United States Patent Application Publication US 2011/0191912 A1 - sequence listing, part 3

SEQ ID NO: 2192 - DNA, 3000 bp, Unknown
  misc_feature (1)..( 3000): cDNA_ID_3066428_gDNA_ID_1620500_Annot_ID_158832 3000 nt of promoter + ATG
tctccaatgccaatacctgtaccaccaccagaaccaattccttcaccaaagccgctgcctccactagagccaattccttctccaaagccgctgcctccactagagccaattccttctccaaagccgttgcctccactagagccaataccttctccaaagccactgcctccactagagccaattccaacgccatagccaacaccagacccaccacttccatagcccctacctacaccataccccataggcttacttgtgtggtcaggatcttcctcttccagttcactcgccatggtctgcattatctgatcaggcttgactttgtgctcaggatgttttgattcaccagacatggactggagtttatggtcaggcttttccttgtgctcaggatgttctcccaacatagactggagtttatggtcaggcttttccttgtgctcaggatgttctcccaacatagactggagtttatggtcaggcttttccttgtgctcaggatgttctcccaacatagactggagtttatggtcaggcttttccttgtgctcaggatgttctaatgcaccggacatggactggagtgtatggccaggcttaaccgtgtgctctggatgttctgatacaccggacatggactggagtgtatggccaggcttgaccgtgtgctcaggttggacctcatgatctggctgtagcataaccatcccaggcatcatttcatggttcagatctagctttcttggctccatcatagggaggtccttaagaatcctgagtgcaaaagtagagctgaagaagcatagtaagaagataaacccaaagcataagccttggtgtccctgagccattatttctatgtaataagttgatcctgctgtacattcctgataaaatgatccctcatgcttttataggaaggaagacttttacttaatagaaaacacatcccctaaacgcaagacgccttgctgaaaatacgcattaaaaatcgaattcacaaacatagcatgacaggcataagaaataactttttttgcgataacacaaatcgtatgttcagcaacttcaactctccaagtttcgaaaccttattacgattatttgcaaaaaagaaactacatcaacaccatcttggcagaagaagtcattataacaaaaacaaacaccaaaaaaaaaaactcaactgagagtattcaactgagcactacttggtagatattagacattatcaccatcaccttgtgattcagcagctctcaaactctcagccatagcacgagccctgttctgagtttgtctctctacagcaaccatgtataaacctaaacaattatgggttaaagaaagtgtcccatacaaacaaaaagctcatgaatttgagtaacaaaaaccatagtctctaagatgaaaatgtgggaaagatggatcaatcataccaatagcacttccgatagcacaaccccatagaatcctcattgaccacttatcgttgataatccctctcgatcccattttttttctctgcaataactctttcaaagctagctttttatccactaaaacgcaaaatttatgattccaaaacagcaaatcaaactcaatcctgaaaaaactctgctaattatcggagatttaagagataaaccttattcttattcttttgataaaccttattctacaagaggaaagaagaaataagaggagaaacaaaattcgtagcgttaattagggaactgtggatgaatgagcataaggaatgtgagctaaccagaattagtcggtgaccggaagagtgagaatcgagaaaatgacgatgagaggaagaagaagaagaaggaacgagtacgggaataaaagaacggactaatttgtaattttaaaacaatgagtgctattttggtaatacataacttataaagggttcataacaataaatgaaacacttttttttctttcccgacatgtattttttgttgattaatacaaaattatcaataacattcgcacatgttatgtggatatctaatttatttttgtaacatccgataaaaaaatgttaaatttattttgcaatttggctcttcgattttcaaatttggtttttttataaataacaagaatttgtcactgtcttccctataaaatttggaggaagcaaaggcgcttgcttttcgcagcaaagcctatagaaactttacttccttctcctctcgtctcatgcaccgaatgtatttccctgcttaaccaattctctactttgtcctcttcttctccgtttcgattttacaagattcgatcttttgcaatcgaaatacctaatattccgattctcgattccggcgtcttttgcttcgggcttttttggtaagtgtactcttacactatctccgtctctactcttttgcgtcttgcattgctgattgttggaaatggatttctttgtggtgtaatgcggtttccaaacgagttcgagttggctcttttagaaagattctttcttctttagtctgattctcaaggtttcacattcttcgttttgataatgcgtttccctaattgcgttgtgattatcgataccgagtaaaaaggtgttcttggacttttcactttgccattgatttgcttcacttgtattactttagaactctcagaaacgatcattgattggcttgtgtagagataattgagcagttccatttatctacttagatcggagatataatgcctgccaggtgtttgttatatgcaattttgggtagagcattgaaattttgaccgagagtagtatcatgattacaagccatgttctgctttagtttcgtagtcagtgatggttattaggaagatgattgaaactagctttttttgcagcttcaaatgcataacattttggttgtaatgtagggaacattttaatcattcagcattctacattttgcatagctactgttgttaaccaagccatttgttttgcactgtgaattagtgggaggaatg

SEQ ID NO: 2193 - DNA, 851 bp, Unknown
  misc_feature (1)..( 851): cDNA_ID_2151809_gDNA_ID_1620501_Annot_ID_158883 3000 nt of promoter + ATG
gatctaactaacagaacaacacatgccaatcaaattactaaaccatgagcttcataaacccacacataaagttacagcaatcgattgattgatcaagtaaccactaagagccctatcaataaatccaggagatacaaactacatggccaaaatgggaatgagtaaactgcgatggagttacctgtaacgcaaaaatgccttctttctcaacagttttaacctgagagacgatattatcatcaacccaaagaatagaaatcggaatcctctttccccatttgtcccagagcgcagtcatcccacacttaaccgcgatgatcccagtcctcttggatctactagacatctcaccttgtttcgcctcaatgattcgggtctgagccccgataatatcagatccaccaccgtccatcaacccagtatcggagctgaatcgtcggatgagaaagaagctactacaatgaggaagagattcagaggatgaaggagttatagaccgtattgatagaaactgattgattcgagaaaggaggcctctcggtacggccgccatgatttcgaatcgaagcgaccttcaatggctaaagtctaaacgaagaaggagagagatgcagaaaccagaactctcaaggcttttgcgtagggttttagatgggcgacaaaatgataaccaaagcctctatctcagaaagagagtctcaatattatttatttccctctttttataatatgtggacgataataaaaacaaaatcctacgtggcttatccattgcgacatataaaacaaaaacaaaacggtacatgaaaattttgcctcaattttcaaaatcaatctcaaattctcaaatg

SEQ ID NO: 2194 - DNA, 3000 bp, Unknown
  misc_feature (1)..( 3000): cDNA_ID_2151897_gDNA_ID_1620501_Annot_ID_158903 3000 nt of promoter + ATG
tggtggaacatccaggaatcacactaactgtttacaaatttgtagctgcgagaggaacattgaagagattcgagaagagtgaacacgacgaaaaggagaaaaaagagaaagagactgacgaagagtttgtgagggagttgatgaatgatccaagaggaaatgagtcattggcttacgaggaaagagtcgttgagagcaaagacgatatcatcgcgacacttaaatcgatgagtaaatgcaatctcttcgtcgttggaagaaatgcagctgttgcatcgttggttaagagtacagactgtccagagttaggaccagttggacgcttgttgtcgtcatcagagttttccaccaccgcgtcggtgctcgtcgttcagggatatgatccagcagcagatacacgaccgctcgttgaggaagatgcagagtacgatcagtcttccagagatatttcagacttaactgcctgaacggattttattataaaaacaaaatttctctgtttttttttttgtctcatgaaatattttgatattctttttggttgggacttggagtgtctccattgttctttttctattttccttaaattgatggttgacattagatttgtgggcatgaaaatcgacctgtaatttcttaatattttgccttgaatgatcaaaggaataatatttttaagatccaacatttctagtcatcaccatggaatgtatccttgcccatgatggtgtcacctacatacctttttagggtgtaatgtgttcattgttattcagaaaaaatgtaacaaacggaaaaatgtctaatcttaaattacctcctgaagagatatgaatgcaaaaagggaccacaaccgccaatgacaccgacaagagtcaaaagagacgtcactaataaataaactaacacattttcgaacaagaatccataacgttaacattcactcactgtctatcacacacacacatgctgtgtacttcattattactctctctcacgctctctcttctcttctcttctcttctttaaaaatctcacaccaacttcattgacaaagagaagaaaacaactctcaaaaacaaaaacatgagctacactttctttctccttttgctctctcttgtccactccactttctcttcattagctcctacggatcgagccgcgctccaatccatcagagactctttaaccgacatgcccggttcagccttcttctcctcttgggacttcacagttcctgacccttgttcctccttctctggccttacctgctcttctcgcggccgtgtcaccggcttaactcttggccctaatctctcaggctctctctccccttccatctccattctaacccacttaacccaactcattctctaccccggttcagtcaccggtcctctccctcctcggttcgattccctccctctccttcgagtcatttccttaacaagaaaccgtttaaccggtcctatacccgtatctttctcatctctctcaaatctccacactcttgaccttagctataaccaactctctggctctctccctccttttctcaccactcttcctcgactcaaagtccttgttttagcctcaaaccatttctccaacaaccttaagcctgtctctagcccattgttccatttagacctaaagatgaaccaaatctccggccaactcccacccgctttcccgactactctccggtacttatctctatccggaaactcaatgcagggcacaatcaatgccatggagccattaacagagctaatatacatcgatctaagcatgaaccaatttaccggcgcaatccctagctcactctttagtcccacaatctcaacaatgttcctacaacgaaacaacttcacatccattgccacctcaaacgccacgtcattgttacctgagggctccattgttgatctgagccataactcaatctccggagagctaactcccgcgcttgtcggagcagaggctttgttcttgaacaacaaccgtctcactggagacattccagaggaatacgtcaagagcttaatcaacggtacaacaaaacagctcttcttgcaacataactacttcacgagattcccttggaactctggtctccaactaccagactctgtttcgctctgtttgtcatataactgtatggagacagatccagtcgttggtttgtccacgtgtccgatcgaagttgcacctctgctctcaagacctgcttcacaatgttcaagattctataatcacagctccactggttaaagatcagtttttctttgttatttttctcaaagaaatttgcaaaaaatgacaaagtttttcataagcgttatcgacaaaacaaaagtatgacattttaagaaattgaaccgttatgtctcctagtgttttcttaaaaaaatcaaaagttcataaaaaagatctgtaaaactgtggtcctcacgtgtaaatgagattgtagtgtttatggaatatataatttatagattggtccttttctctatttttcttcattgacatatatgccattttgatatgaaagaaataaacaacacaccattggttttctatatctcttctccttatcttcaaattgtcattatcttttaataaaaaaaggtacaaacttttattcagtttgtggtctggagagcactcaaaatactgtttacataaaatgattgaagataattagatccaagcatgatggatatggatatgagttaatggtgttgattaagaacttataaagtctaatggtgttgatttagtaaaacattaaatgccagataattagctgttaacagacataccgacaaagaattttaagtaataaagttagcataaagctatctgatttgtcagaatgtaaaaacgagtccaagttgactccttcgagctttgattctcgttccaataatacttcctccaccatctctcctcctctcgttagatctaagaaacagagaaaacaagagagataga

SEQ ID NO: 2195 - DNA, 3000 bp, Unknown
  misc_feature (1)..( 3000): cDNA_ID_3066448_gDNA_ID_1620501_Annot_ID_158907 3000 nt of promoter + ATG
tccacaatctgtgtatgctgtagagttaacttgcataacattatgctggtcacttttgtagttgaatactgttgaagaagagagacagacttagcaaggtaaatgctgttatgctggaaataacttatcatgttttcttactattgatatggaacagaagactgctgaagaacagaggcagaattgacataaatcatcgtcttttttggtgagatagtatgtatgggattgcaacattggttctgctgtatttaggcatcgtagtacaggagttagaaaaattacctaagacatcgccgacatgaaactctcttccctgtgtccagttggtatagtttgtaaagagttcccagccattgctgtcaccaactatatgctctgttccttcagattttagcatgagagaagataaagagaaaatggcatagagtataatcaagctagagaatcggcttccctgatgaagcattgctatctcttaacttcttgttttctcaatttcttttcagaaatacagtatatttataaagcagtaagcatttgtgggtaggaaggtcatgacattgttgtgttaaccagataagtgagtcatgaaaaccatacatatgtggatcaaggagccacagattgtatgcggggtacaacaaactgtgcatcagggcgatgcactgaaaagcattaaacctaataaggcgatagaacatacacagttatgtatgcattgttcatagtttactaatacagcaaaggattaagctaataaggcaagtcgaaagtgcagcatgatggagcagcagccgatgggttaaggctgcactttgtaaacaggttaatggtgttcagtttcttcaaccacttgaatccaggcttcttctcttcggttttgttctccttcttctttttggtcttatgcttatccaggccaaagcatccgtatgagaccttatcagagacgggctctgagttcctagatgcctgaagcgagtagatgcggttctggagaatgcagaccttgtgaaagtggtcatctctcatcttaagcacacacctagcaagcccaacagcttcgttcttcatgaacaatgcctcagtggctagctctctgttctcctccaagagagaagtgagtttgtagccaagattagcgttttcctccacagccacttctttctccatctccagcaacatgacaaacttcttcaacagctctatagtcttggaggcttcatgaaactgttggtccttgtgaagtaactcgtgtttcagaatctctttgtccaagcttgctgtcacaagttgggatacaagctcatcgactttctcagaaaccgcagtaggatctttcatctgttgaaaggataaggtgctctcaacttcagaactgacctcactaacggaatcaatgtccgaaatgcagtcatcatcatcttggagaagctggttcggaagagaagtagtgggtttaagtctggtctgatgagaagaacgacccaagagagtgacgtagccgttgtacaggtccagacaaagtgagagaagcaaaggtcgtccctggtaaaaccattcagctcgttgagcaaaggtatcatcatctccttggctttcttgaaaaccagactcacgcaggatttgcatccgagcttcaaggtctgtttccaacattttttcagacaagaagtgatgagagagaaagacaaacagagcaagagagagagagaaaaagggggtccactgtttctgtagcatgctttgtgatttgaaaatttgaaaatgtgaaaaagctccaaaaagagagagagagagtgagaagaaatttgaaaatggaaaatgaaagtaccagagagagatggcaactgtggagcttccatggatgctttgttcttcatcttcttcaacctgaaagatatacttgttttagttagtgattcgtatataaaattataaagggaaaatgggaataatggcatagatgatgaagacattgatggcttttccaagaagataataaatgttaagaaagggatattttagatcatcgagattaatgaaggatcggagtggggagaagaaagatacaaacccagaaatagtgagagagagaagatagctgacacgtttgttcagttgtatcagtgcagagcatataacaggcaaaatccgccaaagttacaagcatttgattttgttccactcatattttaacacgtggctttagtacttgggtttggtagttgcggcccattgtttgttgggcttaataactcaaagcctttaggtttttgagattctgacatcaaatttagaaagcaaaaagagggagagagcatattggttggtggtaaatgacaattttatatatccagaagagttcataaagttatgtcatcgaataatgttttcataaataaataaaaatgtgcgttttagaaaataatatttatttcatcgtctttttccataaacgcggatctctttattcacactcttaattattttatcatatgagacaattgcatataaaaaaaaaaaacctgaactgtgtgtttggtgagaattccagtttattctttttcactaatgctcagaaatcatcattcttatttggaaatatgcactaaataaaatacacaatggacaaagctcttggataaagttttcaaagtaacacaagaggcagcttcttgaggttttctctcttccaacttttttgctttacttactactgaggttttctattcctttggaagcttcgttgatgggttcaacacaagatctaaaatgtaacatttcttttcttaaatttcctgcaaagttcgatgtagttcatgtttttttttttccattcttttccttataaagtgtcgtccacatttgcttgacgggatacaaaacgaaacccaagtctctgtcttcgtctccttctttcttcttctctctgtcatcattttgcttttttttcttctcctacatgccctagattttgggtttctgaaataaaaa

SEQ ID NO: 2196 - DNA, 3000 bp, Unknown
  misc_feature (1)..( 3000): cDNA_ID_3066444_gDNA_ID_1620501_Annot_ID_158908 3000 nt of promoter + ATG
gctctatcaatctccttcttgactgtatacgttttcatgagtttgatactgcaggacaacaaatgcatagcgattgattggcgtgcgactaaagtattggtgtctcttagaagtataacggatcttatattcttcattaacattctgcttcaggtgtgtctccattgctcctatctcatatctaaggaaattcattggctttaacgcttctttggtcttatgtgttgcagtttaggttggcctatgtagctcctgagtctagaatagttggtgccggccagttagttgatcatccaagaaaaattgctcgccattacttccgaggaaagtttctccttgacatgttcatagtctttcccattccacagataatgatattaaggataataccattacacttaggcacacgcagggaagaatctgagaaacagattttacgcgctacggttctttttcaatacattccaaagttatatagactcttacctcttcttgctggacaaacatctactggcttcatatttgagtcagcttgggctaattttgttattaatcttctcaccttcatgcttgctggtcacgctgttggctcttgctggtatctctctgctctgcaggtatatagtagaagatcagtgtctttaaagattctcttcatatctatcaagtgatttaaagattgtttttgttgtattgcttttttcagagagttaagaaatgcatgctgaatgcttggaatatttctgcggatgaacgtagaaatcttatcgattgtgctcgtggaagttatgcatcgaagtcacaacgagatctgtggagagataatgctagtgtcaatgcttgttttcaagaaaatggttatacctatgggatctatttgaaggcagtgaatcttaccaatgaatctagtttcttcacaagattcagttattctctgtattggggattccaagtaagttcatttcaggtttggttgatgttgcagctattagtctttgaatcactctttaactaatgttgaaatgttttcaactctgaaagcaaataagcacacttgctggaaacttatccccaagttactcagtgggtgaggttttctttacaatgggtatcattggactagggcttttgctttttgcgcggcttatcggtaacatgcacaacttccttcaatcacttgatcgaaggtaaatcacatttcatcaacaatgttctgaaaagggatggtgaatttcttggctaatgcatgttctgttttaggaggatggaaatgatgctgagaaagcgtgatgtggagcagtggatgagccatagacgtttgccagaagatataagaaagtctgtgcactgtggcatttgattttctcaggctgtgtaatgtgatattcataactaatcaactgttcaactttttcaggagggtgagagaggttgagcggtacacttgggctgcgacaagaggagttaacgaagaattgctatttgagaacatgcctgatgaccttcaaagagatataagaagacacctcttcaaatttctcaagaaggtaataagcaacagcctcatgacagcattagtcagtattcattttgtgtactcagactccacagtgttgcaaaaagctagttctgaatccaagtgttaatgagtttgcaggtgagaatattttcgttgatggatgaatcagttttagattcaatcagagagaggctgaaacagaggacttacataaggagtagcacggtgttgcatcacagaggtctagtagagaaaatggtattcatagtgagaggtgagatggagagcattggagaagacggttctgttcttcctttatcagaaggagacgtttgtggtgaagaacttctcacttggtgcctctcttctataaaccccggtactaataacatttgagtgttcataactcttaatgttttttggttagaaacttggaactttggagctgaatacgttttgaaacttgcagatgggacgaggataaagatgccaccaaagggattggttagcaacagaaatgttaggtgtgtgacaaacgtggaggcgttttcgctgagtgtagcagatcttgaagatgtaacaagcttgttttcaagattcttaagaagccatcgagtgcaaggagctataaggtacgagtctccttattggaggttacgagcagctatgcagatccaagtggcttggagataccgaaagagacaactccagagattaaacactgctcactccaattccaaccgttaaatttgatgatgatgtttggtttggtagattagtaattttattttgaagtataaagcttagtgattcactataaaagatgaatcgatgattcattcgttgtaatcaattcactcattagtgtttcttaagtatctttttgctgtttttccaatcatacggtataattttacttcaggtcactcggcttgagtaacttgggctcataatttcggcccattctaattgatcttaaattaataattaatcaagcctggataatgaatgatttttgccttttcggtacttctttactgtaagaagttaattaagacaaagaaacggaaacagccatgtagttaatgacattttgcctccaataattagggccaattaattagttacagttggtaatcaaataaaggaattttcgaattcgtgaatattcaaaaggaaataaatgttaaaaacacagaggagagagaagcctcacggacacgaaataataaacaatgtaataaaagtcagtgtttgacttttccagacatgagttttatttacaataatacacttccttgacctgggctacgaagaagaagacccctgacttggtcatcatctcctttcttatttcttcttcttcttatcaaaattactaaaactctctgcttcaacttccttctccgcctcaaattttccctttatgcctagattctagccttctagggtcttcttgaaaccgtgattttggtcaagaa

SEQ ID NO: 2197 - DNA, 3000 bp, Unknown
  misc_feature (1)..( 3000): cDNA_ID_3066459_gDNA_ID_1620501_Annot_ID_158896 3000 nt of promoter + ATG
taccagttttgtgcttcttgtgggaagaagacgaactcgagttcccattgggtcgttggagagacatcaatatctttttgtcttttgagattttgctaaagacgagaatagagaggtaagaggttgaagagaatatcaaaccaaaggaaattgcatcttttctttcttctttggggccactcaaagtctgcaactcgtttcaaacaaaaaaaaagagaaaagtattggttggcttataaaagaacacgtaggtttatgtaagaccacaaatgcaactgtttcaatccaatggtgtgtatctgtgttttcttttccactatatcccgttgaacttattaattgatttattgttctgttttgcttttaaagtctttgttcatgatttctacggaaaacaacctttagtgagtattcacagagcgtgtgggtttaggacaataattactgtctagaaccatacaaacgtacttgcagacaaagtcagaggcacaactatgtgtgtgtgtatctatttgcatggcgtaataggcatgcataaactcatcatgtggtcatatatctcgttttctattttttggtacacaaataactcttttgtataaagacagctaactaatgttttgaatttttaaatgttatctcttaaaattaaattctaccaattgtaaattcagtcaatcattccgaagcattttttcatgctttgtgattccgccatatattttcccatgttcttttttacgtttttcatcataattttaaagttttacgattttttgttgttatcaatgaaaatggaccaagtaaacttctaccgtaatggttgcatattagatagtggacttatgcgcgcgcgcggaaacaaaacttggccggttgaatcgtcgtctgcctggcatctaacagttttttcgaacattgtcataatcaatatattgagggatgttaatcatgaagtcgtatggaatggacgcgggaaatcactcataaacaatgtgaacattttataaggttataaagaagaacaagtttcatccttcttttgtatatttcgactcatacatatctttctattcaggaataagtataaaacataatataacatgtggcatatcgaccgaccaatacatctttcccaacccatgatcaaccttctgattgtgttttaatttattcgtcatgaaatggatcagaatactcatgatgagtttgtgtatcactcaagggaccccttgtcttaaaatcaactaaaatcatttgatgtaacttttatacgaagtactatccaaataattaattttcataagcagcggacattcattttgtttgtatgactatatgattttattatttgaagctgtatgcaaacgtggagatatgattgcatctttgtctatgcatgaacatgccacgttaatttaggagtacatatcatgatattgatctctcttgctataactttttggcacaatactattgcatgcctctctatattacttcaacaaaacgtttaaatttaccatggttagaacttagaagtaatcgagctgcaaaccatggtgatcatattttttctcgttcgcatgctcggtcttaatatattgagagttatggccaaaatttgaataccattttaagaaacttcagaaaatcaggagtttgattattatctttggttcttacttacttcaacgaaaactaatgacaaaactcttttaagtcgaggtatgcgagtaataactccttggacatatttttttgataaaagtttaattgattatagacttatagtagtcttaattattattataagtataaagaggagtaaacattcatcattagactactagacattataaagttatatatatcgaaattctaacaagaaggatccctagagaccagacatgcatgtccaaagacagatcgtataatagctaataggagtcttatcgatccaacatccaaggtaggctttattacaaagtaactattagagtgcacttcccatgatgattctagaatctaatattattatcaatacagccaatgagcattatgtgatgtaacaatttatgtctactttatattttgaagttatcataaatcaacgaattctattttgattttcaaaaaagagtaaaagatttgggcttctaagagagacaatccacaaagctaaagagacattaacaggaaacgtatagttaaagaaaagaacactgtctgctccacaaaaacaatatacacaaaactcttcaagtctaccttatttttattggttctgcaattttcaatggtctgttacattaatgtgtcataagagacaattgagttttcttatcaacagaagggtctaaaaaattgatcccccaagttcatagtctatagactcagtttttttctttcaaatattgatgtgtaagaaagtgaaagtgatgtgatgctctgtttctgtttacggctagacaataaagccttttttggcccttatctctcctaattaaagaatctgagcagttgagaaattaaaatcaaagccttaacagattaactccaacatcatttagacacactttccttggataccacctttttacggaaacttcgaatcttacatgtaaacaaatctcaaaaccataatttcacatttttactactaactaactccaaagatctaaacccatgaattaagtatctaatcgggtaattattacagtggttttcagaaatcaatgtgtgttcatatttagaaggttgaaagttcatagttaaatgtggggaaccttatgttcctattatttatttatattaaatttcaaagtcgattaaatcaatttttaaattcaaaatctatgcaatagaatcacctactagtccttttttgtttaactagacagagagaaatagaaatagagagagagagacatgaagagcactctcaatagagaagagaaggaagcatgaagctagctctgcagcttcaaggtctcattaatg

SEQ ID NO: 2198 - DNA, 3000 bp, Unknown
  misc_feature (1)..( 3000): cDNA_ID_2151865_gDNA_ID_1620501_Annot_ID_158893 3000 nt of promoter + ATG
gtgatagacacatagatgatgaagataagaccagaatctacattgttggagttgatctttataaagaagtttataaagagaggacaaagggagctcatttcaattggccacttctcatcagttatcttccaagcttggttcatattcaggaaaaatacccaaaagacaaaagaaaaggaaacaagaggaggttagttaaacgaattacttaagctttcttattgttttggtgatgtttctttgagagagtttagtcaataattcaaggggttgtttctatttagttgataaacagagtaactggattaagcttttctcgtccctcttattttgcgtttgaatttggatggttggtttgatgatctttacacaaatatattgttcttcttatagccttatctcttatcagatgattgatttttggagagtatacatcaggtaagcagaacctttaatcaatgcaaccatttaactacaactatacatacaagggaagcaacttcaaatctttttctaaccatcctaacttaaggactgaacatgctttgatatttgcaacgaaatggtgatcagtcatctgagaaaaactcacagtataaactctaaacctaaacctactgcaatattggataatgatcgaaccattgtggtagtgagagtaacaagggtttctcaaccatttatattcagctactgaaatatctgtcggtaacacaagaccaacgatacattgaagactaatgctactatatcaaatggaaaatagaggtgatgctttattacattgcgtttcttacagtgacctcaacatctaaataaaagcaccattctgtgaaatccaaattacaaacagaaattcttttaagtctccgatggaatacacagtgatttgggaataagtttagacaggacgcttatagagagtgtataacattgcattgaccatatatattagagaaactaaaaatcaatatatgaaccttcataaatcataccctgtttcttaaaatagcattaaaaaaaaaatgaagacagaagcagaaacaactggatcttctttggcactttttgaagtccacttcttgtagcagcaacctcaagttctgtgacacaactctttttcgactctgaagaatccacattggccagtccacctttgttttacttttactcttgtctctcttttcctccgagtaatgcttttactctcgttggctattgactctgaaatagttgtacttgctaaatctccaactaagttacacttgtgatagatccaaacatcaagcgtatgctgcgtatcatcatccacaataaccactccaccctcatcagccaagcccaaaaccaaatcaggcgtcttttgtgagaagtttgaaatctatttcttgtagcaaaaacctcacgtcttgtgactctaactcttccttgactctgaagaatccatagtgaacttccttgagtaatttcagaacattggccaatccaccattgtttttactctcgtctctcttctcctccgtgtaagaatttgactcttctgggccattgactctgaaaaagtggtactcgttaatctctactaggttactcttgtgatgcgtccaaacatcactcgtatcatccacaataaccactccacgctcctcagccaaaaccaaatcaagcgtcttcacgtaaggagactcgtctcttgttatcactctatcaccaaagtagattctcttgggatcaatcagcttcaacaaggattcggcgtatactctagtacccattgtataaacatacattgtgaacaactcgttggcttccttcaaaaactcgtgaacaaaaggccgtagctttgtcaagtaatcgctgtccaacttccacagatcttcccttgtagttgaacacgcttcttcgattagacacttctctgtttcggaaagaagtgaaaccctaatagagtggagaagcgtgtggtccaagtcgagtacaaggtttagcttcttctcgttgagacaatagaattgcgtagtaaagcgcttcgtaaacgctgctgcttcgtggcttagctgcaaaccttgaacgagataatcgaatgctctgccatggcgtttgtttaccgtcgatttacaagcgatgcagactccgtaacgaacataccagtgaccgcagctactacgagatgacgaaagtgacgaagacgattcgttgatcgccggttcgaattccatagaaatgttttcaactgcaaacatgatttctctgattgagataatccttccttcctttgatttgaaaatcacttagcactgatcagattgtttttgagaacagaaaaccacagtaatcgagcaaaacgaaaccctaatttgacaagaaactgacagtagaaaccctaaacgaaaccctaattttaagggtgtttcacattaataagattaaaaaccacaaaaaattgtaaaccgcgtgatccaaataaattaccctttttaaaatcaattaattgtggtttattccgtaactaataaattaagaacaatatttatctaaaattctacacatttgagataaaattattagatttctgatttaccaatctacacaatgatatgtcaccatctgtaagcagattatgacacgttttaacaattttacatgttaatgtaagttataataaactatcaagataatttacttattttagctaggcaaactaaacatcaaataaaaaggaaaatttacaatagtctgaattaacaaaagaagaaaaaaaaagaaagtaaaagacagatatacagtatatgtagaatttcactttctgaaatttaaagcataattatttttttgaacaaaaaagtaataattatttattgctctgtaactttctggtattagtaaaaatcttagttgtcatgttttcaaagatttttatttatgttttacgaatttacctatgaaatcaattaaaaccctaactaagattttcgttaccgtcgctttctcctaagtaag

SEQ ID NO: 2199 - DNA, 3000 bp, Unknown
  misc_feature (1)..( 3000): cDNA_ID_3066493_gDNA_ID_1620502_Annot_ID_158918 3000 nt of promoter + ATG
tgcaagacgagcgggacacgtcgggaatttaaactacccgtcgttctctgtcgtgtttcagcagtatggagagagtaaaatgtcgacacatttcattaggactgtgacaaatgtaggcgattcggattcggtttacgagattaagattaggccgcctagagggactacggtgacggttgagccggagaagctatcgttcagacgggtggggcagaaactgagttttgttgttagggttaagaccacagaggtgaagttgtcaccaggagcgacaaatgtggagactggtcatatagtttggtcagatgggaaacggaatgtgacaagtcccttggtggtcactcttcaacaacctctttgaaggggtttaggatctggtgaccgggaaaattctggtctctgtttgttgtactagtgaaaaagaaagatcataagttgttgttgttgtcgtctatgatctttgttggtgtaatataaatatgtatcttttgttttgttgttaagaaagatagagcgtctaaagaacgtcccatttttgtagaagtagctgaagaatatctttcacttgtgatatgggcttttattgaggcttattaagctttaagctccaagcccacatctatgcacttcaacatatctttttctagatgagttggtaaaagtagaaaaagatatgatgattttaaatttgtttctatttatatgtgttcatcgaaacttcattttttttagttttaatagagagtttatatgacttttaaaaattgatttaaaactgtgtcaaaaattaaaaggacaataaaaaatttgcatacaaccgaaaatacttatatttagacaagaaaaaataatacttgtgatgctgattttattttattatatatcatgaatcatgatcatccaattttccggataagccaaagtcaaaatgatgggttccccctaatcttttatgctgagaaatagatgtatattcttagatagtaatataaaattgggttaaagaatgatgattcgattatagcctcaactagaagatacgtgtagtgcaggtgtgtagttaactggtggtagtggcagacaaccagattaggagttaaataaagcctttagatttgagagattgaaatattcgattggaacctttctagatttttacagccatctaaaattagatgcagatcacctactaccattcaaaaatgaacaaaataatttcatttacattttcctagcataagatataataataaaatagtgctcattttaattactttttctaaatattttcgttattttaaattttgcttgtctatactctacagctcatttaataacggaaacaaaaataattgcagggatacggatgggtagctttcaaaacttacatcatcttctgtttcttgagatcaactatttttggagctttgtctcaatcgtaccaaaggataatggtcctacctccttttgcattcttaactttatcttctctacttatttcttttttgggatttttgggggtattattttatcttttgtagatatacacattgatttactacaaacgtatactactatccatcttcaactcttcggaatatgatttcgaaaaaactatgaagattaacgggtatcttaaacatgttaagatacaccggacaattttcatttagaagaattgatatgcaattaacaataaatagttgatgatcttttagttttgaagatgtgcgttaagacttaagcgtgtggtaacaaggtgggactcgggcaacgcaaagccttgtagagtccacttgctcaacttgtctttcttttatctcttttccaagtctcaagattcaatgaactccgtgtaacacaaacacgcccatagatgagctcatttttggtatttccaatattgccactccatgataatatcatctagggatggggttcatttattttgaaatctcaacaaatctcgtcgattctaacacacatgattgatttgtttacttacttgaaagttggcaactatctgggattaaaatttatctttttctactgctagctagaagcatctatatatgttagcctaatacgtggaagatgtcattgctaataatggctaaagatgtgtattaatttttcttcttttttccttgaatttttgttctttgacataaactatgctgtcaaaatgtgtagaatctttttacataaatcattccctgttacacactaaaaggttcacaacggacgattgtattggacttccagatcataaaccatgcaaaactgaaaaccacaagaataattagttctaactttagaacgttcgtacgtgtttcatgttcaaaaagcgtcaattataaaagttgggaaattacttttgagttttgacatttctaaggacagtcaaatatgacaacattgggatgcaacttaccttgtattaacttattttgttataaaaccatatattacatattttaaagggttgataaataatcaaatataccaaaacatagcttttcaatatatttgtaaaacacgtttggtctactagctaattatgagaacatttgttcaatgcatgattatctagtatctactagtggattatgaaaattagatattttcattgcatgattatcttccatatatagtgataacatcaaaagaatctacaccaattattgcattttttcattatataataagcactaaactgtaaaattatattcagccacccaaaccatgacaaatcaccttaaaggcttaaacacataacagccattacgagtcacaggtaagggtataatagtaaagaatcaatctatataatatacgacccaccctttctcattctttctggagagtaacatcgagacaaagaagaaaaactaaaaaagagaaccccaaagaatcgaatatttattatttcgccccgaagattctatttctgatcatttacacccctaaaaagagtagagctttcgtgaagccaccatg

SEQ ID NO: 2200 - DNA, 3000 bp, Unknown
  misc_feature (1)..( 3000): cDNA_ID_2047653_gDNA_ID_1620502_Annot_ID_158935 3000 nt of promoter + ATG
tcctacaattcgttttatcatattaatggtgtatttggatccctggtattattaaatttagaaaatactagtttttaattatataggtaaatgaaataatttgaaattttgtttaaactgaattatgttagaatttaggtagatgaatagatcaatcgaggcttgaagccaagcgtgtgccagcaagaaggggtgacactgatagtataaatatataaaacgaaagatatgatgtatctctccggcatatataattgttttcagagatttattaattaaaattgacaactaaatttgtttataacagatattaagaacaaagtagaaaagaaaaaaaaaacgaaatacaaacaagttagcttagcttcaatgaaggacgtgtttctacaactattagtctgatgacaaaaataatctcgtcagcctaatttttgttatattttttcttttttgttttgtgtcattgttagtcattttgagttcatgtataagctttaagatgtatagggttatcatggagtaggtattaggtacattctaatgacaatagccaaagaatattgatcagttttaaaaatgaagaattcttagaagagaaagaaatagagagagtatcgaattaacacacaaatatttattcgagaaaaaaaaaggctatgaagctctcgacgacgtcgttgaatccctgaatagactacgcctaacgtgatgccgtttattttgttgccgacaaacgacgcgtcgtttgatttcaattgcctacaaaagctaggcgacctaattacgttatttggtagggccagatgaagaactatattgctcgcataataaaatgggcggtgtgtgttagtgacttagtgtgtttttgtgatgctttttttaatttcttttgtccaatattttttataatcgatggtgtatcaattgtctacccacgaaatttaaagtaacatgtcgattaatatatcgatcagcccactacaaacccttttaaatagactctgaatcctatcaattctttgtaagttagtaacgttcacagacttggtcatttgtacttgatcatacgtatttttaagccttttaagcgttttattccttcggagtcttggactctggattgtatatatttatcttatgatttagataaataaaaatactgaaagttattccagtactagtttctaggaatatcaaataacccacttgttaacattagtccaccgaaaattctcgtagaaaaacaaacagaggaaaatagtacatattttatttaaaatacagcatttgctttgctaaccttataataaatacatatatcctatttgtcttttgtcaaaacgagttctttatatactttacaaattcaaagtaccatacgatattgaactaaagatatcacaacaaatattctttgttacaattacaccattttaatactaaaaatcacaaacaaaatcaaatggtacctaatattttatttgtttgtactcatcatgaaaaagagaaacacacaagaaaaaatgctttgcttgttgaagagttattgctttcttttcggaaggcttaggagtgacgagtaagaactgagatgagacagaactgacgtacgtggatatcaagaccacaaatttgtatatttgttccaaaaaagttacaagcattgcatatttgcattgaaatgatagaactgtggcttcttcttaatctatctacaacgagagggtcgcttttaaccgaccggtcattagtagtccttatacattctagtcaaatatggttattgaaagccgtacgatgatattgtatgtaatcttatcttagaaataatgtaggtgaggcgtgagaaagcaatgaaacatttgtcgaaaatatgaataagacgaagcgcgaaagaaacgacacgtgaactccgtcacatgtgatagatatattgggccgttggggacaaatgctcactttcagaacacctacacgttatacacgtaggcatgcgaacttgttgggccattgtaacgaaggcccactttctgaacacctactacacgtgcctacgtttatctgatttttcattttgtcgtttttatttccttgcattagttctcacttctcaatgcaaaacatatcgattaatactatgttcaaaaaataaaataaaaacatatcgattaatatttaatagtgtgggaaaatatatcctcgaataaaccaaaagaaaaaaagatagattaacaaaaagttatcagtttctttttccgatattgtttggaaaaaaacaaactgattaattatctaataagtattctttataccaaacgtgaagaaagaaacttgtgtgttttgattaatgacgagattttctatagtttgttgaaaggaatccaacgttagcaaattgaatagcaaaaatacaaaatatataacatttttcaaacttctaaacgtatatggattcagttaatcttcttgaataaatgttatatacagtatacgtaaagtttaaaagtattataaaaacggaatacagtaacacctgagatttcattacgggtagaaatcaaagacaatgttccttaaaacagactcaattgaaagtaaaacggtaggtgagtaggtttaatttctgatttttgtttcttttcgaccaaatgactactgcaactttcttaaactgagttttttagatctccatataagttacaatacatattgagtattgacaaaaattattttggtttttctcagtaacaacaaataatttcaaagtaaaagcgtaagaaaaattacaagttacaaagctaaataaaaatcagaatctgcagtcgcctaataaaaaatgaaaaatgaccaaagtttctctgcaaaacaaaaactttaatctagagaagcaacttccctcctctctgcaacaaattaaattctaaaaaaaaaacagagcaatatatatgcatgcatatctatagtataagctagtctccattgaatacaaaacccagagac

SEQ ID NO: 2201 - DNA, 3000 bp, Unknown
  misc_feature (1)..( 3000): cDNA_ID_3066474_gDNA_ID_1620502_Annot_ID_158939 3000 nt of promoter + ATG
tcaatggcggtttgatcagtcttgtccatcttttttttttggtgtttaaggatagagagatctttgtctttgtcttttataatgttaagtgtttaaagtcataaacgacaaaacagtcgctcaagcattcaatataatcatgtgattatatgacgtcaccagtctcaattttaggtgactctttttctctattttaatcatttttttttccaaatttggtattacgtaccagaagtaaagagatgtgattaggccttcgtaattaatgatataggttgtctgtttattcatttatgattttcgggtatggactattttctctcaatccttgttaagaaaattcattcacatgaatggtctaatactttttgcacatgttaggaaggaccgtctgcacaagcagagactcccatccatgttgacatctttacctaagttatttcaagaacattatgtacgcttaagtctactttataatagtaaatgacataggataggacgaccatataaatatttattttttgtttttttgacaaccgtcaagacagaacgaatagaatctgaatagttgaaatgtgaatagtattgaattcgtaacactagttatcgcatcaaaatgagatttttagtatcgacctttgcatattccacgcgtcacctctccaagcagcatacgagtatcaaactatagctacctcgtgactaaaatttatgggtattgagaaaataaaacaaagtaatactgttagatatatctcaactacttttgttagcagtacaccgtatatatacatgtttttgctaaagaataacaattgacgtactaattttacctcattaatatatatggtgaaataggtgattagtatatttacctaattcaccatatatgaatatggtggcaaactgagatataagagggaaggtgattttcatgcaaattttttttttatttttttttgaatgaatgcaaaatttattcaaaaaaaaaaaacctgggctacatcaagtacttcatttctgagtttttgaaaaatctaaagacaacaaaagactttacaatttaataaaaaaataataaaaatactttatcactctcaacgaaattgttgatttaataacgtatctcttggtaaaacagcgttttatttgacgaaattgttataaatgaataaaatgataatagaaactagtgtggtacgtaaaatacctctcatttggcaaaataacggttatgtatcatgagtattgcatacgacagcgtgcttaaatagtgtgctttcaggagaaaatatataccaagttatttgctgaaattaccacgcaaatctgaggttcgaatggcaaaataaaaaaccaatgtcatttccttaatgtattaaggtcatttaaataaaattgtacacttttttcacctgtaagcgttccaaagtgtagaatggataactagaagggtcaaaggtataatattaataagcgaactcactttttgcccaagtgatttcacttcttacatttgcttgatatagttacccaaaagtgtatatatattcccttatacaattgttctattttctggattataaggggaataagaaaaaagaaaagagagagtatataataatacttttataaagtgatgttagattctaatttgtaacgaaaagttcaaagtgaaagaaaaaacgaaaaagtttttctgttttgttttatatctatagccaagaaagtttctcagatttacaagaagttaactgagaaaaacaaaaaaaaaacttatgaagcatgaaagactaattaacgaggtgattaattttgagacaaattaaacatcgaattaaaagtaacatttggagggtttatatgttatatatgtgacatgataagtccgattcatgactaatgtatatctggaatctaacatggaagaatagagaacgaagcagagccaaggtcaacttgccagacacgaatcaacagattgtgaatgagaccaaatcaatggtcataaaccggttgggtttaaaccggcaagtcatccttggctcaattccattcgttattccttcatgcaagaccctctgatacaaccaaagactcccattacaatattctttcgatcacgagctacttattttcaaatgtgttacctctttcgtgactcttgtgttgtgtggtaaagcctagtcgagatgtgtcggtatatataggcatacatatacaaatgcgacaaaataagtatattatattgtttaatttctatattccatttctatatgcatggctgggatttttgaccaaaaccctaattcaagaatagaatccaaaagatgggatcaaagaatataatctaatgggctgaccacattttccgatttaattcgcatagttaatattctttccactactttatgccgcagaaatttgtaattaagtaagacaaagaaatacagatataagatggtcgtagaaaccagtagaggaatttcatttttcgtggataagtggaatattaataagagaatggtctttactctttacagtgggaaatgggaatagtagcccattataatttcatcagattctatatatgcatgtttgtataagctaaaataaatacgtttaagcattcttcaaaaaaatttacaagttctagagactctcttaacgtcggcaatttatattctactttacatgacactttcaggaaaagaaaactatactcactagcagatcattaaattttctttttctttttttgaatgaaccttagttgtggtttttatttttgttagctagaaacttcagtgttttttttccgccaatggtagtgctttgatgatggtccggcccaattcatagaaggccttgaaaatgggccagaccaattcagagacccaacaagctcgactgtatacacaaaattcacaaaaacagcttttgagaagttttcttcttcttcaccttattttcgggtatcaaagccacaaaaccctgaga

SEQ ID NO: 2202 - DNA, 3000 bp, Unknown
  misc_feature (1)..( 3000): cDNA_ID_2047725_gDNA_ID_1620502_Annot_ID_158938 3000 nt of promoter + ATG
gagagaaattgagtagctgccgccattctcagggttttgtggctttgatacccgaaaataaggtgaagaagaagaaaacttctcaaaagctgtttttgtgaattttgtgtatacagtcgagcttgttgggtctctgaattggtctggcccattttcaaggccttctatgaattgggccggaccatcatcaaagcactaccattggcggaaaaaaaacactgaagtttctagctaacaaaaataaaaaccacaactaaggttcattcaaaaaaagaaaaagaaaatttaatgatctgctagtgagtatagttttcttttcctgaaagtgtcatgtaaagtagaatataaattgccgacgttaagagagtctctagaacttgtaaatttttttgaagaatgcttaaacgtatttattttagcttatacaaacatgcatatatagaatctgatgaaattataatgggctactattcccatttcccactgtaaagagtaaagaccattctcttattaatattccacttatccacgaaaaatgaaattcctctactggtttctacgaccatcttatatctgtatttctttgtcttacttaattacaaatttctgcggcataaagtagtggaaagaatattaactatgcgaattaaatcggaaaatgtggtcagcccattagattatattctttgatcccatcttttggattctattcttgaattagggttttggtcaaaaatcccagccatgcatatagaaatggaatatagaaattaaacaatataatatacttattttgtcgcatttgtatatgtatgcctatatataccgacacatctcgactaggctttaccacacaacacaagagtcacgaaagaggtaacacatttgaaaataagtagctcgtgatcgaaagaatattgtaatgggagtctttggttgtatcagagggtcttgcatgaaggaataacgaatggaattgagccaaggatgacttgccggtttaaacccaaccggtttatgaccattgatttggtctcattcacaatctgttgattcgtgtctggcaagttgaccttggctctgcttcgttctctattcttccatgttagattccagatatacattagtcatgaatcggacttatcatgtcacatatataacatataaaccctccaaatgttacttttaattcgatgtttaatttgtctcaaaattaatcacctcgttaattagtctttcatgcttcataagttttttttttgtttttctcagttaacttcttgtaaatctgagaaactttcttggctatagatataaaacaaaacagaaaaactttttcgttttttctttcactttgaacttttcgttacaaattagaatctaacatcactttataaaagtattattatatactctctcttttcttttttcttattccccttataatccagaaaatagaacaattgtataagggaatatatatacacttttgggtaactatatcaagcaaatgtaagaagtgaaatcacttgggcaaaaagtgagttcgcttattaatattatacctttgacccttctagttatccattctacactttggaacgcttacaggtgaaaaaagtgtacaattttatttaaatgaccttaatacattaaggaaatgacattggttttttattttgccattcgaacctcagatttgcgtggtaatttcagcaaataacttggtatatattttctcctgaaagcacactatttaagcacgctgtcgtatgcaatactcatgatacataaccgttattttgccaaatgagaggtattttacgtaccacactagtttctattatcattttattcatttataacaatttcgtcaaataaaacgctgttttaccaagagatacgttattaaatcaacaatttcgttgagagtgataaagtatttttattatttttttattaaattgtaaagtcttttgttgtctttagatttttcaaaaactcagaaatgaagtacttgatgtagcccaggttttttttttttgaataaattttgcattcattcaaaaaaaaataaaaaaaaaatttgcatgaaaatcaccttccctcttatatctcagtttgccaccatattcatatatggtgaattaggtaaatatactaatcacctatttcaccatatatattaatgaggtaaaattagtacgtcaattgttattctttagcaaaaacatgtatatatacggtgtactgctaacaaaagtagttgagatatatctaacagtattactttgttttattttctcaatacccataaattttagtcacgaggtagctatagtttgatactcgtatgctgcttggagaggtgacgcgtggaatatgcaaaggtcgatactaaaaatctcattttgatgcgataactagtgttacgaattcaatactattcacatttcaactattcagattctattcgttctgtcttgacggttgtcaaaaaaacaaaaaataaatatttatatggtcgtcctatcctatgtcatttactattataaagtagacttaagcgtacataatgttcttgaaataacttaggtaaagatgtcaacatggatgggagtctctgcttgtgcagacggtccttcctaacatgtgcaaaaagtattagaccattcatgtgaatgaattttcttaacaaggattgagagaaaatagtccatacccgaaaatcataaatgaataaacagacaacctatatcattaattacgaaggcctaatcacatctctttacttctggtacgtaataccaaatttggaaaaaaaaatgattaaaatagagaaaaagagtcacctaaaattgagactggtgacgtcatataatcacatgattatattgaatgcttgagcgactgttttgtcgtttatgactttaaacacttaacattataaaagacaaagacaaagatctctctatccttaaacaccaaaaaaaaaagatg

SEQ ID NO: 2203 - DNA, 3000 bp, Unknown
  misc_feature (1)..( 3000): cDNA_ID_2047729_gDNA_ID_1620502_Annot_ID_158942 3000 nt of promoter + ATG
tttttttaattattaaatttaagctgatgatattcagaaaatatttacttcttggaaaggacaaaaataaaactaaatttactttttttttttctttctctgccttatgtggatgataaattttcggataataacctacaaaatgtgaataaaatttatgagaattgaacaaattgattcatcttttttttttcctttccctggtacagagtttgttgtataagttatataattcggacggtacaaatgagaaaacaaacaatcaaagattacctcaaagactgatgatgagaaactacattttctcggacatcatcatctctctgtattagtattaccttgtgacaccaacggtattgattcagcatctcctggagtttctgtggtaacaactttggatgcttccttcttcagcttatggttgttataagccgctacaccggcaatagctgtgtgtgaacacagagcacactgtatgagaagcaaatttttttcttgttagccaatttgtatgtgagaagttttgtcttaccgatggcgtaaccgaaaagattgatgattgtgagtttcgtgtcggcaaagagaagagctgacaccaagacaaccacccaatccttgacaacgccagcaactcggatagtgagagcactcgtgtgagaaatcaccaagaaaaccgacaagttgagggcaaatgtacagagggaattaagggtcaacactacaaagtggaagttccatgggccattgccatctatcttcgatttctctagaaagatccacggcacaaacaagcagatagcactgcaaaggaggtacaaaaagataaaagtaacccttaggcttaaataatgagagaaatgagatggcttcctcttcttcgattttacttacctgcatgggctcacgtagtacataagagagattgggtttaacttgatgcccttcctcttgacaagaagttccatgaagattagcctcagggcttctccaacaacaccacccatttggtaaaccactccaatccagttgatgtttaattccccataagaagctactaaaacaccaaaacttatgatagacattatcaaaagcatcctgcagctcatcatttcaagtccagcagctactccaagaataaacacagcaacaggcactgcaagtatggttgaagaatactgtacattgttagtcagatataagaagtaaacataagacttatgaggaaccaagagcatgaacagtttcttacttatagccttcaacatctgcgcaaatgcaactgatatgtagaggtaggcagtgtttcccaaccagagggtcattgcaaacattgcacctattggaataactgacgtaacatatctgagtacataaagtgagttaatactgctacattgataaaattagtaaagatatttatgttatgggtattttcgactactccaaaatcaaattccttacgaagtctctttcttccttacatttctagtgtcattccttcctcgaccttcacaatcttcatggagaaataaatagagaacagagaagggaccaaaagttaggcagtctttacttgtgaacaaaaacagaaagaacattaattgcaagattaccttaagaactttggtaagaagaaagcacaagacagaggaaaagatcatatggagtaaagtcaatccaagaggataagggaaattaatttccttagatgacaaaacccactgcagcagagcaattcaaagacaaaaacgttagtcatgacgaaaagagagaaaccacaatctatgaatcgttacttgctacagattgtaaaacggtgaactctgatgcataagcaataacagagaggtcaaaagcaaacacaacacgatcaaacaaaagcaaacggatgttgaattctacacaaccgagggattctaaaatctgctagtcaacttcctagaaactagcacagtacattgcacataccagctcaattccttacgaaaactagcgatcggtttctacaaatcgaaagagcacaaaacaatacgatgcgagaacatagatccagggaaatatagattgtgagatttaaggtaaaccttattgaagaagatttgaccactagaaagagcgatatagagaagaatgtaagcataggtcacgaattcagctctcataaagcctttgctccgatccgccattgaaaccgattattatgatctcagattacggaataaaagttgtcgcttctggtttttatgtaacacttttccgagtgctttttgtttcttttccaatcgtcttctccttcactgagtatttcactttcccatcttctcaaatttcaacaacagctaaataagagcgacggtgacgactttaagtgggtcccactttttattatcctctctcattttatgggcttttctcacatttaaagcccaaatactgttgggtttataagctattgttatgtttcgtcaagcccatgaatttggttctacctcgcacacttttttttgtttcagtttcatcatccacccttggatatatgtccaatgaaaagaaatgaaaattattaagtattttttctcgagattgtgaacgataatatgaaagaaatgtaaggaacacacaagttgcttgtggattagaccacaacccatctgatatttgtccgcatctccacaaccattcttcacctccaacttctcatccatattataatccaacttgccaataattttttcaactgttacagattactacatcaacgaaatattaaacatttaaccatatataaaagttggagatatatgatataagcttttcttagcagtcccacccttcctctctcgagagagctccattccaatcaaagctgtgtaagattctgtgttctagaccaaacagagacgcgtctgtgttctggagattataaacatatgtctgataatcacaactgataactaactcggggttttttgctcttttgacagaaacacacttcagaag

SEQ ID NO: 2204 - DNA, 1956 bp, Unknown
  misc_feature (1)..( 1956): cDNA_ID_2024817_gDNA_ID_1620502_Annot_ID_158941 3000 nt of promoter + ATG
cattgacactattcagacttaagtaatggatactatctgatcgatgcttgcctcgtccatctttccaaggtcaagaccttcaaagttcttcaatgtcaggtttggaggcaaagtgaatctgtagtagaagaacacacatcgttactctataattgtttagctatatgtttgcatattcgagtctaatcaactcttatcacatttcaattgatgtggctttacctgttcttgatatcagactctctgcgacctagccttggggtgtctacagtgagagcaatggctttgaacccagctttctcggctcttctcacgagctgctcaaccaccttcctgttcttgtatacctactcagaacaatcataacgtgtgaaccatcacgtgtgaccacaggtatatcagaattgttcatcaagcaacttacatagagctggaagaatcggattcctggccctgtggaagcaacttcttcaacacttgaagtagcccatgaagatagtgtctgaaacatcatggaagaaaataactcaaaccagaaacttggttatgcatggattggtggattaagcagctataaacaccaagacggttaaaatcttcttttgaatataataacataccatgatggttccagcagcagacgcagctctagccgtagcatattcccctgcattagtttccattagagtaagcctcagtctttgtctctagtgatactaaaacaagttttaactctctagaaatgactgtttcaggaaaaaagaaaaacgtcttttaccatcagggtgagccatcttttgaaaggcagtaggagcaaccatgatcggcatcgagatcttgaaccccaagacggtagtcgccatatcaattttgttcacatcaatcaaaatccgaggccggaagctgttaaaacatcccaagttatgtacatcaaactcagttctcttgtgaaaaccaataacaaaaagtgtatcttatcttattaagaaaagaaaaactcacaggattcttgcaaaagcgtttctgttctcttgaagagtccattgatcttctgcaccagatgcatagtagtcatataccatcttaggcaacttcgcctttgcgattgcatcatactcggtaacgttagtgatctccatcttctgaagtgtgtttctgtcaaaagagcaaaaaaccccgagttagttatcagttgtgattatcagacatatgtttataatctccagaacacagacgcgtctctgtttggtctagaacacagaatcttacacagctttgattggaatggagctctctcgagagaggaagggtgggactgctaagaaaagcttatatcatatatctccaacttttatatatggttaaatgtttaatatttcgttgatgtagtaatctgtaacagttgaaaaaattattggcaagttggattataatatggatgagaagttggaggtgaagaatggttgtggagatgcggacaaatatcagatgggttgtggtctaatccacaagcaacttgtgtgttccttacatttctttcatattatcgttcacaatctcgagaaaaaatacttaataattttcatttcttttcattggacatatatccaagggtggatgatgaaactgaaacaaaaaaaagtgtgcgaggtagaaccaaattcatgggcttgacgaaacataacaatagcttataaacccaacagtatttgggctttaaatgtgagaaaagcccataaaatgagagaggataataaaaagtgggacccacttaaagtcgtcaccgtcgctcttatttagctgttgttgaaatttgagaagatgggaaagtgaaatactcagtgaaggagaagacgattggaaaagaaacaaaaagcactcggaaaagtgttacataaaaaccagaagcgacaacttttattccgtaatctgagatcataataatcggtttcaatg

SEQ ID NO: 2205 - DNA, 3000 bp, Unknown
  misc_feature (1)..( 3000): cDNA_ID_2047662_gDNA_ID_1620502_Annot_ID_158933 3000 nt of promoter + ATG
tgatatctttagttcaatatcgtatggtactttgaatttgtaaagtatataaagaactcgttttgacaaaagacaaataggatatatgtatttattataaggttagcaaagcaaatgctgtattttaaataaaatatgtactattttcctctgtttgtttttctacgagaattttcggtggactaatgttaacaagtgggttatttgatattcctagaaactagtactggaataactttcagtatttttatttatctaaatcataagataaatatatacaatccagagtccaagactccgaaggaataaaacgcttaaaaggcttaaaaatacgtatgatcaagtacaaatgaccaagtctgtgaacgttactaacttacaaagaattgataggattcagagtctatttaaaagggtttgtagtgggctgatcgatatattaatcgacatgttactttaaatttcgtgggtagacaattgatacaccatcgattataaaaaatattggacaaaagaaattaaaaaaagcatcacaaaaacacactaagtcactaacacacaccgcccattttattatgcgagcaatatagttcttcatctggccctaccaaataacgtaattaggtcgcctagcttttgtaggcaattgaaatcaaacgacgcgtcgtttgtcggcaacaaaataaacggcatcacgttaggcgtagtctattcagggattcaacgacgtcgtcgagagcttcatagcctttttttttctcgaataaatatttgtgtgttaattcgatactctctctatttctttctcttctaagaattcttcatttttaaaactgatcaatattctttggctattgtcattagaatgtacctaatacctactccatgataaccctatacatcttaaagcttatacatgaactcaaaatgactaacaatgacacaaaacaaaaaagaaaaaatataacaaaaattaggctgacgagattatttttgtcatcagactaatagttgtagaaacacgtccttcattgaagctaagctaacttgtttgtatttcgttttttttttcttttctactttgttcttaatatctgttataaacaaatttagttgtcaattttaattaataaatctctgaaaacaattatatatgccggagagatacatcatatctttcgttttatatatttatactatcagtgtcaccccttcttgctggcacacgcttggcttcaagcctcgattgatctattcatctacctaaattctaacataattcagtttaaacaaaatttcaaattatttcatttacctatataattaaaaactagtattttctaaatttaataataccagggatccaaatacaccattaatatgataaaacgaattgtaggaaaatatggatagatcatagatgtgggcaatagtgttattaaatactcatcattcatcaaaacattagttttgtttttttgttaaagaaaaaaattagtttctactattattcttaaatgcaaaataaaaaccccacatcattttattttattttgtctcgtcggtgccttagaaaactaatatccaaacacgtattttttcgcgggtcaaatatcaagaacaagttaattaattaaattgataagaaagcgaacatacacgaagaaattttcaacgaagacattactaaggagatgagaggcaaaccacgtacaatgaccgattaacacgttttaaccaaactaatcgctcacataaaactgggacaatctaaactaaatgattgattatcgatgatgtaactttttgtttgacaataatttggaagttaacgaaatgctgaagattaagatgcatcacttaactaatatcgtaaatattttttcttggtcgttgctaagttatcttttctcatacattacaaactatcaaattacttaaatttatatatccgtccctctctaatagaaattagaaaaggtcatacatatttgctacaagaatctcgtgagtttctttaataaggtttttgttaattaattatcttatatactcataattgcgacattaatgagtgttttactcttatttcacccacatgtctcttctttataagcaaaacaaactacctttttctgcacaaacaaactaacttttaatatagtaaaaaacaatttaacctttttcactctatttccttttttcattccacttagatgtgaagggaaagtaattaattcttcaaagcaatgatggaaagacccaatcctaaaccaatcttcaaagtaatctatactgtatgaaagcttcgtttctgtttttcttactatacaaatgaattaattcagtatatgaatatttcgtacataaaaaggaaattaaaatacagaaaagaaagaagaatatacaaacctttaaaagcgcgtaggccttatgaaaactacagctagttattattaaatttgtatttatttgtattttttgttttcttttaatttgtgggaataagagaaatgcataaaaaccaaaaaaagacaatgcgtcagaccataaccatgatacaccaaccaagattaattgttttatggacaaaattaaaaagaaaaattagcattttaagtgtagcattatgtcattaactaatattaaatggtaattattagtactaattaataaacaaatgtagataaaaaagtatatggaagaaataaataaaataatccaaagcaaagcaaagcaaagcgccgaagcctatttgtatggctcttggattcttacttatagcaaatcgtgcttgccagctttttactcgataaattcgtcttatggctgaaactgtataaaatctagcttatcaaaatttatcctcaaagtttattaaattaataataaaaatctctgaagaaaagtttgggtttttgccatttgggttttcttctgtctcatctggttttcgagagagatagagaaagtgagacaaggttaaggaggaagaagatg

SEQ ID NO: 2206 - DNA, 3000 bp, Unknown
  misc_feature (1)..( 3000): cDNA_ID_3066481_gDNA_ID_1620502_Annot_ID_158926 3000 nt of promoter + ATG
ggtctcttagccggtgtaaaaaatggggagctcaaggtggcaagagcaatgtcttctttgctaaaaccctggacgatcgatttatcatcaagcaagtcaccaagacagagttggaatcattcatcaaatttgcacctgcttactttaaatacttgtctgagtctatcagcacgaaaagcccaacctgcctggcaaaaatcttgggaatctatcaggtacgtaactgctaagatgagagatttcccgttcaggttagattcactcttgataaaaatatgtcttgtgttaataggtcgcaacaaagcaacttaagagcgggaaagaaacaaagatggatgttctgattatggagaatcttctgtttggaagaactgtgaaacggctttatgaccttaaaggatcttcgcgggcgcgctacaatcctgactctagtgggagcaacaaagtcttgttggatcaaaacttgattgaagcaatgccaacttctcccattttcgtcggtaacaaagcaaaacgattgttggaaagagctgtctggaacgatactgcttttcttgcagtgagttttattcttctgcaaaccatttactcttcactactctttgaaaaggtttattagcaataactatatttttcgtgtttgcagttgggtgatgtgatggattattcattgctagtaggcgtggatgaagaaaagaacgagctagttctcgggattatcgacttcttgaggcagtacacatgggacaagcatctagagtcttgggtgaaatttacaggaatcttaggaggaccaaagaatgaagcaccaacagtaatctctccaaagcaatataagagaagattcagaaaagcaatgacaacttacttcctcatggtccctgatcaatggtctccgcctaatgttgttgcaaataactccaagtctgatcaacctgaagaaacctctcaagccggtacacaagcagagtgatacaagaatcattataatgtaagtttattttttggtcttgtatagatttttggcatttgggaacacattattattcgttatttctttctttattggaaggttgggtttctgtcagatatcgattttgtttgcgtcttttagattttgggtcgttaaagtagagacttaggagattgtctgaaaaattcctcagaaagatagagagacatttctcttgtgtatagcttttgctttaatgtgacatgatttatgaaagattcttttgtttatatgttggatcctcgtacccttttttttggtgaaagattgaaatcaaaatctggacgtaagtttcttacaaaagagaaacaagaaagaagcaaatcgctgcttctttcatagccttttttctgtacattcttattcaagaggcctttttgaagagagaaccagattttgatgtttcgatgaagaaaaaagaaaggggatttagaggaagtcaaagctgctccatttgatcatcatgaactcttgttctgaagcaattatcggtctttgaccatccttgtttgaatcgctcagctcctgataacttctttgcagaagatcaagaatctccacctctctgtttttgataccaaatccatttataaaacaaactttgaaacaagatcgatctgattaagaatttaggttaggattaggaatatatcataccttgagtaagaagctaccattggactctgtgtgggacaacgaggaccttcatcgtatccttcacatataacctctccattatcatctgtgtaacagatgatcccttgtatcggatcttcaaaaacctgttccaagaaaaacaatttcaacattcatatttttaccaaatggttgtgtctgaattttcaagaaaattatgatccactctaaggagaaacaaaaagagagagatgatcttacaatgttcttggtggagtatctgatcggctgaggctgtgaaactgtggctttcttgactttaacatgaacttgactctgttgaagcatcaaagtctttgctcttactgtctttggaacaaaacatggtgttttaagaggaagataaagtttagttgaatatgccatagcttttgtgtttctttctttcttcaagaagaaactttgatctcttctttttggacaactcgtttggtttatagttctcagagaagaaaattataaattccgatgattgattgaatctgagtttaattaagatttttttttaagtcaattatatatagacgcaaggtgaagataaaataatagccaataagagtggcaatctcattaacaagtttggttgtctttttcgtggggtttggttagttcttctaatggtttcgtttttcttcttacgtttgatttttgatgaacgtcaatgtgaaatcgttgaatatatctacacatatacatgtgtatgtctagtcaggtgtatttttattacataaatttttataaaactattattgggatttcttactccgttaatgtttaaaaaatattactaagaaaactacttagattctgtaacacttatatttgagaaacaaaatgagttttataacccgattctttgacaaaataatatgagacaaaaacaaataattccccaactgaaatagtttatagacttaagacattttaccttccttctgacctaaaaaggtaaaaaagacatttgaccttccatcgaaacaattaatctgtcattacattaatttcaaaaacttgcgtgctattagttgcacttgcattcaaccaattttttcgttatgttgagataatattaatattagagtaaaagaaaaactaaacatcgagcaaattagttgttacagtgcttatctgccgtccaatgacgaattaactcctacttaattaaaccgtggcacgtgtcgatatatcaagcgtcatgataagcttttaggagcatttttaattgcaaaatgacaataattggtgttatattattgctatgatttagacaagagactaattgtaggctaaac

SEQ ID NO: 2207 - DNA, 3000 bp, Unknown
  misc_feature (1)..( 3000): cDNA_ID_2047682_gDNA_ID_1620502_Annot_ID_158927 3000 nt of promoter + ATG
cgagagattcttagctcgtgacatcactttccaaaacacggcgggtccgtcgaagcaccaagcggtggctctccgtgtgggttctgatttctccgccttctacaattgcgacatgttagcttatcaagacactctatacgtccactctaaccgtcaattcttcgtcaaatgtctcatcgccggaaccgttgacttcatcttcggaaacgccgccgtcgtgctccaagactgtgacatccacgctcgccgccctaattccggtcagaaaaacatggtcacagctcagggaagaacggatcctaaccagaacacagggatcgttatccagaaatgtaggatcggtgccacgtcggatttacagtcggtgaaaggtagttttccgacgtacttgggtcggccatggaaggaatattcacaaacggtgataatgcagtcggctatctccgacgtgatccgacccgaagggtggtccgagtggaccgggacttttgcgttgaacactctgacttacagagagtattcgaacacaggagcaggggctggaactgcaaatagagtgaagtggaggggctttaaggtaattacggctgctgctgaagctcaaaaatatacggctggtcagtttattggtggtggaggctggttatcgtcgaccggtttccccttctcgctcggtctttgagagattgttgtgtaatgtgttcctacgtattgttggctacaaaaattattgattaatattgtatgaagcaaatcgtgttgtcctctttgttttgtttgggttgtgtactttctctagatcatcgtagtattagaaacgagatgaaataatgcgggtttttgcgccttgagaatatggatttgagaaaggagggatgttgcctatttgatgatgatgcatgatggatgtcataataaaaaacaaaccaaaaacatgtattttcttgtaacttctctctctttttgttgtcaacgaaacttatgtccatatatcaaaaaaaaaaaaaagacaaactattttgatatgcatgcattgtagtccaaaacttgttaggtaatccgatctagaaagagaataagcaatgaggacagttacggtaagaaggctgaaagaaagggaatttaggataattccgacgatgctcccggtaaccgtttcggagtgcttttagaaaaataaaaaaccttgaatcatcgaccggttgatttttttctttttttcttttttaagtttgttactatggtgtaaagcaaagagaaacttggaaatatataaaccacatgaatgcctaataatgataattgcgcaattttacgatgaattcacaattcgaaagcgtacaaaaaaacttgtctttgaccttggttagatttagctggccaaagttgacttcgactatatcataagattcataacgtattaacattactcaaattaatatctcgaagactcgaactttcctttgtacttgtaacgtgtttaacgtcaaaatcactataatgagcattggcctatcggctatcgggcatgttagcgccaggttaacttagcccaagatggttcaatctgaccggagggagacattcttgacacgtttgttggttcgtctcatgggcttcttttagaccgtaatcttcagttgataaacattcttgctaacccattttaacgggtattaaatttacatatgaaaaaataaaaataaaattaaatatgacctaagttctttttgtagtttaaaaaaaaattgaggttgatcttgcatttttttgttacctggatattctttttttttcctggtattttcccctaaataaagtcattcttccattgcacaaaaaaaaaagagtcaatcttccaatgagagaaaatggatcaaaataagtaattaacctctttcaaaccaaatattcctaactatgatatttccataaacgacatttctagaactttgacaaccagacttccttagtattctgcaaggaacttatcctaaaagcccaaaactaatgcacagtaagtatatcatatcactaaaatctatcccaaattagatcactacaatatctcatcaattatatcaagaaattcgtgattctatacatccaaagtttccataacaaaaaccccataaaatagactatgaataaaaatatcttcaaataaaaatcatgataaaatgttcaatcgtaatcatgttaaaatattcaataagataaaaatttatcaatatatttttgaggacattttcccgcattcaaattcaaataattctaaacaattaattaagcacactattaatcagtaagttttttttctttctataacagtatattgctcaaactattattttaaaaagtgtaatttctaatccaatgtgcaacgttgacaatacaaaccaatgtgctctgcattgactttttctacactgcttattagcttcactggaatgatttgcccatttgcatgtgttatcaagtaagacgtgcatgttttctatactctctagtaagtacatatgtgcctagaagtgaaaatattactttaaattagacaaacatttggacttaaaacttgaaactagtattgtattattaatcacaagtagcacccaaattcatgtttttattaaaccaggtcgaatattctgcattaatcatgcaatattcaattacaatctgatgaatacagaaacggaaacttcttaatgaagattgatataaattaattagtgacagaaattacgtaagaggatgatcatgaattaactagtgacagaacatgatgtatcgtcaacactcctaattttaatcgatcatctacacacacttccttaagaagcaccagagaataaacgcgagacgttaatttaaatattcacattccactacttatataaaactatcaacacactgacatcaataaccaattcttcattcttgttctaagacacacacacacaaatataaaccctagaaaccgagttagggtttttgatg

SEQ ID NO: 2208 - DNA, 3000 bp, Unknown
  misc_feature (1)..( 3000): cDNA_ID_2047670_gDNA_ID_1620502_Annot_ID_158931 3000 nt of promoter + ATG
cattaaactttttttattgtcaaaaagtattatacatcaaataatcttatggttttctaactatgtaatcatctggttgcagagaataagtctgtacagaatccaccattggttgagacaaagaaactggatacgtcattgtcgatgaatctacgtcctccaccatctgagcgacataagtcgtttgatgacgatgattcaacaatgagaaaacctattgttgcaaagaaagctgctgttgttgttccttcaaatgtgaacacatatacggtttcagatcttcaagtagctaccaacagtttcagcgtagataatcttctcggtgaaggaacatttggaagagtatacagagctcagtttgaagatggaaaggtatttaattttatataatcctcctctacttgtaagagcacaatgtcataatattctgctactgagatattttctttgatctactaggtacttgctgtgaagaaaatcgactcatctgcgcttcccacggatactgctgatgattttaccgaaattgtatcgaaaatagcgcatttggatcacgaaaatgtcacaaagcttgatggttactgttctgaacacgggcaacacttggtggtctatgagttccatagaaacggctcattgcatgactttttacatcttgcagaagaggaaagcaaaccgttgatatggaatccccgtgtcaagatcgctcttggcactgcacgtgcattggagtaagtctttaaacatctcaatcacattattgctcaatataatagcatgcagcagagtctcatggaaagtattgttgttgttgcaggtacttgcatgaagtttgctcaccatctatagtccacaagaacattaaatcagcaaatattttacttgactcagagctgaatccacacctctcagactcaggtctcgctagcttccttcccactgcaaacgaggtatatatagtatagactaaacttctcagaattctagtatctctctctctcttttgttcctccatggaacttgttcctaagtattcatgacattgtgcagctactaaaccaaaacgatgaaggatacagcgcaccagaaacttcaatgtcaggccaatactctttgaagagcgatgtttacagttttggagtagtgatgctcgagcttttaaccggaagaaaaccattcgacaggtacttttacaatccatatccctcgccttcctaaaaaaacttaagagtgatgcaaatgtgttcagaattgaagtaagtcctggtgattgttgtgtgtgacagcacaaggtcaagatcggaacaatcattggtaagatgggcaacacctcagcttcacgacattgatgctttgggcaaaatggttgatccagctctcaaagggctatacccggttaaatccctctcccgatttgcagatgttatcgccctttgcgtccaggtaatcatctatatattataatgtgatgatctgaacaaatgaaatctgaatgtatattgttcttttaatctgttacagccggagccagagtttagaccacccatgtctgaagtggtgcaagcattggttgtattggtgcagagagctaacatgagcaagagaactgttggagtcggctccggtagctccggcgtcaatgattacatgtaaattctttacctgatgagaaccaacaaaaaaaaacataaaaatttgccctttttctcttgtctgctcggaatctggatgggacgacaacaagtgacaaccgaggacagacaaaacaaaacaaaatcctttttttctttcggtttcataaaactgatgatgagagaataacaacaacaacccttcacgcattgtacactcccatgtttctttgtaatttgttcccaatttgtagctttttttttagattccgacaacatgaacaaaaccattcccttttgtgagttccgatccaaaaacggtattattccatttgtaattttttccttgtttgaataaattttatgttaataaagtggaatatgatcgattacaatttgtgtaaatctgctgctgaattgctaaagcttaaacagcaacggtcgttctaaatttcaacaatctttggactttcaccggcaatcaaggcgacgacggaaccgtaagagcgtaaatccacgtaatattagaaacccgaccggaaacacgctagtgacacgtggatttgtcacgtggacactttttatgacacgtggtagataaatcgactatactatgcacacctcacgtttgaatcaaaaccatataatatacacgatttcttgaatgagggtagaaataattagaatgatgatcgggaagttgtggagatctgtgggaaccgtcggaaagtttgatggtcgttacgacggcgtgaggacgatggttggaaaagcctcgaaccgagctggtgttcatggttcgaaacttcccaacgctaaagcacttgacaatgtaaccaattagttgaggtttcataatctcatttttgtttgtttgtcatagtaatcatgaaattaaattattctaatgcgtaggaggaagagatcagggagaggattagtaaaggcagcgaagacaaagaacagaaaagaaaagaggttgagaaaaaagttgaaggctctcaaagaggatctaacggcgaagatgcaccatcctccgaccggtgatgacgggtcttggtttttttttatcctgcttaatctcttcaatatgcattgtgtaatagtaatctttgtttcttcgaatcttattgctgcgcttagtatttctaattttgtggtctcgaataaaagaaaaataaaatataatatatacatctaccgggacttaaaagcccaaatattaaaggcccattaagtgtggcttatccatctccctcttcttctctgtctcatctctacaatcacagtcacagatactgtacttttcgaagagacgagtttcgaattttcgccttctctcactcctgagctgaatgaatttccaatg

SEQ ID NO: 2209 - DNA, 3000 bp, Unknown
  misc_feature (1)..( 3000): cDNA_ID_3066477_gDNA_ID_1620502_Annot_ID_158929 3000 nt of promoter + ATG
tcctcgaatgcgtcgtttgtctctcggagctagccgatggagacaaagctagggttttgccgagctgtgatcactggtttcacgttgaatgtatagactcctggctgcaatcaaactccacttgtcctatatgtagaaagagagtttgtttgaagcagtcaagaacgagaccagaacttggcggccgcgacaagagttttaaccaaaaccacgaccaaacatccgaacatcatgagttttcgacagatcctccgacgaacacagacacggcgattattgaagatggtggctgcggcgaagcaaacgaaggtcaaccagaattaacggcggtggtgatagacattccggcgaaagagatataaaatcaggcccatgctaggcattatgggcccattatatgataatatactgtccatgtattaagctaccgtgacatcactaaaaagtgataaataaattatttttttggtacaaaacttatgatatacactaatatactatggtaccatagtatatctcaacttgcaagaaagatactaggaacgactgatactgtgaatgtcgcgatgaatgtttttcttttaataaatgtataaatcttgtagtagtaacttttttttagaaacaattacatttcccaacgctctctactgacacaatttaaatagataaactgtgtatgtgcagcagcacgttcaaagcgtgaagacaaacaaatctatcaaccaaacaaagtgacctttttaaagaataattggcagaggttttattacaacagacaatttttcataaaagtagtgtggaaataggtatcttcaaaaaattagttgtgagaatataaattttgttcactactaatattttaaattctaaacaatttgatacaacatacatcaaaggggttatttaattattgcaaaaaatgtcttgaaattttaagtagtctgtaattaacctaaaagtaaatgttcataccaaatatgatatttttgttatttataaacttatggtagtttttatatttattatttatttttaaaattgcctctctcttttttttggacatcagtctctcgattactgcattggatgccctgtatttgcaacttgttgatagaaaggattacgcaagttgttgctgtcaacaaaaagagattatgcaagttgttatgtttaatatacccgttacacaatttatcactttttccgtaaaataagttccccgccttaaattagctactctagataatgaaagattaatgataaagaaggaatcaaattattcacatgattgtaacatcaacttttgatatattagaaaaaaaaacacagaaaagatcgccaaaaaaagaagaaaaaaaaaatgaaagaaagcatgtgatgattacgagtttactgtatgcttttctaaacgagggaacaaacttcattcataactatttgtagcattttatcctatatggctataattcaataatgtacttgtatccgatacttggatttaggatacaatctcttttatttcattttctagatttggtcaattaaactaccgacactgaaataaacatttctttatagatgacatttaactaaactatgttggagagaatatgatctgatgaaatgggggaaaaaatgtttgatatgacatccactgagactatgtttataatcttactaaacctaccagagatcagatataaacatgtttattgaaatcagaaaaataatttttagagatgtcatcataagagagaataatttttttccaagtttaataaacaatcagatactcaaacagattaaaacagtttagtttatatcattcatatcttttaaaagagagctagagtctgcgttatagcaacaatactttgtatttaaattttattttcatcaaattgatggaataatagctttattccaaaaaaaaaatggtagatggacccgtgacaggcttgcagccatcggcctaaatactttatatttataatttcatcaataatttcggtgcccctaatatctgattgtttacataatcgctatgtgacacttttgctttgctttaattatacctgtatactataatgttctgccataacatttatagcaacgttaattaattccttttatgtatgattagacgtttcaagacccatcattaacaatttataggtagaaatagtcctttacctccatagttttagtataatggcagttttctcaactattgttgttaagatacataaatcagcattctatacttgtatgtaatcaactctgtacctaatgttttaaaagaaagatctaagtactgtgtgtaaaaagatttatacttctaagtaagatagtactaattctattattgaactctttaaagatacaaatgttatcaaatcaaaactgaaaataacaagtgtttctgataacgacggtccagttacacttacacatcaattgaatccaaagaatagttttagtaacactcgagattttcaaattggttgaatgacgaaacgaatactaaaatcagaaaagaagaatatgctttttagtaaagaaaaaggttatattattgtcggttaatgataatataatcctagtttcctaatgtgtatgaggataaacgtggacgagactggtgagttcatcactggcaaagcaacgaatatttaggtaattacatatacaaaattacaaaaatacaaaaacgacaatagactcctgtcaatttccgtataatatgaataatattctgattaaaacataaaacgaagatcttatctttacgagcgaggcagcttatataacccagtggaacgttttttgtttttctgaaaattccactcaaataatagaatcaagaaaagtaaaaccagaaaaagccattttaaataaatagtatcgtgtttgattttaatttcatcaacataattattatataaacacccactcttcacgagtacattcatcatcactcactagtgtcgaacaatg

SEQ ID NO: 2210 - DNA, 3000 bp, Unknown
  misc_feature (1)..( 3000): cDNA_ID_3066485_gDNA_ID_1620502_Annot_ID_158924 3000 nt of promoter + ATG
tttgtgtttgttgtatataaggaaaccttgcatccaaaatcaaatcatgaagttaggctaactttttagctgtcaatgattgcaatttgctcctttgtttgccttctaacataatacggttgaccaaaggcgtgtttctgattttaaaacgatactatcataatatctccaccgtatttttaaacgattgtataacataatatctccaccgtatttttttgtataatttctaggtttgtcaccttccaccgaattatttttattttgtatttccaaatgtattaaaatcttaataaattcaatttgggttgatatgttcgacttgaaatagatactaattagtagtaaaataaaggttggttgaataaagaaactgccaacggaaacggaaatgactagtggatttttttgttaaaattttaactagtaatcgagaataagtaattaggagtgaaggaatgttctttgttgataacgttcttaaataaggccctgttcgtttgatcagtttgatggatcatctggatggagatgagttttgatgtttgtttggtgccaaaaacgggagtttgaaaatttagcctaaattttcaaattcatttggctgaactaaattggatcatttggatggaaatgattcagtcaaaaataacaaatgacaaaaatatcctaattatttcaattgattatttagatgtatttttagatacaaaaacaaatagactaaatcttcttttacaattattttttaaaaaatagaaaaattaattttttctctaaaactgcaaaatcaaaattttccgctaaaaccgtaaaattacatttttccgccaaaaccacaaaaatcatatttcccgcaaaaaccgtaaaatcgtgttttcccgccaaaaccgcaaaatcacgttttcccgccaaaaacgtaaaattttattttccgccaaaactacaaaattctattttcccgtcaaaaccgtaaaatcatgttttctcccaaaaccgcaaaattacgttttcccgtcaaaacctcaaattcacatttttccgtcaaaaccgcaaaaatcacgttttcccgctaaaaacgtaaaattttgttttccgccaaaaccataaaatcgagttttcttgtcaaaaccgtaaaattacgttttcccgctaaaaccgtaaaataaatttataaatgtaaaaaattattatttaaaatttatttacttttaaatatattttagattaagaattaaaattaatatgtttacaagtaataataaaaatataattagatgaaagtatgggtattttaggtatttggattattacaaatcatttggatggagagtagagataagcaaacgaataacatctcattcggatgatccaatcaaatgaaccgactaaaaataaaataaacaagagtcggatgaatcatccagatggacatgttgaatggatcagttggatggatctgtcaaatggaaatgactattggaattttttgttaaaattttaactagtaatcgagaataagtaattaggagtgaaggaatgttctttgttgataacgttcttaaataacttgtgaaggaagaaagacacataaacgtatttggttggcttatggaaacaagtaaagaagtcacgaaagaactaatcaaagaaagcaaatgccgtgtccgtctcatattcaaaaaataaattaaaataaaagagtgcatgtgattgcaatctattcgtattatcatgtagatctacgatagtatttttgtttttccattacaaaatttgatattagcgattccatgttttgggtgttagaattaataatagtattagtatgataacatctcaataaatgtaactagactgcacatatattgatgggatcagtttaataaagtttaacatatctatatttttttcaagaatttttgtaaaatgaaatatatctttcatatttaatttttccaaattttactcgattttctttctaagaacaaaagtttatgatttgatttgtatgtatttttagaaaacgcgtttataaattcacaattatggaatctctatagtattgttgggtccatataattcattccacgggccaaaaagacataagttacgcaaggggttaggattaggtacatgaaggtgtatgttaagatccgtgagacacagataattgacgtgacgatgtcgctttctctgccacagaaaaacatgaatatcatatcagtcaatacctccaaatttttgtttttttaatttttttcaaaaaacctgaaaatcaaagggggaaaaaaatccctcaaaattcgagtattgaagaacgacgacgacgatcttctgggtgactcaaaggtttcagctcaattcagatgattttttgggttgaagatatttgaaacgattcgccttcttttggaatttggaattttaaaggatttcgattttgatgtgaattttgcacatgatcagggactgataattattgggttttgcttgattttgattgttcatgaacaaaaattctggaaaagatctagcttgttcataaacaatttttttagaaaacagaacaaagttttctccgatcgctcctaaaattgtatatatacttttctgattcgtgttaatctggtgataattgaattagatcgtcataaaacacgtcttcttgttgacactgattttagcgtttaatttttattttttttcagtgagaggttaagctcaaggtctctggattgcttttgaatttgcatgctgttggaggatgatagaccatcggtatgtgcttgagttttctcgaggaaggatgaaccgatacgagccgtcttattgattaattatatatatgtagtggagtgcctgaaggagatatatatatatatagtagcagttggatattagggttttcatttgttaggtgtgagtttcttttgttgttgttaatttggattctagacttccatgaccatcgtagcatgatggttgggaaggttttag

SEQ ID NO: 2211 - DNA, 3000 bp, Unknown
  misc_feature (1)..( 3000): cDNA_ID_3066520_gDNA_ID_1620503_Annot_ID_158957 3000 nt of promoter + ATG
atagtttctcgtttagtttagatatataaatacaaagacttgagacgacttctaatactccggcaacgatgattaataccgacgataacttattgatgatcgaagctctcttgacctccgatccgtcgccaccattacttccggcgaatctcagcctcgagactactctcccgaagcgtttacatgctgtgttgaatggaacccacgagccctggagttacgccattttctggaaaccgtcgtacgatgacttttccggtgaagcagttctcaaatggggcgacggagtttacactggtggcaacgaggaaaagacacgagggaggttgaggaggaagaagacgattctgtcgtctccggaggagaaagagcgtcggagtaatgttattcgggagcttaacttgatgatctccggcgaagcgtttccggtggttgaagacgacgtcagtgatgacgatgacgtggaagtgacggatatggagtggttcttcttggtttccatgacgtggagttttggtaacggatccgggttagcgggtaaggcgtttgctagctataacccggttttggttaccggttcggatctgatttacgggtcgggttgtgatcgggctaaacaaggaggggatgtagggttacagaccatcttgtgtattccttcacataacggagtgttggagcttgcatccacggaggagatccgaccaaattcggatctttttaataggatccggtttctttttggaggatccaaatatttttctggagccccgaattcgaactcggagcttttcccatttcagttagagagcagttgttcaagtactgtaaccggtaacccgaatcctagtccggtttatctacagaaccggtataatttgaacttctcgacgtcatcttccacattggcgagagctccatgcggcgatgtactgagttttggcgagaatgttaaacagagttttgaaaatcggaaccctaatacttattctgatcagattcaaaacgtcgtccctcacgcgacggtgatgctggagaagaagaagggaaaaaagcgcgggagaaaaccggcgcatggtagagacaagcctttgaaccacgtggaagcagagaggatgagacgtgagaagctaaaccacagattctacgcattacgagcggttgtaccaaacgtatcgaaaatggacaaaacgtcgttgctcgaagacgcggtttgttacataaacgagctgaaatcaaaagctgaaaacgttgaattggagaaacatgcgattgagattcagttcaatgaactcaaggagattgcaggacaacgaaacgcaattcctagcgtttgtaaatacgaggaaaaggcatcagagatgatgaagatcgaagtgaagattatggaaagtgatgatgcaatggttagagttgaatcaaggaaggatcatcatccaggagcgagattgatgaatgctttgatggatttggagttagaagtgaatcatgcgagcatttctgtgatgaacgatcttatgatacaacaagcgaacgtgaagatggggttgagaatctacaagcaggaagagcttagggatttgttgatgtcgaaaattagctgagagtttctgcggtgtgttttgagaaaattaatcatggggtcaaagtgtaattaagttttgttgattttctcataagttaatggccgttttattagattttggataatatacagttctaatcttgtgacccaaaattagggggacttattgcaaatggtcaaccctggaatgaacgagatgaacacaaacacaaatggtgcttgaattctttttttttttgtttcctcttgtttgttcatcttactaacatgaaaaagatgaatatttatattttgcactttcagcccaaatggtaaaaatttgggttgaatatatttttgagaaaaatccaaaaaaagattattgcacgtttaatatccaaacttttttggttggaaggaaaatatacatagtttaattaaaacatataatttaatttctacaattttactcaagatctaataacaaaagcaaaattctagttttactcttaccatctcaattaatttataattgacatggtatatttgatttgaataaaaattattttttgttgataggttgtttttattaaaattattttattttgactaccaaaataaaaattagaagaaaatctttttaaaaaaatcttcaactttccttttttaaaacacaccctttaatagataaaattagggtttttggaatgaaatgttgaagaagatcaaaaaatttagattttttctatcccaatttaagtgggtgagtaagacaatacatttcttgctatccttttgtttttaattttcaaagaagaaatttaaagcatacatgtatcttaggtttaaaactgatcttgttattatatatagtttcaaaatccaaaacacacatcacaagcgagatattcttcattaaaagaaagaacaaataaaatggagagtagaagatcttcctatgcttttgtttcggttttgatccttgtggtgctcttgttttcagggtcaaacttgttgttgcattagaggactatcatcatccacaaacacttaattgaacaactccgtaaggttccaatttgtatcattaatgtgtgatgtgtccaactcctaaactaaagtctcaataaaataatggagttatcttgcttactcgtacatgtatggaataatggtgtagtagtgactgatgagatttacaatgaatcaattctgaaaccaaaaagtgattcagcccaatgatgtgtgttttaaagcccaatgactaatgggcttatttaacccaaccaaataactaatgggctgaattcggatcatttaaacccgacccggtatcatctctatggcgctctctggttaaaacatacaaacttttagggtttcttcaatctctctctccctctttcttcctcttctctcattgaaatcgaacgagg

SEQ ID NO: 2212 - DNA, 3000 bp, Unknown
  misc_feature (1)..( 3000): cDNA_ID_3593307_gDNA_ID_1620503_Annot_ID_158962 3000 nt of promoter + ATG
ttgcatcaacaatcaagcaaaggagaaaataagttgcatcatataagagatgtgtaaaagaatattttttcgatatcacctaccttttcgactcctgaagttgtgcccgctgttccggtaccttatccacctcacccgccgtatagctatatacggagtcagacaagaaaaataaggaacatgattatcaaaaccacacaaacaattcacaaagtgatgctttttgcttatgataatcacacttctaattcgaattcgagcttaacatacatgaaaccacatataatcaatcagtcacgttacctagagggaagagcagattgaggcacgaaaggagtataagtggtttctctttcagcagcagtttgttgagctttctgaaactcttttaaaacagcttgaaagtcccttgcaagcttagcatctgcaatcttcttacttggctacacaattacacaacaatcaaacacacaacaaagagtcgcttaaaaaccaaacaagaagaaaaagattccactttacattgacaccgctttgatgatcagtttcactagcttctttaagtttagctgaagtatccttcacaagctgtccaatatgcaaccttgtcttgtgcctatcacaacaaaatccgaataataatttctaaattcagaatccacaaaaaaaaaaaagcaatcaaaattgaaatcaaaaattcaattttttttatcaaatgaaatttagatttcaatttcaacatacagcttctcccggagctccggtgtatctttgggagtaccaagtgtgttaacgagtcgctgaaacgtggagactccggtattgatctggaatattccagaagcaacggcttgtgtcgaatcttgtcgaccaccattgaatttcctcgttgatcttcctcttcctgattctaaatcttgaaaactcatcttcttcgcgaaacctctttttttcctggaaaaattggatctacaaaaagattgagaaattggttatcggagttttctctaatctctgagaaaaaaaaaacgaaggtcaaggcgtggatcgtggagacagatagacgaagattgaaaagcgttttcgaaaaaatcccaaactgattttaattgagaagaaaaagctgagataaagttgtttcctttttgatccttttatttctatatatttagtaacctctcctcgtttctgtttttcttgccaaattaaacaattggtttggtttattgagattttggtttgggtcagtttgtttttatttttgatttgattcagttttagttaataaacaataatttttagttagtttatatattaatatgattatattttttctcaatatgtgtaaatagttaaaatgtaaagttttaataaaacatttatttggtttggtttagttcagatacaatcaaatcagtttatataagattccactacggtttaaacagttcaatttggttcggtgcccttagtttaactattttaggtgaaagtttaataatgaaaagtaggtctgggcacgaagcgaatattcggaaaaattgtgatatttgttattcgattcgttttaaccgaatacttgattttatgatttgctttgattcgaaactttccggatatccggaatttcgaatatccggatttttttgtgatatttgcggatatccgctttgatacgtataaatattttaaaaaaatatataaactatataaccatatcagatattcaaagtttttatttaacatgctttcaaaataagttctaaataccaaatataacctttgttgttatcaccggtcaacaaaaatgttatcaaactaattccaaaaactaaaactcgatagtttttgatgtcattgatcaaaacataacataaaaaaaaatatcaaacaaacatcttaacataaaaacataaggtagcaacaatacacaaactatttatgatatctatatatagatataactatatattctaatatatatcaaaagatacggatcgaagcggatatttgattttttaaaaaacaatatttgctatttgattcggtttttacgaatactacattttcctatttgctttggtccaaaatcttacggaaattcggatttttcgaatcaaatcaaatcgaataccgaatcgaagcggatcgatcgaatattttgcccagccctaatggaaagtgttaatgtaattactttatcagcatttttttcgcaagatttccaatgatgaggttattaaactttactacatgtgaaaagcagaaacggttttggacacgtggacgacagatagtggttgataatgtgattatgtcacgtcttttgttttgttttaaacgtaagtactatatgattaaaatttaattagaatctttcccgacaaagaaatagctaagcacgacctttttcttccttgaagtcgccggcgagacaaaaaaaaaaaaacataatcccgacggttacacgtaccggagaattgtatttaaattgaatccgctttgtattttcctcacagccaaagatttttccttactaggattttcattttctcttctgttttcgtttcaaattcagaaaatcttccgtttcaatccggtttatatcggtttttagcaatgtcggtgagtactccttcatatccgattaatcgttctcgtctcgtatttgtagaatttcgatcaccagctgcgattagatatgttgaaattggcgtttagaatcactaattttgggttttaccttcttatggattacttgtttgataaatgtgattagtatttatctaattagttaaaactttgtgaatttatttttggacacagcttcttatatgtataacttttaagttaatcagaacttaaccaattcgttaactttaggagtaaggggtttaacacttttgtgctctctgttttcaaattcatgtcagtctgaacattgttaatgacacaactggtaactgttaatagacgtctgaacgtttttcttcattgcag

SEQ ID NO: 2213 - DNA, 3000 bp, Unknown
  misc_feature (1)..( 3000): cDNA_ID_2106377_gDNA_ID_1620503_Annot_ID_158959 3000 nt of promoter + ATG
ttgtgataaatacctttacatctcgtatgagttctattattagagtatgaatgaatcaaagcaacttgaataatgtgaaatgattactattacaacttgtgtttaaacgatacaacaacaggtttaacatttggtttgaaagttggtaatgtacggagaggcttgacttgtctcgtgttgtgttcatcttttagcaagaaagctctactgctccatggtgacttttcccggaacaaaagagctgtttattcccctaagttcaaaattaataatgtcccttaatacttgtagtcgctaggcatcaggcatgtatctctgtaccaatctgtatctgtaagagcttcaaactatctgaaaactcaagacgaatattgttgagtcgagctgcatgttacagattacaacatatctaatctagctctctctagcatagatttaaatagtaaagtcaagtcctactaattatctaaatatgtcaaatatttctcaaaaataaaccattccctaagagacctgattaataattttcaaaaaatttcagtaagaatcaacataaaattatacaataaatagtttcccttgtatagatcaaagagatgacgactcagtagttaattatcgcagtgggtatgttcactatcaattcatagtgttccgtgattggagggtttctaagtgatatagacttgattaacgcctaaatcctgaaaatatgaaatcgataattactctgattgattggtacgtttactgtttatcaccgaaaaatctctcaaactttattcttcgtctaagactttaattttgaccgccacatataattcaaataaaatggtacaattattagaacaaaagttcaaatattcaagaactttacggtaaaactacagaacatagacaagatgattaccctaagaccaatggttttaataaccactgtccgaaagacaaaacaaaatgaagacgattcttctataaaatatcaaatacaagaagaaaaaaataactcaaatataaatcaatatgaatttaaaagaatcaactcaaaacctgaatcaaagcactggaccaaatcagaaagaaagcaaaaaactacaaaacttggttttatttctgtttgcttattcaaatggaacacaaaaatcaaaattcgaagaaaacatcttatagaacacaaaccatatacataactagatatttcatatttagttgtagatgcaattgagttaccatatgcttctggtcatgcttgactccttgtacgccaccggcagccgattttaaaaccaaaatcggtatccactcgtggcatacagggagccaggcataacgacaaactattatatgtatatattgttgtataccaaacctctacgcatgaacatatctttatacgtggatcttggcttgaatcgaatcagaactttttttaactgttgggaagaggaaatgaagtagtcagagagaaatgttgaagagttttggttgaagaggaatatgtggtacaaatatataaaggggaaagagagaagagaactaattatgttcttgccaaaaaaatatattcaaaagcatgactaagttaggttttgatttttaaaatctttaatgtgaagatagatgaataaaattgttaacaaattaaaggacccatttactcactttccttaaaggtttctcctttttccacatattttatttatctattgagagttaaatcatgcaaagaattttgctttttaaagcacataatagaaaaagacaatggtgatgcatattgtattatttcttcaatattcaagttctaagatattataaacttgcttaaactccaatatatgtacattgttattgtaaggtggaaacaaaaataaggattcttcttgtcaaaggtaataaagattacatagcgtgcaaacctgctgagttacttttaattaaatagttatattggagagttttttataaagatttttggtatcatacaaaggaaaatttataaaaaagaaagagtgaatgggccattgatcaatcatcttcatcagcataaaggacctacattttcatcccaatccagaactttagcgttggacaaatcaaattgatatcccattaggtcttgctttgtttttgtttcttttttgttggtttatgtatgcgtttgtattagtatttacaagttaagataatgtgttcattgtcaaattgtaaaagggttttatacatgatatcaatgcaaatacatatatttggggtttgaaataaccaaaatcttaaatcttcataacttgggaaataatgtgaataagcatttctttacaaatgaacattgtacttgtagacacactatgaacatattcatgagcgtgaacaaaaagtgagtacatatatgttttataacgaagagaattcaaattcaaagactctctaaagcttaaaattcgattcttcttttgcaaaaatagattttgtatgcttttttcatcatagctctacatcggtcgtgggctctttcactttcacttttcattcttttataagtgaagacactttttctttagtgtcattcttagtattattttctcttttctttttattcattttccctttcgtttgtttttttctttgataatggttttaaaaatttagtccagaccaaatatggcctagaattagagaatcttgttaggatgaagttttattttcttctttggtcttacaaaaactgaaacaagataaacgacgtcgtattacacacaaacaaacgaaaactaaacgacgtcgttaaatattaaaaaaaaacggaaacgagatttactagtttggattttaatgggctcaacaggcccatactaaaccagtatgggcttctttcgtgctgcaactcatccagatgatctccggcgacgagtaccttcgccggcaataatggtctctgtgtagatagatcgtgaagaagattagagaatcgaagaactcgtatcagataagctaaaatca

SEQ ID NO: 2214 - DNA, 3000 bp, Unknown
  misc_feature (1)..( 3000): cDNA_ID_2151976_gDNA_ID_1620503_Annot_ID_158960 3000 nt of promoter + ATG
agcagctttactcactctgttaaacgcacccgtaacccacgtggcaccggttaaaacataccggtttttcattatagcagaaccagcattgctcactgtctgctcagcagcagctattgctgattttgttttctctgtgacttgaaacttctgatcaacttctttaactttttcgctcacaactgtagtcccggtgttgattttctccgtgaatccgattcttttgtcgaaagatgtaactctagctgaagctgttgatgtcaactgatgcttctcatcaagactcttcgctttagctatagcgtctttacctaaaacaaacccttttgaaatcataccacttacaacatcttcagcttttctaaataccgatacatcttctcgcgtaggagatgatgatttattgctctctttcaatgattcctaaggagacaaaatgttatgattacacacagtgattcttaaagagagttttgaggttaaagaaatggtttataaggagcttacaatggaagctaaagcatcaggaggtagttggtaatctggtgacattgtaactgtgaccgatgaatcaacaatcgtcgatccctgaaacaaaatagacattaaaacaaagcattgcaatatgactcattgaattaaggttaagaaaaagtgaatttacgtacggtgaggagaactgcggtttcagctccttgtaaatccttgaatgtgacatatgctaatttagaaccatcattctcgctgtagaaaccaactcggaaagttttaggaatcggtaagaacataattcagatgaaaatgtaagtcgaaaaaactgacctttgagtctcgaggtaagcaatatcgccggaaaaagagaagaactccttgagatctctttctgttgcttcaagagaaacgttgctaactttgacagttaccatctgcaatgaagaaaaacgttcagacgtctattaacagttaccagttgtgtcattaacaatgttcagactgacatgaatttgaaaacagagagcacaaaagtgttaaaccccttactcctaaagttaacgaattggttaagttctgattaacttaaaagttatacatataagaagctgtgtccaaaaataaattcacaaagttttaactaattagataaatactaatcacatttatcaaacaagtaatccataagaaggtaaaacccaaaattagtgattctaaacgccaatttcaacatatctaatcgcagctggtgatcgaaattctacaaatacgagacgagaacgattaatcggatatgaaggagtactcaccgacattgctaaaaaccgatataaaccggattgaaacggaagattttctgaatttgaaacgaaaacagaagagaaaatgaaaatcctagtaaggaaaaatctttggctgtgaggaaaatacaaagcggattcaatttaaatacaattctccggtacgtgtaaccgtcgggattatgtttttttttttttgtctcgccggcgacttcaaggaagaaaaaggtcgtgcttagctatttctttgtcgggaaagattctaattaaattttaatcatatagtacttacgtttaaaacaaaacaaaagacgtgacataatcacattatcaaccactatctgtcgtccacgtgtccaaaaccgtttctgcttttcacatgtagtaaagtttaataacctcatcattggaaatcttgcgaaaaaaatgctgataaagtaattacattaacactttccattagggctgggcaaaatattcgatcgatccgcttcgattcggtattcgatttgatttgattcgaaaaatccgaatttccgtaagattttggaccaaagcaaataggaaaatgtagtattcgtaaaaaccgaatcaaatagcaaatattgttttttaaaaaatcaaatatccgcttcgatccgtatcttttgatatatattagaatatatagttatatctatatatagatatcataaatagtttgtgtattgttgctaccttatgtttttatgttaagatgtttgtttgatatttttttttatgttatgttttgatcaatgacatcaaaaactatcgagttttagtttttggaattagtttgataacatttttgttgaccggtgataacaacaaaggttatatttggtatttagaacttattttgaaagcatgttaaataaaaactttgaatatctgatatggttatatagtttatatatttttttaaaatatttatacgtatcaaagcggatatccgcaaatatcacaaaaaaatccggatattcgaaattccggatatccggaaagtttcgaatcaaagcaaatcataaaatcaagtattcggttaaaacgaatcgaataacaaatatcacaatttttccgaatattcgcttcgtgcccagacctacttttcattattaaactttcacctaaaatagttaaactaagggcaccgaaccaaattgaactgtttaaaccgtagtggaatcttatataaactgatttgattgtatctgaactaaaccaaaccaaataaatgttttattaaaactttacattttaactatttacacatattgagaaaaaatataatcatattaatatataaactaactaaaaattattgtttattaactaaaactgaatcaaatcaaaaataaaaacaaactgacccaaaccaaaatctcaataaaccaaaccaattgtttaatttggcaagaaaaacagaaacgaggagaggttactaaatatatagaaataaaaggatcaaaaaggaaacaactttatctcagctttttcttctcaattaaaatcagtttgggattttttcgaaaacgcttttcaatcttcgtctatctgtctccacgatccacgccttgaccttcgttttttttttctcagagattagagaaaactccgataaccaatttctcaatctttttgtagatccaatttttccaggaaaaaaagaggtttcgcgaagaagatg

SEQ ID NO: 2215 - DNA, 3000 bp, Unknown
  misc_feature (1)..( 3000): cDNA_ID_2152054_gDNA_ID_1620504_Annot_ID_158981 3000 nt of promoter + ATG
atgatgatcatcaattgagttaaagtagttagctttgccaccaaaagaatctgatatcgtaaggcatgaaaactaaactgataatagctctgccttaggttgcatattatctaattcaaaaccaagaacaacaacattcaatcaccaactaactaaacaagtgttagataaaaatggattgcagcatgacaagtgaaaaccaaaccaattgttgcagtttcagtgaacctttccttgtaagtagttttgccacaactgagttaaagttgttagctttccactcaaagaatctatcttaaattcctaacacttggttcaaacaaccaataacacaagattgcaattatcaactaaactaaaacaagtgttaaatagaaatgaactgattctcaaaattaggaaccttttctcgtgtggaaaccagtaggtttgcagtttttgcccttgtagaagtctctaggagctcgttttggggagaggatatcaagagaagaagctctctttcttctgaatgatcttccaatccccattaacaatcctcctatcgtcgtcattctccaacaatgtattagactgatatcagtcgttgatcttaaaaaaaaaaaggacctgatagaagagtgcaaatctcagagaggtcaaattaggggtttttgttcaagtgaggttgtaggttgaagacactgtaaacgatgtcgtatagggggtaaaattcggaaaattgttgttttcaggaaactatctgactctaaacaaatgaaactgaaaatataggggtcatatttacaaattagttatcttcgatttacgcacgtattatatgtttgttgtagatgtttattttctaagtattgcataacgcataatgttttcttgtatgattgtatcaagctattctactatgtgaacatccaattatcaagtgaatatatattccaccgcataaacatgttatcaattattttgtatatcgtttcgtgaaaatatcaaaccaaatctaccatttttagaatagcacaaaaaaggattaaggataatagaagaacagagtcctaacttaaagcttagtgaggaagcttcacactcgtattatcgtcaataaaacaaagacgagatacaaatgactcttcacactactattattgtttatcttgtgatgattcctttcctatcaaaatgtctgcagcaacttcactctcttgttgacttttatcttgtgatgattccttcctttccactatatcggctgcagtttcccactcctctaggcctttatcgtctgttgcttccataagtttccacacttccattatatgtccaccttgctttgccttgagtttgagcagtgcagctacccactcctctcgacctttaccagctaaaaacgaccctaacagtctaaggcccaaaggaagaaagcctgcgagatggacagcacgaactgcgagctcttcgaaatcagaaggtggataaggctgcttgaaagcaaaatgagagaagacttgaagagcttcatcatatcttaaagatctgacttcgtacacatccatcactccggcgtcaacaagcaaattcttgttctggctaataagaatgactctgcttcctggagcaaaccagttagcatattcaatgatccacttcccttgttccatgttgttcacatcatcagcgataaggagaattttccggtgtttacgccttgcttcggtaatttcatgtccatcgtgatatgagcttattattaccgttggatcttcttctccttcaaactttagaagcttgtctttcatgttttcaacattatctaggaaaacatgtgtctgaaagtttacaaagatctctgcataaatgtaccttgcaagtgttgtcttcccaacaccagcactaccccaaatgccaattgtacgaacctctttgttaacttctaaagccaacaagtcataaaccactttcatgtgacgatccattgcaacaagggcattcgaatcgtttgatccggagtagaacacgacaagagatatgtcacgagcaatttggttgagtagatctgactgatccattcctgcaagattttgagataatggatactcagcggcaaggttggtcaatttggtaagtgcagttctccaacttggcgccttctccggatgttgtctgcatatttcttccacattaaaagataaatctgtaagaaaaatgggtatgaccatgagtgaacctttttcctgaaactcgagtatcactaagagctcttctaggaagccaacggagcaaggtttcgtcgtagaggtcataacaaccgcgactctcgactcttccaaagccttgagtgtccgttgaccaattggtccgaatctcttctccaagcatctgtaggataaaaaagttctaatgccatttcgaatcaaaatattttgaaaatatccatggctagtctggcagcagaaactcaggaagacatccacctcccttccaagcaacaaagaagcagcagaagatgaagaagcagaagacattgctttggttaaaaacactaattctgcagctggactcgaacaacgaaaagctacacatgtgaaacagctttacaacaaacacaccacttataaaaaaaacactagtagctaatgtgaaaacaaacaagacaaaaaagacaaaaactttacgtagaaatatataaataaacagagcaatgatagatttcaaagtatttaaaagttcttaatagatatctatcaaaatgacagcatacaaagtagcatttggtttattctttatatttttttgccgaacaaaatcaaagattcactgctccaagacatgatccacttgcttgatagattaatttcttatattttccttgtttatgcatcaaaccaacattaaagaaacgacatctctcttatcttttgatctttcaggattcaaatgatcatcttgaaacagagcgttgaaacagagtatctttgagcctcttctaagccaaggtctttgaca

SEQ ID NO: 2216 - DNA, 3000 bp, Unknown
  misc_feature (1)..( 3000): cDNA_ID_2152149_gDNA_ID_1620505_Annot_ID_158985 3000 nt of promoter + ATG
accagggaggagctgtggatgtaaacgatgaccttgcgagagagacggcgttctacactcaagcgcttgaagggacaagagaagcgtttggtaaactcaatgaaatgggtgtgaattttctcaggcctgcgaattactatgcggagatggtgaaatcggatgttcatatggagaaagtgaagtctcggcttttgcatgagaagaaacagattgaggagtctgaagagaggaggaaggctagggataataagagaatggctaaggaagtacagtctcagaagatgaaggaacgtgcgaaggagaagaaggataacattgagtctgtgaagaagtggaggaaacagaggcagcagagtgggtttagtgataaagctggtgagcctgaacttgatttcgaaagtggaaagagtttccagagaggaggaggtaagaaaagaccaggtgtgtctcccggagatcgatcaggaggtaaaggaaggcctacttcgaggatgggcaacaagaagagggagtttcgggattccaagtttggtcatggtggtaggaagggtttgagcaagcagaacacagcagagacgacaaacgatttcaaaggcggtttccgtggtggaaaagctagcggaaacaagaggcagaagaggtaaaaggtttgattatctaaacccacttcaaaactactataaactatttgtcttctttgttttttttaagaacatgtattttgttttggaaaccctgtggtaagggtcttagaaccaatacaattttgtactagtgattacttgaattaacaaagtcccttgtttgaagtctcatagttaacacttgaagttgaaactttatatgatagaaatacaacaaaacaaagcttagagcatacaaaaaaaaaatcctgaaaccagtagcaaccctaggaagttttattctggaactggaaccagacttggaacatatgcataaccgcaaacaaaaggcctattatcactacacaaatcacatcgtcctgcatcaatttgtttcttcactattccatctttactaatcatgcaaacgctaacgcaaacatcatcatcggtttcctcttcggtctcttgctcacaccataccatgatattatcgttcttgtcaatgaaataacttggatgagtgagatgttgatcagtatgtaatgtcgggagatcagggctagtcacgtctacgtacttggtccatgagactacctcatcgctcaatttgtttgtgatccaaacttcgatcttcattgtttctccactttgatgtaacaaagaaagcctatctcctcttaaactcgataaggctgccgtgtctaatacattacattcgaatggaagattgcaaacgattttgaatgtctctgtggagaaatcaaaactctggatgaaaatttcgggtctattattccaatgtgcaatccaatacatgtttcctttcaccgacacacctttacaaggtggatctatagaccaatccaaacgagtatcatcaacaattctccatgaatcagatttgaaatcatatatctgaatcttcggttcataagaccccgcgatttcactctcgtcttcaatctctccatcgaaaatccttagaagtttgtactcatcacgacatacattgtcatatccaaaaccatagaaatcattactcgaataaaaatccattggttcgatccatttgactcgactcaaaaacgggttccaaaccgcgagtttgtagcttcttgatcgttcgttcttgcatctacataacaataatccatcacaatggaccatagtggagatttgagctacattgtcgaactcttgcgggattggtgaagatgaacgagctcctttcactggatcgatgatctgaacaatacgatcgattcttatgaaacgttcttgttcttgaaaaagatccaagtatttgtagatgaatctcttgtccttcaagagagcaaaccattgtttacacgtcaatttgaattgcgtcaaatattcgactggaatcctacaacatatttcttctattatatcaataggaagcaacgaacgttcacatgaagccatgcaaaaacaaattgagaaaaaaaatcagaaaatttatgacaagtggtcttgcttcttatactacgtcgtgaatggatggtaataaacaattaaatgttacctctagttttttttttttgagagaatggtttttatccgtatatggcttattacaagtttcctcctttttcgagtttggtttgaggtctatattgaagatgagatactaaaaattgaggtaaattctttagtgtgaaggaaaattagtaaatacgatacgtttggaattgtttactactaaaaaaaaaattgttttagaccaagccagtccgacaaaaaggcgtgtgaatcataagaagtatcacatgatgctagacataaaagatttttcaaacatgacaaaacaaattgtgagtgtcttagtcatgccatttgaagtagaacgaaacttagtgatgagacacgtaacatcagtgagaatcaagatctaacttcggacttatcgtacgtaccacgtccacctaagtgttatccatatctactacatgtctatcttcattcaattttttttttgcattaacttgtaaacatagtgcataataattagaatcaagatttgaatccaattcgcttactaaatcctaaatgttaaaagcatacatgtttttcaaatcctacttttaggtgctaagttttttttctaaggtagttagagattgttagattttatatcattgaactgatcatcagtctctatactaacttctagatctcattgaatgtttactcaattttttttaattttttgtttggataatcgtctgctcgtggttttgatgcgtacgaacactcgtcaccatgcatgtcaagctctccttcctatataaactaaaaccacccattattgtcctcaaaaacaaacacatcaacaaaacaacaagaaaaaatg

SEQ ID NO: 2217 - DNA, 3000 bp, Unknown
  misc_feature (1)..( 3000): cDNA_ID_2152195_gDNA_ID_1620505_Annot_ID_158999 3000 nt of promoter + ATG
attcaggacaaattatagaagtggttccaaagtctttagcttcagtagacttgactccaataagccccaagaagaaaaggcaagtttgtcccgaaacttgcagaaacagatttatggtaaatcttttttctaacaatctgttggcatttgaaacatgcaggcgtaagtccgaacaatcaggagaaggcgactcgtcatgtaaacggtgcaactgcaaaaaatccaagtgtttgaagctgtaagttgaatacaccaatctttggcttgctttgaagtagttttttgttgagtctcttgtactgtgtttccctctgcagttactgtgaatgctttgctgctggattttattgcatagagccatgttcatgtataaattgcttcaacaaacctatccataaagatgttgtcctggctactcgcaaacagattgaatcccgcaatccacttgcatttgctcctaaagtcatcagaaactcagattccatcattgaagttggtgtaagtgttctcaatatttccttttacttatcatcctcaatacatttatctcattgaaaaggctataaaattctgcattggttcacaggaggatgcaagtaaaactccagcttcagcgcgacacaaacgaggctgtaactgcaagaaatcaaactgtctgaagaaatactgtgaatgctatcaggtatttccattaaactccatacacatcagtgtaagattcccttctgtggattggttctgattcattgatcgtgtagggcggagttggttgttctataaactgtagatgtgaaggatgtaaaaatgcatttggcagaaaagatggttagcttttacttctccactttatcataaacacacaagtctcttgatcttttatttgacaagagtacacaatttcttgcagggtctttgttcgaacaagatgaggagaatgaaacatctggcacacccggaacaaagaaaacacaacagaatgtcgagttgttcaaacctgcagctccaccttcaacaccaattccatttaggtaaagaaataatctcaaatacaatcaaatatgtgtccatttacacttctcctgattaactttattaacctttgttttcagacaaccactggcgcaacttccaatctcatccaacaacagactgctacctccacagtctcattttcatcatggagctattggatcatcttcctcagggatatacaacatcagaaaaccagacatgagtttgttgtctcattcaagaatcgagacaatcacagaggatattgatgatatgtctgagaatctaatccattctccaataactactctatctcccaacagcaaaagggtttcgttgtctcatcttgattcaccagagtcgactccatggagaagaaatggtggggggaggaatctgatacgttcgttcccaacgtttccttctctcactccacaccattaaaattctttgaatgtcaacttctagttggtagttttaacttacacagacaacatacgcaaacatttacaagtttagtagcagtattgcgttagtttttacaatggttgtgtaataaaaatgttaagtcatttatcaatatcttgacaacattcctcgtctaatatcacaaatgtaaccttatttattcaacaattttcatgtaaaaacaatcttcacaattaataatttattgactaactaataataatcttgttcaaagaggatgacaaaagagaaagaaaaccaaaaaacaagctggtcgactaattaagttgcactagacttggaacataagaccacacaattgggtaacaccttctgtctgattctccaagatccacttctttcatggatccatccactccaatgatgtaagctatgtagcgctgtattctgtagcctttatcaaaaacaacagcgactttcttctcctcgtcaatgaagaaactccccaaacaaaactgaaactgagggccaatgagttttcttatactcactgataagaacaccttgctgttccaagacaccgcgttgggctcaatcttagacgtgacccagatctccatcattaatgtatcccacggctgatataaaacagcaagctgctcgtctctaacattggatacactcaaagcatcttcagattcaacaaactgaaacggaagaggcaaaagtggtccaaatgtctctcttgtgaaatcaaaagagagtaagaaaaactcttcgtttgtttcacttgtttcgtaatacttctcttcagcaacccagaaggcatttcccttgagagacacgccactattaatagtccctaattgccagtctggagtgacatgaaaaaccctccatgaattagagttaaaatcgtagattatgaactcatgaaaatggggtctcaaacaagtaatacacctcaagattttgtgggatttgctgctcttgtcgtatccgagagcataagaatagctgtcgaatttgttgaactgatgtgtgggctcgattgaccgggtatgcccccaatacgggttccaaaccacgagcctagtcttggcttgggtgatgctgatgcataacaataaaccgtcgcagtgaaagacttgagatatatcatcaacttcgtcgcctaagctaataactttagcttcacgttttatacatgatgatgatgatgatgatgatgattcaacgacgttgttatcaagattgactctcatcaaataaaccctaaaattcatcatcatgaccaccataaagtaaagagtaaagcattaattgggccaaaaatgtaacgaatgggcctgagtgttataggtccaggtaagggaaagatgacgtcacttagtggatggactaaaagagtgatatgatttggacttcatagttcacactgtttcgcaccggcgcggacaaagttttttttttgttcgaaatccgacaacaaccctagattataaacaaaataaaccagtgtctgcatagaggcaatgtagatgtgatttttgctggaaa

SEQ ID NO: 2218 - DNA, 2614 bp, Unknown
  misc_feature (1)..( 2614): cDNA_ID_1030508_gDNA_ID_1620505_Annot_ID_159007 3000 nt of promoter + ATG
catacataaggggaatggaaacgaaccatctttggctaagtcatgctcattaggaatatgaccaacatgaatataaaaggagacagtttcaggagtagaataaggattgtggaaacaaaatttgtacattccactttttggagccttaaactcaaacttatctccagatgttccctttaaagtctgtacaatgttcccagctggtgacgtcacctacacaaacacaatccaatgaatcaatcaacacattaaccctaaccaaaatccaatccaatccaatcaaagatagcaaatttccacaatcccaaccaaaccctaaattgtcacatccttacaaagatcagatcaggtcaaaattaagcatgagaaacaccaatttcacgataaatcaaacattgggattatcgaaggaaacgtatcaaagttaagaacttttggggtaaaaaggtaaattgaaagatcgctaaccgtgaaatccaaaccaggatgatcggatccccagaagatatcatgatcgacgacgacgaagttaccggaaacagtgtcgccttcgtaaaggacgtactcttggacacattcttcgtcgttcaccgttacagagagagatgagatttgattgattgaattcaatagaattagacctatcaatacaaagacatggatcttcgcttgtcgtctctccatctttttttttagatcttcttcgatcaaaaaaattcagtttgttttctcgagagaattcgccgagtagaggaagaagaagaagacaaagaggattttattgcgacttagattaccaaaccggaaattaaaaccggtttatgacgacacggggagattttattggtcaacggcttttggtcattaaagagagttagagaaaaatattactaattttaatgtaagtaaaatacgatctaaattatgattaaattgataaaattttacttcaaaaagtgtttcagtgatgtttgtttttacaaaaaatttttgatttttgtatatatattggttaatgacttaatgtacgttttggaagttttttttatctacgccattgatatgtgttaaaaagaattgactgttatgtatgcataataatgtcaaggtagtttttatttatttggtcaataatgtcaaagtacttatattctaagaaatcattatttccgggaacaaaatctaaagaatcatatgttttcttctttgtgttaccatgtaaaagtgaatccttccaaatttccttaggttgagaatgacaattcttctttcatatgttatcaaagactaaaatgatcagaatgtcaatttgcagatttggtcaacactacattagaaacgaacatatatgagcgaaagacatgatttggttagggaagctagagttgatgggcctaatgagccctatacggcccgttatgagatacgtatgactgtaagagtaaatagtcttttttttcttaacagtaaataatctttatctccatttaattgtaaagttattgacattttgaaacgaccgtaaatattaccaaaaaactgacggagttaggatcggccacgtagaaagggacaaagagagaacagtcacggactcggccagactaagtatgggcctgtctgaatccaaactcagctaagttccaaaagcataaagagagatgtgtaatgaaatgaacgtattctagaaacgaaagcaatgttatgctttgtttttgagccacatgtttttgggagatggagagaatcttttttacgtttttaacctaacccacttggcacttggccaaaaaagtgagaagaaactgtggcgaatgagtaggccacgccatggactttgttccttgtccttcaaaagttaaatttatgttatgcgtggggacaatctaagcaacgtggttcctttaaatatcgcagcttcctcttttacacttttggagcctacgtgttttgttttggaccggccaaatacacgagtcagtcagtttagaaataatttggatgtccaaaaatcttggagatccaaataaaataattagcatgttttagttcataagaatatgaaatgtagataaactgtccatattaatttttccatagaattggctttttatcgaggtgatgtacttaatgactttgttgattactactcgtataacaataaagaatatgatactatgtgagacttataatgaatttggtgtgtgttaattaatccagttgaaacagtttaataacaaatcagaataaaaattgtagtaagaaaatttgaacgctgatccttcaacctagatagtgaacctttcaaatactatatgattcacgtgtaatgtttttgaccgttggttatttttgtgtgaactatattaacttatcaatatcgaaaggctaaataagtaaataactaaaagaaagttcaggaaacaactcgacctaatgacctatcatttctgatcacccgtcctataaatacatacgtaagatcattcgttactcatatcaagcttctacacacgatctagcttaaagttctgtaacctaagcgataatcacttagctactccaagtttcttcttaatttctctcacactagtagttctaagctttagaaatg

SEQ ID NO: 2219 - DNA, 3000 bp, Unknown
  misc_feature (1)..( 3000): cDNA_ID_3066549_gDNA_ID_1620505_Annot_ID_159000 3000 nt of promoter + ATG
cattgttttaagcacatatatgacaagttattatatttagatattaataatgttcagctatgtcgttaaaaagaaaattccgagtttgtcagtaagaagaatgataagtaagataaaacaatatcatgcaaaagaagcagaaaacgaaccataaacacctaataataatcattgatgttctgaaatattataggtttgaattcttgtatctattttgtaacgaattgacatgtaatttattttcttttctaagaagcacgatatgtgtataatataagaaagtttcttaagaaaccgggttgcaccgttgcatggaggcgaacaacacacacagcaaaacatgatggaccggtatatatatcattatgcgataaaagttcacttcactttgtagtaattgggaaaataagataaccatttgcttgtttgatcggctactccttcgctaatggaattattaagaattagatcaaaagctcatacacgtgaacaacacgaactatagagttcttcaacatgtctctttttataaagtggcgtgatgttaactatttattaaaaaatagtatacgtaatcattaatgaaagagatgagaaataattataacatgtagaaaaatggcattgtaagtttatagttggcatgttagtttgtgaagagatgtcggtcacatatttttgataaatttcttcacttcttttattttcttattaacttctcaattttttttctatacgtactaattttaaatttaaatagtacgtcatagttaacaaagatatttcaataaataagaaatgtaattaatatttttataaagggttgctttccataattatcagacatgtggacattataaagaaatatcgctcaaaatttctttaacgaaaaataatttatttattgtatgcatactaattatgctatttcagaacatatgacatggggtcacaagctatagaatgattgtactctttctaaacttataaaataacaaataatatttttagtataaatctttttcatggatccaatcaagacatgttctagtaaaggttatagaagactttattttacacttttaactccgataagaggataaataaacatttaagaaaattatggtatcaaataaaaaccactaaactaatcgtctttcacaacatatgtaatcttttttttagttgtgtgtgtgtaatgtgttctattctccttaagtatgagcaattaaagcaacatctatctaactactaaaagtttacacgacatgctaaacaagaaaccttcctaaaactatagcaacaacatttttcttaaatttatggagattttttttcatttttctgacctacggtcaaattgagcagaagaagacaggttaaaggacctaccttttgtaaaacccaagaaagaaaaaaacacattttgagcaaaggacagatttgtcatttttcgttcatgattcagatctaatttttcaacctacattaatgtcacctaatctttgcacaaatcactagacacacacaaactaatccgctattacaaaagccacaaaagaaaataaaaatccgattcttataaagaaaatagttttctgatatctaatgtaagattattattttcaaactacaagttaatgaaatttgaataatgataactacaagttaacaaccttgacacaatccccaaatttccgattaagattacgtaatatttttaaaaactgtttaagaaaataatcgagttttacgagggatttgcacacaacgaccgtatcattttcccttaattgcattgattacaccaatttaaaataaataaaataaaattacacgttaaaataagtttctacccctaattaacttttgttaatttagtactactactctattcaacgtttcaatttccaaaacaaatctcattattattaaggtaaaaaataaacccaaaataaaaggcaaaataacagttttttacttttttatatgaaaaccaaaaaagcaaaataaaaatttactgttgtgcgtcaaatcattctcatcttttagttttgtcgcacaaaaaagagttgcaaatctaaaagaatataattgcagacacaaagagagagaaagagagagagctgttggagtgtgaactagagaagacaatgagatgactttcattatcattttgcatccatttctcagtttcatcggtatgtttccttctctaatgatctctctcggctctcacatttttcttatgatatgatttaatcgttcttcttctatccattttggttttagtatttgttctgacacttcacttgtaagacatttggatccaatctactcaacgagtcgtttttgtgtctgtctctcattttgctttaggaaagactcaatcttttgagtttctgtagctaacccatttgctcatttctggtaaatttgatctgataaaaaactcgacatgttctgcatttttttgtccctcttgatcttgttggagttaaagtttcactctttctataagtagtgtgtttgtacatttgttccgcaatggtttgctgattagaaaatctgcctgcagtttcctcactaaaccaaaaaagtcttgatttttttccatgttgtgtaatctcttgatttacaagtatttggactaatacttctctgttaagagattctttgtctctgttctgttggaaagtaattttggtttgctttctctgtagattactttccagttagacctaaatccggatatttgtattgctctaatgattccacttaacttgagtataaaattttgctttaagcctaatcaatttaattgcttattgtgtgacattgtttcagttttgtaggtgaaaagcctgacacatagagaacaaagatgtcttcagtttgagttagtagagattgattctggcctggaatccttatcttggacttgaccacccttgggtgaagtctagaccactctttgtgcttctagcagccggtgtgatg

SEQ ID NO: 2220 - DNA, 3000 bp, Unknown
  misc_feature (1)..( 3000): cDNA_ID_2152187_gDNA_ID_1620505_Annot_ID_158997 3000 nt of promoter + ATG
tgtgaagagaaatagacagacaaataatgtatatacaataagatgaaagaaatgcatttgtcgtctcatacttgtcccaagtccgattattatggttcaaaaaaagccaaataacaagagtgcaaatttattttgaaaatccaaacaatcgtcgtttgttctgtcttttgttttttaacgtttgttctgagttgtacactttctccttgaaatattcggtgttgacatccaacaaaatgcttagattcgaatatgaattatatatggagatggagaataattataaactaaaactatcctaccaaataaacattttggatcaattagttatcccaaacattttatcccatgggatcacacattttagatttctacatcattccctaaaaaatgtttaacaaattcaaaaattagaaagcaacaatcatttaaagtgcttgtatataatttagttgattttactaaagtcgtgcaattgattctcattacaaacaagttataagctagtcttgattttgacacaaagagaaagtgattattcagaaaaaatatatattatgtgggtagatgtgactgaaggatcctacattggatgattaatttacataaaatctagatataactctatggacttaaaaataataatggattctatgtataatggatgacaaagaacaaaaacgaaggagattctatagtacaaatacaaaggccaaatgatgactttggtaagatggcttttcttgtggccatttgtagtaagcaagatgatttttaatttacttaattaaaaatgtaacagcaattattttcttaatattccgttaataaacaacctgacatgcacaaacagttcatggaacagcttttgaatatcccaatacattaacacctgatttagtacattatacactgaaaattatatttaaagactgaccaaatatataatacatagatatcaatcaaaatgttatagaagatgcttctttttcttattttttgaagaaaaaaaaatgcattgttgtatgttttttatgtcacgtgatgtgtcatgtggcacgtgacagtgaagtagcagcatgaatgaagaatggtcgacattatgattatcgcatggagccacttttgccagaagaaatgttttcagctctatccatatcaatactcgaagacatatttactctatactttaataagtttttatttgttacaatcacttgactagtagttttagttaagttaagctccaaaaacttcttgaaaagctccggtagaaggatcatgccttcggtttcttaagccgtgatttgatggctaattgtatacatatcgtcacacataattcgtattttctttagccgaaaatcccccgcaacattactagaaaataaaatgtttaagtagatataatttcatttttcatcattcaaaagagaattttcgttccatatttccctttctatatctcacgattcacgtaccgatgaaaaggaccgttgctacgaacatttggagcattcgctttatggcgtcacgggaaatacattttttggctaggagaaataaatagctaaatttattttatttcagaaggtagctaatatattaaaacaacaacatatgtcacaaaaaaatattcatgcaattttttttcacagttcaccatgggtgcgtaataactgtattcacaatccatcatcatgtacagttatctttagaggtgacattaacttttcaacaactatttaacaagtagacgtacatacgtacgtgaaaacaatttcgttgcgagttgttagttacaacatacttggacgttgagaccattcacagtaactatatttcacatttccacttttacatgtgagtgtgtaacattgaggccattcacggtgactgtatttcttcaagttaaataaagttttgtttttgagctaaaccggttaaaaaatacacataccatattcaaatctttataaacttatataatccaactatttgcaaccatgtacacactattgtaacattctttggtaatgtcgatatactttaacgattcttataatatgggagatattttatgataatgccataaaattatcataaaaggcttgaatatctctgaacgttacatttaaaaagaaatattggaattatgattatgactataacttcgaataattgaccaattaatttcaatttaagtgtcatgatgattacacataagtgctttctcgtgattagcaatattcagccagcaatatattttattaattccaaatctccatgttaaacaaaagccttgtaagttgtaatctcataacgtgtgtttctttttcattccgttctagaatcttctttaatccaacacttaatactagtacttaattatcatgtattctcacgagataattacatttatcgagcacaaaaataagtttaatttatcttaacgaatcactgttaatacggtcaaataattataggtatatcaacaatgacaagtagtagtcaacagagtcagtaaaaaccacagagaaaagataggaatttatttctcttttttgttgttcatcatctttatatatacaaaacaaaacagaaggtgcagcgaaaaggaactgttgattattgcagttacttaaattttattttgcataaccaaagcaagaaaaaaaaggagcaaagattaaggtgatgtccgttactttattaaaagcaaaatcgatacgatatttatttttgtacagagagacaacagcgagtgaattgattctcaaagagacgtgtacgtagaggtgtatatatagacaacataaaagagaaagagagagacaaagacaagtgttggggtcaccttttgtggtctctgttggatttggtttggactatcttcacgagattatcctcatcttcccgcttcttctctcctttgaatctttcttcgttgttctttcactttcttaaagaggatgtgagattgtttttggtagttagaaa

SEQ ID NO: 2221 - DNA, 3000 bp, Unknown
  misc_feature (1)..( 3000): cDNA_ID_2990229_gDNA_ID_1620505_Annot_ID_158989 3000 nt of promoter + ATG
ttgtcccttcaagcgcttgagtgtagaacgccgtctctctcgcaaggtcatcgtttacatccacagctcctccctggtcaatctcaacagtaagcttatgagtccaatcaacatcttcaggccagctaatatcttgaagcttatcaagcaacccatctctgttgtatatcgcagtcttcgtaggctcagccaatttctcggtgatctcgttctctgtatccgaatccgaaagagactccgcttcggagtcagtagcatcatcctcatcaatcatgttcatctcatcatctgatactatatcctcttccaatgacatctactcaaaattcgataacaacaaacaaaattagattcagaatcaaaaaagttcagacttttatacctttgggtaaaaaaaaaacttggcgaatcacagaaactagggtttataagtcaccaacgcaaagagagattccataactggttccgttaccttctatatgacaataaagttcgatactttatctaaggacttaagattataaccatgaacaaaattagggtttatcattctattgacacaaaccctttgagaaggaatagaagaaaacttactgttgattacggagaagattgaagaagcttgtgcttgagtagggtttttgagagagagaagagagatagtgaacccgccggcgcaaggaagaagaagaagaaacttagttttaaaggcttcgactttgtaaaacccttttctgctttatactaaaccggaaatctcacaaaaccggatcataccgggttcaaattatcgctcaattggttcccgttactatttataaaccggatctaagacatgaaaacttgtgacaaattgattcatttcattttagtaaaggtcacatgatttgagatctaacatagtataagagtatcattcaacagaaaggaaaacaaaactttgagccaaggctccaaaactctaatctctacgaaacagataaaggactgtgagaatcaatcattgttttcgattgaaccaaactctgaatcttgagttttgcttctgccatatttttcttctcaagctcatctaccaacattttgcaagtgctatctctaggaaccattccttttcgtactgcttcctcaaagaacaagcaagcttcttcaactttcccgctcatacataaccctctaatgagaagaatatatgtcgaaacatcgatactaacatcgtttttcaccatgtgatgcaataatattccaagtagcttcattttcttcttatggcaacacatcttcaacaatggagcataagtctcaacgtttggactacatgattccccctcctcatcctccatccttttaagcaaacgtagagccatctcatctcgtgagtgatgaagcgcagcggaaatcatggtattgtagactaaaacatcacgacgaactccttgattcgtcatgtcctcaaatatctcagctgcatccttaaacctaccagtcttcgacaaaatatgtatcaatgagctataaaacttagcatcaggaacacaaccatcttctttcatcttctcatacactcctaaagcttcagctacttgtttagatttacccaaagaatgcatcacaatagtataagtcacaacattaggattacacccattctctcgcatctcttccaacatttcattaaccctcctaaaatccccttccttgcaataagcttccacaaagctagtgtaagtaacaacatcaggagtgaactcagtaaccttcatcaaatccatcatcgctctagcatcatcaaatttccgagctttacaaaaaccgtgaatcaaaatgttgaatgtccgcgcatccggcttgattgtatcgaaaagcttcagaaaaacttcatgagcatgctctatactattctctttcacaagtgcatccatcaaactgttcatagcaatagtatctgttttcacaccataactcttctccatctctaaaaaagcatcaacagctttattatatttccctgacttggccaatctcctcataaccttactcatcgtatcaagcgtaacaagcttagattcttcattcttgttcatctcattgactaattcccacatcaaatcaaaattcctacatttccccaacacatcaaccattgcattataagtatgacctgaatgcacataacctgtttgtgaatttgcccaaatgaaaaacccgtaagcttgattccaaccattactaaaccttcttagaacttgcaaaaccaaactctctgtaaccaccacatcgcatttactcaactctttaacaacatcctcatgagacgtgtccttcttattcaaaaagtcgcaaactttatcaatatcttccactggtttcttcactacatttccctctgagacttgttgacgactaaacttctggctctcgacccaattcgccaaagaagggataacaaaatcttcatcatctttggaaaccgaactcgatgaagaagaaggcttgtttgatagaaagtctttaatccaagacggtagctccggtgactctgcggcaacaatcggcgactcctctgcagtgttattcgttaccagaaacctccgttggaagattctccgaggtaaagtatacgaaacaagcttactaatcctaagcttagtgagcattttgttccgtttgaatctaaacgcagacttctctcctgtttttccgatcaaagttcgaatcttttagacctaaagcttgctgctttgtgccgggtcgggtcggttcgttaattggtacaaccccggttcgatttaatttaatttagcgtttagatttttggtttaccccacatctgacaagtgacgatttttactgacacgtgtacaagtcattctcttcgtcttcttcctctaaaaaccctaattttaaggaacctcgtgtggtcatcgtcttcgtacctttctgctttctacgccgtcaaaatctaactgctcgacagtgaccatgcaaagctcaatgaca

SEQ ID NO: 2222 - DNA, 3000 bp, Unknown
  misc_feature (1)..( 3000): cDNA_ID_3066561_gDNA_ID_1620505_Annot_ID_158991 3000 nt of promoter + ATG
ggttatattttagattatatttaaaataatctttgtttttttttgtaaatcagagtgattatttctttccaattctctggatacatagatgtaatttttaaatactttttaagtaaattatccacacaaaaaaaagggaagtaaatttagtagaatccttataagatgtgggagaaagaataaaccctaatttttattttgagagaccgagtagccgatttctttttccttgggagatccgatcacaaagagaaaatatgacgatgcccgatcttccgccagatttggtcgaggaaatactttctagggttccggcgacatctgtgaaaaagttacgatctacttgcacacaatggaacgctatattcaaagatgaaagattcactgagaagcactttagtaaagcaccaaaggagtctatggttctcatgttgaaggagcatagggtttgcccggtgaaagtcaatctcaacaagtagtgatggtttgttgttatgcaccatcaaggacaaaagactcgtggtttggaatccgtgtttgggggaaaccaagtggatccaactcaaagttgattaccggagatacgtctccaagttttgtctagggtatatccaaaacaacgaatctcgccgtagctataaaatcttgcggagttggtatagttacgatgacaaatcatcaccgcgccaaagagatttggggtttgaaatatacgagtttatctctgattcgtcatggagagttcttaatgacgtcaatcacgaattcgttataggaagtagtgtctttgaagggaaatacttacttgcttgcttatgatgttgaagaaaattctagagttgtactaatgtttgattttacaacagagagattcaaacgtctacgccttccgcatttccaagatgttggtaatatggatctatcagttgttagagaagaacaactctcaatattacattggactcgtaatacatcaaagatggagatttggataactaataacattgatactgatgctacattgttgtggagactgcacttacacactcaagtcttctcacgtaattgtgttcgagtcttctcaagtctatatatcgacaaggagaagaaagttgtcttgtgttgtaatgttaatgatgatgcgaccagcaagaacatagtatacattatcggagaggacaatggatattacacagaaatccttttcctactccctataaacatacattgggttctacttgaccgtaataaaaaatggtattcatctattttcaattatgttccgcgtttggttcaaatctataatggtcatctcttatttttttcttaattaagtatctgtttttgaacaatgtagagtttttttttctaaccaaaaataaaaattaatttgattcgatgatgagtttttagtggtaaaaatgttgtttaatacacaaatttttaaaaaatggttatttaatacgtgaataatttaattatggataggttttggtaccttatttatggttcctttctacatagcgtgaaatacgtgaagttcaatcggcccaagagttgtgggctaaggcctaaaacctctgttttataaaaacaaataatggtttagggcaaacgtgagaaaaacaaaacaaaaccctaatctctctgtttacagggacgacggagtctttcttcttcgttgggagatcagatcacaaatagggaaccattgatgatgtcgaatcttcctttggatttggtagaggaaatactctctagggttccagccacatctctcaaacgattacgatcgacttgtagacaatggaacgctttattgaaagaccgaagattcacagagaagcactttcgtaaagcaccaaaggagtctctagttctcatgttgaaagaaataagcgtcaatctcaacgttactcctccatctatagagtttaaagatgcacttggcttaaaggattcccattctaattcagaacaagttgatatagtccaagttcttcactgcgatggtttgttgttatgcaccaccaaggacaatagacacgtggtttggaatccgtgtttgggggaaacccattggatccaattcaaagttgattacgggagagtctactccagctttgctctaggatatatccaaaacaacgaatcttgccgtagctacaaaatcttgtggaggtggaaaagtaacgattacaaatcatcaccgcgtcaaagagggtttgaaatatacgagtttatctctgataaatggagggttattgatgacgtcaatcacgactctttggtcaatcacaactatttaggacgttgctgtcgcgtgtctttgaagggaaatatttactggcttgttgatgatgttgaagacaattctagatctttacttatgtttgactttaaaacagagagatttaaacgtctatgccttccgcatttcgaaaatgttggtcacatggttttatcatttgttagagaagaacaactctcagtattatattggagccgtgctacaccaaagatggagatatggataaccaataacattgatactgatgctacattgttgtggagactgcacttagacactcgctttaattgtgttcgaatcttctcaagtctctatttcgaggaggagaagaaagtcgtcttgtgttgtaatgttaaattgttaatgatgataagatcagcaagaacatggtatacattatcggagaggacgatggatatatagaaatccctttcgtacaacctttaaacatacaaagagttctacttaacagtaatagaaaatggcattcaattattatcagttatgttccgagtttggttcaaatccagtaatggtcctctgttattttttttcttaagtatctgtttatgaacaatgtagagcttttttttttgtaaccaaattttttttttttttttttgaattttttgattataaagtgacgaacttttataattaagatactgaatcagtaagagccaacaatg

SEQ ID NO: 2223 - DNA, 3000 bp, Unknown
  misc_feature (1)..( 3000): cDNA_ID_2152183_gDNA_ID_1620505_Annot_ID_158996 3000 nt of promoter + ATG
cacgactttagtaaaatcaactaaattatatacaagcactttaaatgattgttgctttctaatttttgaatttgttaaacattttttagggaatgatgtagaaatctaaaatgtgtgatcccatgggataaaatgtttgggataactaattgatccaaaatgtttatttggtaggatagttttagtttataattattctccatctccatatataattcatattcgaatctaagcattttgttggatgtcaacaccgaatatttcaaggagaaagtgtacaactcagaacaaacgttaaaaaacaaaagacagaacaaacgacgattgtttggattttcaaaataaatttgcactcttgttatttggctttttttgaaccataataatcggacttgggacaagtatgagacgacaaatgcatttctttcatcttattgtatatacattatttgtctgtctatttctcttcacatttaatttgtaggcagttattttcatttctttgttatgcattgcttaaattatcattgacgatttttgttgaccttgggttttgcaactctctctctgcttttctttctgtggtaaacactaaacaattgaatggaagtcttgcatcttttgacttctgtacttgcgaagtatacttaacaaacaaagcttagttttatctttctcttttggaaaaagcatatcatctcaaatctcaataatcattacatggacctcttgattaagtgtggaaatttaaagaatgtatagttttgataatctcaataatccagagaattttatttttgcagttttgatattccactacaagtaaagcccattccatagttgggctttgaagtgaacattacatggacctctagattgttaacgtataaactccaacgttaaaaccattttagttacagacgtgtggacaaacaatatgttgctgaaatataaaccaaaacatttacacaatcttaccaaaaggcaaaagtctaaactagagtaaacaaattaggagaagttgaaagaaacaaaatcaagcttataacagtatcactaaagaaactcataaaactaatttaacatttattgatatgtaaaattctaaaatacataactttaaattggaggaactgattattattttttttgcaaaaggggaactgattattaagttggaaattcatgtacatccgatataactatattattattattagtaaaaacatcatcgtgattacgaataaaaaatttcaaaaggacacccattgcgtatttttgttgttttaatttgaaatctgatctgtaaagctaaagcataataataataatataagtatggaagaggcgacaaagttgtaaatttgcaaatagatacacaaagatgtcaaaccttatctctttcgtttcacgacaaaacacaaccagcgaatattattagaaggtacctaaccttgtacgtatcgtactctttcacttcttcttcttctttttacttatttatacttctttatgtaaattagcatacaagatgcaaatatgaacctgcctaagttattctttgttttgataaaatagtctttaatctaacaaaattcagaaatgatctatttcaaaaacattaaatagtattaaaaaagaaaattaatcttacaaaatttagaaatgcttaaaaatctgagtttctttaaaaaccacatcatatcttaggactgtaaggacaaatatatcaaatgcaacattatatcagtggggaataatggacacagccacccaaacatgcgaaaggacacccgttaacgactaaatgcaaaagaaaattatttattgtagtgcaaatttttggttcaaacatttctaaaaacaaagatttgtcattcttgcaccctatataaaatatcattttgaacaaggaaagaacaaatttcttaacatcaagatctttggtaatatattttaccatcccactaacagacttatttggactaaaaataaaccaatacaaatttcaacggcttaaacaaattgtcattataacaaaagaataaatctattggtacattgattctgtatatttttgcctaaataggtcaaattttttctctgagtagagaaacaaatagcaaatacgtctccttaaaaccagccttactcaaattaagccattctttttttcttcttccgccattcactctcagcctctccttcttcgtttcctaaactcatttttcttcgctctctttagattctttttttctcatatctctccttgatcctctgttttttattctgaggttgtttttcggagaaggaatcacctaaaccctttcaaatctcttcttctaccaaatatatttttttggatgaaaaaaacttctaccaaattctcagattttatttccttgagggttttgtgttttttttgcatggtctagttgatttctgaaatttaagtatatcttgtttacgataatatagaaaaaaattattggtgtttttgtgtgtttataatttatcttgggtcaatgataatagtggacgacgagtcggtgtcttagggtttactttttgtaaagaaaattttcttgttgaattattggctttttgtgaattcgattttctcttatttatataaaacattattgaatttcaacgctattttgaaaattttatttttaatattcatgttgtattagaatctggaatgtcagaagaacgtgtgcaggaacaagaacttggggttggtgtaatagtttaaataaattcttacaaagaataaaaaaaaaatcaggttctctgcaccaaatttttaaaatcattatttaacatattttgctaaattctctaaaaacaaatttgataatgatgaaaattttgattagttctgtgttgtgtttggtgattgcttgaattaagtctgattgaattttagggttatttgagttttgtgtgtctttgagattattgttttacaagaaaaaaaagaaaaaaagagagatg

SEQ ID NO: 2224 - DNA, 3000 bp, Unknown
  misc_feature (1)..( 3000): cDNA_ID_2152168_gDNA_ID_1620505_Annot_ID_158992 3000 nt of promoter + ATG
atcggcccaatgggcttcggcctaaaacctcttgtttatcaaaataaatattgatttaggggctaacgtgaaaagaaaaaaacaaaacaaaaccctaatctctctgtttacagggacgagaccgagtctttcttttcgttgggagatcagatcacaaatagagaaccattcatgatgtcggatcttcctttagatttggtagagaaaatactctctagggttcccgccacatctctcaaacgactacgatcgacttgtagacgatggaacgctttattgaaagaccgaagattcaccgagaaacactttcataaagcaccaaaggagtctagagttctcatgttgaaagagtatagggtttttccaataagcgtcaatctcaaagttactcctccatctgtagactttaaaggtgcacttggttattcccattctaattcagaacaagtcgtgataaccgaagtttttcactgcgatggtttgttgttatgcaccaccaatgacgatagactcgtggtttggaatccgtgtttgggggaaaccaaatggatccaactcaaagttgattaccggagatacgtctccatatttgctctagggtatatccaaaacaacgaatcctgccgtagctataaaatcttgtggacttggtatagttacgattacaattcatcaccgccacaaagaggtttggggtttgaaatatacgagtttagctctgattcatcatggagggttcttgatgacgtcaatcacgactccgtcgtcaatcacaactccataataagaagtggcgtgtctttgaagggaaatacttatatgcttgcttatgatattgaagaaaattctaaatttttactaatgtttgattttacaacagagcgattgaaacgtctatgccttccgcatttccaagatgttggtgaaatggatctatctgttagagaagaacaactctcagtattgaattggagccgtattacatcaaagatggagatatggataaccaataactttgatactgaagctacattgttgtggaaaagagtgcacttagacagtcaatgtaattgtgttcgaatcttctcaagtctatatttcgacgaggagaagaaagtcgtcttgtattgtaatgttaaagatggtgagaccagcaagaaagtggtatacattatcggagaggacgatggacattacatagaaatccctttcgtaaaatctataaaaatagaaaggcttcaacttatccatactacaagatggtactcattgattttcaattatgttccgagtttgtttcaaatccagtaaggtagattcgtaaaagaaacgaaagaaactagtccttttttttctttcttagtttttgtttttgaagacaatgtcgtttgaataatttaatgaatggttttttttttttttttggatatgtttatgattcgattttttgtttggattgttgaacatctgacctcttcatgcttctttgaggccagcgccttattaagctattatctcttgtctctctgttttaacagaaacacaaagagaacatcaatctctctttagtctcttgttcttgttttagttcttagattgaacacaacgttttgtaactaagagagaagagagaagtcttttaattgtctacattttgtttattggatcaagagatggttcttacaacacaacacatacttatactacttgattccactcaattacttgcactctagacttagcaactactagtactagctagacatcactttagacgtcaacaacaactcctagcaactttgcttagctagacattaaaccaacaagacactctttcttacttgcatagttaaactaaggactcattgcttcttaaccatatgccgatcgtcttgaggaaggaagactatgatattccagcatggttcttgttcacttccaagggtccccttgcgactgtgtaattaagatacaatataaactttaaccaaattagggttattttgtcctctgttttctaccttgtgaacggaagtaactagctttctctctatgatggtctgaacatgaatggatttttgagtaattttggtggttttttttatgcattagtgcagaaggcaaagaaagaaacctcaaagattttgtgttggcggactactctaaaacaccatcagaaccattgctaaagttctctcaggcgaatctcccgcagcatcaaaattcaagcaattgttgtttgcgataatttttggtcgtacgtaacatgttttatatatcttattatataaagtataattttcaatctgagtatcttaataagattttgacacgtgtaaaatatttcaacgaattagattttaacattatgttaacatatatatctaaacttccaaacttaagtagtttaaaaggttaattatatagtttctatactataatttttattttattttattacaaatcataaaataaaactagctatctaacaagtttattattcatgagtttaaattatatatgaattttattttaattattattagttaaaattacaataatactaaatcaatattatataaacaaatatatctaattaataaaattgaatatattgaaaatatattttgatatgatttaaaagatattaattataaatcttccaatttaatataaaatttaaaataaatatcctattatattattgagagacatatacatagatcagtcatataggactggttatattttagattatatttaaaataatctttgtttttttttgtaaatcagagtgattatttctttccaattctctggatacatagatgtaatttttaaatactttttaagtaaattatccacacaaaaaaaagggaagtaaatttagtagaatccttataagatgtgggagaaagaataaaccctaatttttattttgagagaccgagtagccgatttctttttccttgggagatccgatcacaaagagaaaatatg

SEQ ID NO: 2225 - DNA, 3000 bp, Unknown
  misc_feature (1)..( 3000): cDNA_ID_3066565_gDNA_ID_1620505_Annot_ID_158988 3000 nt of promoter + ATG
gaaagtgagactgagtatgaaggagaaagggttacgtaaaccgccagggactagttcaatacagattcgaggtaaaacccatgagttcacatcaggggacgagtcacaccctgaaatgccaaacatagaagcaatgctagatgaagttagtcaaagagcgagtcacttaggccatgtacctgatcttagtaatgttcttatggatgttgatgagaaagagaagatctttatgcttagcagacacagcgagaaacttgcaatggcctatggactcattagctcaaacaaaggcacaacaatccgaatagtcaagaacctaagagtatgctctgattgtcattcatttgcaaaatttgcatccaaagtatacaacagagaaatcattctaagagacaataaccggtttcattacatccgtcaagggaagtgttcttgcggtgacttctggtgatagcagaaacagaactaaaagaataataggaagattatgttgagactgcagcttcctcggtggatgatcaaaaggacgatctgacgagatcctagagtttgacggatgacgatctcgaagttctcaaaggttgtttagatctaggctttggtttcaactacgacgagatccctgcgctctgcaagactttacctgctttagagctttgctattcaatgagccaaaaaaatttagacgataagcatacaccatcactccaattgccaattggaagatctctagtcccgtcgtgtgtaaatatctcatattttccgtcgattgattaggtgatctaagtttgatctactctgatttcaattatgtaattggtttgttgctgagtgctagtgttaaacaagaatttcagtgattggaatggactgtgatatatgaagtctaaatgttatcagtttgttgttgttacaggtgataatccggatgatgtgaaagctagactcaaatgctgggcacaagccgttgcctgtactgtccaattgtgcagctgaatgaatcattgtcacgtctgactcaggaatactagtgtatgaacaatctctctcgggcattgttagcggaggaggagatttcagaaaggcattggaaggtctgaatttaactgaacatcaacaatgattctcacttaatttccatgtatgtgtagtagtagtatctagtctaatgatttttatgaacggaattaaaaggtatcagtgaataaaaacatcaatttttttccgcatttacatgatggtctcagcatctacagcttaacatctgacatcttaatagctggagtcttctccttatgagagcattcctcttatttaactggtcatggttctgcggaggtaacttatctaactgtgtctattaactgagtgtgatgcaatatgattatactctgtgccatataccattttgtgaatgattgtgtgttaagctacagtgtaaagcttgcttattacatgtgagagatgaaagcttattgcagagttaagcaatgtcgattttcaatagtttgacaaacagagatgtctcagcttggacagcggctataggagcaatggctatggcaggaaacgctgagcgagcaaacgctaagggtttaatacagattcgaggtaagacccatgagttcacttcaggagatgagtctcaccctgaaatgccaaaaattggagcaatgctcaccatagagcaagcaacttaggtcatgttcctgatcttggtaatgttttgaacttctgatggatgtagatgagaagatctttatgcttagcagccacagcgagaaacttgcaatggtctttgggctcattagctcaaacaaaggcacaaatttgcatccgaagtatacaacagagaaatcgttctaagagacaacaaccggtttcatttcattcgtcaaggaaagtgttcttgcagtgacttctggtgattacagaaaacacaagtaaaagatggaaaggaagattcacattttattgaataagaccctgcaattatacatataagcttcaatgcttgaacaaggtttctaaaagcaaaagtagatacaaaaaaggatggttcatcacaattcaagaacttgttcatttctcaggaaagattgggtcaatgaaagagtgatacataggatcagatctccaaagaagagccatgtgaagatgagaaggagtgagtcgatgaatctcttcaacaagccagatagtagcttcagctttagtaggatgaatgatagaatccaacctctgttcttcagaatcagtaccgaatcgtgattgatcccatcgttgtaagagaacattcgtgaggtaatgtagaggctgaccataaagctgtttcattgaaatgcttaatccaacccagcttgtgaacggaatcaacgagccacgattcgtcgggattggtacttgcttcatgtagtcttgatacatctctgctcttctcagcaacgaacctgactcaaaaaatttcagagcatttttgtaaaaatcaaaacttttgaatcaaaatggtgagaaaggaaagaaacaagggaccattgaaatcgtgtaccttcatcagcgacgtctctgtgagaagtatcgagcggtgaaaagccatcgctgatctcagcatcgacgtcagatgaaccggaatcacctgatggtcgtagttccattgtcattgagctttgcatggtcactgtcgagcagttagattttgacggcgtagaaagcagaaaggtacgaagacgatgaccacacgaggttccttaaaattagggtttttagaggaagaagacgaagagaatgacttgtacacgtgtcagtaaaaatcgtcacttgtcagatgtggggtaaaccaaaaatctaaacgctaaattaaattaaatcgaaccggggttgtaccaattaacgaaccgacccgacccggcacaaagcagcaagctttaggtctaaaagattcgaactttgatcggaaaaacaggagagaagtctgcgtttagattcaaacggaacaaaatg

SEQ ID NO: 2226 - DNA, 3000 bp, Unknown
  misc_feature (1)..( 3000): cDNA_ID_2152681_gDNA_ID_1620506_Annot_ID_159025 3000 nt of promoter + ATG
attttaaaacaaatttttttgttaaaacaaatattattcttactaaacgttttttgtttaaataaataaatcatgtatttgaacttatttacaatgtaatgacactgacattaattatttaggaatgaaaatattaaatcttctaaatccttgcttttagaattattatgtcattacttaaaaggctcaaaatataaaaaaattaaatattattatttatatatctagactttataaaacattattaatatttaaacttataaaaagtttaatatatcataattttttaatattattatataatatatagagttttaaaaaatcttaattctttccgtcatattttgtgactcgaaattttaaaaataaacatatattaatcaattggcaaaaaatgtgtgagttatacgtcccacatgaactaaaatatttagacaatgattcataaatatatcataaataagattaacattaataaaataatgatttttttacaggatgggtttggcgggacgcgatttagcaggacgttacttaataacaaatataaagtataaaataaaaatattttatagcaaaattttatatatactaattttaaaatataaattgtctccacggtgtaccacgggttaaaatctagttatttagtaattatgcatctcgtataaaccagctacaaaaatatcagtggaaggatctttatcagcaagcatattagaaaacattaaaaaatgaatagtaaactatgagtggggaagcaaaagaagagcgacggcttgctattggagacaaagttcataccacacgaactagacgatgcatagtatagatataggttaggcatatgtccatgcatatgttacgtgtagattgaaagggcatcgagatcaacggtggagatggaagcaagtaaaaatagccacgtgtggaaaaagcaaaagaagagaagaagaagatataagcgacgaaaggagagaggatatgtttcctttgtgatgggaacatcacaactctgtctctattggtacttctagttcactacttgtctatgttttttctttcagtacttagtttcccccacgatttacacaactttcttctgctcgtatttacagattttgaagattatttatacatctttatatagaactacacatgaaatcgtatgaaagcatgcatgaatcatgattcatgtgtgtgaaaattgacggtatgaagatgtgtataaattttatacatctgcgaaaatcatatcttgtggccaaatatcgaccaattggaacggcttgcaaattctatgaaaacgatcgatatgaaaatctgatttacatatataatagtattttcaattaaaaatcattttcctcaatttctatatatgtgtatttagcatatatatatatatatatatatcaaataaaccaaataacttcaataataatttaaatatatgaaaattaaaaaaattcactactcatatgatataattcatcactatagaacttataaaataagatcctggtaaaaaaagcatcaatcttgtatttcagtagtttataatgttaaaatatatgtaatcaaacttctcatatttttattaaaaccacacatgggctatctagctaattcacacacacatatatatatatattgttttcgattgtcatgatgatcatttatccacgtaagcagagacaagatgtaaaatgtcactagtttatagggagtggagtgggaataagtaggaaaagggaaaaaattaaaggaaaggtatacataattttcaagtcgattttgggttgataattacagtgagagggagacaacacattgcgctatacctaattctaactagtttcatttctagactgatggaccaatcatatcactttctactaatatcgttagtttgagcttcataaatatcttttatcacattttattttagaaaggttgttgttagttctatgcatctttttaaaccacacgaagtttcaaaaatattcataataatatttacgcctttataactaacatattcaatttcttacattttatcatggacaaaaaaagagagtagttcctcaggagaaatacaaattcgatatctaaaatcaagtgttagtaatctattggttaatattttttcaacacaaagattatttcatggtaaatgcattttttaagataacaattgtatgttcgaacactagtttagattctctatatgattttccgatactcaaagaaactatacactcactttcttaacaaatttattaggccaaatatatactgtttcaccggagatgcattcatatttactatggattagataacaattgtatgttccgaacactattttagtttaatttagattgcctatatgcatgatttttttataaccaaagaaaatatacactcactttcttaacaaagattaaataaagagataatcataaatggaactttgtactaacagaatcttgagaagaaatttgatttgagttttgttcttttttttttgttgttttaaatttccacatgcctatactttcgtttgtttatgtgacgcttttgtacgacaaaatcaggtttggattcgtacttcttttaggtcaatacattcttttgtttaattctgaccaaaaataaagaaatatgttgtttaataaaaatgtaggatattgagagtcgtactataataaaaaaataaaaaaatctcgaactttgatagtataagagatatacgattaaatcttgaacttaatatcctatatttttctcaaactatacttagtttgtatttatacttgtatatattagagtccacacaaagaaaaatggataacaaataatgacatcaatattttgggaacccccaccatgccaaacccaactccatgttacaaaacaaaacaaataaaatttctttataaaatggcatcttctcttcatattttttaaatctctcatctcaataaacaaacactaaca

SEQ ID NO: 2227 - DNA, 170 bp, Unknown
  misc_feature (1)..( 170): cDNA_ID_3066577_gDNA_ID_1620506_Annot_ID_159026 3000 nt of promoter + ATG
tccttcacattgcatgtatgttcaatggtgagaacattgatcttgtgaagcaaatgcttgtcaatagtgacttagatgtgagtcttgggctccaactcttgcttgataaatctctcattcaaataaatgatgatagagaaatagtcatgcatagtttgttactaaaaatg

SEQ ID NO: 2228 - DNA, 3000 bp, Unknown
  misc_feature (1)..( 3000): cDNA_ID_2152700_gDNA_ID_1620507_Annot_ID_159032 3000 nt of promoter + ATG
tggtgttagttgcaggtgaagaaacagagactttagccaaagaaaccctaggaacagggaaagagaaagagatccttggaggagcaggatctggagtacaagatgctgataacttgagcttccgatctgatggttgttcatcagaaaactcgtactggtcagaaggaggagtgtaggagctgcttggtacatcatcagattgtgagcctttgtaagaaagaggcggtgatggcttgtgagtggtaatggagggtgttgtagctcttggggatatataaggagattgcaaagcggaaacaaaagcagaagatggtggggacacaagagaaggtgaatagaaaggagagtttttgatacttggagatgaatctgaagcattattatttgcttgaagaagatcttctttacctttcttacttgaagagcttgctggtgatgaagttcttatggttaaaccaactaaacttgcttcttcttctattcccttcattactccttttacttctttcaccaaacacaaattaaactcaaatgaaagctctcacctctcagcttcaaaaggttatgtctttatctctctaacttggtaatgaatctcataatggtgtttctctgacagatgatattgaagtgagtgggactgagaggagatgagtcagaacatgaatgcaacagttgatgcagttcaatgagattgaggtaaaatctgagaaactgcatgtgatgtatctaactcttccattttgtggggtccctcttctacaacactgttgaaacccaatttgtgttttcttcttttctttatttaatttctcctcctcctcttacttcagatttgaccaacaacaccaagccagtttcagagagtctctgcaacaatggagaggtcacgggtcagaagaaaaatcattgctttacattgagtttgtggtctaatgttcatcatcattaacaagattgaatctttttactctctagctaggaccaacaatgaaaaagcaacatattagtcaaatctttaaagatgatttcttaaagacttacccttttgtttgatctttttcagacacaaggcaaaaaaagacgtgtcacttcccctgcatatcttttcattaccaagcctgtctctctcgtctatctttctctctgtgtttctttttgaggaagagcagaagattgtgataatgaagagggagaagaatctggagttgtgagttggatctgaaagtgcttatggacattaatttgtttttaaaatagtgattaaagaaatggttaagagagaagcagcctggagatggttaatgtctaaacatgtaccaatgtcattttataatgatcacccacttaatcaaaaaccattttataattaacttaaatttataatcttggattctcctttatgtcatttgtttttagctctcctctctctcttctctcaacctcctctgcattttctggaaatttttaatgagtttttttttcttctttagtttaccaagaagactccagtttttatttaagatcgagttattagagaagtataaatataacatgggttacattggatttaagagagttaaatagacaagagtcagatttaagacattgaactttgagcttaaaagaggttgtaggattgaagaaagggaaccattttcaattttcttagtactttggttgtttgtcatttactgtttgtattttgtggtctatagaaaactccaaacattgtactatattgagtattgaatcatataatactatcattgctgcaattaataggagaaaaatgtcaagagaatattttacgtaaaacatattttgggttctaagtaagtgaaattccttccactatgtgattatgaactaaatttctaacaatagtactaacataacataagtagtaacctagtagtatttgacaatttttcttatcaataacattttagtatattgtaatttgtaagataaactcctcataatcgagtaattatcttttttttttaattcaaggtggtgcatgtatgtatgtgtacactgacacaacatttgaaatctgatttcacagtgggaattggtccaagaccagtccacttgtgactttttatttatttaccccacacattttcacatttatctacaatcataagggactttaaaaacatacacattacacacacacacacacaaaaacaaaaaatttaccatcaaaatcttggagtgtgtgacgtatgaacaaaacaagattgatactgtatgtagaaaagtctcgttatcaaacgatgtggaagcgtttatcaaacgctcaaggataagtctcgttgtttccatacctaaaaacggcaaccactgtatatagaaaagatgtaaacgtcaaaactgaagaagttagaaagacgagggtaaattagtaaaatagtcgagatcatattaaagtcctaacggtatatcacacaccgttgaattccagatccgaccagataagatcacgtcgaatcgaacggtcataaaatatccgagtagttgctgaagtatccagcggtttcgccacgtgtcccgaccatgtcgctcacacgttcgtatttctctattacaaaaaaaaggaaacgaatcaaaatgttttttgatcgtaaccgggaaaaaaaaaacgatttttcgcaacgaaactttccacaatcaacggatatagagagagatctctgcgaatcgtttaaatcgtcttctaatttcgtttcggtctcttcgtaaaggattcacctttgagtggttttgcgttccattttattaggtacgtcaagctcgaaactttcgattcattggctttcgtaaatgtgattaatctgggaattgagttgaatttagagaaccctattgcttcatttttgttttcgtattttggttttattgaatttgcctctggttcttactggaatggtggttgtttagtcttgagattgatcccatgtgaaaagttagtatttttgtggcgtcgtcatg

SEQ ID NO: 2229 - DNA, 3000 bp, Unknown
  misc_feature (1)..( 3000): cDNA_ID_2152718_gDNA_ID_1620507_Annot_ID_159036 3000 nt of promoter + ATG
tatttaagagcacaagagatgttatgacttaaatatattaacttggtgcacattttcttgccattaagttatcatctaagaaataaaattagttaaatctcctaacattgtcactaaacttaaatctaatttttaatttgttgataagttgtccaagagaagtagtaatttgttttcatgtacgagttccacataatcatatgtaacttgactaacttccatagtccaaactccaaactaatcaatcagattcgaattcaagtgccactgatcaatatccaaataaactcttcttaattcaggttctcattagaatttgtatcccgacaatatgtaacactcattgatttttacactcccaaacaactcaagactcaagagtgtgatcaaatgttgattagtgcttaagcatgagatgtttggaagaatatgaatcaaatggtgagatgtgaccgagaagtcttcctcacataaatctgtcttctctcgcttataacgatgtttgcgtgattcaaattgataaaagtatagcattgatattacacgaagctgtcgaggcatatattatgctaattacgaatcgaagatcggttttaaatgcctttgatccctcatatacataaatatatagatataagtacaaagtcgtatacggtatggatgaaataattaaaagattgtgcacatgcatacatacattgcatgcatgacactatctatacgatttggtttgggttaatctctttcgtccacgtcgaatcgacgtactaactattttgtatacaccacttttgcatattcttacttccctttttttagtatatttttgtgttcatgctttttcccatgcttgcttatttaatttttcgaatttatagtttctatcataaatcctctgaagaggcgaagataacataaactatgtaaattttttaattctatatccaaaagtttattcgagttttcaaaactacatatagtaaatagaattatactagaacaaaaataagagaacaattaccacaaaaaataagagaataaaggttaaatatttattaatttgatattattgtattgaatgtggataggaacatatgtagatgcgcgtgtaagtaaaggtaaaatatctaagcgcgtgtgagtttgtacgaaattcgtaaataagatttcacgaacgtacaaatgatttgcctttggttaaaaaggttaaaatagtaaattaataatccaatacagagagtggaggaacaacggccccaagatttttttttaagattgatgtgattgcgacgtgtcgcttgcttgtctgctatgtgggccccacatccattgctacttggtaattcatttttgagcttaattttttagttttgttaggacaactttaatagatcttgaaatggatagctattaaaaattggattgtaaaatgaatttaacaaaggtatgatgattttatattcaaattccttatattattatgaaacctatgtaattacatttttatattttgaaattagattatttttcgtataaatgtttttgtatatatatattccataacattttaaaaaattatttttacagtttacaaatcatcagttatataatgagttatttggatgtttaaccattaaccattagtttcttttaaggattttagtttcagtgtttttgattgcatgtatcttaactattttgtttttctaatgacaatatgtgattaagaaacaacaagtcctttttgcatagaaagccaacaacaaaagtaaaacatttatcggaataagagaatgttagcaaacaattcataatttagctagctatatcaaaatctatacaaaagaaaatgatcaaaaaaaaaaaaagatggtggagtgtgataataattgaagttagtgtggacactttcaatatatatttcttcgtcttgcactcatttgtttttctttattttattcacatttagtgataatacgtatgtggacttatatggaacaccaaaattattttattctatagtgcttcgttcttcttctctctctcaatctctttcttctcttcaatgctctcttctctctctaagaaaccacttttttcttcttttgccaagaaaatctaaaggtttgtgtataccttcgtttcatcaaatccatcaacacttagtttcgtttcttgttcttgtccttgttttaaagtttgtagatttagttactcttctttttccttctctttgatctcttatttgatcttaagatccaaatcttgaaatctacgagattggtatgtgtgcatatgtatagatttacgagtaaaaatatcactgtttcctcaaactcttttttttcttcttcccgatcttggcttttcatgttttggtttcttgatttctagattttcagatttctttctttgtgttgttataaatctcatctcttgttgatttctcacttcttaaatccatatggtgtctttttttggctgatcaagaatcttcaagttttttcttcttacaaatgttttatgatcttgaagtttaagaacaccatctgttttgtttatattacttagttgagttctattattgtatttggtagcttcttcatccatttacggatatgtcttaatccactttttcttatgatcactcaacataaaataaactctctcgaatcagattggtaactgaaaccttttttttttttttttttgcgtgcgaataattgttcctcttaagtgagatttcacttcatcaaaatcaaataaataatctttatccactaatcctagttacttttgtgtgacttcttcttccacatgaaataatgttcttctactaagaagatcatcaaatctgagtaacatgtacttgtgtttgtctttgcagaaggagtaaagagaagagtcagatttggataggtgatgataaagaagatctggtgttatgcagaagtatttgggaaacgaagaggcaaatagtaacagtggaagaatcaaatg

SEQ ID NO: 2230 - DNA, 3000 bp, Unknown
  misc_feature (1)..( 3000): cDNA_ID_2152817_gDNA_ID_1620508_Annot_ID_159043 3000 nt of promoter + ATG
gaagaagaagaaaggaaaaggagtacaagagcctccagaaaagaggaccaaagtttcaaaagaaggacggagcattcgttgtggacgttgtagtaccgaaggtcataatacaagaagttgtcctagtgtgggagtcgttaacaaaaggtggccaaagaagacacctgatggagttagtcagtctatgagtattggtaccaatgaaggaacaagccaacgaccaagccaaccatcacagaattctcattttgactaaggtaatataggtttttttcaagataattgtgcttgtcggttgctctagttaatcatgttttttttgggattttggcagaatttaagtggaatgaagaaaagtaatgagacgtaagaatgtaggcttttgtttaagtctgaagagattgaaagtttttgttataatctcaagtgaactcttaagttgtgtccggattaaatgataattgttcgaaacttggtattgctatttaaggtttcttttggtctgttttaacaatttcgatctcattccaatttcaagtgatgaaaatactaccagacaatctcataaatattacaagttcaagacaagacaatacaatctcttaacataaatattactagatactcgtagcttaatatatagaatttagtgggttttgttaccaagccttagatgcttatggaacattgtcatcgtgaaagaaaaagaaagaaaaaagaagaaggtgatttaagacgacaaaaacgacgtcgttttacaaaaatttgtttgtctcttctttcatctaaacgacgtcgtgtcatacgtggcatccatgtgagcaaccgttaacggtttcgtaacaccgtcacggcttaggcatgtattgacatgaatggtgtgagtttgagatttgaatttgaaaatttggtttgttaatgtatggatttgcacaacagtaaacgttgggtatgaattgaacatactactttagctcgggtatgaaatgaccgtttttccaattatgctaacaacttttgtttgtctccccgaaaaatttcaatgctatagtcaaaattggttaacgtgattggacgaagagtcaaatttctgaggaaatatgggagttattgttttgagttttggtgtaaaactctgatttgttgtttagtagaacgattctaaagactaaacagtcatctcttggagtaggggtataactttccaaaatgtaatttttaccgtgaaaaattcaagtagaagaagaaatagaagaaataggcaacaaggccaagatgatgatctctttgacccacttatctatgattttccggattgatctttcgatgagttgctttgagaatttcagcatgattgtttgttccgaatatataaaatttatgttatcttgaatatgatcgtttagacttacatatcttctctttattcactagcagaaaattacctttaatgaagtattcataagatctttttgtttgattttcagcatttaggaacaacaatatattgtaaaaaatttatacgtttgtcgaaaaatcgtcgaaaatattccgaatttcgacaaaaaatttccaatgattttttattgtttcttgacgaaattccatcaacatttcgacaaaatatttttgacgatcaatttcgtctggaatttccaacgcttcggttggtcaaaatatactatgctttcttgtagtgatgaaactagaagactgtattcatttgaacagcttggcagctgatactcgtttggtttttcttgttggtcccaacttggcaaatcggtactattttcttcgccatttggtaagattcgtcggaaaaacttccggactttgggttctgatgaatttcaacaatgttttctgttaacaatttttttactattttttgacaaaaagtttccaacgaattttcaccgtttgggtaaaataaccaaaacccgaaaaaccatactggaccgaatcgaaataaatggtttggttgagttatgatttagcataaaactcatttggttttaatttttataagtttttggtttatatttggtttggttaaaaccgtaaaaccgagtgttttttatttgtttttgactaaaaataaaaataattatatatatatattgtccaatctatattgtgtttaataatagtattaataattgtttctttattggacttataattattgatcttttttgtaatttaaaaaccaaaaattaatattattaatttttttctatatctgaattttaatttttaaattatatttaacttattggtggatatattattttattatattttacttttatttatgtataaaacttataaatatatttgtaaaaacatggaataaccgaaaaacccgaaactaagattcatataatttcaatttttataaaaccgaaaaatcagtaaaaactataaaacggaaccgtaatcaaaccaaattacaaaagtttttatatggtttaagtttttttaaaattgaaaaaccgtaaaactaaaaaggcgaatcgagatcaaactgaaattcacagtacgtccaccctagttttttcaacgaatttccgacatatttcgtccagaatttccaacgcttttgtttatggtaatatgctataatttcttgtagtatagaaactagaggagtgtatttatttgaacagcttgacagctgatactcgtttaatttcccttggtcccaactcgacaaattcgtactattcacattttttttttgtttattcaccaatccataagtgtactatgtaataacacaaataataataaaaaaattgtcgacacaaaataaaacagagaaaaacagtaaaaacactaacaaaacgcaaaatctcagtttcccacttgaaagagaggaaacaacaaaacaattcgataaattgaaaaatcaaaattgaagataaacgcaaaaaccaattcttcgtcttcttcacaaaaaagatagcaacaatcgaagaagaagagcttgaaatg

SEQ ID NO: 2231 - DNA, 3000 bp, Unknown
  misc_feature (1)..( 3000): cDNA_ID_2152848_gDNA_ID_1620508_Annot_ID_159049 3000 nt of promoter + ATG
ctatgaataagatcattttggtgaagtaaaactaatcgtcgacagactcgaatctgcttatgaaatgaattaaactctgacaaaaagaaagaacaatcttatttctctattcgcaaccgcacaaatgttggcgctgctgtggaaataattacaaaggatcatcaccacctgattcttcattgattgctcaagtttttgatgacatatgaaagtatgtctctgtggttgaagtaagcgagttccacctatgcacgtttacccttactttacaatgaaatctatttttcttcaccaaacaacattttgaacaatgggagtggacaatatacctcagtgtcaaagcggactatgcaggtggaaaatttcccagtgtctgtattggtagtaacatcttccccaggtcttatctctgaaatatcgattgggagatggatagtgtaaagctccttacctatcaatccaagggtgtctgcatcctcactagacttaaaacataatgggatgatttccattcccaccaaattactccggtgaatcctttctaaactatttgagatcactctgctttaacgccctgtaaaaacaacaaaattttgcctcaaagaatttaggacacaaacttcagagagagaaagagatatagagggaggttcaaacctgtaacatgggtctcttggcagctaaatcacgggagctaccactaccatactcagctccaaccagaataattgtggcctaacaagctgctttgtatctctgaaaaaaaacagacattatcattatacaatcagtattaaacccacaagatttccttgggaaaattaagccaagaaacacaaaccatggcagcatcgaagaaaaagattttcacccaataggaatgtgaactgtcttagggcaaacttatccatttaatagcttgttaacaagtctgatattcacaaatgttcccaaagccataatttcattgttaccgcatagacttccatatgagttgaaatatttgcggttaatctccggtgattctaaatcgtgtttcccttggtgatggaattagaaccgtcaaatggtcatctgaccatgggctaagcccagtccacaacattatggacagtccatggtcgacccgtaacgaaaacgggttaaatggtctaaagaccaattatgtccgcggatttaatgggctagcccacacggtctatggttggtccatcaattttctcaacacatcaattttcttctcttctctatctcggcgacgaagctctctctctctcgcttcgacctctctctcaactcctactcccgttagttctactagaatatgaatccgttgattagaataagttctctctaaaatatgcgttcatatgatagtctcattgattttattctctaagtccttatgcaatttcatcgctttgttattttctgttccttaattgtgattctgcatatgctttctttgatttcagcttgtgggtttgtccaaatttcacttgtttgctattctttgttattctctctctcccttcctttgatgccaaccatgtgtttgatgaaatgcctcacagaatatgtagagtttggttttggtagagcttgtaattacttgtgtagagcttggtgtttatgtatggagctaagtgtatgaacgtttagtgtgtgtttgctaatgtttatgaacgtttagagcttgtaattaagtaatcgtttctcaccacaatccatcacttgtttgacaaaacgttgttttgcaggaaacggattagaggtagcaagttcatgactcattggtttattatttttttgcagagagtggccatacatggaatcatcggctttacaagattggcgatcaaacattggcaaataatattcagacatttgttaattcccaaatctaagcttaactcttttgatgaacttattttcagacattggcaaataacattaagttatgggctgaccattggacatggtccttaatggttttggacaaattttcagaccattgtccaataaagatcatccattaaaactaatggtccaattggacatgaccattgggctttggacagcccaattgacacttctagatggaatcataagtagctcgaaacatgtcgggtaacacactagagtgaacaacctgtaacatattcctatagaaagttcaattaatgtgtacctggagagaaatacattcgatgattctaagttgcaagtacctgagcaatttcctctatggtaggctagatatccctgaggaagacatccttatctttcttgttctccccaatatactctgtctcaaagtcaatgctaacctgtgaaatagaacacatacatatattggacttgtacaatcgaataggaaatatattggacttttaaattttttccaaattgtgtactgttccaaaaaggacataggtgttggtgtcggatcccgcaccagtagtccaggaccaaccaaaaattgccacataagcatgagagaagcccataagggatacggcccatgagaacctcgaattgagagggaagacatggacgaggtggccgttctgcgggatggtgacaaggtcgaaattaaggacagttcggcttaaggttctcgggccgggtatcaaagcccacgaagtccaaagtcaattcaaattcaaacgtttgaacattaaactcgaagactgaaacagatgcagttaagggagaaatattatgtataattgagaattaaatgttatgtactagtataagtaagacgttgtgagccatgtaggacacatgcaatttttctagcaaagatactatagccatttttataccaattcgtagctttatacatttgatttttgtcctcaagaataatccatctcactaaataaataaatacttgagtgtgtgaatccgacattcatattttggcgccgtttgtggggatggaggattcttgagtcatcagattttttcaccacattttcgagacaagcagca

SEQ ID NO: 2232 - DNA, 3000 bp, Unknown
  misc_feature (1)..( 3000): cDNA_ID_3066605_gDNA_ID_1620508_Annot_ID_159045 3000 nt of promoter + ATG
aaaaaaaaacctaaattttataaaccataaatttgaatgaaaattacctcattttccttcctcacaatagagattatgagctggaactcctattccactaatataagctcttcacgatagatgcttatggaacattgtcgtcgtgaaagaaaaagaaagaaaaaagaagaaggtgatttaagacgacaaaaacgacgtcgttttacaaaaatttgtttgtctcttctttcatctaaaacgacgtcgtgtcatacgtggcatccacgtgagcaaccgttaacggtttcgtaacaccgtcacggcttaggcatgtattgacatgaatggtgtgagtttgggatttgaatttgaaaatttggtttgttaatgtatggatttgcacaacaacaaacgttgggtatgaattgaacatactactttagctggggtatgaaatgaccgtttttcctagcataattagtcctaaagatgaagataagataaaattgttagtattaatgaatagtcataactgataaataattgtatgcgataacaatttgctaacaattaattgtagttgaacacaagtaaactgacataagtataaattcgtttttttgttttaacattttacttgcaaaaaaaattatttatggtaacaatttgaactatgatacgtccttagctgccagtcggttgagcaattttttttttttttttaatatcaggaggttctgaggcgaaacctgtaatttccctaaacccaaaactaaagtatgtaatattaatttcatctcaggcgtcgcagtcggttaaacaattgatacgtcagtatttgattttgaggtggcagctttcatgcatctaagagcaacctcatcaatggtttctaaacttaagtttcttattttaaagagataaattttattataaaaaaatgtgtgagtttcttgattaacaagaaaccatctccaaaataccttatataaaaaaattttaagagaatttctaaaatatttaagaaacacacataattaaataatattatttttgttgtttcaatgttaagaaacttatatttagaaaccaccaatgaaattcctataaagatgcaatccctaaaatcttgatagatgtaatgttactcgatagttcccgtcatgtcaaaaatattggtggttcgtaactaaaaccacctgacatatatcttatcgtttgacttatcataggcatgaaaacattagaaaaaactcttggaaattataagttctcttatccattattgtctatgccacacatattaaatactcttaagagtttttgatgtgcggatcatttgattgattgaccaagaaacttaacacaacaagtttaaagagttcccgacctctatccggtacgtcgcatgagggtctctccccacaaaattcactatcaagcatggcccatgcttgcatgagggcttgaacatgcgacatagaaactagactgatcgcgtgactagcccccttatggtatgtaaaccatcactaaagtagtgtggtaggtaaatttcgatatatttttccttagttcatgcatctaaaacatttgaaacaattatttttacatcgtgaaatcaaaacgtagttattgtagaaatcggtacacattaattttaagtaagagaaaaagtcgaccaaattagcaaattctattaattattatcgttcaaaaccgcttcaaattcaaaaagttccatatgatgttacgtcattgtgtgggacaatgcaaatgtcaacaactcagagtgaacaagtcgccttcttcgccaacgcgctcacataatttgtgtaatattttatcttagtgtttctagaagcttgactcgctcgcatattgcaattctaccaaatcatatttttattttaatgaaatttctatgattttgacaactaattcttgattttgaccttactatatttcttgtagaattagatagggtgcaattctcatagaatgtttctttaaatttatttctaactaatattaaaaaaaactataatatattcggatttagtcttaagaagatttaccgttacttctaatgatatatttgaatatttgatggcaaatcgaattcaaataaccaacaagttgttggtccaataataaattttttagataaaggtattgagttttagacacgttgggagagatttcttcgtcaaataaaatgaatttattctagtgtgggtctcgcatgtaggaaatgtaggtcttttaattttgaatttccaaatattcaaaaaaaaaaaaaaaaaaatcgaattcaaataactgaaaattagtgtaaattatataatagactatctattagtttctttgaaaaacatatagtatagtaatagacattttgataaatcttcatcttttacatttctaagtatccaaatgcttttccaaaccatatgttttcgggcttttttttttttatcaattcggtaagaaacacattgacggcattaattaacataaaactaataaactacatgttttctatgtttttttgctaatttttcctaaagctaatccattagaaaattttactattctaactatcattgtatgaaaaaggtattatctaattgtattcacaattctataggaaaaaaggttaacatgtcattttcttctcctttttagccgtccactcacgactaagaacttattcgtctaaacatgaattacatgacaatgtcaaagcgtggttaaaacttcagaaagaagtataaacctacctcaagaagtcgtcgtcctctttctctaattaaactattatttcccataatagaaaacactaattttttgcctttttggtaaggaaagtaacatagttgttagtaaatatgaattaggaaataatatacaaagtcttggtcctcttctcatcgactttaaaatctctttctcccattacaaaccaaaaccattagaagatttcgaaaaagaaaaaaaaacacctccacaaacaaaaca

SEQ ID NO: 2233 - DNA, 3000 bp, Unknown
  misc_feature (1)..( 3000): cDNA_ID_2152837_gDNA_ID_1620508_Annot_ID_159046 3000 nt of promoter + ATG
gtacgtaagatcttttaatgttcctctcatgatcttggggggtggaggttatactcttccaaatgttgctcgttgctggtgctatgaggtttctcctttgtaacttggactttgtgtttttcatattcatgcaattctttgttctgaaaaagtgctttttaattgttgcagacggcgattgcggttggagaacaacttgacaatgatctcccaggcaatgattacatgaagtattttcgtccagattacaagcttcatatattgccaaccaacaggcagaatttaaacacacgattagatattataacaatgaggtaaccttttaaaaaggctgatcagtttggtgccaatatagttgagatgtttacaacttttgctttctaaacctctttgtaaatccattatagggaaactttactagcgcaactttctctagtaatgcacgcacctagtgtaccgtttcaagacactccatcaagcagtcaagccactgaagcggtaaaatctttattcattcgttcattactactttatctttctcattactggatatgttttaatttgtccaatgaggttattaagattcgcatgacatatctttaggcggaagtggacatggagaagagaaatgatccacgcatttgagtgcaatccaagttatgaaccagactctaacaacgattagcattttcttggataaggcaaatggtaaagtagtgtcataggagaaggattcttcatattcaaatttcacctttttctgagtttgttcttagagcatgtacagaaaagaacgattgatgtataaaatcaacattgtagagatactacaataacattcaaatattatagaaagcaacagatttttgttgacaaaagtctccacaaattacatataaggcacattctgcaacaattcaatgtaagaaagagagaacaaatgcatggtaagttacaactaatgatatctatatctatatgcagcctgttcaactaggaaaaatcaacaattacacacatggaatttttcattgtgataagaaatcagattctttagtcccttagtcaataaaataatcacgaaccagcaaagtatatgactcaacaacaagagtcctgatattgcatatcccaagaccataaactcatcacataatatatgctaattattaccgaaaaatgagcttcttaatgcctaaaattctgatttgaacttggctcgtacgctcataatttaaagctcagccaagaacatcatgatagccaacagagatgcatacactttcttgaattaaaatcccagatcacaatgaagtaaagttatctaagtaaaatttaattattttcaaaaaaaaacaatattcatggcttttgttcatcattcctttcttgaatcaaaaggttatatatttgatgagagtaaagaacagaataatgatacaatatacattctcttatatagagatgagatttcctaatcaaagataaaacctaaatgtaaatcatatatatttgataaatgtaaatattactaaaactaagatatgataatattttagatccttctgcaatcttcatgatttccatattcttgggcgatcatctcaaccatcaatgattgatttccagtttccccaataaaagtagctttaattcaaatcataataggataatcagttcttaaatactttggaaaaatatatggataaaatcagaaaaataaacctctttcaaataggaataagaaaaaaaataggaattaatcattttgattttctagttgatgtattgatcatatagttgagtattcttataatgtaaattagccgatcaagatttaaatatactttttaaacgtttctttttaagctgattaggttttagaaattctaggggaattagtttcatgagtttttataattttgttttgcaaatattgttcaaaaatcaaaaatcattaaaaatctgaaaacatatttatggcctaaaggctaaaagttggatataatttatttattttcggttggatatattttgcttagttttatcccgtgtgtattttttccttatttatatatagtaaacgagaacgtagacagaacagagttgggatggagacaaagaagagaagaagaagaagaaggagatgattttcttaacagatgatctatgggcaattatacttgcgagattaccactaacaatcatcaccacttcaaaactagtttgcaagcaatgaaatcgctcatagaatctccctttttccgcaaacttttcaacacccaccatcaaaactctcattcttcatggtcaatcctctgtagagtcctacctgaagaagtcgtggctcactacgaaagcgagacttggggtctttcacgatctctaggttcttacatttcttctttcataacccacaaattcaatactcaattcccatacgttacactcgtcgtggcttacactcatgttggattgattttgatcagttcttgcaacaaattactaacttactatgtggctaatccgatctcaagacaatgtgtcgataatatatcactaaaattttcttcaaaagtttctctaaactgtattacaatgttttcacaaactttcatcgatacctaaatagtttatatctttattttcataaaaatttgtgattaaaaataaaattcgttagaaattagaaattttattaatctttgtaataagaaagtaaacttataacaattttaaagtatctttttaatattttccattttaattttagttaaatacatatttttcttcctatatgattgattgcatcttaaatcgcatatcttaaagtggcagaagagtaaataaagtggtcatcaaagggcaaaatagtaaaaacaccacctcgactctttttttcttctgtcttggacataaagcttgattcaattccattccttattgttatatacacatctctgattcaactccaccgaattcagaagatcgaagaagatg

SEQ ID NO: 2234 - DNA, 3000 bp, Unknown
  misc_feature (1)..( 3000): cDNA_ID_3066632_gDNA_ID_1620509_Annot_ID_159058 3000 nt of promoter + ATG
tatacaagaaatgagatcttcctcgagaacaaatgactgttgaagtcagcccgcatggagcgtgttatggaagttattgtcactgggagctaaactttcttcatcatggcggggtaaatggtggatgacttgttcaaaaagaaacataagagaatgcttggggatccgcacaatatcgtattatgtttttaagaagaaagataattttgtttgtttgagctaagtgggattaatcgagagaatcactgtttttctattagctaggttggctggttatagaagacaagttatcatcgagcttacacttcagcttaatcactgcatgtacatggagcaacgaaagtatgattaaagagttttataatcttaaagtaccacaagtggtccaacctcgaagaaatatgaataacacatgaagtatgaaagaacatataagcaaagtgaaaaggtaaatttgggattttgcgattaaaatacttgaactggccaagtaagctaaaggctaactaaacaacaaggcaaacgaaccaactaaacaataaaaaaatgataaagataagcacaaaagattaatcaagatatatataacggagcatgggtaaggcaattgataaggattgattactagctagtcaatcccaaatgcttgaaccacacaattatcaaactcattcttaagattttataggatcataacatgaatcataatatttatatctgtactttgagtaattcatttgcatgcatagatattgggccttaatgggctataacatatatcaaacaagttggcccaaatgcaaattggctcacttaaaaagaagaattacgagctctatggtcagagtattaacaaaacccattctttaacatgttttttcttctttgtgtggcttttgttatttggttacgtcttgcatgagctccagttttcaagtatttgtgtatctccagttactaataattgcagggtgtttactggttgattattggtttttcagtattcatgtattttcgggatagatagctaatcatatattatatactccgatcaaattatgaatatcgaatttgtttataatattatcgataggattaaaatattaataaaggtaaaacagttttatgaatgtatatttttgttgcttagttactaattcgtttgtgtctctttttcctcatgcatggaagtttttggattagatatggaatatgaaatttttattgatggtggctcaaaattagcacttcaccaaagaactacgatttttcgcagttcctatttttccggtttatcatgctgttttttttatatatatccgtcgttttataacttttgttttccttattttatttatattatatcttatcggttgatccgatcagcttacaaagtagattacttttgatccaaatagaattgagcaaccacattgtttgatctgagtttggaatgtcttccgactaccaaataaattaattaggtcaaagtacaacttacagatttccaaaagtaattatgtttttgtttacaaagagaatcgaattcggatatgaaagtttcacctttcaccaaattttcctctaccaatagaccataaaagctttggccaaattattttgtaaccgagttcgaaaccttggattaatcaatgcccaaatatttgggttgtataccgttcttttaatattaatgcacctgttaaaatatataaaaaaattactatttttatctattaagagaatatatgacgattgtcaactcttataaaattttggtagagaatattttgaggattgtcacaacttttaatactttagttgatacataatttagatttttaataaggttatcaacgtcatcaaaaaacaaaagaccaagctcccgtaaaatcgttattctatatcaatctcaaacataaagaccaaacaaaagaccaacctctacactattaatcaatttgttagttattctatatctatctcaaaacaaaatatacaatccataaaatcatacactacaaagttaagtctttttgtttgtatttttttttcatttactaatagcaagttatcatttgtagatagagagtattgaattgtattgttaatttgttattgttgtattattgaatgaacgtcttttttcttctaagcaagttatcatttgtgaatagggagtattaaaccgtattgttattgttgtattattgaataaaagggtacagcttatatataagcatttcatattattgaatgaaagggtacaatttatatataagcatttcatattttgtccacataattggggtttagtggtggttgagaattagagaaatattgaaagaaactaaccctggtttaataaactttgaaacaaaaaaatacatgtacgagaagtttggatttgggccaaagatccaaacagtttacacggtaatcagtaacatgcgatctgactactttctaacgttactcagaaagtattccaaatttgggaaagacattatagtggtcttttaggcagaagtctactagacttttttcgcttatttaataaactctagactctccatatatagtcttcactaataaaactcttgcaaatatttaaagttttggacacgaataacgaatttaatatatatattttaatcaagttcaggaacgatatatatatttataaaccctgatatattttatatatttggttctccgattgtaatcagtatgttgaaagaacacaaagttctcaattcaaatgagtcttaagtcgacaatttttttgattgaaaataattttttatgtaagatgtgattctttggctttgcttatactccaacgagaagtaagagcatacaaaaagtaatgatcgaaagcgaatgaaagacaaacgaagcaacacctctttactcattctttatattaatacctctcaggcttcttcacctgttaacactttttcttcacttgcctacagcacctgagctctcttaaaa

SEQ ID NO: 2235 - DNA, 3000 bp, Unknown
  misc_feature (1)..( 3000): cDNA_ID_2152915_gDNA_ID_1620509_Annot_ID_159068 3000 nt of promoter + ATG
aaaaggcggtcgcttacctacatttactgcaaaacaatctaaaatgttgaagggatcatatgatttcattggcagaaattattactcatcttcttacgctaaggatgttccttgctcaagcgaaaacgttacattattctctgatccttgtgctagcgtcacaggtgaaagagaaggagtgcctatcggtccaaaggcagcatcagattggcttttgatatatccaaaaggaattcgtgatctccttctctatgcaaaatacaagttcaaggatcctgtcatgtacataaccgaaaatggtagagatgaagctagtaccggtaaaatcgaccttaaagatagtgagaggatcgattactacgctcaacatttgaagatggttcaagacgctatatcaattggagccaatgttaagggattctttgcatggtctttgctagataactttgaatgggcaacgggctacgcagtccgatttggactagtttacgtagatttcaacggtggacgtaagagatatcccaaaaaatcggcaaaatggtttaaaaagttattaaatgaaaagaaaaagaattgatgagacacgcatcattacattgcaacaaacatatgatgtccactaatggttttgtatgaacgttaagcgtgactaacttttttataacacatccaatagagtaaaaatatatccgttaaattagaataatgacatttcttatgctactttcaaagagatgcatgaaatgttttatcgattgttaatttttttttccaaagtaatgtaggtgttagtttcttaaaccaaacctgaaaaattgaatttaaaatacttcaaattatctaaaatttcccacaaaattccatactatcaaagaatacaaattagcttaactcatttacgaattacgatcgtaacattacttagtgaaattctagtagtaaattactttactagcttagtgaaaattctatatccaataccaactcgctattcaaattcaatataaatattgtatcatgttaattgctaataaaatgtcatatattataagatttctatattattgagaaatatacacatttctaaaaactaaatcaaattcaaggaacagtttgtgcatcgaagtactaaaccaagatgcgatttcttatcaacatctatgtactagaatctagtctactaaagaaaaaattcatacaattaaattgtctaaaccaaatgggtaagaactcattattaactgggactgtaatgaagcaaaactttttaataacgaaattaaagatggccaagctcgatccattaactgtgtaacttccaaagtaaagattgttattgacacaaacactaactgacttatggataccccaccataatcaacctccttccattgatgttgccccatttttaacatctcatagaaaaatcgtcatgttcttcttcttggcaaacaattcatattttatagcttaaagagtaatcaaatcctaagaaaaaaatagaaagattatttgatttaatttctttgcaggggctatgtttcactaacctttaataaaaatgaccaaaaataatgaaccaagataaacgaatgtaggtgagaatttaatcaaacgattatagtaaattagattagttctccatatttaaactgttgacttccaaagaatatacaagctttactctgcactcacaattggttacaatgttttacagattatgaaagtaatattatttaactattacatatttatgtggtagttggtagaatataaaattaagccatatggtagtaaaaaaattagataaaaaaattaaattatagataatatgaattttacttttgtgcaaaaaataaacaaaaagtattcttcaataaaacaaacataaaataaaataaagtagtgatgctcattattcctctattttcttggaatgggcaagcaaagatcttctacttggcaaggagagagatgtattcccccaaataccaatgaactccaaatccacacatctctagatgcatgtattaagagaatggaatcaaaatccttgggttatgccaataatatgttgaacaatctacacttgagttgatgcaatggatatgaatagtcctgatctccgtagacaagcacaatgttgcatcgtggttgttgattgttattcattccgaagcaaaacatatgattaatattgatacaatggtttacaaaattatgaccaaaatatttttatgtaccgactccttcttacctagaaaaaaagaatgataccaatataaattgaacaaaaagtatatgaataaatccaataaaaaaaatacagaataaaccaattgggacatgaagagtataaactctactcgcataagcattaatattgtatcatgatcgagtttaaatattaaatattatgtatatgatcaaaaattaaatattatgtattatagcaataaaagattaattacacagtttatgaatcgagtttgacttagtgaaaagtttagctttattactatcccagttaataattcgtaccaattcgatttaggcaatttaattgtatgaattctatagagaccatattttattgttacttttacacaaattaagatttaaactttttttttttttatatatctttcatcgaatggaagtctctcttccgtaggtaatgtggacattggggtttatttttctggcaatacaaaacacacaacactaaagcccacagtgtttgaagcaggcccaataagaagctctcttcaaatttttagactcttgcgtgtccgctagtatcacgactggatatgtgataacacacgtagacgaacctgaagcaatcactcaaactcaagacttctctttaatcctcctcccaaaaatctcagagaatcctccttcaattccaattcaaagctccttccttttttcacatctctcttcttcaaattcaatcatcataaaaatcgaatctttattcttcagagagcttca

SEQ ID NO: 2236 - DNA, 3000 bp, Unknown
  misc_feature (1)..( 3000): cDNA_ID_2152928_gDNA_ID_1620509_Annot_ID_159072 3000 nt of promoter + ATG
gttatcaatcatgttccaatagagacaagggggtgtctcaatgggaggaagcaaaggttccatgtctttctaagaccttctcattacacaaacgattaggaaagatcaaaacacatttcagtggaagaagaatgataatagagaatctttttaaccaaccaatctatttcattacgagcaatcatatcttctttgtactaaaggagcctcaacatatctatctatgcttaggatactgtggaacaaaatcaaaatccttaaaagcttcaattttgtataacaatggattttgatgggtccaactaaagctttagagttctacttttcacaggtctgcaactaactacaacctctgaatttgctaaagtttctgaaaaaccaaaaactttaaggaaacacattggtcagctattcacttatggcgtctcttaaggtttagcaactaggctattccaaaacattataattaaaggtttggattctccttaagggtttacttactacaaaatcaaacaataacaagcttcagtttttaataacaatggcttttcaaggttccaaaattccaattaaatctccaaattctgcaatcacagggtccacaactaacaacaacatctcaattccgcaaaatcttcagaaaaatcaaaatcttaagccaaaaataaagctccatactcaaacaaatcacataccacaaaaaccgaaagataatcaatcgtaatcgcaaacaataagaaagatgtaaaacctagttgtagtaaagctcaagacccatgccgtcatggatctcatagtccttgagagtgatgtgatccttgtagatgttgtaccacttctgaattctgatcttctcggctcgtgttccggtttgtgccgcgacaagcttcttcagatcaccgatcgtgtcatcatcgttacacttcaccctaacttttttccctaaacgatcgttgagaaccacctcgatcatcttcttcgctcgaaaactacaattgcgaaccctagcccccaattttctattcctccggaaaagtaaagtacgggaagattctacgcgttaaggctcgttgtgacttttatttataaacttttttttggtcgtacttatgtcggtttgagaattggtaatagatttatttaatttctagaaccttatctatattttaatagattttacctttttttttgtcggctaatagattttactttaattttgtgaattatcaattttggcttcctattttctccatatatagactttgtattaaaattatttttttgtttatatttgaaagtttgtgcaaaaaaaaaaaagtttatatttgaaaccttattattaaaaccttgtgattgtgatttttttaatttttttatcatcttgaattctctcagcaaacttaaaaataacaacaattttatcctatcaaagaaagagccgacctctcaaaataagatacatcttaattgtgattattgatgctagcaaactcaaaaataacaacaattttatcctatcaagaaaagagccgacctctcaaaagtaacaaaagcaaaaaccaaaaatttacatagtgtctgattggtaaccaaaagctgtacaagttttttagctgttagctttatttgaatagtgcaaagctgttagaaagagttgtacaaaaaagctgagagtaaactttttataacacttttaataaagtttttgttattggtaactgtgaaagttgtacaaaattatataaagctgtattgtgttaccattcaaactcataatctgatatgtaaaattacaataaatatgccaccaatttacgtctaaataaaattctacaaaacgctatcaaatcactaccaaatatgcaaatcaaagacaaggagcgaagcttaactactcgaaaaaaatctgtctcacgaacaagaacaccatcaaatcgaaccaactatcattcaccgccatatcaactccggataggaaaacatgtaaactttaacatcgacttgagacaaatcaaaacaactagaacaatctagaggaaaattgaagttgaaccaagaaaaaaagtgctaacataaagatgaaagcttgacggatactaacgagagatcacctcgaaaaatatggtctattttttcaagaaagatggtgttgttgtatgaaaatacgggagctatttgacttcttgtgtatatccacttactttgaaccgtatcacaggtttaaaagtaataattcgtaagtttgaaaaaaaaaatctcatttagctaacattaaagaaaatttaaacgttgatttaaaacgctttaacatgtttccataaattggattaacaaaaattgcaacgttttcaaaacagatcgacgacgttttaaaaaaaaacaagattttatttaaacctttcaatttttgtataaattaagtataacatcaatataaattataggattaacttttcatcgttaattttttttttaaaaacataaatatcataatgtcattaaaaagtaaaaatatctaaaaattcattggtttaaaattataaaaaaatatttcatatataaaatgaaaattattaaataattaaacaagaattatttttaaatatatgtaataactctataaaatcaagaaaaaagaaaagaaaacaaaaaaactataaaatcaattttctcggaacaaaagatgtagttacataggatcagaacaagggaaagatattgatcaacccgtgtagaatatacaatatggttaactcttacaatcacttaatcggttttaccattacaaattttaaacacataaattattatcctctgagaagttggcgtgtgtgctcaaaaaggaaataaacaaaaattgcagaaattactgaactagagatagaatgaaacaataacaacaaccacaaacgaaacagctaaagaaaacgataattaaaaaaaaaaaaaaaaagcttacgaacgccattggagaagagcacgaaaaagaagaagaagact

SEQ ID NO: 2237 - DNA, 3000 bp, Unknown
  misc_feature (1)..( 3000): cDNA_ID_2152890_gDNA_ID_1620509_Annot_ID_159061 3000 nt of promoter + ATG
tcttcttgctttatttcaaaacctatattatagtaataatcaagagatcaatatatatataaactcataagaaaaaagtggttgattcataataagatagtaccagaagtgttatctaattccgagcaataaacgaaaggcatgacaaagaggaggatgagtacaaatgcggcaaaacatttcttggtgatagccatgtctaatatagtctcttaaattttcttacgactgattctagcacttacgatgattatatatataataacacaaacatacattcaaaggttctttttggtgaaagaggaaaaggaaaagaatccaaaaaaaaattctcttgagttagtcaaaagaaaaaataaagagataagtattcttacctaattatgtttgaaacattaataagataacatacattgttttacaaatatttaaatacgaaaattcttttcaattcaattaaaaaaaaaaaagatctcaggttccatggttggaacttgaagttaaattgaattttttgttaaagataagatgtaataatttgatctaaacagaattagtttatattatatcattctttaatatgattaaagggtctatacttagtttattaaacaaatatacataattttttaagaaatatatatttttatactaaaataatatatatatatattgtgaattttaacgccttctatagttaaaaatattcaagtaacaactttatgtctgatatatattcaataatttcagattacaataagtcttcgcaattcttcgacaaaaatattaaaaactagatattaacctgcgatacaccgtatgacgatattttataactaaaaaggtgaaattgtaagttgatttgtttagtactgtttattttgtttagtgtttaataatgtataattgtattttgattgttaatgttagaatttcacatgtcgtataacatcgtgaaattaaagtttaaatattgatattatttgaaaagtcataagagttttaatattatgattgtttttatttattttgttttgtcaaatctattgatggttttaggtttttgtctcatggaagatgcaaatagacatttatgttatcaaattagacctaactaagcctaattaagtcaatgttaagtaacaaagaaagatcatacggttagtcacgattcatcatccatcatcctccaaacaccaccccacttttcaggtgacattgttcttaaatcttaacctatctttctttcagattcatctctatatttatttttccaccaaaaacagtgtgacttaagtcttgggggttaataaatccgttactactaatactattctctattttcttgacttgagacatttttccaatttttacatcaatatgttctaacaaaagaaatagttttttattttattttatcgaataaatattttattgagtaaaaacaagtagagaactatgactttgttatatgatgatattgaccgatgtgttgagaattgcttttttaaggaacacttacatgtttgcaaagaacggacaatcttgaatactacatctgaatgacttaatcatcccctgaagtttaaacccatagaaatttatgttattagattatctttttggattattattattattatatttattttgtatagctattgagttagctcatttaactcacgatcaagatgatatgagtccaaatttatatataaaaaatcatattataaataagatgagttgagttgagcgaactatcttattttgacatctatagggtttgggtatgtaacccatataataaatgggttgggtcaaacccacccgttaaaatcttgaacagggtttgagttattatccactttacactcctaaatagactcaaggcattgcattatacaaacgattagacctaggtacaaagatgtaatattaccaaactatatactactatgaatatattaattatatatgagtctatatattccccaataaatttcagtgttctttctctacttgagtttggttctaacacccaatgagttttagaattcgattcttaaagttaatgcaatgcattgctaatctctgggaaacattactagtagataagtgatactaaacatggaaataatcaagaggcacacatgaactcttctttcttctttaactttattcttctcacttctttcttcttactccactttactcttctttctcagacgcttcaactcaaaaagagaaaccagcatagttgtaatcttgaggatcagctatttttctgaaggatatttggcctaatttcgaaactcaaggtatcttctttttctttttctaagtctcaattcagcaaaatgtaacatacacaaatatcactagtttacatattttattattattattattattttcactagtttacatatatatatatatatatatcagggtcgaagtaccaaatcaaagttcttgctgttgtttacgtatacgagagtgaattttgtttaatggatatctcaaatatttcgtgctttatttgtaaatcttcattgttctttctctacttgtttttttgggtttatataaccatttagctgatttttaaatgacttagaacttggatcttacagttagttttcagttgtgaaaccaagtttgtttatttcagctgtatctttgtttctctgtcagctttgtaaagtaactaagttaggtccactcgaattctcgtataatatttaatatcgcctttcgttttcaggattttgacttggcaaatagaaaattgttatagttttttgtttttctctaattaaaaaaaaaaagaaagttcttgtttcttttgttttggttaagagattagtgttgtctactgtttggattattctttctctgttactgttacgtgtttcattttaagatagagagtctctttatcattcatagagtgtacttttttccctgattgtttcaggtacttaggaaacgctgtagaag

SEQ ID NO: 2238 - DNA, 3000 bp, Unknown
  misc_feature (1)..( 3000): cDNA_ID_3066681_gDNA_ID_1620510_Annot_ID_159081 3000 nt of promoter + ATG
atcataaataatactctcaacttgttaaagggaattacacagaacatgatacccaaattgatgcctaaaataacctatacccaaagtatttgaatatggcaaagatcatgaccaaatcatcaaataagagtttgttttaataatggttggttaaatcctcccaaaagatttactataaaacgtcgtatcagtgacaagaaaagatgttatattcagaaaatgaatctcattcctttaaatgcatatgcacaaatgagaaaagctgataaaaaggttcgatttgatcacgttttgtttcccatttccactttttgctaaccaaaagtataagccgtcaccaatattgaacataaaaatttcggagaaaatgacacaacttgacttttagtaatttctcatccttttacttctagaatcatatcttctgaacacttggaagttgggacattagtcaagaccaccagattctgcaaatagtttgatatatctctaacatcccttacaaaagtaatacttcaatagcggggaacacaagctgatctcaaaactccacaggtatgtagcgaaaaacggaaggcaagcgatgataacaatgctaatgttctattcataggtttgtcgcagcaacacaaatttcataaagatagcaaagattaagagttacaaacaacctgattgaggcaaaaggtgtccaaataatcatattacctcgtttaagcccacacgattataatttggatctctagttcatgaatctgcaacagcaatagcagtaggggtaacttgtttaaccctcctttgatgaacatcccagttataaacacgtgcaatagttacctgtcgatcaccaaaaagtcctagtcagagactactctttactcaatctttgtatgtatctacaatacaggttgcctaaattgcaattttgggtttttgataattaacagttatgttaaagtaagatcaggcccctacttatatgtaacttctcacgaattaggggctaactcaaatgaaatgagataaatttacaagtatctctgtacctgagtaactgtgacttgatccctcaagaactgtaaatcagctacaagaacctccaggctggctttagcattttccagattgtttttcagaagagctgaagcctgttggaacaacaaagattataagaacttattctatggtcccggagatttaaaatagcgaatagaatatgtttttagggtaatggacctcttcacaggaatattccagcatgacattagctcccaaccacaaacacactgagtctgtgtcttcaatgcaggcccgtgaatatattccttcagacacctcaaaatcagctaagagcgcctgcattgtaagaagaattccatgtgagaaaataatgatgaagaacacaagaatcaacagtaagtctaaaaaccaaagacactttcatataggaaagacaaaacatcgtgcccactacaatctctgtgtcagcgattcactgattcttccagtgaagcaagaactcaacatgttctgctgtcaccatcaaacaccacttaacactaatttaaggggccataggaataaataagaactctgattagtgatttcgacattgtcttttcaaccaatcaatctcgatcttcaaaaacagactttcaaatgcaagtaggcttatgagattctaaggaaatgttgcaagtaagactgactcgcgcagaagagaaaagaaaatatcttcacatgaacacaaaagcttgcattcaaagattggtaagaaatcaaagcacaacaaagttcaacattatggaataaaaactctggattctggattcaaaagtttaaataacaatgtttctacatttatatatactcacaatccatctcaaaaacagtagcaagacactgatcataacatcaaagctaaacaaaatgaaaatgaacaacgacgaacctcaccagtacccttctttgcttccaaagtagcaacaacctctaaacacttttcaatatctgggattttagcctacacatttaccaacactagtgagatatcatcaagtagagataacttaaaagcatcatacataaactagaaacaagtgaacctgaagatccctttgttgagcaagaagcttcatctcaacaactttatattgctgaagcctaaaaccatagaaagagaaaccataaaggattaatcacaagtaatgattttggattcaattgattataaatccgtaggagatctgggatttgagcttaagaagaacacactcagataaatgagtagactttcagagtgaaaatgagaactagaaagaggagaaacctttcttggtgaaaggcgagagcagagttaggatcgagaccagactgagagagataagtctccacatcttggatgaatttggcggcagggatccctcttctctcagtcaaatcactaccgcttccactcggagaagacgacgacatcttcgaatcggaatctcagttcccgatttggggatttagggttttaaaagcttcgacttggttttgtatgtttttcgaatctgacgactccgacacggcgtccgtagtcggaattagagtagtgtaacgccgtcgttttttaagaaggggataaaaaggcctcgcaggcccattactattgaagacggacgcggttttgtaaattaattaggccggttccgtattcacgatgaatttttttgaaaattgtaccattggtttagcacttatttggttctaattcaattcagtaggggaacaacttactattgggcctatggagctatgttaagcccatcgttttgatcctaaccggtttataattttttagaatatagaaatgaatctaagatactcaatgtttgacccccaaaaaaaaaaaaagatactcagcttctcccgtctcgctagatcttccaaaatccgacaacagatatatagatcaacctaatttgaggtagaagaatacagagagcagcgaaaatg

SEQ ID NO: 2239 - DNA, 3000 bp, Unknown
  misc_feature (1)..( 3000): cDNA_ID_3066670_gDNA_ID_1620510_Annot_ID_159091 3000 nt of promoter + ATG
tccaattcattagaggaacattttggaattagcattacagtgctcaaatattctttgtagaaaattgatcttagctaggttctttgagcataagtaattaccaacattttgaaggtagtgttcatttatccaatctagcacgacaaacggacaaacatataatccgctcttacttgtcacgtatcctccttatgatttcccataatctgttaggtaaaaatgatctctcgttttctttgaacggaaaaaaataatgagaatttgactgtttcaaagtcaaacatgtttgcatttgcatgcaagtactaataaaacaaattactgatctgaagtatcgaagaaatttcagtttttcacaatttgtttttacaaaatacacaaaaatgccaatagaaatgttttatttcgtttgtttttagcgtattttttaacaaaagtttttcttataacatggtatgattgtgagttcaattcatttgaaaaatatacataccaaatatagaaaagtaaacgcaaatgtgaacagaaagaactatgaattctagctggttaatgtctagtagctttgatttgagattggataatgacgtggttgtataacgtgagtcacgtgacctatatattcatgtgtggatgcgcctgcaaagagagtgaagcacgatgagtctctttctttatttatttatgattcttactcgatagagttattcatcaatattaactagtagaaactaaagagagagcgatgtgttccttttatgtttttttttggaatttgaataacattttgggacactaacaatatgtataggatttctgattccaagctactagctagagtgcaagggagtttattttcgacacctctcggtccaatgtcactcttcgatatatatcacaatcacgctcgtctctcggatcacttctagaaccatttcactcaaaatttggatgttcttttatgttccaaattgaaacccatccatttttttttactaaacttccggattagcaactatatttgttttcttcttttttcctctagttgatttccatgtgatttcttatatagttttatattttcattatatttatttctgagtttgtagattaggtacctcgtgatttataaattaaaaaatttatgaatattttctttaccaaatggaaggtggtctagctagtacccttaactgacaacaaaaaaaaaagaaagaaaaagctaatacccttaactgagtatgtaaaatcatacagtaattagttcaactccatttaaaaaggatgatttaagcactaaactaatatactatcaagtatcaacatatatatgattttggccttcgagaaacacattttatttaaagaatgtatacattcttggtgatgatcatgatcatgtgattgacaaaaaaaaaagcatgatcatgtgcctgttagagaagttttatcaagagaatttgttatgactacgtgttggatgtgtataaagccccccaaattaaaatttatgtttcaattcttaataaaattttgttagctatcgtattaatttttgattataaacttactatatacaattaaagatcttttctttatttaaacgttatgcgatgaaagatttataataatgacttttcaatattttaaatttattaattattagaatttatttgtgtctttactcaaatggttaagtacatttggaagagacgacaaaaaaggttagcattgcacatttgaaaatgatggaaagacgaactactacagcgggcggtgtgtcgagagatgaagaaggcaattggtatcaagggtttcctctaaactttgggatttgtttagctgccttagccgagttatggaacgtgtattatagtctttatatagcttgagagagatgagttacacggttgaatctggaagtggactccgtggtggttgtcggtttcctgaagacatggattagtgaaccttatccgctatcattccttgaaagtttgtagtatgacttcctatcacatgtatataaagagactaattgtataacagatagatgttcaagacactgcacgggttaagaatgttaggatattgttcttgtaagttttcttaataattgaggggatattcgtctccctttgtcctgccaaaaaaaaagtccatttaattttatatttttcatcgaagttcgactctactaaattgggaacattactgtacatagtataaaaattataacagttatggattgagacttgtcgatacgaatatgtcaaatgaaaaaaagaatctaatgtactttctaaaatcgttttgacccgaaaaaaaagaagtaattcgattaaatgttattgtttacattaaaaccctataaagtcttatctcagttcgataattcttgttcaaggggatctctcagatcgaaggttcgatactcaaagatttcgctttttcttttctttttgtttcactttcttcttcccagcccttcttcgccgacgttttcttttgcccggaggagccgactattactcaagattttgattctgactttcaggttctttctttctttctttcttctgcagttccgtttctatcagctcaagatttatcgattaagatttctcaaagtattgatttttttttagtgattagacaaattttcatcagtaactcatgaactttgttatgattagcggcttgggtttgttttgttgaattgtcaatgaagaaaaaccctaattttgcattgtcacaggaagtaaaaatatggactttgatgatgatgacaaaccaaaagaggttaccaaaacccgtagattcgctcctggccgtgccggaaagtctaaacccaaacctaaaccggaacccactgctgataaaccggtacagccgccgccgcagtcacaaactgagtccgtgagcaagactgagcatgacgttgatgctaaattcgttggcactaaggttgaaactgaggtttgtaatggctctgtgaag

SEQ ID NO: 2240 - DNA, 3000 bp, Unknown
  misc_feature (1)..( 3000): cDNA_ID_2047775_gDNA_ID_1620510_Annot_ID_159096 3000 nt of promoter + ATG
tagcatctcacgaatactatggagtcatatggctatattatccctatttggtgctggaattgcatggggcaatatttttccatacaaggaagacatgagcttcgaatatgcctgttcaagatacttcgagttcgttgaaacgttcttgttagttggcatattgagtcattgcatcacctcttcaaaatcaccaaaaccagcttttaaggcaaaccaatttatcgtcaatattttccaatttatggttagcgtaaccatgttttttattacttatatggatcagaggtgggatatcttttggatatacatctgtataatcttcgttgtgatctcatttgttcagttgagttatcctgtggatggctttgagatcctatatattatgatggtagccttttcaggatttgcttcgggaatcgctggactatattttgaaattgagtcagtaggacactcttggcattgggcttatttcatcactgctttcgttttagtaatggttgcgaatatatatcgggagacgatattaatcccattgaggaggattaatttatggttaaaaatgaaagatcaccttaaagtttaactattcccaaaagatgtagttttcttttttaccttgctttatttctaaggaatattgacatgttacaaaagtttttttaatgaaatttattaatacatgactacaaacaaaagataacttaccaaaaaaacattgaatttaaaatttaaaaccaaaattttatcagttttaaaaactaaaatataatttcgggtgaatgaaataattgactaaaaaatggaacgctataagaagaggttatgttgacaataagaagatgttcatgtttcaagtaaagacttacttatgatttacaaaataatttttatgaatttttaaatatcatgtgttatatgaaacaatagtgagaaagttcatatttcttgaaggatagttctcttttcatctaaagtgtgcacatgaacatgttaaccatccaatagaacatcaccatttcatcaacccaagattcttattgttgtgtatacacttttatgaagaacaataaaattaaaaccattacttagatatagactattactaggagaacaagtatttgctccaaaaaaaaattagagaaccaaaattatgtttgaaccaaaaaacatctactaatttatagagatattaatttatctatatagagagattttactaatttgtaatacaaaatttatctcaaatatagttttttctttataatcaatattttctaaaatcaattacaatttacaagtagaaaagcaactattcagtttaaaaacaaacacgaaatttttttgcagaagatttcatcatataatctaattacattgattaaaaagtaaagaaacaataaatttatataaaatgtggcttttaaaatgttaatatttcaggtggcatatggcaaatgcctttttgataaggctataggcatggtgtatggtggtcatcatcatcatcagctcataaaaaaatatgtttcttaaataaaagtttcaagacaaaacagggagagtaacagtccgatgtgatgttatctatctgcacaatgttagaaagctatcatcgctcagttttatgcttgacattccaaagtaacatagttgtagtttagtatatatgctaataaaaaatctcatggatgaattattggagtacttccatgcgacccatggttggatgtgtatgaaattataatttttatataattaaacctgtaaaaaatgtgttaaaagttaggagaagtttgtcttagacggtaaaattgtatatagtttttataatcaaatcaagtttgatctttttaagacaaagtaaatactgtaaacggaagatatcaaagctctttatctattccacaaaactatctatttttcttgattaatttgtaagatcaacatatgtataacagattatggtaatttaaaaacttcacttaccataaaattaacatatatattgaggatttagtttaattccaatatgagaattgagaacatatatttaatgaatatgattcatcttgtagttaattcacttaattattagtcttttgaattagaaaggaaattataaacggtagtatgcataagctttgttaagaaaaactaaatttgttaagatattgaatattatcttttttcctatattttgatggtactgtacttgtttactttcaaatggacatttagctaactttattttagaactatataaaatgttaaatcagttatttaaaatgtagccaagttagatatcattaggagataattgattcaatttatactcctttaatcagaaaataatttattaataacaggatctaaaatatttattttaagtgaaggaaaaaacaaaataagacaatatgtcacatatcacaaatatatatatatattggaatatcctatataagttaattttcgactttaaaacgaaagtaacatatatattgctaacttaaacatctttaaaaatacttttttcaatttaaatcacattaatcagaaaataattttttataataatttattaaaaagtatattaaaaatatggcacatgtcagcaaaaaaaaaattgcaaattttatatatgtctagaatatctttaaaatgttttatatgaaatttgaaattttatttagtgattataaaaaactggtcacctatttagaattgttagcttaaataattcataatcatatataaatatttttaacaatatagtctgcatacgtaatagaagtcaaatatatacagcataccttaccggccggtatgatttcaagattttcaaaattaagacggaactgtaattttattaccggccggataaaataaaaccgaaatttcttgtcttgtccgggaggactgtttctctcttgacttaaaagacttgggatcaaacaaacttgagagatcattttggaatttcaataatctgagaaaatg

SEQ ID NO: 2241 - DNA, 2600 bp, Unknown
  misc_feature (1)..( 2600): cDNA_ID_3066643_gDNA_ID_1620510_Annot_ID_159105 3000 nt of promoter + ATG
cttcgcctacttgctgagatgtttgtttgatccaatgtgggtaattgtcggaatgcaagcatctggcacgatgcttagactcatcaaatagttaggacaagatagaaacgtctattgggacttcccattcactcacgagttgttgatgctaatggattatgggcttatggccctcaaaaatagaaattctattatgcgccaagaacagatctgcttcttggcctatatatctacctaacaaaagttcaagtcacggttgttcttgggaactagactagtatacttggactgttgatggtcaagaaaactccttcttcgcttccagctttacgtgggaactgggaagcattgtggtcacgggaagcggccaaatattggtttgatcactgatgagtcttgctttcaagatgtagatttgtcaaatgaatagactaccgactatagtttggcttgcttcatggggtatgcagattgcaactcactgttgtcttttctctacttatgatgaaaaccaaaaccacttccttgtgaattgtgattactacaagttgattagacgatccatgcagacccgactcagcctcacaaccaatatgttctatatttgagactctcttattgtctgaacaaatctaggtacacatattcaccgcccatcctgcaaaagctagtggctcaagccactgtatatcacatatggaaggaaatgagcaatataattcattagcaacaagcaactcctgctacaataatcttaattaaagaccattgatatgtaggcatattccataatacaattatcgccaaaaaaggacatggaagaaattcattaacctaatgtgaataactagggttgcttcttcgtcaaaagatccatgtgaccattgtatttttttttccatgtttggcaaaacacaaatatagaaggttgacattatgtaaaaccaaaacacttcattttctaatgatatttacattcatatcatattatataagtaaacgttgaatttgtccctcagtatttgaatgcacctagctaggttggctaaatgaatttgaattttatggtcaaaccaatgaacatagggggaactggagaagtataagacgtatatgaacatacagtatagtatttgcaacttgtttgaaactggaaaaaagtataattaagttattacgacaacttataaacataattaagaaacagaattacacgcatgaaaagtcgtaaaatgtcaaccttcaaagctatagtgctgaattaagtgctaactaagtatactaatcaaccctaaaaattaattaagtcctaccacgatcctataattaatgttcaatttgcggcatttggaactttattcattaggataacgcgttgcatgacataaagagtcaaatgagatattttattactcatagtttagttattttcagtgtatagattcgattaatatcttaattaagagagtaaattgacaaaatcataaaaatacagtcttcatccttggattttggcagtacttgtactggatctttaacggagaaatatttaacgataaatatttcttagaatttaagaagtgaaacggataatttggtttatttaagaataatgaattgtgcaacgatgggtgtatttaggaataatgaatgtgtgcaacgattggtgtatttaggaataatgatgctggtcatgtctagggatttggggtctaactaaagcgaatgtaaatatgagaaattttacatctaaacaatataatatgtattgtaaatttgtaataaaatattttgtaaaataacaaacatgatgtttttttatcaatgaaattgaatttcgaaaacaaattgcacttgatttttttaccaatacataaaatctaatttaaaaattcggtggctccaaaatttgcataatattatgaatcctaagactgttttttcgatcagtagacatggtctagtgactagaatggatgttaaacaaccgcactcggactaatctatgttcatatctatgcaaaatgtggtttcatttccgccttggaaaatgaataattttgacataaacggtgtcagtttaaaacacaagcacgagaactagttcgattattaaattgaggaaactgttttgttccggtattttgttcatatttcctgaaaccaatccatatttataagatatctctttttatcaacaatatacttatgcggatttaaacacggatagtaatattatgatgatgttctcctctcataaagatagttgataattacaaatatattaggagatgctctatgttttaaagtttttaagttattgggaaaaattaacaattctaatattgcggccgtttatgcctttgtcccacatgttacaaataaatcttaaaaaagaattatcatctattttgttcatctataaaaccatcaacttctccatcttttcctgtggatacaaacaacatcatccattatctctctaaacataactccaaaaagtgactcttttcatttcagaactcactcaaagacaagtacaaagctaagtcttgatttttttctttgaatatctctttgtgggtcactcttcatcaatg

SEQ ID NO: 2242 - DNA, 3000 bp, Unknown
  misc_feature (1)..( 3000): cDNA_ID_3066654_gDNA_ID_1620510_Annot_ID_159099 3000 nt of promoter + ATG
ttgaatattgtaatatgatttgatgaaatatagagacaataaaaaaaaaagttttagagtatagaattcattcgaataatattaatttttttttttttttgtcatctgaaaattaattaggactcaaacgagccaatcctgaagaatattgtttacaaatgtaatatgaagcggttgggtacaaacttttcgtgccaaaaaatccgctttaacattagtactacgagagattaaagatagagaaaagtttgtgaactcatccttgtcgctctgtaactcctccaaatacgatgagaaagccgaccattcggttggggaagacaccatctccaccagatctgaacagtctgtaaaaaaatctacatcttggttgtcggcaccaatcatacacttcatcgcccagaggagagcttccacctcggcatgtaaaggagatagacttcttctgagattggcagctcccaaagttgatgtctctccagttgatgatgtacagtaccatcctaagcctgaaaacttgtcggtatctttccaagatccatctacaaaacaacgatatccagaataattgttgtctaaagaaaaatgccgcactcgattacgatcttccaaattgaaagaaccaaattttttgttgtgaagctcaagttgagcagacttccacaagtctgactcttactctttttccgccaaatgtaagatctctagaggatctttatccacattatcaaagattttttcattccgtgctttccaaatataccaaattatccatggaaatgaagatgaatcaaattccaaaggtatgcgccaaaataaatgatccaaatttgcatatatagatgcataaggaaattttcctgggaccgtaggtatctgtgaaagtgcctaaatctgacgagcatgattgcataagaaaagcgtgtggttaatggtttcttctagagcaccacatctgctacatcctatctcacagtttattccgcgttttcgtagattgtccattactggtacacatcccgctaaaatttgctacaagaagtgacgtaacttgggcggacattgtactttccatgagaatgcttttaagactttgatgtctgggccaaaaaaagaaaagttagcatccaaagtttttaacctcgccgtatgatatccaaatttaactgtatattttccagattttgtgaaatgtcaacctaggatatcttccttagttgacgcacccaagtgcaaagcacttattaacgagacatcttccggatcaaaaagctcttgtaaaagatcaatattccagaaatttgtccgtgagtctataagatttttcaccttcaaagaaggatcaaaagcgtaaccattttttaatgctggtctcgggaattgaattggaatccacggatcctcccaaactgagatggattctccagaaccgactcttttaataagtcatttattaaccagagatctagctgagcaaatactcctccaaccatatgatggagagtatgattttatattatccaaagggttggatttcagaaaataacgtcatttaaaaaccctcgcaaagagtgaatctggaaccgtgattaaacgccataattgtttagttagaagagccgaattaaaatcgtcaacattatgaaaacccaaaccctcttccgatttactataacacaccttatcccatgccattcaatgcatacctctagattcaccatttgaactccaccagaattttgcgatcgcactcgtgagcttcgatgtgattgttttcggtagtctataacaagacataacataagttggtaatgccgtagctaccgatttaatcatcacctcttttcctcctttcgataaaaacttagctgaccatccatttatcctattttgtaatctatctctaacaaaagagaagatttttgttttagatccacctagactttctggtaaaccaagataggagcccataccaccaagattagtgattcccaatgttgcttttatttctgccttaagtgaatcatcgaccttatgaccaaactgtatcgaagactttgtaaaatttatttgttgtcctgaaaccgtttcataatgctttaaaatttccaaaattactccacactgctttttgctagctttgcaaaagaataaactatcatctacaaataacagatgagttaccaagaggcttgccgtaactactttcataccagtaatcaatttttgttgttaagaataatattaacttatttaaccttttttgtctttgttttttttttaatttctattaaatgtatgttctaaaaatataggtgattttgaacaaaaactgaatttcaccagctcatcttaaaacagtgacaccgccggtcgaaaccaccgtttttctgatcgtttcttttccaaatcattcggcaaaaattgaaagcgaacctttttcttttcttccttcctttcacctctttaatcataatcaaatcagtcaccaaaagccacagataaatcccaaattggtttcatcgattataagcaggaaaaaaattgatcctttagggcacactagtttcgtcatcttcttcttgtgggccttcttcttcttcttcttctacgacctttaaattgacttttctttactctaatggaatctccttttcctccctctacgccactcgtttcgaatcagagtttcaggtactcttctgggcaattccccaattttgctcttataatctcaattcgattcttggttagtttttgcttaatttccacaatcagacgaaattcaaaagctttacttatgggtttgatctcaattactacaaaagcttgtttgatttcgtcgttttgctcaaagatttgaactttctgtgttgcatcttcgatatgatcacttctagttacttatttggattagttcttcttctccagtgtcagggaatgttagagaaagtttaagcttgagtggtagaagttgaattgtgtttgaatttgataatg

SEQ ID NO: 2243 - DNA, 3000 bp, Unknown
  misc_feature (1)..( 3000): cDNA_ID_3066662_gDNA_ID_1620510_Annot_ID_159094 3000 nt of promoter + ATG
gtaggttttatctagaagaactctcacaactgaatcatctttgcaagatggtcttcgaaccctgacaagggaacgacgacgtagcttaatgtttgaatctctatctaagcttgaattacgagacagaaatgagcaggaagaactagagagaaatctgcattccgcagataatgcctcagtttctttacccggaaggcaaagtggggacagggaatggcgtattatgagatcagaatttggttcagacgaaaactcatctgtcagctcttcctcttgcccagttcgcaaatgcgttgatgaccatgtgaccaacatttatgactcgtttctacctatccttactcagttcgttgaggacggcttacctgtagcaagaacaaatgaggtacttaagatgatcaagcaagtcctagtggatctgaagaatgcgccttacaaaacaaggaaggctcgattgactttagattcagataactcaagttcattcccggagcagtttcttcccgcactaggcgatttgcttctcgctctttctttaaagagcgagagagacacaaacggtaaaagtgtcacaatatccgtagacgggaaactcactaaaactgctatagcattgccagttgcattggacgcgttaagggaacttgttgctgacctcagcaaataccaaaacttaaacaaagattcactgtcttttccacttgttaaacagaacagggtatgctctggttctgtcctcgcaagtggtgaagagcttccttctggcattgtaagtagtatcctattacaagtctcatcttaccatttaatcaaacttgttttggttattcctaaatatcatgcctcactcactgcctcaggcaaccgcagcttttgatggaatccaagagtccaaatgggaagaaccaaatggtgcaaaaggtatgaaatatagcctgatccaaaactatgatatttgttacatgttataatgcgaatctctcctcgcacaggctgttggatcgtgtacaaaacactctacaaccagatgcaccaactcatagcatacgaactcatgtctgctaatgatgccccagagagagaccccaaagattggtaatgtctgattcctattattcaagtctagacatacacaatcaatgctttaacactgtttgttgcctccaccaggattcttgaaggaagtaacgatggtggttcgacatggtgtgtcctagacaagcaaactagtcaggtattcgaggaacggttccaacgcaaatcctacaaaataactacacctggattccaagcaaatcttttcaggtatgttaaataacttttccctgatagaacacaaatgtgttttgaattgagtttgataagagtcttatcataagacagtcccatttgcttttcttgtttttcttatgggtcataatcatatctaatgtgtatgttgcaggttccggtttttaagtgtacgagacgtgaattcgacctcgagactacaactagggagcatcgatctgtacagaagtcaccagtgatttaatgatgcattcatgcacatcaaatgtataaatattccaaaaacatcaatttgttttgtcttcactttctgcacattgatgtattccgtattcgtgagggaattggcctttgctattgctatgaaacacctctgtcttagacagaggcttacagactcatggtcacagttgttatcaacgaataataagcctccacgtgtaacttaacctaaaggtccctagttcagtaaacatggaaagtgaacaagcgagcgacaacatcggcgccgcaaaaaaagtggaatgattactcttcctctgcgagacgacgatgaggaaaacgacacatacgaagctaaaatgctcctcataggcgagaatggtctcgacggtgagagtttacctcctactcctctgcgtgacggtgcactggagctccagaagtataacatcagctccatcgagtcaacagtcgtgattcgtgagctgacgtcacaaggtctctcctttcagctctggccagcggcttctactttcgtcacgttgcttgataactaccgacgtgaccctagcaagagtccactcaccgccacactcttgtcgctgaaaaaaccatcgccgttgaacatactcgagctcggatctggaaccggcctcgtcgggatcgctgcggcaatcactctctctgctaacgtcacggtgacggatctcccacacgtcttagataatctcaacttcaacgccgaagcaaacgctgaaattgttgagagattcggcgggaaagtcaacgtggcaccactacgatggggagaagctgatgacgtggaggttctaggtcagaacgttgacttgattctggcttcggacgtggtgtatcatgaccatctctacgagcctctcctcaaaacgctgcgtttgatgcagctagaggggaagaggttaattttcctgatggcgcatctaaggagatggaagaaagaatctgtcttcttcaaaaaagctcgaaagctcttcgatgttgacgttatccactctgatgttcctcaagaaagttctagaatcggtgttgtggtttaccgtttcaccacgaaacagccaaatcagaatggtcggattgtttcgtgttagcaatcgcgttgtcaggattcatttcctaaataaagtttgcaaaaatgtttgtcatgtctattcaattcaggtgttattaaatgatgaaccaatccatgcaaattaaatataagcattgaagactataaggccttacaaactatttggactcttttataaatgatcaaaaactataggtgataaagcaaataagtttttaaaaggggttgcgaccataaatagcttggggcctatttttgtgaatcgtacaattactaggactattttgtaaatacttaaaaactattggaacaaaagtatcagagtagaacttgtgacacacagtcacacagactttgactgaccagtgaagactacaatg

SEQ ID NO: 2244 - DNA, 3000 bp, Unknown
  misc_feature (1)..( 3000): cDNA_ID_2047812_gDNA_ID_1620510_Annot_ID_159086 3000 nt of promoter + ATG
ttacggatttgcccttacctcaagctgagtcatcagaagtcgtgaacacaacaccgacttctccaaactcaacctcagtctcatcttcctccaacgaagctgcaaatgataacaacagtggtaaagaagttactgttaaagatcaagaagaaggagatcaacaacaagagcaaaagggtactaagccacagtaagttattcattaaccctctattttaatattatttggtgttggatttttattaattattgtgagttttctttttaaaggttgaaggcaaagaagaagaatcaaaagaaagctagagaagctaggtttgcgtttctgacgaagagcgatattgataatcttgacgacggttataggtggagaaaatacggccaaaaagctgtcaaaaacagtccttatcccaggtataaatacatataactctgtatatacatatatattgcagccctagctagatccatttagaccatcagaccatgctcactatatatgcatgtgtttacatatactttatatgtaaagatatttatatgcatatctactttatatgcacatgtaagtatatttcgctagatcgggtttatccaatttatggatcatccacttctacatattgtacatatgcatgttcattcagatattgatatacataacacaccatatctgtagtcatatataatttttttatatatttaggtgtgtgtagagtagccctagattcagtgttctctatatatgcagagtctaatatgcatataacatgaccctattcaatcatatatatgtacactatatgttaatatagacgactgtatatacctaatacgcgtttttgtagggtcaaaaaaacgtttgaatttttgttttcgagaatatcttttctttggttccattccatgaggtttctatgttttgtgttattcttcccttgatttatgttgcttgtgtcggaagatttctgtttcatcttgttccaaacttcatctcagatctcgagatcttctgtatctctgtatatcttccatgtttcaaactaaaatagattagaaatttgttgaaaatgtattagtacttaatttatttatttttcctgaaaatacagaagctattaccgttgcaccacagtgggttgcggagtgaagaagagagtggagagatcctccgatgatccttcgatcgtcatgacaacctacgaaggtcagcatacccatcctttccccatgacgccacgtggacacatcggaatgctcacgtcaccaatcctagaccacggtgcaaccaccgcgtcatcatcatcattctccatccctcagccacgttacttgctgactcaacatcaccagccctacaacatgtacaacaacaactctctaagtatgatcaatagaagatcatccgatggcactttcgtaaatccaggtccatcatcatcattccccggctttggttatgatatgtctcaagcttctacttcaacttcttcttccattagagatcatggattgcttcaagatattcttccttcgcagatcagatccgatactattaacactcaaaccaatgaagagaataagaaatgaagaagttttttttcccggggcaattgtttttttctttaggccggatccggtaggtaggtttcatgaggagtttttggtcggtttaggtaaaccgatgttgatggctttctaatgtttttttcttcattacatttagcatcggttttgtttcatcaccacgaaataagcaatcgacgctaagttggaacagaggtttatgtagcatatgtgatataggtataacttcattttttgtttgagtattaataaagatgtatcgttaactttttatgacttcggagagagaagagtttaatctagttatatagtatgtatttagttgtattatagtgtttctagaccatctaatttgtaatcatgctatcactagcccggctcagaatcttacatttattttattttcatatatccatcctaatcgatgtagatttacataacatacagtatacacaaagatacttcgaggtttgttgctattcaatcatctatatgcttaccattgctcacaacaaatatattattctacaatcatgtatattccttatagttacatatattaacttgatcagtttttgtattatagtcatcaagatgcaatgccatcacacaaaacaaaatcttatatgacctaatgtgatccttggctagattagatataagatatttgaaagtaaattaatactttattggacgttcatatatattctcaattttcataactacagtaatttcacatcatactattcataagtaaacatatataccataacgacatctacatataacttttaaaatgataacaaaaagcctaaataagaaaaaaaaatatttcatatctatgaatcagtcatataggtgctaaaaatgttagctttatattctcatctttatataaagattcataaagagagaacttttagtcttaaactcaaagtctcctttatagttttcttcactgcgacttttatgttagtcttcaatcatcacaaataaaattcaaaaagactttcaggattaatgagcacactgtttatatctacatgcgtacttgacccacccattacttagttgtagtcttgtagatatggtcatatggaccatatttaatttttgacattatcaacatatcctttctttagttctccttttttcaagtattttaattacaagataaaaataaaatgaattggactgttatggtatgtaactatgtataattatacttcgttaaacttcattttaatgtaactcatcctttgacattagttaacacacacacacaaacacactaaagatatatcataaagttgatgtatggaggtatatatgcgtgcatatatgctttaggtctttttcaggaagccgatagctacgcaagtcatgtatggctgatattaaatataaaagtaa

SEQ ID NO: 2245 - DNA, 3000 bp, Unknown
  misc_feature (1)..( 3000): cDNA_ID_1442233_gDNA_ID_1620510_Annot_ID_159082 3000 nt of promoter + ATG
ctaggttcttaagccctttcaccttcccccacatagttgttaaccttttgtactcttccaacatctccatcacttctcttacaatcctccctgaccctcttgctatccgcattatccttgactcgttaaacacctttggatttgagctgtccagttctgcacaaccaccaatcagttattgctcaaaactactattacttttacagagaaactttctccaaagaagatattgctctcaccttcattagtcatagagtccatcattgtcatgtatcgctttatcttcgcctggctttctttctcatgtccctctggcatcatttcagcacgcattccaggtagcatggagaaaacctacaaaccaacaccgtattttcatatttttgtcttatcagcatcacgttgtgctctttagcttactaatatttgaccagagattctgacctccttaagtgggcccatgttcagcatgttctggaactggtcgtacataattctcaatgtaaatttaccatgagagagcatttccagaagttcaggctgttgatctttaggtaccacctcttgtagtttattcacgaatccagacatatcaccatttcctattgtacatatacattatcaagattctgagtcaactcctcacaatcagtcaatgccatgatatttacctaagagacggctgacaaacggtttagcatcaaaaacttcaaactcatccatatgctctcctgttccaatgaatatgacaggactttttgtagctgcaacactaacaagatggaaaatagatgagatccacttgcccaattggaaaagcttgcatgattttcatatcaccatttcgagtacatgacaactcagcagctacaagatacttacgcgctaagagtcccaccacccttggcatgaccatccatcttagtaataattacagctcccacagcaacagtttgtttaaatgctcgagcttgttcaaacgcagtttgaccaatactgctatccataacaaatataacaagatctggtttctgtaaagtgaaaaggcagcaattagcgcctccaacataattaaggaacaagaacagaagactttaagataagagagtaaaaccgttgcttcagaaatttgacgcatttcttcaaagagagaagcttgttgtttatggcgaccactggtgtcaacaataataagatcacaattttctttcttgaacctatcaactccctcaacagcaattttcacaggatcggatcctgtgtaactgcaaagaatcacaaatcagtattagcacattctgctatcacagtatgccctggctaatggtttcaatccataagagttttttattttatatatatttcgtcatgttattgacattgaagtaaaaccaaattgacaaattgcaaaatagaaacagaagataacacaagacctcaaaatatccatttatgtatactgtacaaatctatgaaaaagacgtgagatcccttgttacagtggcactgtaaaatgaataccgaaaaaagagcgcaaagaaaaaactggcaaaagggatttaaaggtaactggagagggatatattcagtaaccgtagtggcgtagtcctcgagtgtaaaccaaacaatttcataaatggtgtaccatggctctaccgtcaaaaataaaattacatcacttttgtacgtgagctaatatatttggaaatgcaagcaccaaaggtcttccaagcacgcaggaagaaagctaataactaagatataagattttttaacactgcaaaaagggttgatgtcagtaccttccataataggggatcttagatttggtggcattctgtttcagctgatcaaaagcacctgccctgaaagtatccgcacacactagagctggtttgtacccttttcttctgatgataataagcatacttggtacaagttgtggtttttccagcacctaacacacagtcaaaaagttttggacgattttaacaatgaatttacaactacacaaaagcatagcatcttacagagagatcagatacctcaccttgtaatccgacgaacataactacactaggtttggcctttttgggagcaaatgcagactttcctggatccaacatcttacagagttcactgaagatcgcctgaaagagaatcataagaacttaatcacaaaaaaaaaaaaacgtaaacctatttaatcgaaattagacatgcagaatctgcggtaaagcctaagacctgctcaatgatacgacgcttgttatggccggctgctagatcctcaaggttgacgattttcttaatattggtctgcatctccttcacaagggggaaagaaacatcggactggagcagagcacgagtgatctcgttcaagcaatcattcagagccttttcatcgattattgtcacattgttcatcttctgtatggcgctcataatccgacctccaagctccgccaacaccattttcgctgctctctgtattcttctacctcaaattaggttgatctatatatctgttgtcggattttggaagatctagcgagacgggagaagctgagtatctttttttttttttgggggtcaaacattgagtatcttagattcatttctatattctaaaaaattataaaccggttaggatcaaaacgatgggcttaacatagctccataggcccaatagtaagttgttcccctactgaattgaattagaaccaaataagtgctaaaccaatggtacaattttcaaaaaaattcatcgtgaatacggaaccggcctaattaatttacaaaaccgcgtccgtcttcaatagtaatgggcctgcgaggcctttttatccccttcttaaaaaacgacggcgttacactactctaattccgactacggacgccgtgtcggagtcgtcagattcgaaaaacatacaaaaccaagtcgaagcttttaaaaccctaaatccccaaatcgggaactgagattccgattcgaag

SEQ ID NO: 2246 - DNA, 3000 bp, Unknown
  misc_feature (1)..( 3000): cDNA_ID_2047816_gDNA_ID_1620510_Annot_ID_159085 3000 nt of promoter + ATG
acggtacatttaaccacaacgacaagaagttattaatctgactttgcttgttacgtaattgtgcatttcattttcatattgttttgatttattttgctttgctgattaaaataaaaaaaattatgacaacattttaaaatcatcattgattttgtttcactgcatttattatataccatttcacatacatatgaccatttgttcaactataagtatagggatggacattcagttatttgggtttccggtttcggttttttggtttatagaaaatagatccaattcggcttaatattataattcggttagtgcatatggaaacaaagttatattttggttatgtttttgacaaacaaatcataaatagcttactataactgattgtagttatagattgtagtcttgtagattattaataatataagctctttaatgaattttggctagtttggttgttttatatagttcgagcttggttcgattcaaaattgggttattcggtatagaatattttttcttccatttaaatcaaacataatttggatcgggttagagtagacttttggttcggattcgagaagtttggttcggcttgaaaatttgacctagctctaactataactatttgaatcgttttaaccaattcctaatttgccatagtatgtcgagtttttggtttgtaattttttttaaaaatgattccaaaaaaaaaatgaatagtcggattaatattataaattaacaaaataaatagaaatgatggtggaggcgtggaacaataaatagttaacgagatttgatgaccgatgacttgtcggagaagaagcaaactctctgctgacgtatgctttgtgtcagcttattttcgaagcttctttcttacgcgttattccttatttttaattgttttttcatttactttcctaaatttactgtttctcaatctattcaatttattagcttaaatttccactaattttgtctctttctgttggttttatctttccctcagagcacattttccatcttatactctctatctacatgaaagtatgtgctcacgctgtttccataaaggaatattaattttgtacagtataaaatccgttaaaagtttcacactaatgaatactactatcttctctcacattggaaaatgcgctaaaatataaaaggagttaataactgcgtgtttatcactagtgagtttgtaatagttattgtggtgattaatctaattatagttggtccttgatttaatcttaattaagaaaagagaaattaagtattgcaagtgtaatatgaaaagaatcggcgacaagacgttcaagtcaaaatagaattaggctaaataagtataaaattttacgtcaggagaggatcacgaaaaaaaatctttccccttaaaaaaacaattacaattgtattggaaaagacaagttgtcgttaaaagttaaaaatcaaacaaagccgcgaggagtttaaaattgaaaacgaaaaataaaacaaaaaagagtactgtaataatcagatgcgtcagacccacaccttttggtttcgtacgtgtcttcccttacgcgcctatcctcgtatcccttggtctcttaccgttttaaccggttatttctttgtactaatacgcgtaaaaaacaagagtcttgctaaaagatcatttgagttcatcaaattctgttacgttatttgaattgatacgaaaactatttaagaaattatgttctaaaattctaaataacctgtttatactatactttccataacatacaaaaatttgctcaaatactaagaaattctctcttagtaactatgtccagccatacttaggctatgaatgataaccaaaactgcatctaaaaccgtaccgcaacagtgctgtaacagtatcaaaatctctacatatacatatgtatttatgtattttcattactatttgaaccgcaccgcacttctcccgtaccgcaaaacgcagtcaccattcggagccttaatatttaatcggctttcatgctcaaacgttatgacgtaaaattttaaaaattcacaaaatgagactgtttattagtctcctcaactatactttagtttggcctgatgtctacaaattgtaatctagttaatagtaagattttgtttgtttaaattttttttatttttttttgcatatatggttgtgagttaaatgcccatatgatatctatcaaaagtatcttttctaatttcgccccctttacaattatgaaatatacaaaacgtatatatttttctgattatgatgaaatagttgaactattcgaaagctcataaacggtaacccatccatatatagcttatatcacacactaatcattggaaatagttaattttgctcacgttcatagtaaaaatgaaatgtaacaaaaaaaaaatgaaatgtaacgaacccgaattatatttggacaagaaaaagtcaagttagtattcaagaattagagaccaaattgtaacaaatgccgtttggagacacgacacaatgtgggaataaagaagaaaaaaaactgcaatgaagtgaagggacaaaaattaaatgctcggcagaggacggcaccgtcttgatccattcacaaccgtacgccacacacccctcaccggcgtttaccggtgaccagtgttttctttctttctattatattttaattccatttttattttatattcttttgcccgcgtaaatgagacgaaataataaataattattataaaaaaaaacaaatgggaaacctcctaaatccaagctgttttccagaagaacccaaaactccacaaaagttatattcacacctctctcttatctcaaaaatcttataaaccattacaaaataaaaaacatataatcacccagaaagctaaagaaaagttttccttttttcccctcacgaaatctcagagaagatgatatatatctataaaagtatcatctcatagattccatcttttctctattac

SEQ ID NO: 2247 - DNA, 3000 bp, Unknown
  misc_feature (1)..( 3000): cDNA_ID_3066688_gDNA_ID_1620511_Annot_ID_159114 3000 nt of promoter + ATG
tcaacagaaaaaaacataaataaaagggtattttatcaactttgacaaaaaaataagtaatttatctaatctagggtgaatataaaagtgaaaacgtaaaatactgtacgaccttgtactatccaaattaatttctactaactactatgtagtttatatgtactatttcacataacttgaaattatgtttgaataattggtaacatatttgatataactataattgatctgaggctgctatgtaaataagatatccccaatactttgcacgacgtttgattagaaagacactgaaaaagaattagtatatacttaattttatgggttttgtttgctagagacgttgaaagttaaactataatttctttagaattttcaaatccggattatttgttgtggccattcaaattcgaatttttagttgttatgtttcaaaaacgaaaataataacttgttttactttttaaaaaacaataaataataaaatccctaatttgtatatagatagacaaaaagtattaactgctacttctggaacaaaagtaaaaatgtaagggtcacgagtgagtgttttcgttgggcctcacgtgtctgtaaaacttgttttggttgctcagaccacttgtgaaccgtacagttataaacttataatcattccaccaatcccatttcagattcctattttacgttatatattcacaagtcttcttttttttctcccgtagctttatgttttggcttttgtttgcatcaaccttaccttgtgcaatttgttcttttgtctttaattaggtaaaacgagaactttggttataactatccatcagtttaccgttaacggtcaaaactttgtcaatgacagaatggtatatagtcattcgttgtcaacgaatatatgagaagttgttagaaggaattgaaatctttctatttacataaactttcgtatccagtataactcgaacgagaaaagtaattacaagcaggtttatacttataataataataataattcgttctagtgttttcattacagaagcaatatttggttgtattagaccacaagtatctatacccgaaacaaaagaaaacgagcgtcgttatgttgatgggtcaattatttaataattgatgaatatctctaacaataagctgatctgttagaaacttataataaagaagaccaataaatcaaataacaattaggaaaataaataaagaagtatgggcaacatgactagatgcttattattggccaatttggtaaagagtcgatcgatgctcgagacccgtgacaaccttctctgtctgtctcacagctttattaggtcttacgtttcatttttgaatttctttataactaaatctgtaaatgtttctatatagatattctaattgataaactaaatatacttctctctgtttatttatgggttatttatttgctcatagtgtcattgcctcgtctgaccacgaccttgttcgcgtggttttttcccatgcctatacattgatctaaccatatgtgcataaaattacttacaaaatatatgtatgctaataaagaggactgaaatcaagaatagtcttcaaaatttgcataaaacgtgtatttttgccatatcaaacgtttataattctcattcatgactaaaaatacagttggagggatccaatgtctaagtccataataaatctttcaactatactaaacggacatgaagtggttcatgtgtaaatactcttacatgccaccaaacttaattttaaaattccaccaactaaatatttttgtctagattataagaaacttttgattacaaaagtgtactccccaaggccccaaatgttttgtatgaaaaaattgttgtataatctgatcaataatatatctgcaaacatattaatataaaattgttaaaatgtttgaacaaggaattagtaaattagtataaaatgtcagaacttacaaaattgaagtagtttgttagctgtataatggcatgcaaagagtgagttatggtttaattaaatgtaatagtaagtccattaaaacaaaagagctaagattataacattttttaactagcgttagggattatgcggatgtagtggcggcggtggggcacgagtccaagcatggacatgactggaggctacggtaggtggtttcaacgatatataattaacaacaaatgagtctttaacgttgaaaaaaaattaacgacaaatgagtctttaacgttgaaaaagtttaacaggttgattgatgtgttgattagttaatattactgatatatttatgttatttgtagcacattaaaattgaggaaacacattaaaaccttcatgataaatagtcacaacagttatatgtattttctttataaataaaaaaaaatatttatttcactcacatttatcttaaaattagccattgttttttctctgtaatagatctatcgaacatagttgctaccgaatttttcattttatcgaagaccattttaaaaatattataatgaacgattctttgcataaccagcatatttatatataagttacgataaaattataattagacgttgtgcgcttcaaataatcatcatcactggtgttgcttgagtctttatattgacaaatgtgatcgtactgagaaaacgtaaaaataatgttgaagaaaggaaaaacaaactgacgcttttgaaaaagggaaaacaaactattaattttttaaatgttttcaacaaaaaaagttttttctttttcttttgagatatctcattttcgtaacctgtccagctagatcgttttatctctatcttattttatgttcataacaagagtctcttatcctttgtcatcaattttcgccgaaaagatctctataaataccatcattcactttctatcacatgaaaactaaaaaacacaaacatcacatgtatacacacatatagttacaaacacacatacacaaaacacagatatataaaaatg

SEQ ID NO: 2248 - DNA, 3000 bp, Unknown
  misc_feature (1)..( 3000): cDNA_ID_2025511_gDNA_ID_1620511_Annot_ID_159122 3000 nt of promoter + ATG
tacgcgtttagaatactccatgttgaaaaagatagaaaaatcttataattatcacattttcattaatctatgggcttgaatggtttaccgtataccagttcacgtggtcacgtttttaaaacgtgattccgctatttttacctttcaaaattttatcaagttttaacgttttcatgtttaaaaaaatgattccattatatagcactagcgtattaaaaattataactaagaaacgtgattaatctacaataactagttttttttagcaatttataatcattctacataaactttctttagttcatttcattcagctaaccattatttagttattctattgttcagctatccatctcacataccaatcaaacccatcaaaacgagaaaactctaaactaaggggtaaagacttgactggtacattagttgaataactgaacaatacaatagcggaatcaccaggacgacaaaattcaaaacggaataaacttaacacgccaaaaagctacttaataaatgactttgtctaaactagttagttatacatttaacacatgcgaaatagattggaaaatagcttattaattttcacggtttatcactccgtggttattattgtgaatggtatacactcggcaaaatcacgttttgaaacacatgaacatgcaaataagacacataccattcaagccctatattattttgaattattcataaaattgaaaaatttgacacaaaaaattgttatcgtgttaccaaagcaatttttatcggtaatactcaattatgaccagaacatatactacttccccactttttgcttcaattttgattacttcatcagttctgccatttacatgcaaggtaccaaaaaaactttttttttttctttcgggttaaccaccgaaaatcatataacgttaaatgaaaatgttgaaaacaataagatatgcaattgtatcagaattcagaaagtaatgagaagaaacaattcgatataaaaagattacaaaaactataaaatgaccaaagtaaaacacacactaatacacaaatctcatgtcttaaaggacgccattggttgtagagaaccacaactcaatttccacggtgtacgtctacaatctccaaccgctattcccgcgtttgcgttctgatcgtcgacacaatcgccaccaccactctgcgtcagcgttaaactcgtcgtagcaatcatattctctaaatcgctaacgtaactcgagagccaaatcttctccgatctaagacccgcgttctccgtttcgaccgagtcaagcctctgttttacagctcgacatctctcactgttctctttgattcgtcgttcaagactggagatctcatgaatcgtgtcttccattaacttctgtttcttcaaacgcgacctccttgcagattcgcggtttgataacttgcgttttcttttcttctcatctatgtcggaacctgaacttgtcttctctgcgtttgccatgtttttttgttcaagagataacgtaaaaccaatgaagaatcacaactgatatagaatgataaacaaggaattggttgagatttatcatttcataactctgtccattgtcttttcataactcaagaactcaagaatttcaagacaagaaaaaagaatttcaagaatctgtgattttgcgaggatcaagagaaattaaacaagaagatctttatttatgattacgtttgattttaagagaagagaagagattagttagaagagaaatagaacaaggaagaagataaggataagatcgaaaataaggaaagtgggagaagttgttcgttttaggttgctcttatttatagatttaacattataaaaaaaaatctcgaatttttacattagaaaagattatccaaattgtataagaaaggaagattcatcgaatgacgaatcggaaaagaaagagaattttagtcaaacatttttattttttacttttttggtttattgtttttattttattttatttttattaggacataacagctaaataggtgttggtgttgttccttaataggtgaccagtaattactatttttgctttttagcatttaaattgttgttttgttgtgcatttagttgtcacactcgtaggataattcaagaaatatcctacgaaaactagattctataaccttctaattatgtatatatacttgtccaaatttaattcatcgttttgtaagtccctttttctgcaactccagtaaaaatagagtatgattgtctaaaatcagtaaactggatcagttaatgtcagtgggtaatgcattagctgacataaacacgttccgatcattatttcttcttagttcggttttaactactaagcatttcaaaaagttacacaaccattttaaattttaaattgctaatgggacaaaaatacctcatttagaaagaatcatacgtacgtaaactatatcgtcaatgaaacacgaagttcttttggaattggacaggttaaacgtggagcaatgaccgactatttttagtgtttttaattttggggatttagagattacgcttaacatggttgacaattttattattaaagaaaattatccatgttgaaagcaaaattccatttgatattacttttgtgtgggtcttatctgaaatgattttagtaaactaaaagaaagagactgtatatattgataagccagccctgctttcttttcaaatgaaaatacaaaacaatagaagatgggcgataatttattaattaatataatacttgaaaatacacgatccttatctgctcaccgataaactatatatcattatttatttatcagataaataaaatacttcaatataattatttttcataaaaaaaaagtagatgcacttcattggttggctagttttagaaatttgtttaggttctacggaccttttgttcgggtctgagtcaatcttgatatttgaggttttgaacaaactagaaaaaaatg

SEQ ID NO: 2249 - DNA, 2528 bp, Unknown
  misc_feature (1)..( 2528): cDNA_ID_2047850_gDNA_ID_1620511_Annot_ID_159125 3000 nt of promoter + ATG
catcgctacgtaagaatacaccaaaaggagattggataaaatcccccctaggtgtatcagcaccacttgttgctgcatcctccctccggtcagcgaaagcagcatcaaagaaaccctgatcagattgatgactgtccccacttccaccctcaaggtttgcagcgttattatcacctgctcgcattttcgacttgaccttgttgcccaccttagatgcctgaaatgttgactacactagtcatacgacagtttacgaaaagatcagaatatgcaacctaattagactaaccaaatctgatatctttgaagctatagcaacttgtataggctgctgagaatcaaggccaagttttgatacaaccgcctctttcgagtcaagaccaagcttagatgcaacactactagtcacccgactaaagctcgtttcaccttcttgccccctccttgtcttagccggagagcctctcgggtcttgaaagagtgccgaatcatttgtgatacatatgatcccaataagacaaccatcatcatcataagaaggagacatcgtagtcacaactgaaaacctctctccagctttgttctttacaggaaactcaccagtccaactctctccactactgcaacgccgagtgatattctgtgcaaccgaagcatcctgaacatctacaagaatatcaatcggatccttccccagtgcttctgaagctgagaatccataaagcttctccgccattgagttcctggaattttgaatctgaatatcagttgggacatatcagctactacaaagacatacacattacaacgaaactataggaatcaaaatccacaatcccagaaatgttctaactagtactcaccaaaagataatttggccatttagatcgaagacatgaacagcttgagccatagactgcaaaatattcaaatactgtttatcggtgaacttgcctgccgattgcccctcgcctccgccgccggcaactttcgcatggctctccttacgcaacggagaagcgtgacgaaacgaagccgcaccggtttttctccacatcggagttccgtcgttactgtttctcctcacaggacgttgcggcgatgctgaatgcgaacgctgcttcatctccgccgatactttaagtctcgacatctctcgttttagatgctcttggctttcttctaactctcgtatcttctttagaagctcctccgctggtggagtcgtcttctccattgccagaaaaacgcagtcaaatcaaatcaacggagatcaaatctgagtttgaatcggagaagctgaatcaaggtgaaaatggtggagaagcttgagagatggattaaggaagaagaaacagaatctggagagagtcaacaaagaaggaaaactaatttgcttatctttctttgttttgattcctttttttctggttttaggtttctcagtttgtccttacttttttctttaatttttcaatttctgttttttgcttcttatagagtttttctttttcttcttcctaattcatgaataacgattaaagttgtttattatagtggggagattatgtaactaaataatctagattttttctaatttcaaacaaaagtgttttggattagtggtgtgataaatggtttgtttcaaattacttaagtttggctgcttgtttggtataagcaattttttattttttggtttttttcctctgaaagaccattaaaaaagaaaaagtgaagactttataaataaatttttaaaaaacagataagatggaaatataaattgctttattttagtcatttaggcagcctatattttgacccaaaataatgccttaatttttagataattcagtataataaattattaaaatatttataaagaagataaattgtaaaaaatggtgataaacaaacacaaaaatttcaacaaactatttattaaaaaaaatgtattttatactactaggagactaacaaaattctctaatcgaattaaaaataactccaaacacatattacgctcaataaattagaaatctcatatgtgatttagtgtagtgatatactttaaggagctatccttaaatacaagaccccacgcaattaattttgcatgcaacccatttccattaattactcaagaaaaaaaaagttatctttttttggcaagctctcaaatttaaagtctcccattggttggacttctttgtttgtttctattatgaccgtacaaaactacagtacaaaatcatcatcgatgtgaaactttttttgtcgttcatgttatttatttatttattttcttgttttttttttttatcgtctgaaaatttattatagagatttcgataaattacaaagccggcgattaacaactaaccctagaaatataagccgacgattaaaagataatctcggaaacaaagcctaaaggaaagggaagcaaacaaggcaaaacaaaccttacatacaaagaaaaaattttaaaactgaaacaaagaagcaaccaaaacaacccaatg

SEQ ID NO: 2250 - DNA, 3000 bp, Unknown
  misc_feature (1)..( 3000): cDNA_ID_2990508_gDNA_ID_1620511_Annot_ID_159124 3000 nt of promoter + ATG
agttatgaaatgataaatctcaaccaattccttgtttatcattctatatcagttgtgattcttcattggttttacgttatctcttgaacaaaaaaacatggcaaacgcagagaagacaagttcaggttccgacatagatgagaagaaaagaaaacgcaagttatcaaaccgcgaatctgcaaggaggtcgcgtttgaagaaacagaagttaatggaagacacgattcatgagatctccagtcttgaacgacgaatcaaagagaacagtgagagatgtcgagctgtaaaacagaggcttgactcggtcgaaacggagaacgcgggtcttagatcggagaagatttggctctcgagttacgttagcgatttagagaatatgattgctacgacgagtttaacgctgacgcagagtggtggtggcgattgtgtcgacgatcagaacgcaaacgcgggaatagcggttggagattgtagacgtacaccgtggaaattgagttgtggttctctacaaccaatggcgtcctttaagacatgagatttgtgtattagtgtgtgttttactttggtcattttatagtttttgtaatctttttatatcgaattgtttcttctcattactttctgaattctgatacaattgcatatcttattgttttcaacattttcatttaacgttatatgattttcggtggttaacccgaaagaaaaaaaaaaagtttttttggtaccttgcatgtaaatggcagaactgatgaagtaatcaaaattgaagcaaaaagtggggaagtagtatatgttctggtcataattgagtattaccgataaaaattgctttggtaacacgataacaattttttgtgtcaaatttttcaattttatgaataattcaaaataatatagggcttgaatggtatgtgtcttatttgcatgttcatgtgtttcaaaacgtgattttgccgagtgtataccattcacaataataaccacggagtgataaaccgtgaaaattaataagctattttccaatctatttcgcatgtgttaaatgtataactaactagtttagacaaagtcatttattaagtagctttttggcgtgttaagtttattccgttttgaattttgtcgtcctggtgattccgctattgtattgttcagttattcaactaatgtaccagtcaagtctttaccccttagtttagagttttctcgttttgatgggtttgattggtatgtgagatggatagctgaacaatagaataactaaataatggttagctgaatgaaatgaactaaagaaagtttatgtagaatgattataaattgctaaaaaaaactagttattgtagattaatcacgtttcttagttataatttttaatacgctagtgctatataatggaatcatttttttaaacatgaaaacgttaaaacttgataaaattttgaaaggtaaaaatagcggaatcacgttttaaaaacgtgaccacgtgaactggtatacggtaaaccattcaagcccatagattaatgaaaatgtgataattataagatttttctatctttttcaacatggagtattctaaacgcgtaggagtttaattgattttaagtgatttatttgtctataaatgttatatatatattcgatgtatagaacaatagatgaactatcataaaccataaaattcaatgatttcaaatatgatcgaggtgattttttagctctagtgatatgtctatcaatttcaagaaaaatcgcctccttaaactgaaacaattcgtagagcatatccgttctttgtaggagtatgaaatatgcaaccacaagtccacagcaatggtcaggaatgaaatatgcgaccacaagtccacagcaatggtcaggaaacctcacaacggcataagtttatcttcccgataattcttttcgctcagaaaatagaccatatgacaagtcacaaaacaaaaagtccgtaagacatagtcttagtatgataacgttctagatcaagcaagagaaagtgacataagtatgcatatattcgtgtagagctcatctatatatgcacaataaatctttatcactttacttcaatatatacgaacataagttttattgcacaattgattaaccactttcacttccataagaaagtataagccaaaaaaagagtcctcctctctttctatcattctctccaagtattcattagtcatgtttctttacatttatttatgtttgtgattaggaagaaattataacacgttctaacttttaaaatacttcaaaaacacattaaacaatgttttgatgaatgcgtgattcacaatcttcaaaaaatattgctgaatcttgaagacaaaacagcctattcattaacaccaccagcaaggacgacatgttaacgaccaaaattgcaataaaataaaacaaaagatgttacaaaaacaaatttgtaataaaaaaaaactgttaggtgtttctctttgtcaatgtaagatagagaaatcaattttgggtagaaagaagttgtgaactaactacctaccaataagccacatgactgtgagaagcttttgtttccctcccatttctctatattaatggtgcttcctctctaaaccattcctctctctttctctctaccaccatttattctctccttaatcactgactcgactcgggtcgtgaccaggtctgttctcttctaacaattcgtaactttttttcttagatctgtcttgattccgattcgtgtttttgataccaaagtttcgatatttacgaggagggttgcgtaaaaatcggaactttttttctttctcaatcccagattcgttaatggagtaatgagatctgtttgttagtgattatcgaattagtgtaatgttgcctaatttcgaattcgacattgagataggaacaatttatagcttgtggatctgatcattgtctctcttttgtttgttgtgattctcagttttttctatctgagct

SEQ ID NO: 2251 - DNA, 3000 bp, Unknown
  misc_feature (1)..( 3000): cDNA_ID_2047860_gDNA_ID_1620511_Annot_ID_159121 3000 nt of promoter + ATG
catttataatcttttaatgggttcaatatagataattgctgatccgacaattagtatattctcgtagttatcacgattcatgatgatgatgatgatgatgattacatcatccaatttgttagacaatttctatggatgacatctgataaacagagtgagaagtttgcttaacgcggaacatatatacactcaagtatttaaagaagatcacgcgcggcgattgattaagcgagaacgacgctacagtaaaccaaaaccaaatctagatctgtgcctctccggtcacggtgcttctcaccggtggccggagagggcttctccctcttctcctttcctctctcttatctcctctgcctctcctttgaagctccggtggtgttcaaatctggcttgctcttcgtctcttgttggtggtatgcggcgagtggtcacgcacggagcaaaggacgtgcggcgtgtctctctccgtttaaggcagtggctttgatgagacgactgtagcggttgtgcggctcctatcgacgggaccatcttccagatctgataaattggtggtgcatcgccatgtttcttcagacatcgtcgttcttctttgatttgggcacaacggtgagttttcggtgtggcagatcttctcttctcgggtctctctacctgttttttctccagctctggtgatggtgtgattgatccgacgggcttctcttgtggaggcaatccaaggagtcgtttggctcttgtggattgttcgtggtggttagtggcgttgtgggttttgtttggtggtcgacgtctctcctccattggtgggcagttgagggtggtagcctcttcggccatgggtatggattctctgtgtccattgggtttcgtcccttttgcttcatctctggtttgctttcaggtggagttttgttgttcatggtgttgtcggtgttggttcatttggtgaaggtgagcctttgggtgttatggctatgttcaccgagggttgaatagaggcggcggataggtctaagtggcatcactaactcaacgagttagtgtagaagtccgcggttgtctttacgtttttgcgttagttctttgagaatctgtaggcacctatctcgaggtttgtggacggatctcagatagttgagctcgtggcaacaacgatgaggattccaatacttcggtattgtggcaatcacgcaaatttccaagtttcgcggacttgaaatcggtgtttcccttcgcaacttagtcataattactcagctgcaatccgaagttttttgagtagtaatgttgtttttaattttctgtagtgtgctttaatccgttcttgtattttctgtaacttctgtcaaaaatcttaaaatggtataaaatttaactttttaccaaaaaaaaaaaaagtttgcttaacgcttacatatgacgtatctacgtggatgatttatgattacaagcttttgtagttacattttctttaattgttatttatcatatttttgttaattaataatgttggatcttttttttccaaactaataaaacttagcaatatgtagtatatatgccatatagaaatacatactccaaattattttcttttctggtgttaattttttttttttcgaaaaaaagagaaaagagttaagtctgtgttaattctttctctactaactttaaaagagagagatcatgttacaaagaatagagaacattgcgtaaatctctccatctcaaactcttcttagtttattattacaaagccactctacataattgggatgcaaacgacaacgttcatgtctatagatggatagaagataacatcatcgctcatatttagttaggcaaagtattttattatatagttgaaagagtctatttagagtccgacacgtgacaaattttctaaaatatgtaataaagttgcaacgcgtaacaacaaatcgattaaattttgacttatttaaaatattttatatgttattggagtgtacaagttttataatttttttttcttatattttatcttgttattttaataacattacaagctatgagattaaaaatgcagaaatcaatttacattttgttacttttcaaagtactaattaaacagagtaaaatattgataaaaatttgaaagttccataatcttttattttgcaggataccagtcaaaaatggtaagaatttatcatttcactacatagaataccaattcaaatatatagctcaaattcccccccccccccaaaaaaatatagctcaacataaagttcactacataaatccttattttctcaatatatcattttatataatttttgttcattactttacatggtataaattttatcgatttatattcaattaggtaatataatcttttatttttaataatatcatatttaaagcatgatgatacgcgatataattttttggataaaagtaaagacgcgatatgattattatgtgttcaacataatgtacataagataaaatttatttaaatctattaattttttttataaaatcaatttgaatgtgtatgtgacattgggacatcatctagtttattttgaaatatatgtaattaggtagtatgaaactcttttagacaataaaaggtagtatgaaactctttctgactttggtttttaaacaacccatatatgtctcttgtaaatttactttcaaggttggtttgaactcttatttcagtgcaactggttggtttttggttggttagattttgtttattaaatgtcggcccattagttagatggcaaaaaccatgggcttagtagaattctaatctataagtccaagcctctttttgataaaagaataaatagaaaaaaaatgtggctgctgggattcgagcccaggtctccacggccacaacgtggaattcttaccactaaactacagccactttgttggtttgaagcatcaagaaacaaatacaaaacaaaaactatctgatgataatgggccatg

SEQ ID NO: 2252 - DNA, 3000 bp, Unknown
  misc_feature (1)..( 3000): cDNA_ID_2047871_gDNA_ID_1620511_Annot_ID_159117 3000 nt of promoter + ATG
ctttcttctatgaaattgattacgacattactgtgccacgtcagcctcgcaatccaggtcaattcgtgtcaatccacacaaacaaataatttcttacaaaaatagtaatgaaaaggacgtaatcatgcatatctaatttatctacatcttatggtgattaatgatcgtatgtgtttctctgtttttttaattagactgaagaaatagaaagaaaaatatttgaaaaagtatactaacaagtccaattgtgttgaatagatctgaacaaccgataaagatgtagtcaaatataaaatcattacaaattttatatgaagagatcgcatctaatcatcctcgaaaccgacaattcaatcggttattaattataacaaaaataattacttcgaatctcaatccgaataattgatgcatcttatatattgatattgtggtggataaaataaacaaacaatcgcattaatgatgaacggctatacctctagacaaacttatacaagttggaagaaattgaagataattttggatcaaaaaaagtttgtggttttgcttggaggcattgccaactaacaatatctgtctccatgtatctctctattcatatcctcatatgcaattatgcatgtacatgtacgtatacattcatagatatgcagcatatgctctatattgtatagatctttagcccataagtttcctccacatgagactaaacgttgattttgataataaaagcgtaattcatctttcagaaaattattgaagcaataatactaattgaatttttgaaaatctagttagctatcaccacttatagagttatagtatatacttcaatattgtaattattatgacataaaattgtgttcattaaattggcaacgtaacgtgactttgatggaagaatgcgtcttcttgtttccaaccttccaatgatattagacagctctatctctatcttaacgactcattttctttctttggattgtatcaccctctatccacacaactcatctcatctaatcattttttatatatctgcatgaatcaaaatttcgaaaaacaatttcataacatttgcaaaaaaggaataataaaagaaatcacgtacatgtgttagtttatgtaacaaatatacaactttggtctccataaacaggaccattaattacaattgtttaacaaatcaagggaaaaaaaaactgtactgcgatcccttctaaatttactttcaaatgtgtaaaaatttatcacattgatgatcatcaaaatgcaatacttactataccaaacaagttaaatagtatgaatcttctgcttaacccgcttgtcttttaatcaggcatatctataaagtaatgtctttttctcactttaaattctatattagcaagctggaagttataatttaatacaattgtgtaagacaaaaaaatgatcaacagaagagataaggcaaaggatgggcccgaaacaagcctaatttgataacaaatctaaatttgatccatttcataagacttctaaacttttagccatctgggtaacatcatcagttgcagtgtcatactatcactcaaatccgatccgaagttatattcttctacacgatatgtcacaagtttgaaattaatgctccatatgatatttcaggactattataagttatcaagaacaattaagagaaagcgaaaagtagttagttaaccaataaaaaaataaaattaaagtagattgtaaaagtttaaaaaaaaaagagaggatcaaaacatgacgaggttattcaatcaagagcattcgagtaaaatattctagcaataatttgaaatcacattattattattgttatttttaaatccttagtcatattatttatgtgcctttttgccaattaagaaaataggtaaaaattgtcaaaaaaaatttttattgatatacggttaaaaacaggttaaaattccaaaaaaaaaaaacacaccacaaaactaattgaaatgagaaaacaactacaactaagaaagcaaaaactatagaagcaagtttaccacaatttcagcatactttcgaacggtatacaaacttcaaaagtgtgcagattgttgttggttctcctttgaagatttttatcaatcttcaaaagagagaaagaaaagcttggtgtttctagagatctcttcaagttcttgtgagaaaaggctcgaaaaattgtgacaaatgcatccaacaatttggttttagtccatgtaattattctcatattctccaaaggaaacagtcagtgcacacttgtgcacttccccttctctttgcaaacaacacaagaactggccaacagaagtgtaggctaacattctcctacacataaacaatacgggcaaaagcccaaacaaaaagaaagcccaataacttaaatgaaaagcccaatatgtaaacttggaatttttttgacatcagacttcatcaagtgacgaaaaaaacaaaattctaatttataaattttaaaccatttctgtagcaattaaataattaacgaaggttcacccaaacaaatcatattttaactaatttataataaggttttcttgaattaatattccttagttgcgccgacaaatacacgaaatgaaaatataagtttgttataaatttgacggattttaaattaattcgatgcataaaattttcctttttttttgcttaattttgtttttgttttcttctccagtcaaagaaaagctctttgcgcaacaaaataacagaaaacacagagacaagtgagagaaactactagagagaagaatgtcaagctttcttggttctacgttaatggaggtttcgagtttctgttgatttcttttcaacctcaagtaaacttcaaatctcctccgtctacttctgtatctcttcttcttcctccaaaaaccctgaatttcgctccctctgaccaccgtactgactttaccggctccattcggtgatctacggaggtgatagctagct

SEQ ID NO: 2253 - DNA, 3000 bp, Unknown
  misc_feature (1)..( 3000): cDNA_ID_2991329_gDNA_ID_1620511_Annot_ID_159119 3000 nt of promoter + ATG
ctattaatcatatagcaagaggtctggaggtttggttgattatgaggatgacgaagatgagctagagaagagtaaaagacagaagctcagttcaacaagtgaaggaaataagaacaccccagaacaaggtggtgaagctaaggaacctggagaactctaaggagctaatgacgatagcaatagtttagatgaagaaattgacagcaagcagatgtaaagagatgttgagattaacattcttgacaatagataggatttttgaagaatagaagaaactgtgtatagagggttaaaatgatgcttttgaagacaactcgatgatccgtgtaaatgactatgcaattgcattttgtaaatgaatcttgtgtgaaaatgaaattacaatttcttaaagagagacttggaggatttcatcatacacccgaggatttaagataatttcaggcaggtgtttctgtgtatatatatcagatttttttgaaacaggtaatgggttgtttttgtttgtagatgtcttgataatttccgtttctcttgatgtccacatttaccatttacctctaattgatatcatcaactcaagcgtttttacaaacaccaaaaagcgcctatttgcatcatacagtataattaaataattcaaagttcaaacgatgaaatttcacacatattcatattatttaattcaatttgatatatcttcatagagaaacaatttgtaattttaggaaaaaaaggaaataaaaaaggagtgaaggacttgagagaaaataagaaaagagtttgtgaataatcttttgtctttctctttcgtcttcctcgctctaacgccgccttctcacactctcaaattggctcatccattccaagcacgctccttcgatcttcctcttggtacgctcgtttctaattgtaagttttcttcaactcctattccaacgtttgtgtagatcttgtattcgagcaattagatcgataaaccctagtttctccgtggatattctagcaacttcccctagatttctccgtatataatcgtaaggatttagaaatcgaattatattgtgatgtttagttaacgaaaacccagtttattgaatcgtctccatcaagtagaatccctaatcttagatcccctgcttagggtttcgaaatttgtctattttgttcagctttatactgattctatttgtccaattttgaagatttgattctaagtctctagtatattctttgttatgcaatgcagaaacatgtctaattcaaaggacgagaaatcacaagatgcagctgatagaatcaaggctgcaacactcactgctgctaaaggtctaagccgtacacaagcggagagagcagcggctgcagcagcgagaaacgttaacgcttatggccagaaagaagaaggtccgagtagatggcaggagaaaagagaattaaagaggcagatgtatttgatgagtactgagaaagctgtcaggcttggtgaaaggaaagataaaacaatgtcagcttcagccgtgggaagcagtgcttcggcggcttcacagtgtcagaaatgtttccaagctgggcattggacttatgagtgtaagaatgaaagggtttatatctcgaggccttcgagaactcagcagcttaagaatcctaaactgagaacgaagccttctgttgatgatcttgatggtagtgatgatgatgatgaagaagaaaggcctgatgcaactaatgggaaagcagaagttgagaagcgatctaagaagagtaagcgaaagcataggtcaaagtctgattctgaaagtgatagtgaagcctctgtgtttgaaacagatagtgatggctcatctggagagagtagttcagaatacagttcatcgtcggactcagaggacgaaaggaggaggagaagaaaggccaagaagagcaagaagaagcaaaagcagaggaaagaaaggcgaagaaggtacagctcttcttcatcggagtcatctgagtcagaatcagcttcggactcagattctgatgaagatagaagcagaagaaagaagaagagcaagaggcacagcaacaagcgtcgttgaattggttttaggaaatcgataagtggatgaaaattttcatgccttagaatcattttaagcttcttaaaggaaactcactgctatgttacttctttttcttcaagttcgattttttctttttgtcagccatttatggctttatgttgtaacaaactgataaatctttagaatctcctcaagttttcatagctcaatagctccttggagaatgttgtaaacctaaacgaaatacctttgtgttgttatgatagagagattttagtgactgttggttatagcatgcatatattcgaaggatggaggaggttttttggcattcaatggaaattatctatgtactagatactctgtaacaaaaaaataataaccacatcaatccaatactaattggaaagtaatcagttcaaacaaaattaaaatcatcccctgaaacatacaaatatgtgtaataaagtcaagggcttcttttgtaaatatccgtaatttatcttccagaaatagttgcattaattatctctgtgactctgtccccagtctccttcctcacagactgatccctctctctcccaaagttgcattaagttttaaactagtacaaagtctaagcttggagcttccactttgtgttctccttgaaaagtttttaccttttttcaatctctgttgttgatacacctgtaaagctcatattgcacacaaagtgttcgataaaatgcctagccgaaacaaaaattgcatataactggtttgtttctcactctctatccctcaacttcttgaattttttttcgtaggaattctctagaggtgttatttaggaacataacggtttaatcgtctccatttcgttggtactttaatcataacagttttggttttgtgatcttcatttatagcttctgagaaaacaagtgaaagt

SEQ ID NO: 2254 - DNA, 3000 bp, Unknown
  misc_feature (1)..( 3000): cDNA_ID_2991329_gDNA_ID_1620511_Annot_ID_159118 3000 nt of promoter + ATG
aaataaggtctgatggttatagttgcacgtaacaattagcagaagaaaaataataaaaaatgtttctcacagagtaagtttttcttgccttgtattgatagttcttcgatacatatctgctagaatggttggtataagatccgtaattcttctttttattgaactacaatacatcttgatttctattaagagttctttgataaatttttcaatttcgcagcaaaggatcatttgggatattttctgtgagaagcatctacctgaattagttgatttcataatggcctcatgtcctgaaagacctggcgatacatctgaaggtgcattcgtaagagttggcagccatcgtggaacaaagccgggaatcctattgcgcatttgtgaattgctgtgctcttgcgttcagctggatccatccaggacaaagtaacctttatgatgattatcacattatttctgttttagtgtatcactacagtagccatctaatattcttgtgcatttacttctcttgtctgctacgtgcagttttctccataacagtgtgatagaaaaggttttgcttctcactcgaagaaaggaaaaaaccctagtggctgcagctgttcgatttgtccgcactctcctctctgtccatgtaagtaaagtagtcttcgatcagcattttttcttataggctcatctgtgcattctctcttgagaatgaattagacaattgattctataatggctagaaaatgttctcggatgacaataagtctttaggtaagttatgcaatttctaaaatattgttctatttcagaatgataatgtccagagttacattgttgagaacaacacgctgaaaccgattatcgaagtttttgttgctaatcgtcatcgggacaacctgatgactgctgctgtgttggagcttcttgagcacatacgcaaggttcctattatttcatccttttcttcactgtttctttggggtgttcctctgtacataatacatattactgttttgtgtgcaggaatatgcagtgttggtcaaatacgtaggtgatacattttgggaccagctagctccatttgagaacctgcgttccatcaaggatttgaaaacgaaatatgagaaggtatcattcttcgatctaacttctactttgaaaagttttcctaaactattctttgtttaacaatgtgtcaatgttgtcttagggaccaaagagcaccactgatgatgaatctgatatgagacaagatgggcgtgctctggatgaaaaaaagccagcttctgcttccagtacacagatggaagaagctgatccccataattccaatgccacagctgcaagttctgcttctagcacacagatggaagatgctgagccctataatcctgatgtcacagctgcaagttctacttgtagcacacagatggaagtagctgagccctataatcctggtgtcaccgctgcaagttctacttctagcacacagatggaagaagctgatccctataatcctgatgtcacagctgcaagttctacttctatcacaccgatggaagtagctgagccctataatcctgatgtcacagctgcaagttctacttctatcacaccgatggaagtagctgagccctataatcctggtgtcacagctgcaagttctgtttctccgaggtatttgtttctggtttctctcgatagaaattcattagaagcaacaaatatagttaatagatttgctttctgttttctattaatcatatagcaagaggtctggaggtttggttgattatgaggatgacgaagatgagctagagaagagtaaaagacagaagctcagttcaacaagtgaaggaaataagaacaccccagaacaaggtggtgaagctaaggaacctggagaactctaaggagctaatgacgatagcaatagtttagatgaagaaattgacagcaagcagatgtaaagagatgttgagattaacattcttgacaatagataggatttttgaagaatagaagaaactgtgtatagagggttaaaatgatgcttttgaagacaactcgatgatccgtgtaaatgactatgcaattgcattttgtaaatgaatcttgtgtgaaaatgaaattacaatttcttaaagagagacttggaggatttcatcatacacccgaggatttaagataatttcaggcaggtgtttctgtgtatatatatcagatttttttgaaacaggtaatgggttgtttttgtttgtagatgtcttgataatttccgtttctcttgatgtccacatttaccatttacctctaattgatatcatcaactcaagcgtttttacaaacaccaaaaagcgcctatttgcatcatacagtataattaaataattcaaagttcaaacgatgaaatttcacacatattcatattatttaattcaatttgatatatcttcatagagaaacaatttgtaattttaggaaaaaaaggaaataaaaaaggagtgaaggacttgagagaaaataagaaaagagtttgtgaataatcttttgtctttctctttcgtcttcctcgctctaacgccgccttctcacactctcaaattggctcatccattccaagcacgctccttcgatcttcctcttggtacgctcgtttctaattgtaagttttcttcaactcctattccaacgtttgtgtagatcttgtattcgagcaattagatcgataaaccctagtttctccgtggatattctagcaacttcccctagatttctccgtatataatcgtaaggatttagaaatcgaattatattgtgatgtttagttaacgaaaacccagtttattgaatcgtctccatcaagtagaatccctaatcttagatcccctgcttagggtttcgaaatttgtctattttgttcagctttatactgattctatttgtccaattttgaagatttgattctaagtctctagtatattctttgttatgcaatgcagaaac

SEQ ID NO: 2255 - DNA, 1845 bp, Unknown
  misc_feature (1)..( 1845): cDNA_ID_2153039_gDNA_ID_1620512_Annot_ID_159132 3000 nt of promoter + ATG
gatcaaaagaaaaaataataagccagaaatgtggttaaaaatgagtttcacaggaaaaatatgattaaaatggtataattttgctacatgcttatgataatgaaatatacaagtagacagaacttaagttgtacgtaaaaatatttgaccgaaaaagtaaagttgtagattttcgtcaagtctataacaaggatatagaattagagacaaaaaggaataaaatccattacagttgaatcatatgcatttccattttctaaattggaaactacattttattaaaatcttgactggtaaaaatattgactaaatttttagaatatacattttaaaaatgggaaaaatcttttataaccaaaacgtaaaataatttttgatatcaataagataggtaatattggtttaatcaatttatcatatatatatgagctggatatgaaatttaaattttaaacggacaaatctagtatatttgaacataataataaaagtaattttaagtatggtaaattttatcaaattatatatagataatttactttttaatcaataaataaattgctaatcctgataaaaaaatgtaaatttttataaaaataacatagttcgtacttcctctttttatcgaataacactgttatttcttcttttaacaataacaataaaatgccataaatcagactcaaaatgataaacaagtttagaataactaactatggtgtaattgtggaagataaacaaactgaacataaaatagtattggtggtagattaaacaataggcccaatggaagtttttcattaataatccaacaagtcgccagtttttttgcacttttaccttcaattttttttattaaaaagggcagggtttttcgatattgtaggattaatgtgtattgttttaaacatagagggtaaaatagcaaaatccagtaaacaaaaataagaaaacgcaaacgtcgggtgttttgaaacgagccaaacacagctttaacttgtgggctatatatatagctttgcacacataagaacaaaacataatgtggcttggcttatctcctcagcacaagtgtttcctctttactcttcaaatccttcttcattctcccattcacaattccttcatttttcatttttaacttatcctccatttttttttctgaaaacacacaaaaaaatatattcggttttagaattccaagaaatccgggaatgagcatatctctctagctagactcattccagcaaactctgaatcaatttcccattttcagatccaaatccattgtgttaaaaagaggtaaaatcactctacatttctcttattgttttttttaacaaatttgttcattggtctttgtgcttattagattgtcgaagaagataaaatagatttcgaaataaattcacaaccagaattttgaggtttattagaaagtagaagaagaaaggtcactgtagattgagtctaccattgttcatttgttctcatcttgacatcttcaatgtagcatctagagactccaaattaaataaataaaatattcaatattttggttttatgaaaaggtagaagaagaaaggtcactaataaattcgagtctactattgtactatctttttttttttttttcattgtactcatctttaatggtagacacgtattctgagagtagaatttaaatatctataatgaaaaaaattctttcttttcgtaatttattgagaatctaatccgatgtatttggtcaatgcaacttatttatctacattgcagggattaacaaaattgaatagttcttaacaaacaattagaagaaaaaaaaagaggagaaacaaaatg

SEQ ID NO: 2256 - DNA, 3000 bp, Unknown
  misc_feature (1)..( 3000): cDNA_ID_2153058_gDNA_ID_1620512_Annot_ID_159139 3000 nt of promoter + ATG
aaatgatttgttttgtgaatagttgattccagctaatgtggtgaaagacaatcatcttacgtttggtgattgtatcaactacattgatgaagaagggaacttagtaggacaaagagggaataagcagatgataggatttgcttcaaaggatgcatggcgacataatttgcagaaggattagacataataacatgaagatactgtcaagtatgagctccttcatgaacttaagtacgttcataattccacttgatccacaactttgggctattggtataaaaagctaactttatctagattacatgctacatctcaattcaagatgtccatttattaaagcaaaggcatgactttatcttcgactagaaactggtgatggaccatcctcaacctccactagcatcatctccacctactcctaaccactaacccaattatccttttcaccttttcctctcaacactatcctatttttaggtgatttagggaaaagagaaatactacactttgatgtaattttttttttaattgaattgagctttgaatactatggttaatatggatgaaagaaaacacacgttcctactaatttctttttctaaatgatgacgttttctcaagttacttatcgtagtctaatcggttattgacaaaaatgatctagacgtttgaaaatcattggccaacctcttcactagatagaatttttatttctaaccattacctacctgatacacacaccaagttctgaatctagagatgatcttgtctcatttgtttatagactaaagagtatataaaagctggattcatgtgggtcatccatcattaatcgtgttcttcaattcaccaacttcgtaggttccgcatcttttgtactttctttctatttttaatcttgcaatatcaaaaataaatatatacaccttttaaaaaaattctgaatatgcatatggtaatggtatcatcagaaaacattgaatattgaatcgtctatctaccaatctcttcaagttgtgaattttatttatcaaaaaaaaaaaaaaaatcaactgaaacgtcaatgttatgttttgcttcaatctaaagaaagttgtaccaaaaataaagtacttttttaccaagaaatttcggattgtagccaaaatatgtcttgttttattttttttgttcaccaaaaatatgttaaactagttttttgactttttcccccatgcgttgttgttgttattcggacgaccaatatttaatacagtattcaagtgtagctaagctactgattccagataaagtaaaaaaatgtctttgataccaacttcactttgaccaattatcgaactctttaatttcataatatatagctttgacaaatatcccatcagaattcataaatcgccacatgaatcttataattgtcaactatgtgcagtccaatattaatatcatggaaaactagattactagcatttaatttcttaattgtatttaggttatagacttaacatggtttttcttctagagcattttcactacatttttttctttctatgttattattttatgttttacttattgttacatccatttacaacgatgttggataaaatatttttaactgttcagtccgtaaatgactagctaaatttttacggatatatttttacataaaaaaagaaattatttttacgatttaccaatttaactcttctttctctctaagttttcatttattaaaaatgatagtttttttaagaaagttatttgtatttatttatttaaaattggatgcaaaaaattacaaaacttggaagaaatattgttaacccatctttatcagtatagaatttctgattactccctgcgttgaaaataagaagatccatagaacgtggtaatgtttttttttttttttttctggcaagaaatggtaatgttaatcaattagactcatgactaaagctggaaaatttgactaaaatggtattatcttgcattattacctaaaagctcttcttgcattactctttcatgcaaaattgcctccaaaagtcatacttcgaaatcatggctttgtaactcacccttgccaccatctatctaaacttattattgtttaaaacaaaattgattttcaaagaaaaaaaaaatataaactcccaccggtcaataacttttaattttcacttcaattattcataaaataaatatatacaccttgattctttcttaataactggagttattttgaatttaaattacttttgaaatacaaaagaaagtaagataattttgccatttaaaatgtctacaacaattatgttaacacttaacatacatttttagaaccaaatggtaatggtccactagttaaaagatttcttatgaatgtctttttatgcagagttcgaattttctcacaacgattttaaccattttcgtcactcgcaaaatttttagtggataacaaaaaaaaaaaaaagttgaaatttaatggaaatttaggagatttgtccaatttttaattttcccgattaatttaaaaaatctactttacgccttttattgacaaagatgcatattaactatatatatatatatatatatatatatatatatatatatatattataaactaaattttgtagaacccatcagaagaaatttgtacttttaactttaaaatcaattaaaaaatttcaattcaaataaaaaaaaatccaaaattgtttataaattcaagaaatataacacacaagttgacataaacagtggagagatttgtgaaatgtgaactcttttgacgtctttctcatatttcgtctcgggacaattcacacgcactgaatcatctctctcacgaggactattcagccatttgcaaacgcacacacaaacgcacacgcgtttatttttttttcgccaaatcaaatctgaagagttcctgtatcttttaaccgctcttcttcttcttcagagagcttcgttgattgaacggaaaaa

SEQ ID NO: 2257 - DNA, 3000 bp, Unknown
  misc_feature (1)..( 3000): cDNA_ID_3066718_gDNA_ID_1620512_Annot_ID_159142 3000 nt of promoter + ATG
aattttatgtcttaagggcgcttgcggacaaggttgcagcttctggattctatgttgtggttcctgattactttggtggagatccttataatccctctaaccaggacagacccatccctgtctggatcaaagaccatggctgtgttcgttcctcctcctctcctccttataataactgtcctatacattctcaacttctatttgaagttttgttaacaagtttgactcaatgtatgtgttattgttctgttattttgatagattccatctgaatcagttcatatcctcttttgtttttcaggataagggctttgaaaacacgaaaccagtacttgaaaccataaagaacaaaggcataactgccattggagccgcagggatgtgttggggtggtgagtttttgttagaaatctatgcctaagagatgtgacgctctctttttgtctaatggatagtacttttctctcttgtgttattcatcttcagcaaaagtagtggtggaactgtctaaagaagagcttattcaagcagctgtgttgcttcatccttcttttgtcaatgttgatgatatcaaaggttagtgactttgctacttccatcttgattcctcacatagaaccaaggaacattagttgtcatgccttgcctaatgcgttgtaacatttagagtcacctataggattgcgtaactgatctcgccatgattagatactatcattattactgtaaagaatactaattcacatttgcaaacataaaaaacactgtgattggtccggtttctttactttcaccggtctttgatgatccttatcaatttcacgggtttattgcaggtgggaaggctccaattgctatattaggagctgaaattgatcaaatgtccccaccagcactcttgaagcaatttgaggagattctatcttccaaacccgaggtaagctgctttatcaccgcaactcaacagtgtaatttaatcacctttatctaactttaaaacggatcctgtaggtgaatagttacgtgaagatacacccgaaagtgtcacacggatggacagttagatacaacatcgatgaaccagaggcggttaaagcagcagaagaagctcacaaggagatgcttgattggtttgtgacctacatcaaatgatttgagaaagaaagaaaggtattgtctattacttcatatatgcaaagaataaaaattaaagagagacaaagcaaaactcttggttggtgtttcaatttctactttctatagtcttttgaagcattctctgagattctgtgataccttttgttaatcattgttttatgatttttatatgttgacgatacgttacccttctcatcatcttcttgtggtaagcaaaaaaagttaccaaaacaaactttgattgaaatcaatgtcttcttcgactaaagaagtaaaaaagatattgtacatatatacagaaataatcaattcttcttcttcttgatgaatttgatagtcaaaacgcaaaattattgattgttgagacttgagaccttgagtaatttttttttttttgggtcaaatgagagtaatttataagagtcaaaatcattacatgaaaatgatttaagagagtttgtccacacacaaaaacctaaaaaaaagaaaactagtaattgacaaaattatacgataaatttattgtataagaaattgatccatatattatttatattgttgcttaaaaatcgtgcaaaaatgtggacagaaaaaaaaaacttgccaaaacaagaagatattgctcaagaaagtcactaggttctttagagaaatcaaataaaatctcaattcataatcaatgtagatttctcataattaaatttgtattacaaacttacaattatcaaaaacaaaatctgtaattacacaaaaaaaaaaaaggaaaatagaaacaaaaaaaaatccgcagaatatctccaaaaatcaattctactaacacaaaaacaataatactaataaatctatttttctattttcaaggaaaaggaaacaaacctttatagctcctctctatcgtctcgtctctataaataaacgagaagctcacaaattccacaaaaatccactctaactatgaaacaattagggttttgaaatttacctaaatctctccgtaatcatcgatcaaaacgatgctcgagtgtcaatcaatgatggagaaattatcaccgttcgtagacgtcgcctctctggaaatcgagtctctgcgaagaatcaaacgcccgaaacgcttctctgaagaagaatcagaagaaaccgagaatacgacgaattcatcaaacgcggtattcggattccctaacttaccagaagaaccgaatcgcgatatggatcaaagcgttttgtgcagaatctgcgttcgattaccagatgggagaagaatacagagaagtttcttaaagagtgaatctgttcagcttctttggtcgttttgttattcgcagattggtgatgaatcttctgagagaaagcggcgttttaaattgattcaagggtttcctggggattataagaatctttattttggatctaatactacttttgaacaatctgggcttgctaattccttggtttctgttacttggctctgaagaatcttctttcgatctgtaattagaaaaataatttctttcttctaccaagtttatgtttactcaatttctcgaatttgtacttggaaattgcaaatttcatttggttttcttgaatcgttgttagatatttccgatcaaatcgtttttagataacactgtttcaaagtcaatgtcgtcatcatcatacaagaagaacgtatagtttttggtttatctttttgttgcttcttaagtcactctttctcgcatagtttttgaggtgacgaagttacgtatacggtgacgtagcaaaccaagcccataagcccaaattctaaacaagcctaagacaagtgagcaaggagtgggtaaaccaaaccataccaaa

SEQ ID NO: 2258 - DNA, 3000 bp, Unknown
  misc_feature (1)..( 3000): cDNA_ID_2153103_gDNA_ID_1620512_Annot_ID_159157 3000 nt of promoter + ATG
gcaatattaattaaaaatgatgaacccaggttctttttccttaaaaaatgtaaaaacaagttgaaattgcaagttccttttaccatcaggttttttaggctcggatccaaaagatctgttatttgctcgttgtatatctgcaataaaagatgggaaagggaaccatgtatatcaagctttgataaatgaaaacatcataagcacaaaaactaaagttgaatccactcattaaacctcgagaaacgaacagcggcactggtactttagctgcctttcagcatgctttgcttgctcctgcaaacaaaaaaaatcaacttttgaatgttctgcctctctcacataatgaaacagactgaaaggaaacaacacgaagcatcacctcactgagacgggcgaagagcaattcaaagacacgtggagtcaaacctctttggtcaccactaaggtgctcttccaacaatccatttgcaggaccccacatggtatacgttttcccactgccagtctggtgaaaacaaatgttagaattacaatcatcttgagaaattgaaattcaatcccgtagaaacagattgagaaatgatgactacctgtccataggcaaaaacagaactgttaaatccagcaagacagttctcaacaagaggggctccaacaagctgaaagatctcatcctgcaaagaatacaaaaaagataaagacttgttagcctatataaatcataagataacattgtatagtgaaaccccaatcatgaaaactaaatgcctgcctgtgttgactccgggtcagcaatcgaatcgaatgtgaaagtctgttcattaatagtgagggcgtcgttggagatcttttttactatcatctcctcttcctcacctttgcttggaggcttcattcttactataacctacatatgcccaaagacttagagattagcttaaactttactcagaaaacataatatagtttctcttcaatttagtaactataaacttctaaaaatacaagcaatcatcttcattttgttaatttatagaaatctggaacttaattagaccaattaatccaagacattaggatttttccttcgaacattctccaatttctgagcaagaaaaacaaaaaataaaaagctcagactaccttgacaccagagtctgaaaccccaatcgctactccattatccgccgtagcttccgcaatcagcttccgtttaagaggattagacgacggaggacgcggaggcaatggacttttcaatttcgccggagaagatctatgatcaggaatcaacgagttcagatccggaggtggagcattctctttagaagatttaatcttcctttgtgacttcgatttcgtcaagctagggtttggcgattgtgactctccgatatcacgcaagatagcgttccttggcatcatgaaatgcttcatctctctgcgctaaccaattcgaagattccctaaagaagaattaaatctgcttctgcaacagtcagtgtttcgggcaaagtaacgaagaagaagggaagagagagagagagtttgagagtttgagagagagccgttaatggcgagaattttgaatttctagatcgagaacgcattcacatgtttattcatctattctccgttgatcgtgagatgatagatctaacggataagatcaaattagggcccatgattttgttcgaccgtttgagttatttattcttaggatatttttatcccacgtggcacgtgaggttttagattgtgttgggttgggcttataaacgaagcccaatgaaggtaaactccaaatttaaacagtcgattcaaatcatggttattgtgttgtattacaataataaccataattttgtagactacaaaaatatatcactttaattcataattgtattgaaatcatggttattatgttgaaatcatgcgaggctcgctcatgattcaaataatccttgacttagcgggtgacgtattcggttgctgtgtactcaaaagagtcatatcaatagctgaagatcgcttcaaaggttacttccttgacctaatcgcaaagaacgctctcttattaggaagttcattgatccaacatgtgcttaagctcgattttacacgaaaaatcacacatgaccacacttgcacgagataatggctaagtttgatgacattctctcgcgttccaacatagtagagctccataggattgcctccaagttggcatcagattctgatctttttatcgactttaccaaaaccatgcgaggctcactcatgcatgattcaaataatcctaggaaaatcagaagaagtcgacacaacattcttggaagcaattaagcaaaggctcaccgatattagaaccgataaattcggttatctcatcgtgttatatttcatacaagttttcaagaaaagaagaccttattctcaagtgaagtatgaaatccaaaaactaaatctctctccctttcaaaggaaacactgggaagtgggaaacacattggtccaacgagcgtattacggacaccatcgcatgtatgcttcaatggcattgcatcgagctttcgtatcataaacatgggagaaacgttgtggagaagcttctcggtgacggtaagtcggtggtggctttggggatcttctcgaaggagattgtgaagtgtgatgaagataagttggtgaaactggctaaagatgatcatgggagcaaagttttgaaaaattattttagaaaaaaaaaactcaagtttgagcttaggaatacaaatcagtaattagacttaccatttcaatttctacgatctcagttcgatcctaactaaaatgaaatgagtatagacacacaaaaatagaaatatttgatactcagtcaacgttagagttcctaaaaaataacgccaaagaattttgagatttttcaatttcttcattaaggaaaaaaaaaaaaaaaactcaaattctctgatctgatctaaaagcttccaacgaatg

SEQ ID NO: 2259 - DNA, 3000 bp, Unknown
  misc_feature (1)..( 3000): cDNA_ID_2153107_gDNA_ID_1620512_Annot_ID_159158 3000 nt of promoter + ATG
ttagtaaatcccattgcatatcaaggccacacttcagagacaacaataaaagatgcattcattttatagacaaaaaagtactacacaaaagatttagaatccaggcgttgcaactaatgcaaattgaactgcacaaccaaacttgaagaactaattcagagccttgcgcaccaacgatttataattacgtcgcagtaatacctgatcaagtgcagaagcaaaaaggtctagaacatgaccctgagtgactagttgctttgcgatgctatcataaaacttgacagccttcttatagtacggagcggcatctttatctaaatctttgtgagaacgcacaggatccgacaaatcctttgagacaatctgtacaaaagagattacaaatatgcttcatacacatggtgtgatcaaagctcacaatgccaacaatcatcaacatatacttaccgttccagggccttccgtacatggacctccgatcaaagctacaattctagccccagttccaggcaagcaagctccaagcaatcctgcagctacactcaatgccacgcctgtacatcgttgggaccgatgacctggcttaacaggccactgatcactttgtagctcatccaaaagctacataccaaacatcattcacacaaagatagaagaatcagatgaaaattttccgacttgacaatcaaaagcaaagtcactcaccgagttgagtgtgaattcgcactcggaagcaggcaacaagaatctattcaaaccagaactcgggaagccattttgaggtcctttagaacctcctctcctagaagaaccaccaagccccaactgatccaaaatctgatctttcgaaatctctttatctcctttaaaaacaaaaactttagacatctcagagaatcccaattcatgtacatgagcctgagtaccaaacgacacaaatccaaccaaagcattctccggaagcaacccaatcgcttgtttaagcgccgatttagcaaaatccaattcttcttcaatcatacaagtatcaagaacaaacacaaacaccggcggatccaccagaccttccccgttggctacaggcggaggaagagtgtattcaacagtagtgtactgaggataaagctcaccaggaagattagtctcagagatcacatgataatgaggcgggaaatgattacgctgataacaaaacggacagatccaaagctttgcggtgaaatcgacttgtgcgtaagcgtttaacgcagcggaacaagtccggcatcggagcggtgcgtaaggaagagtagggatatcggcatgtcgccggatcggagaaatgcaagcggcgagtgggatcacgcatttgctagcttcagctttggaatgaggccagacgttccatgtcatacgaactccatcgattccttctagatctgtattcgcagtctccgccattcgttggaagcttttagatcagatcagagaatttgagttttttttttttttttccttaatgaagaaattgaaaaatctcaaaattctttggcgttattttttaggaactctaacgttgactgagtatcaaatatttctatttttgtgtgtctatactcatttcattttagttaggatcgaactgagatcgtagaaattgaaatggtaagtctaattactgatttgtattcctaagctcaaacttgagttttttttttctaaaataatttttcaaaactttgctcccatgatcatctttagccagtttcaccaacttatcttcatcacacttcacaatctccttcgagaagatccccaaagccaccaccgacttaccgtcaccgagaagcttctccacaacgtttctcccatgtttatgatacgaaagctcgatgcaatgccattgaagcatacatgcgatggtgtccgtaatacgctcgttggaccaatgtgtttcccacttcccagtgtttcctttgaaagggagagagatttagtttttggatttcatacttcacttgagaataaggtcttcttttcttgaaaacttgtatgaaatataacacgatgagataaccgaatttatcggttctaatatcggtgagcctttgcttaattgcttccaagaatgttgtgtcgacttcttctgattttcctaggattatttgaatcatgcatgagtgagcctcgcatggttttggtaaagtcgataaaaagatcagaatctgatgccaacttggaggcaatcctatggagctctactatgttggaacgcgagagaatgtcatcaaacttagccattatctcgtgcaagtgtggtcatgtgtgatttttcgtgtaaaatcgagcttaagcacatgttggatcaatgaacttcctaataagagagcgttctttgcgattaggtcaaggaagtaacctttgaagcgatcttcagctattgatatgactcttttgagtacacagcaaccgaatacgtcacccgctaagtcaaggattatttgaatcatgagcgagcctcgcatgatttcaacataataaccatgatttcaatacaattatgaattaaagtgatatatttttgtagtctacaaaattatggttattattgtaatacaacacaataaccatgatttgaatcgactgtttaaatttggagtttaccttcattgggcttcgtttataagcccaacccaacacaatctaaaacctcacgtgccacgtgggataaaaatatcctaagaataaataactcaaacggtcgaacaaaatcatgggccctaatttgatcttatccgttagatctatcatctcacgatcaacggagaatagatgaataaacatgtgaatgcgttctcgatctagaaattcaaaattctcgccattaacggctctctctcaaactctcaaactctctctctctcttcccttcttcttcgttactttgcccgaaacactgactgttgcagaagcagatttaattcttctttagggaatcttcgaattggttagcgcagagag

SEQ ID NO: 2260 - DNA, 3000 bp, Unknown
  misc_feature (1)..( 3000): cDNA_ID_4359736_gDNA_ID_1620512_Annot_ID_159154 3000 nt of promoter + ATG
tggtcaacatattagcagtacaaaaaattttgatctgaccagagtcgcaagatattttagataataattgaagttcgagactaaaccgagttggactgtcccaattaacacccctagataatgaacacatctcaactaattgtcgggtctttggatcatgcgtttgtttaatcactttcacaagtaaagatgtgtaggacatagaaagaacttaaactaaacagttgtgtatctgttccttctacttcatttggttgatgtttcataatgcgacgcataaactaatataataatatatggatatgtaatcctcatgcagctgttacgcattggtgccggtagtggtcgggctattgagtaccattattttttaatattatgacagttttagcatttgagttgtactaatagtcttatataggtttaaaaaaaaaaagagtatattgtttttctaatctttgataatatttacttatacacaataaagttaatgccttgtaatccaataattgtagtcattcaataaagttataagtgcatccgtatactctatcaatcaatcacaagtcacacacgtacgtgtcacgtttaaaagtgtcaaacccaaattatagatacacaaaatactacatacataataataaatttcgtagacttttagggcaagtttagactttagcgggtaatagactatgagatcttaaggatattatgtcgttgaaatttgcaaagaaataataacacatttgtataattcaagtttaagagatttttacaaggccaactccaatgattacacagtacactattctccaatctttaaaaaatggcgaagattggtaaaaaaaactgagtaaacaaaaaaagtaagatcaaaactaacaagattaaaaaacgattaaaaaaagattaagagttatgagtaatcatcggaagaaagaagcatagtgatgcaaattctgatgatatgaagctttgctctttgttgcctcactgtcctcttcatcttctccaacctctctttcatcttttccatcaactgactcatcaattttccagatatgttggataccaacatggcaacacatcattatacacacgcatacctttatatacatgcaaacacttacacgtacgaacaaaggaagaagcgacaatcccacacctatacacttgagttcaacctccaacactacatatacaaagtgtccaccatgaaactctgtcggaatcctacgtgataaagatacttatgtgtgtgcttatgggttatatatgatttacaccatacagttttgtgtttgtgggtggatgtacaattatacatagaaaaagctagctaggtagttactaatcttatttatatatataaaagatgacgaaatgttttgcaatctttgacatcatcacttctttaaatgatatatcaataaataatcatactgtatattcttttatttttcttgttaataaggaagttctaggtcttgatcccactttttttttttgttaataagaaagttctaggtcttgatcccacttttttttttttttgttaatgagaaagttctaggtgtattttatcccaaaatctcattcgatttgggaccaacttttgctaatatcattagagcgaaaccattactttcaagtgagactcgaacttgggacaactttcctcctaaggcagttcttgaatccaagttaactatccctatttattttatttaataataaatgtgggatatgaaaataatatggattggcgcatggatggagagggtccacttgtaggttggagagtgaagcaagttcacgtgctgatcatcgtcatgcaactctttgaatatttgcataaatacacgttcttaaactcatcctccatgttctctcactctacttttgtcctcctccactaacttgtcatttcttaactttttcaattttggtttgattatctcaattaattaacattatctattgtaaatgtcttatcatctttttttcttcatgtaatgctatataatcagtattgtctacaatctacgttacaccttccatttttgtatgctattcacgttaatttgtaaactgaattagtatatcgattgagatacatataggtaaaatatggccaaggaaaataagaaatcatttaaccaaaaataatacaattatacgaataataaattaaataaatcataacaatgataacaaagagacaaaaaacaaaaactaaatagtgatagcaaaggacaactaccttttctgtttatgacttatcttcaacaattagcttcaatattggttttattagccctacaagctgtccgtttcatatcaaacatataatcttcttgtcttccaaaatctgcttttaaacagcactgcctctctaattaattaatctagcttcaccacaaatttcttttagttctggtaaagttttcatcaatataattattctatgtatatcacataatttatatttgattaattaaaagcatgtatttgcgtttaaattggggatattgtaatggactacaagtatgtgctaatttttaacattaaaacctaagaaaaaagaagatatactaattgatatgtatgagatcatataataatatatgatgggtcgtatcttgagaccaactagtaaatcaggaccattttagaattagaattatcttgctccgccattatatgcgaataatcacagtcgaaccatatgcattatatcctcagctaaaatttagtactaaaaggttcatgatttgcgaagctttgttcacttggagagctggagtatattatcataattctctttaacttagcttattggtgtttattacagtcgcattatctctaaccacatatgataatagagaacaacataacttctagtagtaattaagcactttttatcaaattaaaagttaacactacaaataaaataaaccattgaaaataaaatagagctaaagtgtcaacagttaatca

SEQ ID NO: 2261 - DNA, 3000 bp, Unknown
  misc_feature (1)..( 3000): cDNA_ID_3066720_gDNA_ID_1620512_Annot_ID_159140 3000 nt of promoter + ATG
gttgaacagacatgtttgatttatctatctttcttcgatgtacaggaacacactgttgaatatcttacaagattactatccccacccgttccagcagattattccagggctgaaaatcatttgattggttatgcctgcatgttgaatgttgttattgttgggataggatctgttgacagcattcaaattttctctttacatggcatggtatgtaaattgtacttccaagtttactagacttaatagtgaatttgctgaaagatgtaatgtacgattttgatggctactttttaggttccgcaacttgcttgctcactaatgccaatttgtgaagagtttggatcttacaccccgagtgtatcatggactcttccttctggagaagcaatatcagcatattctgttttctcaaatgcattcactcttcttttaaagctatggagattcaatcatcctcctattgagcatggtgtgggagatgttcccacagttggctcccaactcactcctgaacatcttctttcagtgcgtaattcttatcttgtttcgtcggagatccttgatagagaccgaaacagaaagagactttcagaagttgcaagggcagcatcttgccagcccgtgtttgtggactcgttccccaagctgaaagtctggtataggcagcaccaaagatgcatagcagccacattatctggacttacacatggatctcccgttcatcagacagttgaagcacttctcaacatgacgttcggaaaggtcagaggcagtcagactttaaatccagtaaattcgggcacaagcagttcatcaggagctgcaagtgaagatagcaatattagacctgagtttcctgcttgggatatcctcaaagccgttccatatgttgtcgatgctgctttaaccgcttgtactcatggaaggctttcgcctcgtcagttagctacaggtttgttttgttttgctggatcagattcctaattgtgttgtcatgtgcgataacatccgtctatatgacctttggcaactctgaatgccaatgagagatgtttgactgtgttgatcagttgttatatcagatgcatttcttacagtaaagtgaatttatttacagaataacaagtgtttttctttcagggctgaaagacttagcagattttctcccggcatcattagcaacgatagtaagctatttctcagctgaggtgagtagaggtgtttggaagccagtattcatgaacggcgtggattggccaagtccagctacaaatctatccactgttgaggaatatataacgaaaattcttgcaacaacaggcgtcgatatccctagccttgctccaggtaaaactattcaacgtgtttaaaatgccagtctgtttgtttggcttaccatctctgtagtctgtaccatcctctctttataataagctttttacctgtcctgatttgatgtgttaaagttaaagttgtcttttgaacttatggttgacttcttgctgtggtattgcaggagggagttctccggcaacgcttcctttacctctagccgcatttgttagtctaaccattacttacaaaattgacaaagcctcagagcggtttctcaacctggctggcccagctctggagtgcttggctgcaggctgcccttggccttgcatgcccattgtagcttcattatggacccaaaaggcgaaacgttggtttgacttccttgttttctctgcctctcgcaccgtcttccttcacaaccaagacgctgtgattcagctcctcagaaactgcttcagtgccactctgggtttgaatgctgcccccatgtcaaatgatggtggcgttggagctcttcttggccatggattcggctctcatttctatggagggatctctcctgtagcaccagggattctttatctccgtatgtatcgtgctctcagagatactgtctccgtatcggaagagattctctctctgctgatacattcggtggaggatatagcccagaacaggctctcaaaggagaagctggaaaagctgaagacagtgaagaacggatcaagatacggccaaagttctctagcaacagcaatgactcaagtgaagcttgctgcttcgctgagtgcctcgttggtatggctaaccggtggcttaggtgtggtccacgttctcatcaaagaaacgatcccatcttggtttctatcaactgacaaatcagaccgagaacaaggaccatcggatctagttgcagagctaagaggtcatgcccttgcctactttgtggtcctatgtggagcacttacttggggcgtggattcaagatcatctgcatccaaacgccgccgccaagcaatcttgggaagccacttggagttcatcgcgagtgccttagatgggaaaatatcagtgggatgtgaaacagcaacttggcgaacatatatttccggtttggtgagtctaatggtgagctgtttgccgctctgggtgacagagatcgatacagaagtgttaaagagtctaagcaatggactaagaaaatggggaaaagacgagctagcgattgtattactctccttgggaggtctcaaaacaatggattacgcagctgatttcatcattcatttgcgttcatagcttcttaaaaagttttgatcttctccagatttcagatagttgtttgatagatgtttttcttctagtgtttgcttccttgttgtgacttgtgttctctagctccagtgttgtgtgatgaaatcaatcacgcatatgtatagagagaaacagaaaaaaaaaaaaaaaaaaaaaaaaaaaaaatcttgtatagaaaatattagtgtactattctagaccgttagatggattagtgttctatttggaaccgttagatgactctccgttgattagttggtcacaagtcacaacaacatgttaaaagaaaacgaatgattgagtttggtttctttgtatcatctctctgtttttccgaagaactaacac

SEQ ID NO: 2262 - DNA, 3000 bp, Unknown
  misc_feature (1)..( 3000): cDNA_ID_2105183_gDNA_ID_1620512_Annot_ID_159137 3000 nt of promoter + ATG
tatgtttgtatctgattcgtgaaatcgaggactctgatgccataagattgaagaagtttccatctcacaaacatgcctcgtttatttcattgatctgattctgtttttttggaagagagtttgtttacaatttttatctgattctacagctcatctccagtactaggatccaattctagtcagattcatggttactcatcttcttgtttttttctgaaccatggttacttatcaactagaaccaacaaagacagataattatctgaaatatcaatacaagaatccatatttagaaaaaaaaattatttttaatcatcaaattaataattaaacagaagctggtgaaactaacaactatctgttaaacattagttgagaattgctaattttgtcaaggttttatgatttactaagaggtcgatttttcaaaaaacaaaaaaaatcgtaatgcagatgaattttaaagtagagctaattcattagtcatagagaaaaatcaatttagaaagatttatatagctgaatttggggatgtctttatttcaatatcaacaacataaataggcttaaggtccaaaggaacattaagatatttctagaacgtcttaagtttaactcaaactgatgtttctcagactgaaacgaaacagagaacactagccacaaacatgacaaagcaacataaattaaagaagatactactagttacatttattatttaaagagtactagacatgattttgggtctccgctggttatgtgcaaaccaaagcttagaccgtttcaagttctcacttgagatagtcgatgagccaagcgagcatgtccttgtgagcttccattgcagcttcaacttctgatggatcattttcattgtatctaacagtccaaccgtgtttgcatcttgggaatatcttcacaaaactcttcacctgaaacatatcactttgctcacaattatctacttgaagaagatatctacttccaaaaacacatcaactactagttgtgtttttgtaagtaatgaaaatattaccttgcataaagacatagagctaagcaaagtacctgaggtttagaagctaaaatatcttcgaactgcctcacaagttctggaggagacacttgatcgatttcagctcctaatacagcaattggaaggttgacctctgcttcaatcatatagtgagagtcataatcacaacaaatgagagagaactatcaagtaaggagtggccatatcaaagatctaaatacccttgatatcatccaccgtaacgcgagcaggatgtaacaaaacagtagcgtcaacaagcttttccttagctagttccaccgcaacttttgctaaagaataagaaacaaaaagtcttgtgttaactaatatacatggttgacttattatacagatcatggaaaacattttcataaaactgtggtgatgatgggaacaagaaaaccgaactcaccaccccaacagaaccctgctgctcctatactagttatgcctttgttcttcaaggcctccactattggctttgactcctcaaaccctttctcctacaaaatccatagtctggtttcagatacattgacacagaacagtacaaaaacactgacttaatcttagctttgcaatcaacaataagtagtgatagcattttggcactaataataagggattattgggatacttggactatttcatgctgggaaacaaagactcatttatgtttttgagaaaaattgaggattgaacatttaataaggaaaagaaactaactagttcatgatctttcatccaaataggaaacggacgatcctggttctcgggattataaggatctccatggaagaaatcaggaaccaccgcgtagaatccagcttctgcaaccttgtcagcaagtttcctatcaagggaagaacaatatccatgacaagttacagcaagaatgaaacatctttcgagtgactataaaaggtgatataaactataactcattataacaaagaatctgaagtaaaagactgtctaacaatcaacaaaagacaagctgattcagtagggattctctgttacagcacctcaggtttggagtttcatatcctgcagaagaaaacgttttagattctcaaatcaaaccaacaaattcagaaagaacatcaaacgtaattgggacaggtaaaaaggtttttttaccgaaaacatgagggacaagaagaacagcaagctttgaatgagtggaaccacagacgtaggtgtcaaggttaccgagtttctcgacatgacccgacccgctagttggatccagatcaggcgggttctcggtgcactgatgacctgacattcttgttttcgccgaaccaaaaaacaagacgactcctctctcgcgctttgggacctctgttttaaaaagtaaagccaccaaaccacctttgacctttcacaccagttatctacactacgtgtgcgtatctactcttccacctaaaaaaactcacgtgcgttaaataaaaactaacttttgcaatgttaatttttcttagaataaatttgctaaatggggtaataccttaccttgaatgattgaatgattctatgcacttatgcagagtaaaaaacaaaacccaacaatcaaagattattctaattcaattatcaattttatcataacaaacaaaaactcttttgacaaattatttatgtggcttcctctaattatctttaacttttttttgtttaattcacaatttatgtggtcagatattttttcttccttccacaaggtgttgccttgaaaatcacgtcggaagatcacgaggaatcgttttgcgtgcgccacccaaacagacaaaacaaaaacacttcttttgttggttccttgtcggtttccaagggtttttgtttagggttttcattttctttttccttatctatctaatcctctgtttctctccacatcaaaaaaaacctcaaaattaagagacgaattcgagata

SEQ ID NO: 2263 - DNA, 3000 bp, Unknown
  misc_feature (1)..( 3000): cDNA_ID_2153043_gDNA_ID_1620512_Annot_ID_159133 3000 nt of promoter + ATG
cttgagtttttcgtcttttcgagtttgtttaattaatgaaactttctgcagattctcattgctaacagagatacaaaatcaaatcttagtaagaaaaggtaaaagctttgaatttttctgcattaaggattggcatgcaagctttgtctcctaagcttttcaattctcgcaggggatggtggacaccgatgtttttaactgcgggtttagcatctgcaaagtattttctaaagcatgtctctaggcagaacactctaacacaagctcgtagaaacatttctcgtcactatgaccttgtatgtagcttgaggccctgagcctccatctctcttatatctctgtttcctttttgtttgagttcataatcaaattctctgtttggttaattcacagagcaacgagcttttcggtttcttcttggatgataccatgacttactcctctgcagtattcaaggtgaccatgaaatgtttttagggaatttttttttttttttttggtttctctgacttgactatgattctgacttcaaccattcacaatgatcatagtcggatgatgaggatctgagaactgcacagatgagaaaaatctcgcttctgattgataaggtaaagcattttcttgatttagaacaacaacttgtggttttttatctcttcttgaataaccgaagagggacatttcaggcgagaatagagaaggaccacgaggttttagagataggatgtggatggggaactttggccatagaagttgtgagaagaactggatgcaaatacaccgggattacgctatctattgaacagcttaaatatgctgaagaaaaagtgaaagaagctggacttcaggtttacataatccatttcttgatctgctttcttatctccaaggctatgtatgactaactatataacttctgaatgataggactggattacttttgagctccgcgattatcgccaactatctgatgctcagaaatatgacagaattatatcttggtaaagaaaactctcattttccctctgttaatatggctctgtagttaatctatcttataagatgacatttttgaacattttagcgagatgctagaagcggtcggacatgagttcatggagatgtttttcagtcgatgtgaagccgcacttgcagaaaatggcctaatagtcttgcaggtaatatatagctcttccttatttctcttccgagacattatcaaaacatttcataatcatttgagcctttttatgatgttttgactgtaacagttcatatcgatacccgaagagcgttacaatgagtacagactaagttcagatttcattaaagaatacatattccctggtggatgccttccttctttagccagagtcactacagccatgtcctcttcttctaggctatggtaaaaatgtttgtgtataaccttttccgcaatctctttgttaaatcaatctaacacttaagttaatacagcatcgaacatgttgagaacattgggattcattactaccaaacattgagattgtggaggaagaacttcttggcgagacagaagtaagataaaaaaaatatttaaagcatttcctctgtttttgttctgtttactcatattttcaacataactattattggtgcagacaaatcatggctcttggatttgatgacaaattcgtaaggacgtgggaatattattttgattattgcgcagctggattcaagactcttactcttggaaactaccaggtaataacattgacatagaccattaaaaataacgcatgattctttagtttcatgcaatcaaatgtgaggttttgacaactttgagtacaatacattgcagttggtgttctcgcgtccagggaacgtagctgcatttgcggattcatacagaggattcccttctgcttattgtgtcacctgagaggcatccacaacgtttgattgcttatatttttcgatctatacaatgtttgattgacctgaaatactagtattgattattgatttgtttggtgtgccaatttgtgaaagtttgttgaataaaagagagatttactttggaaaaaaataagcagtactcgtggagctttatgaccaattcatacactccatgcacaatcttgtatgcgaaacctttttgatattctatctgccaaaggattcactgtcaagtatttatctactccaatctttacaatagtagcattagttaactataaaattgccaaaagctatagctcacctaaagtatacagataatatatttgtgacttgatatttgttgacagcagtgatcaacaacaaaccatatatatagtagtaattaataatgaggagaagctcctctattaatttttgatgttctttaaaatactccttgatgaccaaaaaagagaatcaagggtattttatgattttcaaaagatttgtttttgcaaaaaattattgaccggagtaattattctgaaacaaaaaaaaatatatattttttctgccaaaagaaaaatattttaaaatattttttttgagattttctaattaaaaattcttcatagtagagaacatataataaaataaagttttgtttaaaaaaaaatagattttaagaatatagactcaaataaatgcgtcaataaatgtcaagaagtggcaaaaatgtaggtaacttacaaattttaaatcactaacagaaatctcaaaaaaataaaaacaataaacaaacaaaatccgttctaaaactttcttcttcttctctctttcccttcgtatcttcttcttcttcttcaacctctcgatctcactgatttttctcttcaacaactcgatcttcccttcctatttttcaattggggtcttgcaaacgaatatctgctttgaaattgaacgaaattatttagttttggtggtttttcttcgacttcaccaatctgttgaactcaaggagaatatatgagataacatcagtcttcatttctgtgagtttctata

SEQ ID NO: 2264 - DNA, 3000 bp, Unknown
  misc_feature (1)..( 3000): cDNA_ID_4359864_gDNA_ID_1620512_Annot_ID_159135 3000 nt of promoter + ATG
gaacccgcctgatctggatccaactagcgggtcgggtcatgtcgagaaactcggtaaccttgacacctacgtctgtggttccactcattcaaagcttgctgttcttcttgtccctcatgttttcggtaaaaaaacctttttacctgtcccaattacgtttgatgttctttctgaatttgttggtttgatttgagaatctaaaacgttttcttctgcaggatatgaaactccaaacctgaggtgctgtaacagagaatccctactgaatcagcttgtcttttgttgattgttagacagtcttttacttcagattctttgttataatgagttatagtttatatcaccttttatagtcactcgaaagatgtttcattcttgctgtaacttgtcatggatattgttcttcccttgataggaaacttgctgacaaggttgcagaagctggattctacgcggtggttcctgatttcttccatggagatccttataatcccgagaaccaggatcgtccgtttcctatttggatgaaagatcatgaactagttagtttcttttccttattaaatgttcaatcctcaatttttctcaaaaacataaatgagtctttgtttcccagcatgaaatagtccaagtatcccaataatcccttattattagtgccaaaatgctatcactacttattgttgattgcaaagctaagattaagtcagtgtttttgtactgttctgtgtcaatgtatctgaaaccagactatggattttgtaggagaaagggtttgaggagtcaaagccaatagtggaggccttgaagaacaaaggcataactagtataggagcagcagggttctgttggggtggtgagttcggttttcttgttcccatcatcaccacagttttatgaaaatgttttccatgatctgtataataagtcaaccatgtatattagttaacacaagactttttgtttcttattctttagcaaaagttgcggtggaactagctaaggaaaagcttgttgacgctactgttttgttacatcctgctcgcgttacggtggatgatatcaagggtatttagatctttgatatggccactccttacttgatagttctctctcatttgttgtgattatgactctcactatatgattgaagcagaggtcaaccttccaattgctgtattaggagctgaaatcgatcaagtgtctcctccagaacttgtgaggcagttcgaagatattttagcttctaaacctcaggtactttgcttagctctatgtctttatgcaaggtaatattttcattacttacaaaaacacaactagtagttgatgtgtttttggaagtagatatcttcttcaagtagataattgtgagcaaagtgatatgtttcaggtgaagagttttgtgaagatattcccaagatgcaaacacggttggactgttagatacaatgaaaatgatccatcagaagttgaagctgcaatggaagctcacaaggacatgctcgcttggctcatcgactatctcaagtgagaacttgaaacggtctaagctttggtttgcacataaccagcggagacccaaaatcatgtctagtactctttaaataataaatgtaactagtagtatcttctttaatttatgttgctttgtcatgtttgtggctagtgttctctgtttcgtttcagtctgagaaacatcagtttgagttaaacttaagacgttctagaaatatcttaatgttcctttggaccttaagcctatttatgttgttgatattgaaataaagacatccccaaattcagctatataaatctttctaaattgatttttctctatgactaatgaattagctctactttaaaattcatctgcattacgattttttttgttttttgaaaaatcgacctcttagtaaatcataaaaccttgacaaaattagcaattctcaactaatgtttaacagatagttgttagtttcaccagcttctgtttaattattaatttgatgattaaaaataatttttttttctaaatatggattcttgtattgatatttcagataattatctgtctttgttggttctagttgataagtaaccatggttcagaaaaaaacaagaagatgagtaaccatgaatctgactagaattggatcctagtactggagatgagctgtagaatcagataaaaattgtaaacaaactctcttccaaaaaaacagaatcagatcaatgaaataaacgaggcatgtttgtgagatggaaacttcttcaatcttatggcatcagagtcctcgatttcacgaatcagatacaaacataaatatttgctcagagggtaccatatctgaactctgagtttgagtatggaaaacgttcttaaatctaaaagttctcctatagatttggtaactaggtgacgacgtctttacgatactctctctaaatgtgactatacaactaatgaaaacttgtaaaaaaaaaaaaaaactcaaatacaaattttcattagttttacttttgtattttaataccaatcctatgcatgtcttgaaacaggtgaattgttgtaatatagaaatatttcttaattgatgaagttttgttattcacaattttaacgataagttaagtccaatgttcaaagtttcctgaggtggtaatcgggtggtcatgactcatgagctgcctgattatagtacattgcaaatttaattggttgactttttaagtcatcattttgttttaagattattgattctgatccaaaaataattagtctgaggatgtaataaattgaatcttttttggcataattaaaaaatgtatttatattgcattataatgtggcagtaaatggcagagaggcctcttgtgttggtatttaatatcctgtttctgcgtacatctcttatttaattcctcaccttgccaaatcacaattctcctcttcaagtcttaaccaaacccaaagtccttcaacaagaaaatccaatg

SEQ ID NO: 2265 - DNA, 3000 bp, Unknown
  misc_feature (1)..( 3000): cDNA_ID_3066726_gDNA_ID_1620512_Annot_ID_159134 3000 nt of promoter + ATG
caaaaccaattggtaattaatgaattatccaatgtcttttatatactactcaaatcttctctcatctttatgatgtgtgatcattctccacaagattaagtttgatcatacagttcatttaggcttttccatgtcctaaaggaggttatggccgttatgaatttacttaacacaaatctaataagttttccattatttagccatgaggcgatgctaggatgattagtaagcctattacataatcttattttcagatagagtttaacataattaggtgattgacttgaatagaatctacgaatgccatcaattgatttacttgacactgtttccatagaagtttaacataaaacagtgtcatgaaacttaagtagttgttatttggtgggctaaggaatagaatctaggattgtgcttaattaaacctcgttatgtcacatggttcgatctcatctattgttttgctatgttgaactttcgtgatacaaatctttctaattttgaactgaacttcaattcctaattaaactcgtttttttgtgtttcatttattcgttaatgttagtcgtcttttgtgtttcatttattcggtcatgttagtctttccctaatatagtgtaaattcctagtttaacaatagtttcactatagcacaatggttaaattcatcttgattgataactttcctaaatttgaaatccacaaaccaaattcattgcctatcaaaagaattcgtctctcatattcgatctgtggcataagaaaacttttttaaaaagaaatatgtaattatttgtgtaaaaatatatacagtgtaaattcattgcttatcaaaaacatccgttgtagtacaagggtttaattcatcttgattgctgtttctctagtttaatcgattgatcgctttctaggtttgaatcctggcagcggaaacttttttaatttatctgttgttatttgtgtaaatatatatacagtgtaaattcattgcttatcaaaagatccgctgtaacacaaggatttaatttatctcgattgttgtttctccggtttaattgattgatggctttccggatttgaaaagtttccgggatcgaatttcggcactagaaaactttttttagtttttttttgtaattatgggtttcaatagatagatatacaatatatagtttaaattcataatttataattctccccttacaaaagattaaaatttggattacatttgagaataaaggggagaagcaacatagcatgtagcggaatggatcaagctaaaagacgtttaagggagaacacaagtttatgagactcctagatctcacatcgttcaccctgacccacatcgaccttgtgatggtcccatgcaagaaaatggcaaatcacacgtcgattcttacatcgggcagaggtagatcaaagcgggaaagttgaagaatcatgcaagtatcagattggcctccacatcgacataggcaatgtcatcccacaaattttgaagtgccagcatggtttaaacttgtttttgaggatttttaatataagtttgagttttctctaatttgtatagagactcaagagccttgttctacatttcgttaatgaagatgtcatattttcatcaaactagtgaagattttctcatcttgatacatctcttctcttaaattatgtttatgcctccatttacctttgcttttttgcttctttagttcagtcttgttatcaaagttttgaagattaaactagctaggattaataatgaatacatcaatgatgttgattatgggagaatcttgctagattctttagtcaaaagaattggagttcttagactctcataggaagggaagatcttccccaccattccttacacgcaacgtgagttatctagaatttagcttctacctgctcttgagtcttagcaagtcaaagattagtagcagcagtgcagcacactattaacaattacatcaaccatcagcgtcagaagacaatttaaccagactaatattctctaaaatgttagccgtttattttgaattttttgatggccggaaactaactctttactacttgatggtagtagggttggcttacttggtgggagctacaatggttccgcagccggccccaactcttgaactctaggagttttttttgttcttccattatattgttttctttcttttttttcgaaaaaaactcttccattataatgtcggttttttttttatttggataatggcacaaccatatcattactgtaaaccaatccggtaaaaaaaaaatagaatttaaacaattataaataaaatttggtaatggtaggatcagccattatggtcatctttggacgtgggatcagccattgtaatgtctatagggcggcctaaagaaaaatcctcccaaaacctctaaataatattgagccggcagaaggaccaccacacttgcacacatcataatcagaagctaagtcctaaatatgtatatatatccacttgattcctaatatacatttttttttttgttaaaatacctaatatacataagaataagatgtatatacttacaagattttataaaaagaaactaaagatgatatatatatcaaatatatgtacataacacttgattcctaatccaagcactaattctggctttgtctacttggtgagtcatgattcatgagtgttaatattaaattcataaatgtgtctctgtgtcttaatattttagttctgtgtttaatattttcataaactatttttgcgtacctttcttattttatacttacttttctttttttccctcgtgtttgtgcatggagagtcgaaattggttggcttctcctctgacagagacaggccctttgaacatatccaattaaaaagctctccacttactccttatatagttcttcacctttacaaataaaaatttgtctagcttctcctactcttcgccagatccaaattccttgaagatacaatg

SEQ ID NO: 2266 - DNA, 3000 bp, Unknown
  misc_feature (1)..( 3000): cDNA_ID_2153020_gDNA_ID_1620513_Annot_ID_159190 3000 nt of promoter + ATG
atctaacatgaacttatcattcattatatttatcttatattactccaaataaccattagttatagccatattttcttaaccattcaagaacaataaagattcccgggattcttacatctctgagctctttatcgacgacaagtttaccgtcctttgtcatgaacttgcctcggctcatttccgaatcgacgatccccggtgctacaatggtaaccccaatatctgatccaaactcagttcttagtgtttcataaaaggcgatcacagcagctttactcgcctgaattcatcggcatgaaatgaaggtacaaaaatgaatgcttgagatcagatggttagtaaattaggagagggaaatggatacaaaatataatgttacacagtaaaagcttagtctaggtgaagcaatgtatccacatccagaagcaatcaccacaatccttcctctaaacttctttaggtatggagaagcaaaaaatgtgcaatacacagatccccaaaagttgatgtcctatgcaaagaaaaacaaaacttatcacaaacggttagtacaaaactatttttttagagagatctttggtcggagtaacttgaccatagccggcgaagccttagagacatcttcgatgtctgcaaaaaaatagagtggagcaactcctgcatttgtcactagatgatccactgcccaaattagaaacataaacaaaataagaaaaattaaaatcagcaatactattttagtttactcatattatcctccataatttttgaattgtcctacctaattatgttgcgattgatttagacgccaatttctatatttgtgtttacaaatgaaaaaaaaaaaaaaaatacctactagagcctaggtcatagtttcaattgcaaaaaagcaaaaaaaaaatacattatctgataaattgtcatgcaaacaaactacatttagaacgtaatttagtaattatacttattgacttacatcgtccaaaatgaagaaccgtggctcggataaaacgctcgcagtcttggagtttggaaacatcggctactaagggcaagacttcaggggagccatagagctcagcgagagccgctacatggaagagaggttctcctcttatgtcaacaagtgctaaatacgctcccctcttcccgtactcatacgctaaagcctatacacacactatcacacccacttttacataaccctaatcatcatttttgtttgtttgtttgttgacttacctcgccgatgccagaagctgctccggtgatgacaacaacttttccggcgacattttccgagaacagattccggcagatggagacggcggatttgagcctctggtaagttgggtagaagacaagaagtgcatacaaggttaagagaggaaacaagaagttgatgatcttgttgattgaatccatgcatcaaggactatacttcacaatggtttttcagttttccttgttctctccgctttcggagttttttgttttgctttattctggtggaagcttctcatgataatgtatgtggcaatcctacaagctgatatgcccacacgtgtttgcacaatctacaaacctcaattatatagtgtttttgttatggacgatatatacttgggttcaccatagtattaaacccttttattcacccgtctctttttctatctaatcaaaataaaccaatatgctatgtcatatagtcatatactcatattatatgtttaaaaataaatcaaaactaaaaaaaaaaaaaagcaaaataaattatgaaaataaaatatgtatttttaattaaagaaaattaaatattactttatgtttataaataagaatttaagttagtatttacaatcatttaattatatttaattataaatctaatcacattaataaaataaaatgaaattccttcaaatagtacaattttaagtttttaagacaaaaatagcattcatatttttttttgacataaataacattcagataactattttattttattattaaaattaacaattaaaaaaatacacatattcattaccaaaaattcctgacaattttttccgccaaaataagttttcgtcaaaaaatttcccgtaaaaaatatatgcccctattttctcgcaaaagaaaatccaggaagaattttacaaaatttaggaaggaatgtaagcaattacgaaggatttcatgaaattcaaaaatttctttttgttgtgtataactcttcataaattttatgatatctttcctgaattttatagattctttccgaaatttcgtaaaatcattcaaataataattttctaaaatttagaaaggattttacgaaattcaggaaagatttcacgaattgttttttgtgaaatcctttctgagttttgcaattatcttcttaaaaaccacatttcttcaaatcaaactatttacatttctaagagtgctcatgaattttctcacaactttttttttgtttttttgatgactttgtttttcttaagttcctagtccctccctactatgacttcctattttttttaagagtcacaatcgttattttaaagccaaaatcttttataatcactacttcaaatttcttgagtcatttacagccaataatcattcagtacttcaaatttcttggtaataggttcacaaggcggtttgagtctgactatcaatttccgccggaaccaaaaaacagagacaaaggaaaggttggaaaaagggacaaaaacggcagcgtttccatatcggtaaataacttcgaattaccctttttaacctttttttgcagttctcgagatctttctatcactgtaattgctttttagttttttcccaacttttcgaaaaaattagaaacaaaacaaaaaatcgattcttcgtcttcttcttccttcttcatcaatcatcattctctctctcttcttctcaattcaaaactttcgctctgtttccttttggtctctgcttcttttagtttta

SEQ ID NO: 2267 - DNA, 3000 bp, Unknown
  misc_feature (1)..( 3000): cDNA_ID_3066853_gDNA_ID_1620514_Annot_ID_159200 3000 nt of promoter + ATG
cattagtctcggtttcaatttccccaattcagtcacttttatggttgcagatggtggaaggacctagatcttgcatctaagttaccttacattagggatagacttgtagagagccatctcgggggtttggggccgtacttcgagccacactattctcttgggaggatcatagtggctaaaatcatcatgaccatggttgttgtggatgacacttatgatgcacatgcaactgtacccgaagttgcggttcttaccgaatgtttgcagaggtgcttgctatatttatgtgtttattcataaatatatgcctctttcttcttctttatttatttattcaatcgtgtaaaaatcttggcatgaccaggttgaatattggtgccgatgataaacttccggactatttacgaacagtcctcgaaagtgtgtttgaagttatgggagagattgaacaagaaatgagaccgaaaggacgatcatacggcgtgaaacaagtgttggaaagggtaatgtagccaaataagctgaatatgaagccaattaatgtatatgtatagttagtggaatctaattagttcttggattctaaaacacagttcaagaacgtagcaaaggcggacaaacagttaacagagtgggcacgaacgggcgacgtaccatcctttgatgagtacatgaaagttgggttggtgacagctgggatggatggttatgcaggatattgctttataggaatggaagatgtcagtgaaaaggaagcttttgagtggctcagttccaatcccctaatcatccaagcgctaaatgtaatgttccgtttagcaaatgacgtaggaacctacgaggtacacggcacattaaatatagggatgtctttggttttcttgtgatttttgtttttttagttctcatgaataaatgatatttgtagaccgagataaacagaggagaggtggctaatgggctcaactgttacatgaaacaatatggagtcaccaaagaagaagcatcccaagagttgcgtaaaatatacagcaacaacaaaaaagtggttatggaggagttcatgaactcacatgaccatgtgccacgccaggttctgctgcgatgcctcaactttgcacgcctcttcgatgtgatgtacacggagggtgatggatacagtgaacccaaaggcaaaatcgaacactttatgacctccttgtacgtccacccaatacccctttcataatgacgtgcaacacacaccaattctaagaagaaatttatgactctgttacctgcctcaagactgaatatctaaaatattcttaatttttaatttaatataaagtcattttgttgcatggttaactcgtaaaacttctaaccatgttgaatttgttcattcttaagctagctcacgttaagagtgtgcctctctatcttaagaccaatctccgtatctacacaggcctataccagatcagttgacccgatgtggttcttgttacaggacatgatcgtaaagacggttatgtcgtaactttgagggaatactcaatttaatgcacttaagacattgaacaggtcaggtgaccggttaactgaaaaacatgatagcttgtattctccataaatcaacttaaatgattgtatgactttgtccctcccatttttcccggttcacatatgggtccaacaataaccgaagataagattagtatattgttaagctctgtatagtaacgttaaaagcagttaaattaatggactagacgtattgagtatgagctgagatgcatcacatatagaagcagagatagagacgaacttgaagagtgtagctttagggattgtttttgtttttaacctctatttccaagttactaggaagcagaacgtaactatttaagatatggagaatccctgattaaagatgttgttaagaaattcaagtgaactgaaaaaacgctgacactaaaaagtcaatgggaacatctccttaaatagagatgaaagagatctctgcagcttcacatattcgtattgaagataagagactcaggatccacttttagcgcaaagcagataatcacaaagcatcacctttcttggagtaatacaaacgtgatcacaaagcatcactggattatatgtattatatatgtaaagctgcagagatcgaagtatgtgtccaaatcatcactaaagacagatgggcgatcgacgatatgataagggactacaactgtggtttgaatccaacaattaacctctcttgatttgtagattttcagctgttttcaatccaaagctgcacttgttgtaataatgatatttttcatttgaatataatttaacattacattaaaaaaaaaagactataccggcttagtgattttggttatatgaatatttaaaatatctgtggagatttagacggatttaaaatgatttgagataattttgcagaattactattagaaatcttagtatgtgattagtataaatttcaggacatttgatcataacatttttatatatgatcgatccattaataatagtctaataacttcaacaaatactatatccaataaggcatgatttcaatacatttcagaaaacaaaatcatcccaaaatcattaactcaattcgaatttgaattttgatggcgtcatggtgttctcgacatcgtgtttgtatattaacttccggatcttgcattataatttagttgaaaattaggacttaggagggaacacatttttcgaaaatacgaacgtgataaagtatcccacttttcccggattttcttgtatacataaatttccttaatattattactttttactttttacacaaaaatgtttagcttcctttgttaacttaacgggaataagagcagcagccggcagatatgaagtagtttttgaaatagaaacctaacctaataacagagtacttcaagtaaaacagaatagctatctctctctccctctcgacgactgtgataaaacatg

SEQ ID NO: 2268 - DNA, 1129 bp, Unknown
  misc_feature (1)..( 1129): cDNA_ID_2153283_gDNA_ID_1620514_Annot_ID_159229 3000 nt of promoter + ATG
cacaacggcttctttcgtagttagcttcagtttctcctccaacttccacaaggcttccattttttgctaaatttggggtcttttttagtagtctatcttgagagctaagtatataggtgaaattggtgagcttcatgtgaattccaccgttatagatttattcatcattatggtatttataacctatagtttctatatacccatcaataaaatctttcatctcaccttgttgattcattgtgttgggtatagatataagtggggtattaaatatatccgttgtagtcttcgtaacgcaaactatataaatttattgtgcatacgaaaaaaaattaaatgtaacatttgttattagtcgtatgattgtaacgttttgtatgattgtaaggttttggaaagttgtgtaaccttccgtattgtttttaagttgagagttaatcaggaaggtagtcaaaattttggttcaagattagcaaagaaatgaatgatcaaattgtaatcaggtaggtagtcaaattttgattaatttttttttaagatttgaggttacttgcatgatttgtagtatggaatctatatagcttgtagggacagaaggttttgatgagatcacgagccatacaatgtctattcatgttcttgttgggtggacctagtggaccttgtggtaccacaaattaaagatgaaggatcaaattgaaacatccaaaacattttggtgcaaattgaaactcaggtagtatcatggagatataatgtgtaaatacaaattactaaaaggagtaatttaaaatattactattagtaaacgaaacctccgctttatctacttttccggcgaattggaagggttttgatctccttgagcaaatcggagattctttctacagttgtgcgaacgttcttataataagtttttagttgatcgatctccgatttagtgaactaggcgtcatcttaagaaccctaatttgttttctccggttgtgaaaacttctgttgttcgtcgtcgaaggtcagttcgtgattctgagtttgtacaccttttcgtttcctctgttggcactcgaattttccaggaagtgaaactagaatttgattctgcgtagtattgaacattaagataatg

SEQ ID NO: 2269 - DNA, 3000 bp, Unknown
  misc_feature (1)..( 3000): cDNA_ID_3066787_gDNA_ID_1620514_Annot_ID_159226 3000 nt of promoter + ATG
ttattttagttgatgtaataggtgacacaaacttattagcgtaataattttgatagtgatgtgttttaaatattgaactataaattaggttcgttgattttagaaggccaccaaacaaaacaagaaaaagttctgcttggcagagatatttcggctcttataatttacaccactttagaataaatccaaaatcaaagaaaagttatgtttcatgtggtcgattttgtcatctctactgtcttgattgttttaaacggtaaaaatagtaagtgaaaacaaatagaaaaaccgtaatttatgatcattctagtggatttctgttggtttagtttttttttttttttgggtgtgtttgttgttagtatatattatcagttagatttacagttaagtgatgttttttattggtttgcactttgcagctagtaaccaaaaaatatatatactataaactaattttcaattattgaagttgcttaatccgaactagaagaactccaaaaaggtatataatctgaatctgatcaaggtcaacaaaccggagagtcatattttatgttcaaaatttttgtgatacttgttgatacttcagcggtgacatattatattgagcaactcccaaacgtatgggaacattttgtgatacccgagttatataaaccaaaaatgtaagactaaatcagccattttttgtgcagtgacgtcgagacaccgaggttcacgttttggtaatacaacctattaacaaatacaaaatataaaagagacaattggagaagtttattatttaaaaagggtcaccggaacgaagaaagcgtgatggaaaatgaaagttcaactttagcttaaatgttaaattattatcacttatttgacaccttgccttacatttttattaatatatacaatttgtgtggcttacgagttgagattctttttcatctataatatgtaaataagtctttttcatgcttttagctaatggaccgactttatatctcacccatatgtttacaaaaatctaaacttgaagaattaaattattcatccaataaacttatatcaaagtctttaatattaaacttataataaaccatgagttaacgtaattacgtcaacaatataggctaaaaatgtgaatggcgaagttaaaatatagtacattttagtccaaccctaacagaaaacttagtctcttcgttttttttattatcaaattaattaattactcaaatacagtataaacaatcgatcatttgcataaatttgaccttgacatcgataataattaattttcacaagtaatattatacttattttgttatttatttatgttacacttgaaagagagcccaacgaagacttgcaagtaagttacaattttatttaccttgagcttaacgttgtagcggcaacaacagtaactaaggaaggtcgcagatcacttgcggatgtcattatcctattttgacacttaatcactactatacattatacaagaaaaaaaaactaaaaactcttttatcatactattaaatttgcgacatgtgtatatacatatataacacatgtgaaattaatgttaacgatgattaggtaagttttactgctatgtaaacttgtcggatttattatgttatcttatctttatcaaatttattgaaccattaataatgacagagatcaatttaatatgttatcttatctttatcaaatttattgaattaccatttataatgacagagatcaagctaataacgacttaactgctctgagatctacacttttggtaaagttagatagaaaatcaaaattaccaataaatattacataatgtatttttaagaaaatagtggttgaatttttatgagtgaaataatttgagggtgacacctaaaaatattgaaattgcaacatagaaatattttaaatagtaaaaccggtccatcggtagttgcctcacaacgggtcaatttcaaaaagatcaccgacagtggacctaacaaaactatcaaccctcagagttttattaaattacgaaattgccatatcattcctcgtgacctgtaccccgtacccaataagtaccacgaaaattgctaaatttaggaaaatcacttcttcttctttttttttttgaagaaacaacaaaattagaatacacggaaattaaaaagaaatcacattgcttataaaaacatttctcatcttcagatttttattttcctatccgtcttttctccgatcgctggatcttgaagatctctagattttctcatctctctctgttcacggactctgtgtagatagagttcgtctgtttttcggagttcttgtgagaatctagggtttttttcttaaatctcgatcgggttttggtttctgtgatttttttttaaaatttgtgattcgaagaattgccattttctttgattagtcatattttttaattgcgatctctacatagagatcatcgaggggtttttaaattgaattttttgaaattgacgaagacgatagagttgttgagcggtattgatcttttggtgtgaagacgatagagtttaaatttgatttgaagaggatgcaaaaaactcaggagaagaaggttggttgcttcttattcatcggaggaccttatgattcctttgttcttgacatacgatttttgataatttatttgctaatgctatgtttcagaacatgaaagagatggagtttttcactgagtatggtgatgctaatcgttatcggattcttgaagttattgggaaaggaagctatggagttgtatgtgcagctattgatacacaaacaggagagaaagttgctattaagaagattaatgatgtttttgagcatgtctctgatgctcttcgtattctccgtgaggttaagcttctacggcttcttaggcaccctgatatagttgaaatcaaaagtatcatgcttccgccttctaagagggagtttaaagatatatatgttgtttttgagctc

SEQ ID NO: 2270 - DNA, 3000 bp, Unknown
  misc_feature (1)..( 3000): cDNA_ID_2153268_gDNA_ID_1620514_Annot_ID_159224 3000 nt of promoter + ATG
tggtgaagcaccaagcgacgatttgctgggaatacttcttgaatcgaatttgaggcaaacggaaggaaacggaatgagtaccgaggatctgatggaggagtgcaagttgttctatttcgccgggcaagagacaacatcagtacttctggtttggacaatggtgctgttaagccaacaccaagattggcaggctcgtgcacgagaagaagtgaagcaagtgtttggcgataaagaacctgatgcagaaggactcaaccagctcaaagttgtaagtaaaaccaaatcataaagctcttgctgacttttgctgtgttttgatggctgattcgatcccacgcagatgacgatgatattatatgaggtccttaggctatatcctccagtaacccagctgactcgagccattcacaaagagctgaagctaggcgatctgaccctaccaggcggtgttcagatcagtctacctattctgctagtccaacacgacatcgagctgtggggaaacgacgcagcagagttcaatcctgacagatttaaagatggtctttcaaaggcaacaaagagccaagtctccttctttccctttgcgtggggaccgaggatatgcataggccagaactttgccctgttagaggcaaaaatggcaatggcattgattctgcggaggttctcgtttgagatttctccttcctatgttcacgcaccatacacagtcatcaccattcacccacagttcggtgctcagcttatcatgcacaagctctaatcagacaacacatttgtgttgttgtcaaatatacaataaacttgttatacagagatgaatcgagatagatcataatacaaaactcaaatctttccttttatgttcaaatcagcactcgtgtcacacagattataacccttgaagcagtgattcccaaggaacaaatctctgttgtgaaactaaaacccaagataaaaggatcgaaatttacgactcgcccagtatttgttcttcataagccataaccaaacatgcaatgccaatcagacgagtcgattaccttttgaaattgtgctcaacagtgctcgcctaaaatcttagaatctcttgaaattttgaaacagagcaccaatagaaaaatcgataacaacattggagattccccaaaatcatcgcttcagaacgccctacggtttgactcgctaaacccccaccctccggaaccctaatttcagagaacaaatcgagagatcaacggcgagattcgcgacaaggttctgacagcgtttaagttcggactgaacgacaacgctgttaagtgttcgactgttggtttttactttttactctttccgtttatctaaacgacgtcgggtggtcctgcgcttgaggtgaaaattcaatttattggctttgggcttgaggtgaattcaattttattggtttgtgaaaacatgtttagatatgaccatgttttcaaaaaccaaaaaaactagacaaaaacatctcccagactattgcaatttttgacataaaactagtcttttctcaagttttatttggaaaaaaaaaaaactactttaatccatcggatctaaagtttctgattccaaatccggatagtttttctggttgggccttttgtaactggagagctacatgtaaagtttaatagccttcccatttgagagaattatagtattaaaattattatgtttttgttaaaaaaactactttcatattttcctctaaatataatgcacggtatataccctgacgtggatttcggcttttatttagtttcggctcgtgcggtgcaaggaaattcttctagtcatcatcagccaccaaaactggcttctcaattagggctcttggtcaatccttaaaagttctattgattttcatcgactacacttttttggcgaatttatgtgattgaagtggaatctaagattgaggttctttgtggtcttcggttctcgatacatcatcataaggtattgaaagttaattttcttattcttgttaggatttctaactaagataggtcaaaatataacctagatctctcgtatctctatctatatatacgtcacaaggtattgagaattcactcatagcttctgaatttcgcggtgtcgtgtttctgtctcatcatcggggttttgataaagatgtctcagtccaaagtagctatgaaaaaagattcgatgaggaagaataagaaattggttataaatattgctctagataaagaagttcttgcttcgagagtggaagctgatcatgatcttggttctgtaagagatgagaaagagaggcttgaatcatcagagagacgaagagaggtttgttccaaagctgaagatattgttgataaggccattgataatcattctagggttagaggagatgggattatgcgggaagctgatgtcgggacagggttatcgggcgcgttaaaccgtcttagagagcaaggaactttcaaggaggaaggcaaggttgttggtgttaaggacaataatcatgaagatgacagattcaaagatagatttaaggatatacagattcagagggtgaacaagtggggaaggataatgactgagaaagaagcgtatcggtcactgtgtcatggattccatgggaagggacctgggaagaagaagcaagagaaacagaggaagaagcatgaagataagtcaaaacagatggaatcttcagagagatctgtggaaagaataagagaaattcatgccatatccaagactccttacattgttctctagtcataaacttctctttgattacgataatctcaaagacatttaattaagaacttcataaatttggtattttgctttgatattcttaagagttcttggatgtttttacatcacataaaacattgcttttcacctatatatgttaccatttattttggtataatctaacgtttttgcattcttctttggaattatattttggttttattagggaaacgattttca

SEQ ID NO: 2271 - DNA, 3000 bp, Unknown
  misc_feature (1)..( 3000): cDNA_ID_3066793_gDNA_ID_1620514_Annot_ID_159222 3000 nt of promoter + ATG
tttatgttcctagaacttttagcaaattatctacctctatctttctctcttctttaagagaaaaaaaaatggagatatcagtttcttcggtaacattttcactagctgtagttgttgtgtcttggtgggtatggagaacgttaaagtgggtttggttcacaccaaagatgcttgagcgttccctgagaagacaaggtctttccggaacttcttacacgcctctaatcggcgattttaaaaagatgatcagcatgttcattgaggcaacatccaaacccatcaaaccaacagatgatatcacccctcgtgtcatgcctcatcccttgcaaatgctcaagactcatggtatccttccatagttcgcttcttgattcttctctgtttagaacttataacaaaactgttgcaaagtatctgatctatatataaacttttgtatctttattatgctcttggaacaggaaggactaacttaacatggtttggaccaataccaacaatcaccataatggatcctgagcaaatcaaggaagtgttcaacaaagtctatgacttccagaaggcgcatacgtttcctttaagcaaaatactaggcacgggactcgttagttatgatggcgataaatgggcgcaacaccgaagaatcatcaatccggctttccaccttgagaagatcaaggtttaaggctttatttctcagtcacatatcaagttgtattttttcatttggctcttctgacccaacttttgcgtggatctgcttctatctattatatatagaatatggtacatgtgttccacgaaagctgcagcgagcttgttggtgagtgggacaagttagtctcggataaagggtcctcatgtgaggtggacgtgtggcctgggcttacgagtatgactgcagatgtgatctcccgtactgcttttggtagcagctacagagaaggacacaggatatttgaactccaggcagaactagcacagctagtcatgcaagcttttcagaaattttttattcccggatatatgtaatgaaaaaactctacttgtctagctttaatatagtgcttttaaatctggattcttgatctttaacttttagtgctgcaatctattagagatatgacctgtgttgtcataatcatgtgcttattgtttgtgtagttatctcccaacaaagggtaatagaaggatgaaaacagcagccagagaaatccaagatatactgagagggatcattaacaaaagggaaagggcaagagaatctggagaagcaccaagcgaggatttgctaggtatacttcttgaatcaaacttggggcaaacggaagggaatggaatgagtaccgaggatatgatggaagaatgcaagttgttctatttggccgggcaagagacaacatcagtacttctggtttggacaatggttctgttgagccaacaccaagattggcaggctcgtgcacgagaggaagtgaagcaagtttttggcgataaacaacctgatacagaaggccttaaccaactcaaagttgtaagtataaaccaaattttttataaaacaaactttttcaaatgacttcactacttttgttgcattttgatgatttaagctgatccctcacagatgacgatgatattatatgaggtccttaggctttatcctcctgtagtccagctgacccgagccattcacaaagagatgaagctcggagatctgactttaccaggcggtgttcagatcagtctacctgttctgcttgtccatcgcgacacggagctgtggggaaacgatgcaggggagttcaagcctgagagattcaaagacggcctctcaaaagcaacaaagaaccaagtctccttctttccctttgcgtggggaccaaggatctgcattggccagaattttacattgcttgaggcaaagatggcaatgagtttgattctacagagattctccttcgagctttctccttcctatgttcacgcgccttacacaatcatcaccctttacccacagttcggagctcatcttatgctgcacaagctctaatcacataaccccttgttttgttatcaaataaactcattatctttttatgtatccaagtcagaactcgtgtcatagtttaataaaacccttcaagatgtgtcaaaccctggattgcaatataatcatcgactgttgcttgacacttcttttcaaacatcactaacaagagacaaactatgtctttattaactctgattcttcctccctaataattatgtgttgcaccaaaagatattagaccgaactcgtgtctctcaaactattatgaaaacttcccacattaacattaccaaaacacttggaattcatatctttatttgaaaagcaagacccgagatacagaaatgatcgaaatgaataatacagtctcacaacagaagaaactaaataaaacacttccagagatacagaacaaaaacaaagggaacagagagatatgtaacttttttttttattgaagtaaaatattataacaacccgttgaagaaatacagaacaaaaacaaagggaacagagagatttaaagtttactttttattttatgtcgacaaaacaaaatacttcaagttcaatgtttaggtaccaaaaaacccattgattggatggtggtggtaaatgacaaagacacgtcacaaagttgaagacgttcgtcccttgcccgccagtcaagttatgacttatgagagtcacataaccaatattaatatatctcctattttgtctacttttttttacagaagtccaaatttggttcttgcgccttcgtggcacgcaaaatatcgattacttcaaaagaattatatcaacacaaacactataaagtatataagacatcatcggtgatgtcatcaccacatccatatcttttccaaagttttcaaccttttattccccgaaattttttagcaaattctctacctctatctctctcttctctgggaggaaaa

SEQ ID NO: 2272 - DNA, 3000 bp, Unknown
  misc_feature (1)..( 3000): cDNA_ID_3066797_gDNA_ID_1620514_Annot_ID_159221 3000 nt of promoter + ATG
gagagttattttccctcctggtgtattcatcaacaagttgtacgctcgatctttccatataaaatatataatcaccttctccaccattgtatcctacaaaatcaatacaaaaacctctatcagatatactagttatactacaattctgggtaacacaagtataactagttatactacacatatctgtataatacagttataactaataatagtacatgtaaatgggtaatactactgtacctaagaaatactacatgtaaatggttaatactagtgcaactaagtcatactacatacatctggataaaactagagctacgggtaatactacatatatatttttcaattgaatcatgtgcaattctactcagttctaccagttgtatttcccgacaataactcaaatcgcatggtttcgggttcaaaactacaattcactctgattcagttgttgtaatccatttcttacccattttacagatctattcaacccaggcagtatgcataaacttccaatgtgcatacccaaacacaatttgcttaatctcaaatctaattgacaacaatctcctagttttctaggttcaaaacttcaatattaagctctatgcagctcgagtaagataccttttctttctatctcgacgcaactcgtcggagggagaggatacgacaacaatggcgactgaaatcaaatttcgatgatgagagcgatgagagctcgagcgagaagaagctgagaggagagagagaggagaggcaagagagagtcgagagagagtcgagagattttttttttcctgttttattttttttttcttttcaaaaactaaataatttaaaaatgaataaaataaagaaggagagggtaaattcgtcaactcacaattcattaatagagtgggggatatgaagacaaaaataggatacaagaggttagtgtttggcaaaaaaggagttataagattatttctcttataatttagactgaacgacgccgttcgaatagtttttttaatcattgtttttttccgttccaaactatgtcgtttgatcaaactcaatttgtgctaccaattattaatttgtgtcatacttatgctaagaccatgctaatcttcttcttttttcttttttgaagctaatgtactcggaggaacaatcgatatatccacttcaaaactgaagctatttctaggtgatttaagatttttaacatcgttaatgagtatttcatgggaagttcactataaattataaagtaaccctataattatggttattggtgagttaattatattcagtagcactttaaaaagaaatgtacgttcagtccagaacaattacagcttacgatcgaaatctgaaatcaaatcactctaactttaaaaaaaaaaaaaaaccttaaatgtgtaggtttttcttttggaatgaaaaagaataatccttgcgtaataagatagcaattgattgaaaaacaaaatagctcatgtcggcctatacactataatattctagacacgtccctttctgttggttgttaactaaaatagctcatggcggctattacaaaatgcaccacttgagatgactatgaaggtacaacaaaataaatatttgtcatatgtgagagcaaactaattggaaaaacaggatgagattgagatcataacaaatgagcaatactaaaatacactaaaccaggtttagtaaaccttatgtccttatcagagttttacgccattttatatagtttgtgtttttgagggagttgtatattatttctgacgttggagggatttagtagttttacttttcttttctttttttttgtcgttttacttttttttttgatatttctttatttcacgtttctatttaacttagagttttttttatatatttatgtttttagtttcttctctacatatataaaaattcttaagttatttgtaagatacgttttattatctaattaataaaagtaaagagttttttttctctaattggtagaatttcaagaatttcaatcctttcaagttcgacagtttgacataatacttgttattcctatcatagacataatgcttgttattcctagatattctaaatgtgtcaatttctcaaaacattgtaattctcaaatttaaatatgaaagtttttagttatttttcttttttgaaaaaaaactcttacggtgatcatcgacaattttgttacgatgatcgtaaaacaatattgttacgatgatcgacagtttttattcattatgatatattttagatattaataagaagcatatcctaagatctaagttaagaaaaatttagatattttatgtgattatttatcagttttaaatgaatatgttaaatttactttaatcagtgtttgtttagctaatgtgctgagaccggagagtgctaagatacaaggtctaaaagtaaaaaaataaaatatatagatattaatttatttttaataatagatattttaggtttttgtatatataacagcatttggtctataaaatatatgagcagggcctgactttaatgcaaaaacaacagtagcctatgtacatgtacaaaaaagtcgttttagtcaaatgtgaaaatcaaatgattttgtaattatttttgttttaaagaaatgtcaaaaagttgaagacgttcatgtcagagcatctttactggtgatatatccaatatggatgtctaaaacattttttatagttaacttattatatatttttttgtttggtcaacattatattatattttaatacgagtaactaagaaacaggatggagttaggcgagatgtcaaattttgtttattacggcttcgtggcaagggactgtgaaccacgacatcaggggtgatgtaatcaactaatcaccgcatccatatcttctccaaaagtttcaactttatgttcctagaacttttagcaaattatctacctctatctttctctcttctttaagagaaaaaaaa

SEQ ID NO: 2273 - DNA, 3000 bp, Unknown
  misc_feature (1)..( 3000): cDNA_ID_3066812_gDNA_ID_1620514_Annot_ID_159216 3000 nt of promoter + ATG
cctcttttcgtcgcttttcacacaaagtccaaatatgcttctgcgctttggtggcatgtgactgtgagggtccaagtaaagcaaaagatcaattaagcacaacaaaataattgtccaaaccaccaaaatataaaatataaaataatttgtgaccatcatcaccacatccatatcttctccgatattctaaaccctgagaatggtcacaaattctctaactctctctctctctctctagtagaaaacatggagatatcagttgcatcggtaacagtttctgtagctgtagttgttgtgtcgtggtgggtatggagaactttacagtgggtttggtttaaaccaaagatgcttgagagttacctgagaagacaaggtcttgctggaactccttacacgcctcttgtcggtgatttgaagaagaattttagcatgcgggctgaggcaagatccaaacccatcaacctaacggatgatatcacaccacgtatcgtaccttatccgttgcaaatgctcaagactcatggtatgcttccttgttggcatcttgattcctctttgtttagaactattgtagagtatctagaaaaggtttcaactttcgtatctctatgtggttgaaacagggaggactttctttacatggtttggagccataccaacaatcaccataatggatcctgagcaaatcacagaagtgctcaacaaagtttatgatttccagaaggcacatacgtttcctctgggcagattaatagccactggagtccttagttatgatggtgataaatgggcgaaacaccgaagaatcatcaacccggctttccaccttgagaagatcaaggtttaaaggctttatcttccatagtccccaatcagattagattgctttatgtatgtatgttcatttggctctgaaccaaattgtgccttctgcttctatgtatagaatatggtacctgcgttccaccagagctgcagcgagattgtttgcaaatgggacaagttagtgtcggataaagagtcatcatgtgaggtagatgtttggcctgggcttgtgagtatgactgcagatgtgatctcccgtactgcttttggcagcagctgcgtagaagggcagaggatatttgagctccaagcagaactagcacagctcatcattcaaacggttaggaaagctttcatccctggatataggtaatgaaaaactcaacttatctgatttaatataggtccttctgagcttgactcttgatcttaaaatgtcgcaatctattccttaaagatatgaaccgtgttaacattatctttctgccaatctttttctgtagttatctcccaacaaaaggtaacagaaggatgaaagcaaaagcaagagaaatccaagttatactgagagggatcgttaacaaaaggttaagggccagagaagctggtgaagcaccaaacgacgatttactgggaatacttcttgaatcgaatttggggcaaacgaaaggaaacggaatgagtaccgaggatctgatggaggagtgcaagttgttctatttcgtcgggcaagagacaacatcagtacttctggtttggacaatggttctgttaagtcaacaccaagattggcaggctcgtgcacgagaagaagtgaagcaagtgtttggcgataaagaacctgatgcagaaggactcaaccagctcaaagttgtaagtaaaagcaaatcataaacctcttggtgacttttgttgtgttttgatgatttttgatgaatgatttgatcccacgcagatgacgatgatattatatgaggtccttaggctatatcctccaatacctcagctgagcagagccattcacaaagagatggagcttggagatctgacactaccaggcggcgttctgatcaatctacctatccttctagtccaacgcgacacggagctgtggggaaacgatgcaggagagttcaagccagatagattcaaagacggtctctcaaaggcaacaaagaaccaagcctccttctttccttttgcgtggggatcgaggatctgcattggccagaattttgcattgcttgaggcaaagatggcaatggcattgatactccagagattctcctttgagctttctccttcctatgttcacgcaccttacacagtcttcaccattcacccacagttcggtgctcctcttatcatgcacaagctctaatcgttcgtagcaacccattttgttgttatcaaatatactttccattcacagatgaaacaattccatatcagtctacctataatgctagtccaacgcgacaccatgatgtgggaattcaagcctgagagattcaaagacggtctttcaaaggcaacaaagagccacgtctccttctttccatttgcatggggaccgaagatatgcatcggccagaattttgccatgttggaggcaaagatggcaatggcgttgattctacagagattctccttcgagctttctccttcctatgttcatgcgcctcaaatagtcgtcaccattcacccacagttcggtgcacatcttatcctgcgcaagctgtaattctagaatcccatgtgctcttgtcagataaacagaggaaaataaaccagatcatagtataaaactcaaatctttttattaattgaattcagaactttgtgctcacatatgtcttgacaaaccaaaatatttccaagaaaaagagtgaaacgcatggaccaatatatgtcttcctattttcgtcgcttttcacacgaagtccaaatttgcttcttgcgccttggtggcacgactgtgagggtccaagtaaagcaaaaattaattagtcattacaaaataattgcccaaaatatcaaaatataaagtatttaagacatcaggggtgatgtcatcaccacatccatatcttctccgaaattctaaacatttatacatcctgagaatggtcacaaattctctacctctctctctctctctctctggtagagaaa

SEQ ID NO: 2274 - DNA, 3000 bp, Unknown
  misc_feature (1)..( 3000): cDNA_ID_2153231_gDNA_ID_1620514_Annot_ID_159208 3000 nt of promoter + ATG
aagagcaaaacagagagaaaagagctaaacggtggcgctcatgagaaaactataaaagaggtttctctaaaggacaaaccctaggggccgtctctgtgggcttttctttttcctacttgggcctttaattattcttctcattacattggcgttacaaaaatatttgcagcgggtaaatcgggtaaattaaatttacttttttactgtcgccggtcaaatgagctcaagtgtttttatgagtcagtggttcaggtcaaacacatttactaaatgagcttataatcagattcatttgaattcgtatcatctaaacaaatgcaaattttttatataaaaaaaattctttgaaaatgcaaacactagtatgttttcagaagaagaacttttcaaagaaacatatacagtactgttttgtaatctagagacaatacacattatgtaaacaaacattatggatcgatcttcttctgaaacaaaatctcaacggattcagattgttgacatcttcaccttcatgaccacacccctgatcctcttacggttccaaagatgacgataatggtagcaaaaacagcctgcgaaaaggaagggttagtcagaattgatttatatttgtgataaagaaaagagaaatggttcttgttgagtgagagagatatatagagtagtggacttaccccaactgcgcaagctatatatcctggtctctcacgcgggttcctagagaataatagaaggaagaaaccgatgtaccagggcaaagcgaagaagaaaccaaggatgaatcttcaagacacatcaaaccaaaaaaaactctcaaaaattatcaagaatgtaatgagaagagaagttaggtaaaaataaatgataaagatcacttacaatacccagccaatgccgataccgcaacaacgaccgtgttctgttggtcttactccattaacaacataacctgcgaccaaagactatagttgatgaaaactagagataaccaaaacgagctttagaacagccaagtggtgtgtgtacgttgcaataatgatacaatccttttgagaaactacagtttagctagaaattttggcagatgagataagagattctgatgtttgtttccaaatgaatccacaatgttcaaaatactaagcaaaaaaatcatttgtcaaattgtaagacgtaaacgccaaaagagaaccttctatttgcattatctatttcaaaaacctgatttttttttttataaaaaagattcatttcttcatgtcattattctcaagtgaatctagcatcttgatttatatcatagaagaggcaatatacaatttctctctaattactggatcactcgaattttcaaataatcaaattttaatccaatgcgaatcttagcatcttagatgaggtaaaaagttgatcaaaaaggatcttcgatataatggatcaagaataaaatgaagcttctataccaaacaaaacacaaaacaaaacaaaacgacagctttgatgatgttgtccatataatgagagatgaggaaagaaagaaaccttgggcgtagggctgagcaggctgaggataaccggtggcgggaggctgctgctgcggtggatagttagagacgccttgaaacggaggaggaggctgttgttgatgttgatgatctgtcaccacagatctgtttttatcgtcgccaccgctcgtcatctctcaacagatcaaactaaacaaaaaaacagatgtttctctgttttctttgatctggagacggtggtgaaccaagatttcggttttgctggatgcttcttattaaagtttcgtatttctaggggaagtgcatgtgccacgtggctttttatgtggtggttagtcagctttcctcaaccagattttcctataataatctttgatatttgcgtaatcccaggggaaacattcgcttctctttttttttcctaaatataaaaacaaacaccgacggaaatgaaattttttgttcaatttctttcttgtatctatattctctaactatatatcgtttaatcatattggctttaatgtttatgtcacagtcgcaatggctttctcaattgacactgcaccttccactattattcaccttataaattatactctttttagttcaatttttcacttttaaaaaagacaattttcttctctattaaaacaagtgacatgcacctctaatttgcatattttcatttttattttgggttcaaataagagatgcataatatttgattatgcaagttcaaaaaaatatttgattatataataaaagagataaagagagagatgaatatagaaaaatatcccacttgttcttctacataacaatagattagaataacatttaatattaaattatttgttgaccatttagtggaattatttcattatttttaatataaaatgtagaatagatagctattgttatctaataaaagtagatattctatggagatgagattatatgaaacaagtcaaattgtaagccgtccatcagatcaatgcttttaaaaatgaacggataggatcgtctaattcacgattaattgaacaatgacattggagtgggacctttatccttgtctcctcacacgtgtctgacacgtttgcactctttcaggcggttgacgcgtttcgcttttcaaaaaacgacagcgtttttctttggcttcgcggaagaaaacagagtaaatttagatcgaaatgttttttttttctttggttctgtctctgtgtctttttctctgaactaactaatcaaaatccacgagaacaaacaaaaactgaaatcatcttattacttgtttctttgtcctttcctaaccaacacacatgaagtgcgactcgtttcggatggttttgtttcatgagattgttgtttgatcctttggatttaagaaaaaaaagcaagaatctttggactagtttgttgttcacttctgggttttgtaaccaaaggaagtataataataatg

SEQ ID NO: 2275 - DNA, 3000 bp, Unknown
  misc_feature (1)..( 3000): cDNA_ID_2153235_gDNA_ID_1620514_Annot_ID_159209 3000 nt of promoter + ATG
caaagaaggtactcatatggactgattggatgaaggtttaagaagtttgaggaaccaataaaaagaagtacaagatagaagtcatggattgtgagcatctcctgcaatagttacctcctgactctgggctaacaaatttctccatatcaactaccagcatatttggctgcaaaattagacacaagcttcatgtagctagagtaattgtaatgcagtgtttgcttaactacagaggggattaatccagagcatccgaagagaaaggcgacaaacaacaagaatcttacctcaacaagagtctgctcaaatgcaacagacaaaagtttgtcctgattgagaaagaaagatattggttggagtgttagaagaggaaaaactcaaaaaatccagagaaagctcatcaggcgtcagtacttactagccatcctgcaatccctggaagcacagcaacatcaagtccatgagtggtaattggtttaacagtcatttggaaataaggtggctctgcaaaacacactcgtaaacgcccgagaaaaggccatcgacgaaggaacttcactccaatcaacaccttcaatagttaaagataccgatatgaagtaagatacttcattgaaggaagcgtgtaagtgaagctgcagaaaagaaaatgcactacctttccttcaacatgcattcctgtcaaatgcaactttgtccacattccaaacccaagtctttttcttaacttcacagcgagtattgcgctcatatcatctgctgtgaggaaattcattccaagttccagtacctgtacacactccaatataagttatactttctctatagaacttagagcttatagaactgaaattgtgcaactataccaagtgatcatcacccgtagattgccgtagaaccctaatatctgtcaacaaaggagggtttcttcccaaataaaggtgttgtatcacaacttttttctgcacaaattatcattccatcaatactaagtcggtttttcgactgtaaactgagctacagttagtggcctagctagtactactacaaagggctaactagacacaaaacgaaactggaaagactcaaaatttgaaagagttaccgcagtccaaggtctatacttgtccaagaaccaaggtatgatcggacgaagaatcttctgagaagcaatctgttccatacaaataggccatatcctctccacggcatgattcaaccaccgcaccgattcagaatcagatagaacctacaaagttgtatttaaaaaataaaaataaaaaaagattaccatttcatgcaaacaaaggtaaagtcagtatcttccaatacaagattgagaagaaccctagaacttgaacaaatgtatacacaaagcaacttaaagtcttaaacaacaaagtagaaaattacacgtctctggttagcttgcttcctctcttcaaactgcaatttcttcctcaatctcatcacatagcgttcatgaacctaaaagaaacccaccaaaacaatatttttcaccaaatccaataaaaattgaagctttaacatctaaaagaaacatttctccagagaaggaacaacacaccaggtaaagataaacgagagagaggacatagaaaaccgcgtgtgatcgattcaagtaagatagaacccaaagtaacagtaacacaatcaccacatgatggattaccgaacactccattattattatacttcctttggttacaaaacccagaagtgaacaacaaactagtccaaagattcttgcttttttttcttaaatccaaaggatcaaacaacaatctcatgaaacaaaaccatccgaaacgagtcgcacttcatgtgtgttggttaggaaaggacaaagaaacaagtaataagatgatttcagtttttgtttgttctcgtggattttgattagttagttcagagaaaaagacacagagacagaaccaaagaaaaaaaaaacatttcgatctaaatttactctgttttcttccgcgaagccaaagaaaaacgctgtcgttttttgaaaagcgaaacgcgtcaaccgcctgaaagagtgcaaacgtgtcagacacgtgtgaggagacaaggataaaggtcccactccaatgtcattgttcaattaatcgtgaattagacgatcctatccgttcatttttaaaagcattgatctgatggacggcttacaatttgacttgtttcatataatctcatctccatagaatatctacttttattagataacaatagctatctattctacattttatattaaaaataatgaaataattccactaaatggtcaacaaataatttaatattaaatgttattctaatctattgttatgtagaagaacaagtgggatatttttctatattcatctctctctttatctcttttattatataatcaaatatttttttgaacttgcataatcaaatattatgcatctcttatttgaacccaaaataaaaatgaaaatatgcaaattagaggtgcatgtcacttgttttaatagagaagaaaattgtcttttttaaaagtgaaaaattgaactaaaaagagtataatttataaggtgaataatagtggaaggtgcagtgtcaattgagaaagccattgcgactgtgacataaacattaaagccaatatgattaaacgatatatagttagagaatatagatacaagaaagaaattgaacaaaaaatttcatttccgtcggtgtttgtttttatatttaggaaaaaaaaagagaagcgaatgtttcccctgggattacgcaaatatcaaagattattataggaaaatctggttgaggaaagctgactaaccaccacataaaaagccacgtggcacatgcacttcccctagaaatacgaaactttaataagaagcatccagcaaaaccgaaatcttggttcaccaccgtctccagatcaaagaaaacagagaaacatctgtttttttgtttagtttgatctgttgagag

SEQ ID NO: 2276 - DNA, 3000 bp, Unknown
  misc_feature (1)..( 3000): cDNA_ID_3066828_gDNA_ID_1620514_Annot_ID_159211 3000 nt of promoter + ATG
cttacaatttgacaaatgatttttttgcttagtattttgaacattgtggattcatttggaaacaaacatcagaatctcttatctcatctgccaaaatttctagctaaactgtagtttctcaaaaggattgtatcattattgcaacgtacacacaccacttggctgttctaaagctcgttttggttatctctagttttcatcaactatagtctttggtcgcaggttatgttgttaatggagtaagaccaacagaacacggtcgttgttgcggtatcggcattggctgggtattgtaagtgatctttatcatttatttttacctaacttctcttctcattacattcttgataatttttgagagttttttttggtttgatgtgtcttgaagattcatccttggtttcttcttcgctttgccctggtacatcggtttcttccttctattattctctaggaacccgcgtgagagaccaggatatatagcttgcgcagttggggtaagtccactactctatatatctctctcactcaacaagaaccatttctcttttctttatcacaaatataaatcaattctgactaacccttccttttcgcaggctgtttttgctaccattatcgtcatctttggaaccgtaagaggatcaggggtgtggtcatgaaggtgaagatgtcaacaatctgaatccgttgagattttgtttcagaagaagatcgatccataatgtttgtttacataatgtgtattgtctctagattacaaaacagtactgtatatgtttctttgaaaagttcttcttctgaaaacatactagtgtttgcattttcaaagaattttttttatataaaaaatttgcatttgtttagatgatacgaattcaaatgaatctgattataagctcatttagtaaatgtgtttgacctgaaccactgactcataaaaacacttgagctcatttgaccggcgacagtaaaaaagtaaatttaatttacccgatttacccgctgcaaatatttttgtaacgccaatgtaatgagaagaataattaaaggcccaagtaggaaaaagaaaagcccacagagacggcccctagggtttgtcctttagagaaacctcttttatagttttctcatgagcgccaccgtttagctcttttctctctgttttgctcttggctgattcgttggagcttgatctctccgtggaaatgggtggtttccgggtaagttacttctttagtctgtgtataggatacgtgattctgggtatttggacttctgaagatttgatttggagaatcatcaactgtgctcggtcggggatagtgtattataaggataaataggttctgattcgcttagaaagtatgaaactttttctatgtgcatccgttaaattaatatgaatttgaagtgtttatttccggatttggtttgttctgtatgaatctctaggatgattgttttagtgcttaatgtcttctaaaatgatcattgtgaatcattttaagcttcattagctatccttaggcccagagatcggtgttgtcttgtgactcactgagagagttgatatgatgtaaggattagggtctggtgctgtttaaggttttaccaaagctgatatttttgttggtttgtgattaattgattcaatgtacattgcagtttcaccagtatcaggtggttgggagagccctcccgacagagaacgatgagcaccctaagatctacaggatgaagctttggggtagaaatgaagtatgcgccaagtccaagttctggtgagccattcgatttgataccagtttgttaatgtaaactccattttgtcttgtttatttcctgatctaaaatggatttgctcgttgtatctaggtacttcatgaggaaactgaagaaggtgaagaaaagcaacggacagatgcttgccatcaatgaggtatggattgcattttacttagatatcttagatatgctgaaagatggctacttgtatctgatcttgttgttctactttattatagattttcgagaagaacccaacgaccatcaagaactacgggatctggttgcgttatcagagccgaactgggtaccacaacatgtacaaggagtaccgtgacacaacactcaatggtggagtggagcagatgtacactgagatggcttctcgtcatagagtgaggttcccttgcattcagatcatcaagactgcgactgtccctgcaaagctttgcaagagagagatcaccaagcagttccataactcgaagatcaagttccctcttgttttcaggaaggtcagaccaccaagcaggaagcttaagactacatacaaggcatcaaaacctaaccttttcatgtagaagcaaccgacatgattctcatcagaataggcttcttgttcctagtctgaacaaaacactggagttatcttcttttgaacatttttcaactttttttttgttctagatatgatacaatattaaggtgactcatctccaattttcgtcagtttccaaagttttgctgctttagtgtaatgttgcagaaagttcaaaactgtactatctcccactatcataaaccaatctgctttgtatgccaacgaccactaaactagcaacacttcattctcattcttgtatgaaactattctcgcaattccataaatgtcttcatctgcagtctggtttatgctacatgtccccggagctctcggcgtctgacacacacttcacccaaaaaggattgagagcagttcaattcatcatgctcagtggatcacttttcatgatttatcgattaaaaaaattgcaagtagacgagaacagatggaaaactcttacacgcaagtacacagaaaaagccccttttccggcaaaggatttggagtgtaacttgtataatcaaaactccagtgacagccaaaaagtctcaatctttataaagacccacaaaaacttgcggactccagagtgagtgtgagaatcggag

SEQ ID NO: 2277 - DNA, 3000 bp, Unknown
  misc_feature (1)..( 3000): cDNA_ID_2153256_gDNA_ID_1620514_Annot_ID_159215 3000 nt of promoter + ATG
aaccaggtctgcttcttgcctttcgggtggggaccgaggatttgcatcggtcagaacttcgctctgttggaagcaaagatggctctggctttgattcttcagagattctccttcgagctttcaccttcctatgttcattcaccttacagagtcttcactatacatccacagtgtggggctcatcttatcctgcacaagctttgatactatactccacgtgatgttatcaaaacttatacatatgagaaacaaaatttcatagaggaatttattcaagataatagtcatattaaccatgttttgaattgagaatgcttccctaataacaactaatccatctatttttgagtattattttataccaaatagaaatgccttagtggaagagatgatatttaaataagaatctacaaatttggggaaaaaatctataaagtttaaaatctctcaacttttgaaatacacagttgtaactccccaataaaagcaaaattgatcaattagtgactcaagtaaagcaaaatatcaatgagtcaaaataaaacaattttgtccaaaacacaaactatacagtattttaaaacatgaggggtggtaatatccatatccataccttcttcgaaactatctctcttctctgggagagaaaaatggagatatcagttgcatgcgtaacagtttctgtagttgtagttgttgtgtcatggtgggtatggagaactttacagtgggtttggtttaaaccaaagatgcttgaaagttacttgagaagacaaggtcttgccggaactccttacacacctcttatcggtgatttgaagaggaacgtcaacatgttgacggaggcaacatccaaacccatcaaactaaccgaagatatcacacctcgtgtcctgcctcatcccttccaaatgctcaagactcacggtatgtgtcctggttggccttttgcttcctctctgttttaaactgttgatcaagagaaaaagagtttcaaattttgtatatctatgtggtttgaaacaggaaggactttctttacatggcttggacccaaaccaaccatcaccataatggatccagagctaatcaaagaagtgttcaacaaagtttatgattatccgaaggcgcaaacgtttcttttgggcagactaatagccactggaatcattaattacgatggtgataaatgggcgaaacaccgaagaatcatcaaccctgcttttcatatagagaagatcaaggtttaaggctttatttttcagtcatgaatcaagttgtatgctcattttattctgaactaatttgtgcattctaacttctatgtatagaatatggtacctgcgttccaccagagctgcagcgatgttgttggcgaatggagcaagttagtgtcggataaagggtcgtcgtcctgtgaggtagacgtttggccttggcttgtgagtatgactggagatgtgatctctcgtactgcttttggcagcagctacaaagaagggcagaggatctttgagctacaagcagaactagtacatctcatcttacaagctttttggaaagtttacatccctggatatcggtaataaaagatctcaacctgcctggttttagaacttcactagtgctgcaaactattacagattgtgaaccatgatgtgtcatatactcatattctctctgtcttctgtttgtgtagttatctccctacgaagagtaatagaaggatgaaagcagcagctagagaaatccaagttatactgaaagggatcgttaacaaaaggttaagggcgagagaagctgggaaagcagcaccaaacgacgatttgttgggaatacttcttgaatcaaatttggggcaagccaaaggaaatggaatgagtactgaggatgtgatggaggagtgcaagttgttctatttcgccgggcaagagacaacttcggtacttctggtctgggcaatggtgctgttaagccaccaccaagattggcaggctcgtgcacgagaggaagtgaagcaagtttttggcgataaagaacctgatacagaatgtcttagccagctcaaagttgtaagtataaaccaaatcataaaccttcaggtgactttagtacttttattgtgtttagatggttttgctgaatgtttccaacagatgacaatgatattatatgaggttctcaggctatatcctcctgtaactcacctgacccgagcgattgacaaagagatgaagctaggtgacttgacactaccagccggtgttcatatcagtctacctataatgctagtccaacgcgaccccatgctgtggggtactgatgcagcagaatttaagcctgagagattcaaagacggtctttcaaaggcaacaaagagccaagtctccttctttccatttgcatggggaccgaggatatgcatcggccagaattttgccatgttagaggcaaagatggcaatggcgttgattctacagacattcaccttcgagctttctccttcctatgttcatgcgcctcaaacagtcgttaccattcacccgcagttcggtgcacatcttattctgcgcaagctataattctataaccacatgtgctgttgtcaaataaacataggaaaataatccagatcataatataaaactcaaatctttttcttatttgaagtcagaactttgtcctcacatatgtcttgagaaaccaaaatatttccaataaaaagagtgaaacgcatggaccaatagatttcttcctcttttcgtcgcttttcacacaaagtccaaatatgcttctgcgctttggtggcatgtgactgtgagggtccaagtaaagcaaaagatcaattaagcacaacaaaataattgtccaaaccaccaaaatataaaatataaaataatttgtgaccatcatcaccacatccatatcttctccgatattctaaaccctgagaatggtcacaaattctctaactctctctctctctctctagtagaaaac

SEQ ID NO: 2278 - DNA, 3000 bp, Unknown
  misc_feature (1)..( 3000): cDNA_ID_3066824_gDNA_ID_1620514_Annot_ID_159212 3000 nt of promoter + ATG
gtctgaacaaaacactggagttatcttcttttgaacatttttcaactttttttttgttctagatatgatacaatattaaggtgactcatctccaattttcgtcagtttccaaagttttgctgctttagtgtaatgttgcagaaagttcaaaactgtactatctcccactatcataaaccaatctgctttgtatgccaacgaccactaaactagcaacacttcattctcattcttgtatgaaactattctcgcaattccataaatgtcttcatctgcagtctggtttatgctacatgtccccggagctctcggcgtctgacacacacttcacccaaaaaggattgagagcagttcaattcatcatgctcagtggatcacttttcatgatttatcgattaaaaaaattgcaagtagacgagaacagatggaaaactcttacacgcaagtacacagaaaaagccccttttccggcaaaggatttggagtgtaacttgtataatcaaaactccagtgacagccaaaaagtctcaatctttataaagacccacaaaaacttgcggactccagagtgagtgtgagaatcggagatgtctttttcagtagtagcagctttaccggtgcttgtagcagtagtggtactgtggacatggcggatcgtgaagtgggtctggataaaaccaaagatgcttgagagttctttgaaaagacagggtcttaccggaactccttacactcctctcgtcggagatataaagaggaatgttgatatgatgatggaagcgagatctaaacccatcaatgtaacggatgatatcaccccacgtctccttcctcttgccttaaagatgctcaattctcacggtatagtgtcttttctttctttgtttcagcagagttgggaagtgaattgtgtagaatttagtttgacttgagatctctgttaggttgaattgttggtgcttgattgagttatgttggtggaacaggaaagactttcttcatatggattggaccacttccaacgattgtgataacgaatcctgagcagatcaaggaagtctttaataaagtcaacgactttgagaaagcttctacattccctttgatcagattgttagcaggtgggcttgcaagttacaagggagataaatgggcgagtcacaggaggatcatcaacccggcttttcacctcgaaaaaatcaaggttttggtttttttctgttgtttgaattacgttagactgtgcatatgtgtgtgtgatcgtttagtaaccttttgtttggtttacagaacatgatccctgcgttctaccattgttgcagcgaggttgtctgtcaatgggagaagctatttacagataaagaatcgcctcttgaagtcgatgtttggccttggcttgtgaatatgactgcggatgtcatctcacatactgcttttggaagtagctataaagaagggcagagaatatttcaactacaaggggaattggctgagcttatcgcacaagcttttaagaaatcttacatccctggatcgaggtaaaaccacgatctccattgtctctttgttctgttgcaaactaaagattttgagaatttgttgtttggtgtaggttttacccaacaaagagcaatagaaggatgaaagcaatagatagagaagtagacgtaatattgagaggtattgtgagcaaacgggagaaagcgagagaagctggagaaccagcaaacgatgatttgttggggatattgcttgaatccaattcagaggaatctcaaggaaatggaatgagcgtagaagatgtgatgaaagagtgcaagttgttttatttcgcgggacaagagacaacttcagtacttttggtgtggactatggttttattaagccatcaccaagactggcaagctcgcgcacgagaggaagtgatgcaagtactcggtgaaaataataaacctgatatggagtcccttaacaaccttaaagtcgtaagtgaagaaaacacaactttcaccattctcgtccatctaacaactgcgtttatagttaacaaagtcagttaaatttcaactgaaaggttgtctttgaatgttttttcaacagatgactatgatcttcaatgaggttttgaggctataccctccggtggctcagcttaaacgagttgtcaacaaagaaatgaagctcggagagttgacccttccagctggaattcaaatttacttaccaactattcttgtccagcgtgacaccgagctttggggcgatgatgcagcggattttaaacccgagcggttcagagacgggctctcaaaggcaacaaagaaccaggtctctttcttcccctttggatggggacctaggatttgcatcggtcagaattttgctatgttggaggcaaagatggcaatggctttgattctacaaaagttctccttcgagctctctccttcttatgttcacgcgcctcaaacagtcatgaccactcgtccccaattcggagctcatctaattctgcacaagctctgattttgtatatccatggatatgtcatcaaaagtctcatattatgtaacaaaaagatgtcatagaaagccctgtagccatatgttgtgaaattgtcaatatctttgtctgaaactagtcgctattctataaggtaaaagtcttcttcagtcaagtctaaggtcgttttctatcctggctgcattattaatcttgaaaagtctattccaagaagccaatttcaactctaccatctttagcatgtgttttagataagccaatcgttttttatgtcataggccagtggagaaagatttagcaaaaacataagtattttatggatttagataatctagaacattcgttgaattttcctctgcctcacactttaaaataacatcaaatctctatctatttatacaaacccttttcatctggcatcttcagttcagtaaaatagaagaaagcatctaacgaattttacaagtaagtgcgttt

SEQ ID NO: 2279 - DNA, 3000 bp, Unknown
  misc_feature (1)..( 3000): cDNA_ID_3066837_gDNA_ID_1620514_Annot_ID_159206 3000 nt of promoter + ATG
gatttcgttgcaaaatgatgatgagatgatgaattggtgtacggaactttcttacatggatggtgtggtagatagtggtgttcttgagattgaaggtggtgattattattctcatattaactatgcactcacatttgaggaaccaactctttctctatggcaagagaataatgatgtagttatgtattgattgatttcgtgaagtcataatataacaaaggctgtttcgtaatccgttaacccccaaaaaaagaaggaataagaggctgtttcattaatctttaacaaattaaaaggaaagaagaaagggaggctgttttaatcagttatctaatcttttaaattttatgtatgtattcgtaaatgttatgtatgttgacgttacatgtttttatatatatatatatatattatgattgttgagaaagcaataccaatatacatagaattattttaaaagattctcgtgattatcaagactagcatgcatcaagatgtaactgtagcggccggatgcaaacatatgaaagttcaaatgttttttgttttttgtttttaatgattaatgtttttacaaagtatattttaaccataatataacttgatgtaaaaaaacatgatcgtgctaattacggtaacttttaggaagtttttttttctccctttctatccaatgaatacccgttgacgatagccagaactacaaatttgtacattttgttgaatagaaatagtcgaatatttaaatggtataaaattaaaagaaatttgaaacgacattagccattgaattcccaccaaaatatttattggattttgttattcatgaatcatgattacataatggatgcatattcgcataattaatttatgataaaaaggggtagactctagaggcatgtccactgtcatatcaaatgatagtaacataacttacataagtgatcaaatgggctggtttatttgagactcttggtgtggaatgaatgaatttggttatagaatcttgaacgtaatcataatttctgagtgaaaatcatgtttattttcatagcaaaaaaaaaaaatcatgtttattgactttagaaatatacataacaacttcttttttttttttttggtaatgagagctttttttttgtcggcaacatgaaatacgggagtttggattcagatcgtgacacataaacaatatccgtacatagtgctgattggaggtgaaagtttttttttaataaaattttaaaccataagatattaaaaatttattggataaagatgatttgaaaactaaaaagggttaaagcatagtatattgatttgcttataaactgcataacataacataaggcccactttaaccaaaacataaggcccataagatatgggcttttgattaaacatagtggtggatatactcaaaagtccatttctatatatcaggcacagacatcagctcatcacactaaatagtgatacacacttttggttagtagttcgtaactagcatcaattaagcttcactacaggcctatcacctttttttttttcgggaggcctatcacctatgcattcattatacaccggttaatgtatagaaattaaattattgtttccagtacatcaattatccataaatctagtggctatttttagaatataggttgttgaataaataacgtaggagtaattttaagacaaacaataaaaatacaaaaagaaaacttgagtttggtggtgttttttaaaaaaagaattggttttgatttgtacaccaagttatttttgtatagtcctttagtatattcttagtgactaagaaatagatacaaatgcacatcaagtatatgctttatattccaattcattagaaaaagatttggctgctttacagtgaataaactttttcaatgttttttcttttcccatgcacgttgatggtgtagattaacaaacacttttttttttcccatcaacaaaactagtaaaactacatgtgccaaaatgcctgtttctgcttatcttattaactttcactttaattaagtatgtaatttgtttgtttcggagaaaaaagcttacttaattaaaaagctaagctttccaactttaatctttctgacatttaagaccaattatgcaaactaattaacacttccctctattgattgatttaatataataaataataaatctcaactttcttctatatgaatatgacaatgatttcaaggatttaatcacatcatgtactaataaaaatttggacctactacttacaagttacaattaggaatccaaattacatttcttccaaaatcgaggtttattattattttattttgtttgtatgtgaattaattaacccaattagactaataaaaaaagccggtcaatatttatatttcttccaaatatactatatcacctatttataaattactaaaagagctctatgacgtaactttaaatagcaaaaggctacagtaaagtgaaaataaattgtttcacatatccaacgatgaaaaaaaatgacaaaaaaataatcatggtttttttaaaacaaaaattcgccgcaaattctattactgtaaatcaagaattttatcatctatctaactcctaaatttttttaaaaagaatattttctaaaagttttctctagttattaaaatacatattgttattgttactgagaaataaataaatccatataataaattaacctatagttttccctctcaaaaaagaacggccaactaaataaaagaaagcaaaaagccaaaaagaggaaatcgcacccattcatcattctctcttcaaaaaattccgccatggaaactaacctcactaagcaatttcctctttatataactccttccttctccactcctctcttccctccttccgatgcttccctccaaaaccccaccgacgacctaatccctagaacacgaatcagcttaattcgtctgattctgattgattttctcccaaaac

SEQ ID NO: 2280 - DNA, 3000 bp, Unknown
  misc_feature (1)..( 3000): cDNA_ID_3066841_gDNA_ID_1620514_Annot_ID_159203 3000 nt of promoter + ATG
aagcttgtttcagagatgggtttggtttgttttctgataattgagacaagttgaggttttagttaattgaagcacttttgctgtcatgtttaaagcctgtgggaagatttttgggttcgtttcttccatttcctctagagtctgagcatgaccaaatatttgaagcttatgaaccttttttagaagaaagatgtggtttccttggcaaatataaccaaatggattttctaggaaaaggagtcctctctaaatttgtggagttgttcttagtgttagctaaataaggacaatatcaactgtaccgttatagtatctgtgtttgtcagcagtggagagcatgaggaggcgcttcgttggtttaataagatgtatgctttaggaaaaaagtttcatccaaagctctgtgctctcagtagtgtgtgtttgtcacaacatctgctttggctgcattgatctaacttctatgaactgcagaattgtgaagatgagcatggcgtgtaacttgttagttcaaaattcacttacatattctcctagaacaaatcgattatgaactgtaagtacttaattaattctctgtatttcacttactctgatcaagtggcataaacgttaagacaatcattatgttctaggatcggacttcacaaattggggtacttgattttctctacttgtgatgtcaatctttttattagaatttcctcctatcactacttaaacgaaatctgatttgcattcaattattctaatcattattttaaacttcttactttgttaaagtatgtacatagattgtttactttttcatcccataattgaaaaatattcatactatattgtttgcagaaattacaattcaaaataacagtgaagctgaagatgttgaccctcattgcttccaactacaagaaacctattaagaagaaagaaaaacctattaagagctccacatttataaagttctattagagacggtggataggccatggctactactgttcatctcagctcattctccctcttcatccaatccagaggaagaagagacaactccatatcttccgtcaagagtctcaaaaaacgcacaggtttgtctccctcttctgccctcacctcacaaggtggcagagacatgattccaccagagggaaaatgcaatgatcacaactctgcttttgatttcaagttgtatatgatccgcaaagccgaatctgtaaatgcggctctcgacgtttctgtaccgctccgagaacccctcactgtccaggaagccgtgcggtactcattgctagcgggcggaaaacgtgtgaggcctctgctctgcattgccgtctgcgagcttgtgggaggcgacgaggctactgccatgtcagctgcttgcgcggttgagatgatccacacaagctctcttattcatgacgatcttccgtgcatggacaatgccgacctccgcagaggcaagcccaccaaccacaaggtatgttgttaaatcatataaaggctcaaagaaatgctcactagatttgaatcgttcattgattttagtaaatattcactcgtgttggaccaatttttgctcaaacaaggtatatggagaagacatggcggttttggcaggtgatgcactccttgcattggcgtttgagcacatgacggttgtgtcgagtgggttggtcgctcccgagaggatgattcgcgcggtggttgagctggccagggccatagggactacagggctagttgctggacaaatgatagacctagccagcgaaagactgaatccagacaaggttggattggagcatctagagttcatccatctccacaaaacggcggcattgttggaggcagcggcggttttaggggttataatgggaggtggaacagaggaagagatcgaaaagcttagaaagtatgctaggtgtattggactactgtttcaggtggttgatgacattctcgacgtaacaaaatctactgaggaattgggaaagactgcaggaaaagacgtaatggctggaaagctgacgtatccaaggctgataggtttggagagatcaaaggaagttgcagagaaactgaggagagaagcagaggaacaacttctagggtttgatccaagtaaggcggcgcctctggtggctcttgctagctacatcgcttgcagacacaactgaatggactgatcatatcctcaatgcatcaatctcctaacaagtccttttacttagatctatggtcttgtttcttataaatcatctatgccgtgtgatcatctctctcatttgttttcaagttgtattatgtttttgaatcttaataatgtaatgttcgaaaaatatcaataagatttgctcataggaactaaatcgtagcgtaaggattcagatgatcagaactaaaacgtgagcgcaagtttagcttatgggttttcttcacccaaaacagagtataaagatctgaatttttgttattgaagcagcagcaagaacgaattccagacaaaaaccacagttgacccgatgtggttcttgttgaatgcagaccatgatattcacaaacactgctgtatcgtaacttggaacgaacttaatgccagtcagagatagagattgaacattgattgcttggattctcaattaattcaatcatattaaatgattgtctaacattctcaacataattcagtcatattaaatgatttgtctaatgaatgcttttaatgttcactaatgtgcccaacccaaacattacagaatttaataatagcttggattttcccactaaatcaaactaaatcttcgtctgacattttccctcgcaatatgtgtccaaccataaaaaaaaaaaaaaaaaaccactaattacgattcgtagttactttattttgttttattcaaatcagccatttgaaagtttgaagcatcagcgcaaacattaagaacagagtttctctaaatagtttttcgtctttatcctttttacagtaacaacatg

SEQ ID NO: 2281 - DNA, 3000 bp, Unknown
  misc_feature (1)..( 3000): cDNA_ID_2994894_gDNA_ID_1620515_Annot_ID_159238 3000 nt of promoter + ATG
gtgaaggcgcatacctgaagaaatgcgtttactgcaaggtaaagttggtcatgactctctctgaatgacattgggactgtctcaatcagctcaatgaaccttgtagttttcatctcttgatcatacggtaaacgagagagaaaaatatcccacagttttccaactctcacgttgcttgaggaggaagtaagatggcgttccgattctgttgatacatatactgaaaacaggctttccattgtaagcaactcctgactgaaagcaacttgcctgttcccggctttcgggtatataaagttttcgggttgggcagtgtgaagaagagatacaatctgatcttgcagctttaacacagtgtcatgcttcaaattgtgtgcaagacacgcaaaataaaacccaactggaacaaacctatatgccttgtctcttgtaagaagcagatctagagctctttgcagaatatcagtattagtttgaccttcaggtattacagatttactggcgtaaagggcgaccaatggacttacatatctttctttcataccttgtcttctaagcgacccaataatctttttgaagaattcgaatggaagatccgtgaggtctttgatccaagtatcttggtttattattctctctatgtttgtatattcccatggttgattcaccataccttcaagcatgatgactggcttttctcttcgtctttcgggatcgagaatctccatacaagccgtgaaagccagagactcaatgcaccggctcacgatgagtagatcttcagaccaaggcactagatcctgacatttcttcagaacaactaacgtgtcatcccagttttgcaagacaacttggtttagataaaggtcaaatctctcgcagaggttacccgtcgaatgttgctctgtcatttcaagaaattgagctgcacatcgtagtccagcgatgttgaaaggatgtattaaagttggacagccataaatgaaaagcataatcttctcaaaggtctctgctccaccaggaaactcttgtggtatctcgatctccgatagctgatcctctctttccttaaaatatccgctctttgcacacaagagactctacaaaagataaacaaaaaaagtaaggcattatattaacaaaaaccactaagctacatgtattggttgaaaacagaatttcttgagagagagatttgattatcattattaccttgtgaaggttaaaactcttgttgcaaactcgaacatgtactgacgcgggtagaccggtctctttactcctgtgacacacacacacacagttacattacataagtctacaacatgaataattcagatttgttatatgacatcacgaagatagtcttgagattcataccaagaaagaactttgattttcaaaagggtactgatatttggagaagaaatcgggctggaggcgacggacgaacaatccttgaggctgaaagtttccattattgagtatataaattgtgaaaactaagtagataaagtatatcaaaaccaatatggtatgatgaaactggagacatttggtcgttcatttattcttcttcactattatatttttgaagaagaaagttgcgtgttttggggattgaagaggaagaaaaagggttctaggatccacgaaacaagaggacgctaaggaagatttgagaaaaagaaagtttcttttggttttcgtttttatcaaacattaaactataatatggctacttgcatgcaggcacacacacatatatgcgtagtagatgttgggtcaaagtcagatgcgcacgagtgttgagctcaaaaagaagatctcaaaattcaaggcaagaagttgaagacgacgttcctcgagtgttgagaagagttgaaaaatcttgtattataacattttttcttcgcttttttcaacaacatttttgttttttactccaacactttctttctttttcatgcattaactgtaacaagactctaaatagttctaaccagacattttggtgacgcttatttatgatgttacgatctggtcttcgagttatgtaatatacgttaattaatagtgatttgagtatttctacgaatataaatatatatttttgcaaccatcgtacattacgagaaaatcaagagaggaaatcgaagtactgtattgcttacttaggaagaattcgctcatagaaaacagggaaaaggaggctaaagtaggaaattattagagaattacttatattgacacacatgtaacatagatttaaatggatttactagactaacatagatttgtcgacaaaaaaaaaaaaggctaacatagattttttggtaaaaatgacagcaatatttttagtattctatgctatctttaagttatttaaagtgtactctattaaaccacatagataaagaaatgccaacaaaaacaatatgaaacattacaaattctagaaaacgccctaaacggttagctttaaatttgaactctaaaggacataaagaatcaatacgtaaataaataaaacacgtaaacgactaaattcggttaattcccttaaaaaaaattgatcactctttattctttttttttttgacaaaaaaaaaatcactcttaattcttaaaacttggtttatgctattcatcagcacaaagttcctgcaattcataccaaaaccagcgaagtactatttctaatttcttgggatcaggcccaacaacatggaaattgcctaacagcccaaataatcagaagcccaaaagtaaaaacaaaaacaaagcgagcctatatttacactcagcgaccaatgtacatccgccacgttatatcgataatttttcatctaaattacaaaaataccacttcgttttcctcctccttcacttcctttggcggctctttttttgtcctctcttcctcttttcgtcggagctcgcgaagctctctctcctcagaaatcaaaaaccctaaaaaccctttttgtagcgatgatg

SEQ ID NO: 2282 - DNA, 3000 bp, Unknown
  misc_feature (1)..( 3000): cDNA_ID_2153146_gDNA_ID_1620515_Annot_ID_159242 3000 nt of promoter + ATG
aggaagtaaatgttgaaacaaaatcagtcagacaagtaaaaagtatacaagtccctaaataattttgcagatgcattttcctctacgatccatgctcgagtttattccatgcaacaaattgatgtatttttttctcaataaattaattttattacacttatcttgacttttaaaataactatctataagtgattgttcatattttgtctgagctttgttcacatattctcggtgtcaggaaccatcattcatctttgtattgacacagagaaaccaaaagttttcacattcccgcttgggttttgaactcggggaacacctttcattttattttttcttaaatcataaatggctcactcattgaatcttacttttaccctttattttagtagatttaatatgaactttttacactgtatgcaatatagatgatgatgattgatgacaactaagggtatctccatcagtgagataccttcttggtttctcaaaaaagaaaaatattagtattttaatatatattagttatataattaaatttttacaataaaataatatttgaccaatagatgatatacaagtgttcttatgggtttctcagagtttctcacttgagagactaattctactctctctcatactttttgattatattttatttttatattgaacagtttctcaatgaaaaaccattgatggagatggtgtaagatatgcattacttaaaaaaaaaggttgatgatgatatctcagaaatattctgcatttctatcaccaaagaagatctgtagttggagatgatgagagtttagccatgatgagaaaaatgggaaaagaattagcattagattttctatatatatagtttacaagtcccatgtacatacatacacacatttacatacatggtacatgggacgtcactcattgtatgaagttttaaaaaacgacaaatagacagatttagagaatcatttatatatgtttttaaaacacattacccctctacatttttatttttgttaaacgtgagatatctccaccatattataatggaaagggttgtcaaaaagaataatgatacaaaaaagaacggcaaaggggggttgggttgtggggtcatagtgacacaacattcacttacaaaagagagtaaattttatttttattattttaactgctttgcaagatttagttaacacctttttagtttggaatctggattttcttattaacttttttttaattatatgtaaaattctgaaccaaaactcgtacatctcaacgtatcaaattagtatgacttatgacacaatcttttggatggatcctaggctcaatcactatatcataagcttttggttatcaaaagtattttagcttcagatttattattgtactataagaactatcacaagttatttgaagttcaagatacaatccatggcagtttaaatttgaccatttgttttatagattttttgcttttttttcctttgaaacgatccaaatgtttccaaaactatggataaaataggtatgttcgatgattaaaatggtatagtaaaattagaaagaaaacaaaaactgacattttatcataagaaataagtttctgttttcgttattttctacaaaatcaaattacttcgtaatttccacagtcgtgtggcatgaaatcacatcatttgaattcagcattgtagtcttcgttctctacccggtcaacattctttgactttgattttctttggtgttccttcttgtcttcctatatctactaaaagccaattagttttcttttccgtgtatttatatataattttctaaatgcattatattaaaactgaattatttgattagaagtttacgacaaaaaagaacatttactcaaataattggtggctttgtgttgttaatatttatgcaaattttgtttttggtgacaaaaaaaagctaattaaattactctgtactataaacttaagttatggtaaaccagtggctctggtttgattatgtttagggtaaaaaaatcaattattctcgtatgttttaggaattaatttgcacttacaatttgacaattttatagacgattttagtgattaaaaaaacctgaatttatatgcatttcgggaatgtttcggttttgacctagaattttccgattaacaaaaaaaaatctttttaatactttaatcttaaactaagattagagatagtgaaagttgaaaactagattgagacaaataatgaatcggggacatgtatctaatataattggaggctcaataaatcatcaaatgatgtggtggtgggagcgacatgtttgagtggtataatcgtaaatcacacgccggtttaagattctgtttcttttttttttttctctgtgataagagtgagacttctgttttgtctttcgagccattcccatgtgccttgtctccgacaactttctctcttcccttctctcttcctctggttcacatggaacttcaataacattcactactttaaggtttctcatctccgaaaaagtcaggtgggtactactaaatttggattttcgttcacttagaacagttctgtttgatctttgattcctcaagttataacttttgtttttcttttatatcttatgacatgataatattaggtcttaaatcatcctcttcttttgatcctgttggaaaattctttgatttggtggttatgttgcttagataacctaaaaaggtatgaatttgtagctttgttggattcttaatctctgtttttatcaatagatttgattaatatatgtctaattatgtggttatttgcattagaattgtgttatgtatagacgaatataacttgaggttatgttgatctaagttacaaaaataattcagggtaatttagagcttctctaggatggtttaagatgagtctttaagtctgatttttttatacttgcagttattgtgcagatcattgaagtgactagaaatg

SEQ ID NO: 2283 - DNA, 3000 bp, Unknown
  misc_feature (1)..( 3000): cDNA_ID_3066879_gDNA_ID_1620515_Annot_ID_159243 3000 nt of promoter + ATG
actacgagcgcctctacgtcggcgcgtggcttggagacgcgccaccttcgtcgcttatatttcttcggaagcccgttaacgttgtctgaaccggaaccggaaccggaaccggaaccggaaccgtaaccggaacggccctctttttgtttctcgacgatcaataaattattagtaatcttgtattctttttaaaattaattttttattccgacttttatggttacgaaatttcgatttcttcatttcattacaaggtttcattaataaacgtgatttttttcccactcctgtttctttttcttccctagtagatactgccaacgcgtagctgttttgtctcttctacttttttttttctttttttttataatcttggccttcactaattttcattgattatgccatatgtgtttttttttgtccttttggtttagtgtgaaaatatattaaagagcaagttattgactcttggggaggtgacactttttaaaatgtaaaattaaatgatgttctaataagaaaaaaatgtaatatgatgggtttttttttttaatcttatggcattagccaaagtgaattttatggtggaattacattatagactttacaagatttgtgaaatgtaaattttattttaaattttagtggcattgtaattaattggtaaattttcacccaaaaacaattttatgaactagcaacaatgataagtggattcaaaaacacaattctgtaattttgatgggaatttgttttttatagtaaaacataattttttattttagcggaaaacacagctttacagttttaaaaaaaaattaaataaaaaaattgaatttaagtagaataattttagttttaatgtgtttagtattttgccataaattttcaagaattatcaaataattattgattacactattttgttaaaaacaatgttatataggtctaaatgggttaagaaaacttaaatgaattttaaatgggaagggtaaatgtggtgtaaacttaattggttaaatgagtttaaataaatgtggtgagttttaaatgacatgggtataaatgggggtgaattagcccatattaacatctctagtaaccaacattacctcattgactaattatcgagttatatctactgtaagtcttttttccgcaccgagataatgccaattgcttggatcaccgtcaagagatggaaaactatcccgaggaaagtgaccacccaaaaatgtcgagaaaagaagagaagatctcaaaatcaacggagagaaaaaggtcatcttaggaaaaatttgttgtctcacaaaaaacagcaacgtcaacggaaaatggaagccacctaaatgatctcgcctacgaaccaattcaccaaaggaacaacgtcggtgaaaaaaaatatattttattaatagttctcggatcgttacattatatacttgcaataatttcctaaaaaaacttatttatctaaactaacacctgtttgattttttattttttatttgtattggttacgatggattaaaaaataatgtcatctctatgttttaaaatatcgttcagttcaattttttttaaaaatatatatttttttaattgtattgatttctactaggtactgtttctcttcgaaagcaagaaaaataaaacaaaaatcaatgaaatagatagctgatggtgtgaatgaacttgttacttgtctttttcttttagttcccatgtacattggactccatagagaagaatatatcatatccatattaaaatctcatgtagctttcgtctatatcatgatagattgagagaaccaatcatatatagtcttgagaagttctgacttttgatccatttgatgttccaataaaccttaccatctcctcttcaaacactaaagtgttttaataaattactaaaattgagggattgtaaatagattacaaaaattgctacctaacctaaatcaatctaaaaggaaaaggaaaattaaattaaatctcttaatttcgaacaggctaacttagtattggtttagataaattattgctaattttacatgaaaggaatgcgtcttaaattaagcagtctactatcatgaaaaccgtggttgaagacttgaagtagtctctacctgaatgtgaagtctggtattttgttcgtgtcattgtgcacatagtcgcatgtgtcaaaatttttgaagggtatggcaacagtagaaaaacttgtcgataccttcttagtaaaggtctcatatgggttatatagacaaaagatgatactttgatatgttgataactcttggtcacttgtgactaaatcttcaagatcaaggtattgacctaaattaccaaagctggaataaataaccaatgaaccataagtttctcctctatgaaagatttttaaagagagaaaagaggaaaagcttcggcgtcaagttttttgttttttttcctcctctctagtcaacaattcttatctctttttttcttttcttacaataaaacaatacttgtcctcacattttgtcttgtctcactctctctcccattgatcttcttcctcggctacatctcccgacgcctctctctcgttccggtgagtcctcctctctctgctccgatctgtatttcttctctttcagtttcatgctctctgaggtaaaattaatgatctttcttaatcaagttataaaacttcaaaactagttctaaagatcgatgcttgagaaatcaattttacttacgatttgtatttcatatatatatatatagcatcatctaactatcaacttaatcaattccttaagattcttctttgactaatttaccgagagtttgataaataattagggttttcaatttctgggttaaagtcaacttcagagcttgtttctgggtttaagtcaaattcaaagcttggattcatgttgtgatggtgatattatgatttatgagggttttctctgaatttcagattttggtttaatatttgatg

SEQ ID NO: 2284 - DNA, 3000 bp, Unknown
  misc_feature (1)..( 3000): cDNA_ID_2153197_gDNA_ID_1620515_Annot_ID_159257 3000 nt of promoter + ATG
ctaaataaagaaaatatttattggatgttacacatattttgaactgcataaagccatttttatcgattttgccactattaattaagatgtcaaatatagattccttctttatcggtgttccatcaaataatctctcagtttttctttctctctctctttctcttgccaaaactcaaaaaaccaattccccattgaatcaaacgaactcaaacttttgtcagtttattactaaacatataggaaaagttgaactatcttgcctaatccattttttacaatagaggaagatcaacattttggcaaaattcttatgcaaaaaaataagaacaaagtgtttgtcattcttttagttgattagtttttttttaactttgaacccattgaggtttgtaataaagatgttgtcatttcgaatgccgtctatcggaagccaacctacggcatttgctgcaaaaataacggacaatccaaagaccgtggcacaactcaagtcggctgcatcgccttcacctcatagtaccgtgacgtgcggttaccaagctcatgtggcagggttctttcgaaacgtcaccgttttatggtccaagaatctcatgaatcattccctcaccgtaatggtgtcgagtttagacaatgacatgaattattgttgtaagattgatctcgtgaagccatggcagttttggagcaaaagagggtcaaagtcattcgacgtagagggaaactttgtggaggtcttttgggatcttcgatcagcaaaattggctggaaacggtagccccgaacccgtgtcagactattacgtggcagtagtttctgatgaagaggttgttttattgttgggagatttaaagcaaaaggcttataagcggaccaagtcaagaccggcattggtggaagggttcatatactttaaaaaagaaagcatatttgggaagaaaacgttttcgactcgggcaaggtttgacgaacaaagaaaggaacatgaagtggtggtggagagctctaatggagcagcggagccagagatgtggataagcgttgatgggatcgtggttgtgaacgtgaagaatctacaatggaaatttaggggaaaccaaatggtgatggtggatagaacaccggtaatggtctactatgatgttcatgattggttgtttgcaagttcggagactgcagcgagttcagggttgtttttgtttaagcctgttccggttggagcgatggtagatgagagctttagcgatgcggaggaaggagatagcggaggagggagtagtcctttgagtcgttataattcagcatcaagtggttttggaccattgcatgacttttgtttgtttctttatgcttggaaacttgaatgaagactattaatatcatagtgtgtgtgtttttatttaaatctcttttggtgattaagttggaatagaattagaaattaacaatttagtctaccttagtttggtcccaaataccaactaaacgattgctcaagagttaggacaatcagatatttgcaaacaaaaagtttgtattagtttaaccatactttttgttaatcgaataaccataagaaaatttggtaagtttcttatggatatgagttagttttctttagctaggccattatatatataagtctatttatttacaaattcaattaaaaacaattagcttatttagttatcaattaaagctgttttttattttaaaaaattagcctattaaggttttgactttttaaaaaaaatacatgaagcaaaaaaagaatgaaaagtctttaaaaaatgaaatacttgacactagcattgtgactatctagtgtacatagtttcaaattaaaagttttcaactcaaattaatgtactaatattttgtcaaattgaataatataagtaagagtggacaccgacctgcgcgtgtcagtgttacagatacacaaatatctttttttgtgtagacgtttccaatttgccagatattatatttgatctttctctttcttttcacctacaaaaataatatctccttttttaggcaagatattttgttcattcatgtgcgtctctcaaattaagatattttggttttttgtaaagtcaaagcaaagactattgttgtgattgggcttttaagccttaaagcatctaaaagaagacgcttttgagaatccagaatcggaaaagttccacttgtgccttgtagatcgcgagtacggctctttgtctacacgcgagcgcgtgacttcatactcataaaaatatctttagggtccttagaaaatgggttcttttgaactttttacccaatgtttctagaattatcagcttatgtcacatgcctctgcctacatgtccctttgcagacacaacccacccattgtctatccatctgtttctccttttacccttcttcacacgcagctaaagaagaaatttgtggaatcatcgcttattcgtttcaaaagtcattcatttttggtgtctctgcttcagaagatacttgacgatctctcctacgtgagctctttaaaacccttgtcttgttattttagtgagggttgctttgattctcaatcctttttgactgatcttgaaatggatcttctttcacttctctcggatttgtaataagaaatctataattttttagctcacttctctgattggtacatgttgatctgaaatttgaagtctttctgcgatgttaattggtttctctgatgtctcttttgattggtctttgatttagaacagtctcatccataggaagttacaatctttgaggaagagatgtttaaaaagattggacttttatctaattctggacttgctttcgataccaagtttcaagcttttgttagttgtttaatgtattgtggtaagtttttttccttctaagattatgatataagggactaaccaaaatggtttgattctttgttagtgaaaggagcttgctttcttcagtgtgacggttgagattggttgaaagatg

SEQ ID NO: 2285 - DNA, 3000 bp, Unknown
  misc_feature (1)..( 3000): cDNA_ID_2153183_gDNA_ID_1620515_Annot_ID_159253 3000 nt of promoter + ATG
caggagcttattcttcttcccattcaacatcttcttcttcttcttcctgactcatctgtcctctcagttcccctactacatcagccactccttccctgatcatccatagagggaggttttccactctaggatcttcatcttccctggtcggattcaatcttgcccgattcaatcttgtccgattcaatcttgtctttctaaaacgtgcttcggctgaagcgaaaaaactagcagacgatattgaagaagatgaagatgatgcaggagcgcttgtagcagctactgttgtgtttgtactcgagatactcgaatcgggttccttcggtccagaacaactatgatcaggtccaaaccgatgtttcaagcaatgatcgacattttatagagaatgtcaagacttctttgcacctagaaacaggacattgtttcttcttcttcttaacatcgttttcgtagtttgagggatcacaatctgtatcattaacatgtttatcccaagttatgtttgaatcttcgtcagggtttaacctaaatcctatagcacaaaacggacaaataatcactgtgacatctcctctgtttccttttggacaatcgtgttacatatagctacaatgatccaaacaaagcacctgcaaatagagttttaaaagttagataaactttaccacagccattgttcctctctatttagaaaatcatgcaacattgtagatcgtagaaactagcattggaataaaaagacaaggagaaagagacctgaaggcagcgatcacatgtgaagggcaagaaatcgatctgcgtgcaaacatcgacggagcagtgtttccctagatctggaaattccggagtccccatcgaaataagggtttcgacgttcagaacaattcaaactcgaagaagtaacaattcgaacccgaaagatctaggtccgaggaaccgagcgaactatgtaaatcaaaatctctatactttgagaacacggtacgaagaacggagagaactaggtcaaacaaaatctctatcccttgagaactaggttcttctccttttataacacgcaacagtcggatgggcctccttaatgattaatatcttgatgggccttctctatactaatatatgacccaaagagaacccattccactatatcccccttctgccttgtgctaagtttttagtacttttccaagttacctaatcctacaagaaattctggaaagtgaaatttctcataaaatatatcatttacttatttcacttataatacaatagaataaaacaacgtgtagaaaacaatattaatctagcttatcttgtaattcatcaaaaaaaaaaaaacttaacaaactgtcacctttatttggggtcatcccaaaagtgcctccataattcctcacaatgaaaaatttcacaatacgcaacttaaaatattaacattttttcatcttatataaatccaatcactgactactattatattcatatcaagataaaactcaataaatcattccaattctctaatcaaaatgtggagcaacaagttcttcttccttcttccagttgtatgcatcgtagtgttcgctacttctcaaccattgccatcaccacaaccttcccaactagattgttggtcatcactagaagttattcccgactgtgtcccggaaattttccgatcgataacaaatggacagttcgggaatgtaggtccttcttgctgccatgcttttataggtctcgatactgaatgcatccctcagatgtttatcttcgctcccctcatcccgccttctcgcagactcagggatcattgttcccacaaaataattgtgccataaacattttgagactttgttagttgttacaaagagtttgttattctacatgttttagactataaatgtgcttatagtgttatgtttctgcttaattaactacgtacgttctctactataagatatcaataattaacttccatgtgaacatgtgtcatttagctataataagtgaatacgtactaggatacgttggtttatttatcaaaattgtacacattgcatttgcttcacaattgtttggatgactttacaaagcgcttgtttacttatggccttatgggttgtgaattttaatcgagcattgttcatattgtagtccttcaaattttgagttttttctcgtatatacacatatgtaaactccaatactcaatagctgaccaacatcgagttacaagtacgactaccaataaaaagattttaccgaaaataagaaacatcttcgatatatattttttgattatctcttaatcattagtttgcgatgtttatagtgcgggaattgagtttgagatcgactcaaaaattataattggttttctcaaaacatggattagacgactcatatattcattgtctttcctaacatgattatagtatggctctatcgtgaaggactggatagtctgtattttatatatctatagaaaaactaacagttttataaatgagttagcaaaatatacttttttttgttgctttaaaactttttttttctaattctatcccatattatattaattcgattttgttgaatgattctagaggatcgatatacccgaaacatgtttaaaattgtaatttatttttagttttttcagtgaagtaggaggacatttgtccccctcaaatcaccaaatttttaaaaaaaaaaaacttatacatgatttaaggattatgcaattgtattgtctgtccgtcatttgactcattttcccactggtaagagctcaacttcagggattaatgggcttaggcctgatccgtttaaaaaaaaaaatatatatcttcataagagagtttggccgtttggaaataacgtgtaagtaggacccacttttgtgattatccgccgcacagaagtctctcctccactccacaaatagcattcccggcgagagacagagagcgaagaagaagactcaaaccaaaaaaaaaa

SEQ ID NO: 2286 - DNA, 3000 bp, Unknown
  misc_feature (1)..( 3000): cDNA_ID_2153132_gDNA_ID_1620515_Annot_ID_159239 3000 nt of promoter + ATG
tcaccagtagtccccttgagagatcctctcttctaatattagcttcgtcatcttttgtctaattaacccaaaaaaagagcacactaaacagtttagtgaaagaaagagaaacccatctatatagcacatcataaaaaggataggctttaaactcacatgcgtaaaatgaagtgggaagtagcaaccaataacttcaaaaagatcagatgcatcagaagcgagtggaccagaaggactggggaacaaaggagccaaaagctctactagatgaaaaactatcattaagcattgaggatctttttctccgtcgatggcttcacacatagcataaacaagtagatcaccctaggaaatggccgtttagtcaataggattacaagaaagtgaggaaaggtcccgagtagtattacaaatttggatacatataaataattatttgtcttcctacaaagctgactcaaatagatttccaagaaaacattcctcacacagtagatcgaatgtttaattctgaactaagtagagagcattagcataccatagtcaaaatagcttcagaatgttgttgtaaaaggcactccagaagttcaaaagcgagctgcaaagtcatttagcagaagataatgaaaaaaccatccagcgtagaacacaatcattcagattagataacagaatactacaaataaccgcttcatactttgcgctcatgcagtgctaaagcttgcacttgcacattctgtatcattgacttcgccatagcttgtacatcgatatcagtaaccacaccagctacatctttcctcttcagtagagccaaacaaccaacaagcgccccgcacatcgctctccaatctgcctgattcaagtacaacaatcgtttcacttctatgttaaaacaattgaatagacacattggaatcgagtataatcaaacttaagaagtatcaaattaccagcttttcggaaaagaatccaacgagcgtatgaactattgtatcgttcaacggctttgctttcaaacaatcgagaatctccgcaagcaggagaatacctatagttatgaacacaccaatgtccaattgcgttcaaattgataagctcattaaactaagctagtgaatcgaaatacctcgtgctcgaacgaggttatcggttgttgtcaaatacatctccatctctctaacctaaacattagcaatacagaaataagccaacaacacaaataaagcctacggaagaatattcagaagttgtcaagtgagtggaaattgttaccaattgggtaatagataaagaatcattctccaaagaagaagcaattgctttaagactatcatcctgaaaacaaaattaaacttggtgaatcaatgaaactgttgttctaagtctcaaaattgatcaaaaggtacctgttgagaagaggaacgattagtgtcaacaaaagtttcgagatgttgaacgagctgattcggttctaccatcatcgctacaaaaagggtttttagggtttttgatttctgaggagagagagcttcgcgagctccgacgaaaagaggaagagaggacaaaaaaagagccgccaaaggaagtgaaggaggaggaaaacgaagtggtatttttgtaatttagatgaaaaattatcgatataacgtggcggatgtacattggtcgctgagtgtaaatataggctcgctttgtttttgtttttacttttgggcttctgattatttgggctgttaggcaatttccatgttgttgggcctgatcccaagaaattagaaatagtacttcgctggttttggtatgaattgcaggaactttgtgctgatgaatagcataaaccaagttttaagaattaagagtgattttttttttgtcaaaaaaaaaaagaataaagagtgatcaattttttttaagggaattaaccgaatttagtcgtttacgtgttttatttatttacgtattgattctttatgtcctttagagttcaaatttaaagctaaccgtttagggcgttttctagaatttgtaatgtttcatattgtttttgttggcatttctttatctatgtggtttaatagagtacactttaaataacttaaagatagcatagaatactaaaaatattgctgtcatttttaccaaaaaatctatgttagccttttttttttttgtcgacaaatctatgttagtctagtaaatccatttaaatctatgttacatgtgtgtcaatataagtaattctctaataatttcctactttagcctccttttccctgttttctatgagcgaattcttcctaagtaagcaatacagtacttcgatttcctctcttgattttctcgtaatgtacgatggttgcaaaaatatatatttatattcgtagaaatactcaaatcactattaattaacgtatattacataactcgaagaccagatcgtaacatcataaataagcgtcaccaaaatgtctggttagaactatttagagtcttgttacagttaatgcatgaaaaagaaagaaagtgttggagtaaaaaacaaaaatgttgttgaaaaaagcgaagaaaaaatgttataatacaagatttttcaactcttctcaacactcgaggaacgtcgtcttcaacttcttgccttgaattttgagatcttctttttgagctcaacactcgtgcgcatctgactttgacccaacatctactacgcatatatgtgtgtgtgcctgcatgcaagtagccatattatagtttaatgtttgataaaaacgaaaaccaaaagaaactttctttttctcaaatcttccttagcgtcctcttgtttcgtggatcctagaaccctttttcttcctcttcaatccccaaaacacgcaactttcttcttcaaaaatataatagtgaagaagaataaatgaacgaccaaatgtctccagtttcatcataccatattggttttgatatactttatctacttagttttcacaatttatatactcaata

SEQ ID NO: 2287 - DNA, 3000 bp, Unknown
  misc_feature (1)..( 3000): cDNA_ID_1019772_gDNA_ID_1620516_Annot_ID_159268 3000 nt of promoter + ATG
atatatatatttactaaaagtttttgctaacttattcctttccaaaaatacaataaatttaaacatgattgatgttaaaaaaaaaaaatttaaacatgatttaaatcatattgtatacaacaaaataaataataaaatggttagtaaaaatttaaaacacgaaatgaaaaagggatattcacccaaacaagttgagttttgaaacaacaatggtaattcaatctctgattagtccttctttagttctttacaagaattgggcttgtggtatgttggatttcagccctaattgatatatgtctaattttcaaatccaaataatgttcgttctactaagtaaattgagatctaagcaatagattgcttggcttgggcacaatctttaaggccgtgcccaaaaaaaatacagacacaacagatatgccctcagataataggccgtgtctagtaactctcttttcttaaggccggtgggctgattctggataggaaattatttgtttaaaacccaaaatgatgattcttgaaaacaaaaatacagatacaacacaagtgaagaaaaagatgcaaaagaagtagagcaagaccaagaacaatgaagattaaaaaatttacttgggaaaaatttggctcaggaattttggaaactgtttttgacttctcgtcttcgcttggcgtcttataaggtcaaactatctggattctcaatgatctttgcaaaggtttggagaaaagcagccaagtcagctccatacacaatgcgatgatctgcagtcacattcacctgccaacataacaacaaagcgacaatgttactgttagcatagccaaaagctatagctaatcgtattttaaactttctaagtcgaagtgattcaccaaacccatcaggaagtttattaagtcaaaataaaacttaccagcattgtgttttttacactgaagaatccatccttatcagcaactacagttggctttgacgctccaacagccataatagcaccctagagatttgagtataacaattaagtaaattccttgtaatcactattcatagaagaggcaatgaaagtttctttcatatacctgtcctggcggaagaatagcgtcaaatctatccactccaaacataccgagattcgataaagtaaaagttcctgcattccatagatatatcccttaaatcaaaatccttaaacacacttcacatgtttgtcatctaaacaattcgttaagaatagtaccagagttgtattcatggggttgaagttgcttgcttctagctttccccaccagctctttccatttttgagataacaagtacaaatccaactatcaaaacaaccaacacgactcacacattcagttaaagaaaccagcctaataataccaagtgtgtgtgttaattcactcacacgctagctattttctacaactttattgcttatgcttaccttatctgcatcttgtagaacaggcgtaatcaggccaccattgatagcaaccgccactgcaatgttaatgctactattgtaactaaaactcttcccgtctttgcagctagcgttcaccacaggatgctgagccaaggccatccctgcagctttagctaataaagctgtcattgttacaccctttggcttcacctgtaaacaaaagcagtgatttaacatcagcttcatcattcaatacaacatcagcttcatctgtttcattcaattcaatttcaccttctcgtaaagtgcatcaagagcgtcagtgttcacaggataaccaacacggaatgtaggaacagagagactctcaatcatgttcttagatactgcagattgcattgctgtgaaaggaacaatgcttgaatcaggtaacagaggaggcaaattagtggtggttgctttagccgtcaccggaggtggaggaggaggcggtggtgcgatggaggatttggacggagcaattccagccgccgtctccacatcagaagccgtaatcctaccgaatggtccagttccagcaacggattcaatatcaaccttgtgttgtttagcaagcttcttagcatacggcgtcgcaacagtcttcctcggaccatctgatactgccgtcaccggagccggttgagcaatcgccggagcaggagaagaagtaaccggaggaggagatggaacgacagcctcagccacagaagaagaagatttcgaagcggctttactcttagcttcttcgatctcagcttcagtctcagctaacaatccaatcgcagcaccaaccggagctgtttcaccttctccgacgacaatcgcagcaagataaccatcgtaaaacgtttctacatccatatcggctttatcagattcaacaaccacaacactctctcccttggcgagtttctcgccttctgttttgatccatgacacgattttgccttccgtcatggttgatgataacgccggcatgaaaatttcacgaatcttagatcggaccgtcattgaacgacggtgagaagtcgccggagtcgtggagcggaaaacgacgctgcggagggatggggatactgaggaagcgaatgaaatgttggatttggaattggttagtgaagctgtcgatagaaacgaagaagaagaaaccgccattgttgaatcacagagagagagagatctgagagagagtttagagagagtgaagtggacggagaagacgaggttgaagttcgttgagcgtcttcgcctacatttgtatcagttaccagtttaataaccggatatataattaaaccggattaatttatctgaaacttcggtttaggttaaaccatctagaaacaaagaaaatttagatgcttctcaatggatattaggtaacataacaaaaccagttttcttatatatcttctctgctctacctaagttagagaatcagattccaaaatcttaatttataagtatacttttgttttcttaaccaaaaacatatcatacaatattgctctttcgtctcatg

SEQ ID NO: 2288 - DNA, 3000 bp, Unknown
  misc_feature (1)..( 3000): cDNA_ID_3066941_gDNA_ID_1620516_Annot_ID_159289 3000 nt of promoter + ATG
tagagtgtgccactatgatgaatctgatccgttaccagtccatcaagaggagaagatattctacaccgaagaagattaccgagatttcttggctcgacgaggatggacatgtctgagagagtttgacgcgtttcaaaacatagacaatatggacgagcttcaatccggtcgcttatacagaggaatgagatgagaaaacggttactacagaaggctagaagaaaccttttatttttcatcagtcactataaatagctttttttgatccaaaatactttattttcatcagtcactgtacatatgcacctcttttgacatgccattgtgaatcagaggaatttgatttgtttattgagaaatctctttttgatccaagagccataaagtttgattggtaaacaaaacggttcagtacaagagacagggacaatgaaaaagctgataacttttgaacaaaacacaacacaagtacaggattccaattctcatacaattcagaaaaagaaaaaaaacagaagagaaaacgatataggtgtgtgaataaaggattcacgtgcctttaagaacaatgagaactcccaaagagataaacgcaagctgaacaaagagccttgcatacgtgtgtcccgacttctgttactcttcttcatcccactcgtcgttcttgtatgagacaagcgtgtcgactttgtgaatctgcaaagtatgaaaccaccaaaatacttagacatttcaaagtgtataaataaaggtttcaaaattcttcctcctccttaccttggtatcaaaaccgtgtaacttaaccatctgtggattagcaatcaacttcgggtcgctctcgatccaagtgaatggaacagccacatcagtatccgtatacgccaatacatcaaacacacctaatacaaacaacatgcacaatcaaaaacgagaatccaaatcaaactagttccgaaatgatgatcactcaaagttcctatgaattggttcttacatgtttcatcaagacaaggcaagtaagtaacacttgaagcaacctgtctcataatagcttgaatctccctcatgatctccttatcactcttctccctcgacacactaaaaagttccataaagataacataatgaaacaaagaatcaaagaaaacaaacaaacttgcgaaagtatcaacactaaaaacaaaaaactgaccctttgtcaacaacttcattatcagtctcaatacgaaaattccacctctccaagacttcaccagtagctttactcataatcactaacactactctctgcaacttcccagcttcaagccattctttagaccaaaaacaaaatcaagtctcagactctctcacaaaaggaatcattgaataaaagtctgacatttgtaaaattaccggagatctgagaagtgagattagacatgaaagatttgacggattcatcttcaataagcaacatcggaagtccatatttcttcactttcacaaaactttcctctggataaactgcacgattatacaatatactgtacccagaaaccaataacgaatcaatttcactgtaaaaaaatcacagaatcgaagatttccagacactgaaattgaaaagttccgatccaattctcacctgttcgcagcgtaacctggaggaagaagaagaaggaaaaaaaaaacatcaaatcgagaagaagatatctgaaattgagtctaagaaaaaatgaagatacgtacagaagaattcgctgacgatggcagcagatccgtgtaaagtgatgatatctttagcagccgctgttttggacgccatggagtctaaggatcggtgattttgaaaattgaattcgcaagtgttaacagcgtcgcttagggttttaatgattttgaagggaaaaaaagatatttgagggaaggattaaaaagaaggaaagaaagaaaaagaaaaaaaaaggaataagagcgtaacggctagtcttcctcggaaatgcacttgcaacggctagtttgggttattatagtttaaggtcgaatccactaattttttttaaaaaaacaatataatatcattaccagaatttttaaaatatcaaatataaaaaaacaacaaattatttttagccaatagcaacatctctacaaaccattgtaataattattatttttggtttgcaacacattttacatttaaaagaaatacaccaaatattaaatatataataactttgttttaaaaatttaatagaaaagtccatagttttctgccatacggatttagactcgccatgtggtttttaacttttaagccgtatgtctctttgataaacgaatgaagcatcaatcaaaattttaagaagccttttaagtgttgaaaggtaaattttgtagtttctattggtaaatcgactcatctatgacttttttttttaaatagatttcaaatatacttcatatatatgtatatataaatttatgtcgtgacacccatgaccgaaatctagaaaaaaaaaaaaaaaaaactaaggtatttttttccagtctaactgaaaaaatacaattttacaaataactcaaacttcaaatgtgttttgatttacttaattaagccattattaatccacataaggttattaacacaaatttatcaaactaactagccacttgataatccattactaggtaaattcaggtatatatataagttaataataaactgattatttgaccaaaaaaaagcataattaaaatatatttttatacataaataaaataaaataaactctctttgatgttgacatcatatgaacacagagaaacagatgaatgaaagcgttgttagcctctctactagagagctctttaaactctttccaaaagctttcactcactcactgttacgctattaaatgtggttccatctcagatatatacgtatccaatcgaattttggattcttatataaaatttggcttcttgggttatgccaatatgttgttcgatgaaatg

SEQ ID NO: 2289 - DNA, 3000 bp, Unknown
  misc_feature (1)..( 3000): cDNA_ID_2047921_gDNA_ID_1620516_Annot_ID_159292 3000 nt of promoter + ATG
acaaggaaagcttcaatgagaagaaaagaagaaaagagaagaagcttcaagcgtaaaaaaaggagtaaaaggaagaagaagaccctaatatgggaaagacagacgacgactccaatgacttaattttttttgtccaaaccttattatgggcgacttctcttctcaagaccttatgggctttacgggcccaatattaccatgtttcaacgtgtttgataaaaaaaaacaattgttacattttcatttgacgtatttgtactatttaaagtttttttcaacactttgtaatatgacttgacttctattattctataaactattgacccaataaatatcttataaaaagtaatcgttttctgttgtgttcactgaacaattattttcttttatttctggaatatgtcacaaagaagagacgaatcttggaagttttaagttcatcttttattattatgttccaagtttatattcttctacgaagtattccttgctaaaacacggtatatatcaaactttacgtgttgttttatagaacttattaacaaatattatttggtacactttccttcttatttattttttaaaaaccattagacatgattttaataactggttgtcattaactaagaacacatttcttacctgatttgtgcttttaaaatgccagtttttgtttcacaaaaaaaaataatttcagattttatattgccttggtttattggatcgtatttaagatatctatctacaagatatttttttttgtttttttgtttactaaagcttatctatgtacaagatacaactatctttattgctatatcacatctatttatattcttttattgtgaatctttgtggtttttaaagcaaaacattatttgttccactttctaggtatataaatctaccaaataaatatgtctcaaactcatggcactgaatatttaatgaataaatttggaaaaatgacctatttttgggttttcatttgaaaaataccctatctttatttctttttttaaacaattaattttcaatatataaagtactaaaacagcttcagtaaaattaggaaataacaaaaaaaaattaaaacttaaaacaaaaaaaaaatcataaatacaaatttgatgtaactaataattttaaagataattattatcttaaatatttttaaacaaaatgttgtccaaaaagtaaaattaaactttatcaagtgatagactttttagaaatatttgtaaatattgtttcataaaattttaatatataaaataaataaagtgatagactttatatgaattcaaatttaatttttatcttaaatattttaaacaaattttcgtccaaaaaaataagcaaacaagtttattaggtgatagactttagaatatttttcaaaattttataatatctaaaaccaataactttttatctcaaaaaatagttgaaaacataattaagaattcgaatttattttattttaattttgtttttctaaatttcgaattttgttttaatttatgaataaaacaacttttattttaaatctggataaatttgtcatcttatatatcaagaattacaatttttatttaaaatagaaaaagatgtatttttcaaatgaaaactcaaaaacaagatagttttcaaaatctcccaataatgaatttatctaaaccaacatcaaaacaaaaatagaaagaaaaaaaaaagtagtttcaatagacaaaattaattctatttaaaatcaacaaactaaaaagatactaaacaaacattttactaacaataaaatataatgttttttacaataattaaagtttattatacatataaaactgtctattgaagatctgaacgttacaaagagaaatgcacagtaaaattaatatttatgtagaattattcatcgtaatcacatttatctttttatttatttttattttgttattgtaatcacatttatttttatatgcagatagataaatatcatcgtaatatatttagctcaaacacttctggtattaatccatgttaaaagaaaagaaaaaaaatcatatattcctggtttatcttcatactgaaaaatgacaaaaaaaaacaaaaaaaatgacacgtgtttaaagattttgacgatttcactctaatcttatctttcttttttattattatttaagtttgtttaattgattttgtctccaatagtttttatttttctctccctcgtaaaatctcaacccctaaaaataaaataaattgagatttttcgcacaattttctcgtcgtttccattattttctctcttcttgactcggtcgacgaaattcaccaacccgttctctctttctctttctctcttctttgaattcccaaagtgattgaatcaaaaacttcgtttgattacaattcgatttcccccacacaaaaaaagagatcttgttttaatttcgcggcgagggttcggtttggctttcccgttgatcgcgttgttcttcttcttctttggtgattcaatttcttcaattcaatcaaattcgtatctttcttcttctttgataatgtttaggatttaggtttcgtaatttctgaaaaccctagtttagtttttgttcgagaaaaaagaaaaggaaaacaaaaaaaaaaaggaaaaatcaaatttattcaattcattctttttgtgttacccaaattcggttgttaatacgtctcaatttcgaatttcttttctagggttttttagggttccaaggaagctctcaaaatttctggtgcctagtatttttttgttgccatctgaaatcaagagtttcctttttctctccatagatctattaattcatctttcgattatccaaaaaaaaaaataactttttagtttatcttcggatctgatctatcttctttagggggttttgagtttttctagggattgtgtacaaaagagggatttttttggttttgttaggtttaaagtgtatatagagattaatagaaatg

SEQ ID NO: 2290 - DNA, 3000 bp, Unknown
  misc_feature (1)..( 3000): cDNA_ID_3066931_gDNA_ID_1620516_Annot_ID_159296 3000 nt of promoter + ATG
aagaagctaacaaagatttttcagttttcagtttctcagcgaaaccaccagatttggggataaaattagggtttttcgatctccagagaaaacaaaaaaaatgggagaatcaatttgtcttgtgagatctttctcgcaaccttcagagttttcatcgcgtgaaatcaacgaggttagtgcttaagatttctaaatctacaatcttggatttagggttttgataatagagattgattttgctagtgaaatttctgtgtatagtgtgttgtttgatgaatctgaagagaatttgagatttggtttttggtttttggcaggtggtaccgaatcgagtgcttacggaatcagtatcgtttggtagatatgcgaatgaaacactagcgtgggcgagatggtcagcttttactcagaatcgttacttggaagaggttgagaggtttactaaacctggttctgtagcagagaagaaagctttctttgaagctcatttcaagaaccgagcttcagggaaagcagcaacacagacgaagaagattgaacaagtaaaggttaaagatagtgttgagattgtttgtgatatacctaaggatattctcgttgattcagaagtaccactagcggtgaatagagaggtgtctagtaatgaggtggactctgttgttccatcaatttctgtaatagatgaaactggtaaagtggagaacttgaagtcagtggttgttcctgatgaggtaaatgcatttctgttacattgcaatttcctgtttttattttttctctctaaacgtccatggtgttttcagggcaattctacttctttgagcaaagaaagacctcctagttcttccggatcgaaggtctcaagctcaaaactggaatcttccgttgttatagaactggatcattcacttaagaacactaaaaaagagtcatcctcgagtagtacaaggtcacttagtgcatcgaagaaccgaagtagatcacctcctgagcccattcacatgtcaatcagctgtgtttcttctagtaataccgagaaaactattgtggggaggccccagaacggttctaggagtgcagtgaaagcagacaagaagaagagatcaggtccaagttcagttcacatgtcactcaattttgcttcttctactcttcgtacgaccaaagaagccccaaaaacactggcaagaaactccactacacagggaacaacttcaacaaatgctagaaacaaacttttcccaaagataaacgaaccaacgggagctttaaaaagctgcaagagaccattgtctcagacatccaaagacggttcaaccaatgtaattctcttcccaagtttctcttcttgcgtatatcccaagcatatttgctgagactgactcttacatatattgcaggcctctgctgtcacgttacccagacttcctcttctcagtaatctgctatcagaaaacaaaaggttactgatcaaaccatcttcaacaccaattcatcgctttatactattactttattattaactcaaccctataattaactttgcttcttctgatatacaggaaaaacatatctgtaaggagttcagtttcatgtagaatatccaacaatgagcaaagaaaaccttctgtcgggtaagcggtttaagtaccaacctcttagagaaatactatcttatgtcacttactgcaaatggcctgagttggttaattgaaagtgtttgtgttagttccctgatttatgtggacataagacgagatgtttttgtctaatgcattttgcagctgtgaaaatctgtcaactcatagcagaaccaaagcaaagtctttgactgtatcttctcccttcgtcttcagaagtgatgaaagggcagagaagaggaaagaggtagaactaaagaagatccttttactttatctttgagattatttgaggacttatagagccgtagtttaaaaaagatctcttttgttgtggatgtgtcttgtctgttagttcttcaagaaagtagaggaaaaaaacaagaaagagaaagaggataaattttcttgcggcttcaaggcaaatcaaaacactaacttagcatctgaagaacacaagaacccacaagttggtggttttcaggtatattcaactctcagactgtaacttgtcataaatttgggtattgaatctttgatgtatgacattataatcatgtgcaggtaacaccgatgaccctgacttcaccaagattccgcaggaaccaaactccaggaaaagagaacataaaaaaacctcatcaaactcctcataaagcttcctcaatgaagatcatcaacaccaaaaaagtagtcatggagaagcacaaaagcagcaagatccatccctcctccaaacagcagacaacaaaaagaactcaagaaaatatgtctcctaatattcttcagaactaaccagagacaaaccagatcaatcgattcctcttcttcaagtctctagatcatcgtaaagattcgacttttcactttgaagattccgaaagttttgtcccttcagctagtaatctcatctcaagcttatggtttaggtgactagcccttgattcagattgtgtaaccacaagcttttaaggagctgtgtagaatagatagaactcaagtctacttactcttcaaagtaactatgtactcaatagttctgtagtatcaatcttgtatcatttgtatacatagagatttgaaataaagaattatgtctacttttcaatttctcattgtgtttctttcttgaattagtatagacaggaacatggcaaagctttctgttttacatttgttttaaacgacgacgttttggtatgatgttgtgatgttgtgttgttgtggtgtgggcctctcgtttcagaggtgagagaaaaaatcttatctctgtggactgtgattgtgtgatgtttccatatcttcagcttttcttctactacatgctctaatcacgtccttgtagaggaaaagaaaaaaa

SEQ ID NO: 2291 - DNA, 3000 bp, Unknown
  misc_feature (1)..( 3000): cDNA_ID_3066924_gDNA_ID_1620516_Annot_ID_159300 3000 nt of promoter + ATG
accactcaagatctaactcacactgatctcttcaagaacgcattaaacgaagtcatgcaattgatcaagatggtaaaataacatctctctttcactctcttacgcacgccttcaagctattctcttgattctcatttttttgtgctcatgaatttgaagaacttggtaagagattactggtcatccatctacttcatcaagttcaaagaagaagaaagctgccacgaggcaatgcataaggaaggatacagtttttcatctccaagactgagttcagttcaaggctctgatgatcctttctatcaagaacatatgtcaaagagttccagatgcagtagtcccggttaaggagtctaaaactggtactagaccagaacccaaaccaatgttcatagcaatccaatccatgtaatcttccttcacatttcttgtacatgtcattttctctcttgttatacctaactgtaagagaaaatgtccggttcggattttggtttagttttaaatgtgtataccggacaaaaactatggaaccatactaattaatatctcgaagaatttatacgtatatgccatctgtttcaccaagaataaaaaagcacctgcagattgatcttcatgtccttgcagagtgatgatgttgcatcacatgtttcatgatgtgatgacatatccattggcctcgctaaggcttttcatcaacattttgacataatgtttttttccaccactatattttgacgtgtacaacatctataacgagaaggtgggatggtcatcaaatatttcaattttagaatataatttgttactgaaaagagaaagttgaagaattttttaggtttatcatatgattaaatgatattaaaagttttaaatatctataaaatataaaattaaatattgttgagcagcaataaaatgtctttaggtaagtttttaaaaaaaaaaatcatctgttaccatttaagctctaaattattcagtaaaattctgcaagaaatgtcaattaaaccctaaattcagtaacttagccagatttattctgctgttaacatataaaaattaaatgttcaaaaaataaaacttatatgtgtaggtaagaagtcttgtcagcgaatgaaaaaaaagtttaaattaatgtttcattattatggtgaatctttcccaaatattagtggttctcatctcaccataaataaatattatttcccaaagaagttttttttattttatttttggctgtctaccatatggttttggtatatatatgggtagcaattattgggtgttgtcgatgttctctccaagatagtttataaaactaaaaggaatctttatcagtttatctttcaccaaattagttaatttcaatatatttttttggttaaattgtttagcttatggggaattctctaaatagtaattacatctattttctgttccaagactattatgaataaattttcgaaaatgctacaaattagttgtgataatgttatttccttttcattcttatatctcaatcttaatatcttcattctatctttgtttaaaactcaaactaaaatgaaaactctataacatctagacatgaaaactctcactaaaatgaatttaacaaaatttacttctattttcggtgaaaataatactccttataaacatgaaaaagaatgaggatgtcatcatagtggataactatgtaaggactcatgagtaatataatcaaattattagcagatattaataaactactataaagatccgttggatagatagatagataacttgttctaccactcaaaccaagttttggatgcacacgtctatatacacacataacacatgcatacatgtattgatcatcatgatgttatattccattacaatcaaacatatatgtgacatataatcacaaattttcttataatttgttatgttatttactgagaaagagatctgatcgctttataagtccgcataaagagacaccacaactttctttcttcttcattcacttctatcaacgccaaatttgcagactttcccaggaccaaaattatattaaaaaaaagttccttttttctgatcaaattgtgaaattcgcttgcttgctttcttcacagtcaattaattctctaacaaaacattcttcgatcgttcgttttcatcttctatgcttctctgatcagacacaagaacacaaccaaagaaactcactatagcttgtctgtagattctgatgttcgaattcttgttgttgatgatgattgaattgatgatgatgatggtttgatgcagatgggttttcaaaaatctcatcttttttcttaacaagtaatcatttttatccatctcaagtctctgttgaattttctatgattttgtctctgattgtgaatctgggtaatgatcaaactgtagtattagttactaacatttccccaaatggattgatctctctgatgtgtttgtttggtcaatcaaaattgatttctgggttttctgttgtgatcatggtaaggtcaaaagttttgagtttccgtgtgcagaggagaaggagtagtcctttgcgtgtgacaaactgttttcttattatcttccgtatcagatccaatctttctttaagattcctttttcatctttatagaataattcattgttgattcctacacttctcttccaagttttcttctttcattcttggttgatttgatttgattgattcacagattctttctctgttcttcattagtcaaaaggtttcaccttttctagtttctgtttataacaattgattatgatttggaaccttacttagtttctgtttcttatgtagatcaaaaagcttagaacttgttgaacaatactagagactagagaatttgcaggtaagtttttggggatcttgttctgtttgttttctcatatttcaggctaatcagagtgtgactttcttgtcttaatttgtggttttgtagataatctgtttcaaaa

SEQ ID NO: 2292 - DNA, 3000 bp, Unknown
  misc_feature (1)..( 3000): cDNA_ID_2992902_gDNA_ID_1620516_Annot_ID_159297 3000 nt of promoter + ATG
aagaacccacaagttggtggttttcaggtatattcaactctcagactgtaacttgtcataaatttgggtattgaatctttgatgtatgacattataatcatgtgcaggtaacaccgatgaccctgacttcaccaagattccgcaggaaccaaactccaggaaaagagaacataaaaaaacctcatcaaactcctcataaagcttcctcaatgaagatcatcaacaccaaaaaagtagtcatggagaagcacaaaagcagcaagatccatccctcctccaaacagcagacaacaaaaagaactcaagaaaatatgtctcctaatattcttcagaactaaccagagacaaaccagatcaatcgattcctcttcttcaagtctctagatcatcgtaaagattcgacttttcactttgaagattccgaaagttttgtcccttcagctagtaatctcatctcaagcttatggtttaggtgactagcccttgattcagattgtgtaaccacaagcttttaaggagctgtgtagaatagatagaactcaagtctacttactcttcaaagtaactatgtactcaatagttctgtagtatcaatcttgtatcatttgtatacatagagatttgaaataaagaattatgtctacttttcaatttctcattgtgtttctttcttgaattagtatagacaggaacatggcaaagctttctgttttacatttgttttaaacgacgacgttttggtatgatgttgtgatgttgtgttgttgtggtgtgggcctctcgtttcagaggtgagagaaaaaatcttatctctgtggactgtgattgtgtgatgtttccatatcttcagcttttcttctactacatgctctaatcacgtccttgtagaggaaaagaaaaaaaatggctgcttcatcttcctctttcactctctgtaatcacaccacacttcgtactctccctctgagaaagacccttgtcaccaaaacccaattttcagttcccacaaaatcatcagaatctaacttctttggctccacactcactcactcatcgtatatctccccagtctcttcctcttctctcaaaggcttaatctttgccaaggtacatttctcgactcttgcattgatagattgtttgctacagttgggtaacaactagttctgggaattagcttctttgttagaccaatgttttttggacaatctaagttctgttccatttcttttttatatgtttttgagtattacgatataaatattagcaagacaatagattgttagatacacagccatttttgaataagaaacaaaagatgtaaatattgggttttaagtctgaatttaaatgttataagaacagatttatgaatgtgttagtgcagaatcaaagacaaaatcaaagaaacttgtaatcagtgtttgttttagagaccataaactttcacatacctgaaaataagcaaatgctagaatgttcttgaatatgttcaatcctttattcatatgatttaagctgacacggcatatgaactctctttaaccttctgtgaattggtctctttgtgatgtttggtgggcagcaggttaacaagggtcaggctgcaccagacttcacactaaaggatcaaaacggaaagccggtgagcctcaaaaagtataaagggaagcctgttgttctctacttctaccctgcagatgaaacccctggctgcaccaagcaggttgttaaatctttactttctcctccttcccgcattcattgatcgcatatttagtgtttctaaacgtaaatggttttacttgtgtacaacaggcttgtgctttcagagactcttatgagaaattcaagaaagctggtgcagaggtcattggcattagtggagatgactctgcttctcacaaggtacacacatcaaaaatctctggtttcttgaataaacccatttcttttttccggattttaaagagagtggtgggactttaaacattgttgcaggcgtttgcaagcaaatacaaactaccgtatacattgttaagcgacgaagggaataaggtgagaaaagattggggagtgcctggagacctgtttggagcattgccagggagacagacttacgttcttgacaaaaacggtgttgttcagctcatctacaacaaccagttccagcctgagaaacacatcgacgagaccttgaagtttctcaaagctgcttgatcattctctctttctcttctttctcttctttcatgcatgtctcatgtctgtctccatgagaccatgaccttcttatattgtttctgttgagtatgaattttcaataataccatgttataccaatgagaagggagttggctttggtctagtacaaagatcacaacaggataagtactgaagtgtggttaaaatgttagttggttctgtgtatttgagtctctcgttttcattgtgaacacctctactatctctttctcttgtatcaattaacacttcaagtaaggtacacatatcaggtaactctagctagcccttgattaaaattgtcaaacacaaagctttaaggaattgtgtagaatacatagaactcaagtcttcacacaatagttttagtatgtgaactcaagtactcaatagtgttgtggtctcaatctaatatttgaaatttaaaacggttattttcgcattgtgtttctttcttgatttgagtatagacaggaataaaggtagagcctttggactgtatgaagaatatggcaaagctctgtttttttacgcatttgtattaaatgacgtcgtataagtcggagcaccgagggcctctcgtttcatgagagaaacaaaaaatcttatctttctgacaacggtggtggtgtgtgatgttgtcagccatggcaaagacagagctacaacgatctctctctcttttcttcttcttctgtgtctgtctttaaatagagtctctttgaaacgaagcagctttgtcctgttctgatatcc

SEQ ID NO: 2293 - DNA, 3000 bp, Unknown
  misc_feature (1)..( 3000): cDNA_ID_3066933_gDNA_ID_1620516_Annot_ID_159294 3000 nt of promoter + ATG
cccataaggtcttgagaagagaagtcgcccataataaggtttggacaaaaaaaattaagtcattggagtcgtcgtctgtctttcccatattagggtcttcttcttccttttactcctttttttacgcttgaagcttcttctcttttcttcttttcttctcattgaagctttccttgttgcaggatttaatttaggattcacaattccaacacatacaaattgtttaaaaaatacaataagtcataaagtcagaatacgttaaacattgaaaatgtgaagtataatatttggttttctcttcttgttttttcacaagttaagaagtgtctgaaaaatagtcatggcttcttctcaaaaggtttctgattgggccttatgaggtattgagaaaagagaagtagcccattaaggtattgagaaaaagagaagtagcccattaggtcttgagcaaaaaaagaagttgagtcgagcaagcaagagtccctgactcagtcctcttttctcagctgtccagaaagtagaaaccctaaattcgaaaatggaaacacgaaatcgaaccatacatctcactgatgcgatatggacggagattctagcgaggttaccactgagaatcatcgctagattcaaatcggtaagcaaaacatggaaatcaacaatcgaatcagtctatttccgccgtctctttgtgtctgtgcaccgaaaatcctcaacctcgtggtcgctaatgtggtacggacaaaaagatctcgtaggtttccatggatgcgagacatggggtcttccaaagtctctatctttttacatcccatcgtctctttgtattatcgagggttcctcccatggattggttttgatttcagaaaatgatgatgattgttgctttgtgggtaatccagttttacaacagtggatcaaaatccctccacctccagttcactcttcagtgtttggtttggtgtctcgcgtcgacgatgatggctttgttttgggcttcaaagtcgttaagttagctgaagtaatagtgacgaataactatgtctcgtgttctttgagtgtgtttgtgtattcctctgagactgggatttggacttgtaagactattcactgcccttatcaaatcaccaactttggttctttcactttggatggtaccatttactttgaccatcttagtgaacctggagtgctcgtagcttatgatttctattctgaaatctccgatcagttttgggttatacctctcccggatcatccgaatcacggcttcaatagcgacttcaaaggtgctttgactacgtcccaaggatttgtcatgtatatcagaacattagctcaatcttcgtctaatgttttcaaggcttggaggttgaacaatgattcaacttggcaacttttgtggaaaatcggcctcccgtcacttatcggtgattatgtacctatggcaatgcatccatttgatagtgacattgtccatctttggagtcaagatcatcgtcatgtggtatcatggaacttgcggactcagaagaatagaatcctcggagctgaagataatgatgaagatcataaagattgttacttgaaccagcctgtttgtgaggagtgtatggatgagatatgcggctgtaaagcttctgtcaggttactacaacttgttctcccacggtggatggaatcggtgccttgtcctccccaagttgagatgatgaatacagcttcggtaatctcttacgttacttcaatgcaagagacaatgataaggaattggcttcatcaatgatttcaatatctgcttttttttcttttctcgtcttttggtttctttcttctatctagtaccatctatgtaatggaagacaaccatatccatatcatgcaatatttgcatcttcttatttttgtatcagttcaatgacatgttttgccatttcatctttctaagttgttacacaaattgtcacttcctttgaacaagagtttcttcaattgcagttttattccagccgcacgtagtttcttaaagatatgttattcgatagctttaccatatgtactagcaaaacgaactaaacgacggcgtacgtagcgtaaagtagtgcccgcttcaaaatttcgtaatcaaaaaacacaagaagacttggtagcccaatccacataattaaatactattttaaaacaaataaattaattaaaaaaataaagtagcaaaaaagtacgatcgatgaaactgagaccgttggatcaaacctatcgaattataaaaactagatcacgagaataataaaaagaaaaagaaaaaaataaagcagaaaattcatctccaaaaaaaaagaaagaaaaattcatacttccaaaggaaaggggaagaaaaacaaaaacaaaaaaatctcaagtcaacaaacaacaacgaaggtccgaagaactttgaatgttgttatcatcatcatcataatcagaatcatcaacatcatcgttgtattcttttctgggtattttctcttgttgaccttctaattatgccatctccgattatcgatttttgtagagcaatcgtattttatcgaagcccttgtttctggttttagtctcttgtctgaaatcaatctcaaaaaggttctgttttttcggggaaatgtgcagcttttgattgtttcattttccgattgtttcagaagaactggaatcgccgtaaagttcgaatttttttttgttagattgtacaaaagggtgttgtgattaaggaagaagaagaagaagaagataaaaaggttttttttttggctgttgttgtaatctgggaaagtttgggattttgtatcgatctcaggtttgtgatttgattctgtttctaaaatttattaggctgatctaggatttgagtttttttttatatggactttgctttttttctcagatggtgaaaagacgaagaagtgtgattgttttggggatatgattaaagaacctgaattgttctggtgttgagaataagaaact

SEQ ID NO: 2294 - DNA, 3000 bp, Unknown
  misc_feature (1)..( 3000): cDNA_ID_3066937_gDNA_ID_1620516_Annot_ID_159291 3000 nt of promoter + ATG
aactgtctattgaagatctgaacgttacaaagagaaatgcacagtaaaattaatatttatgtagaattattcatcgtaatcacatttatctttttatttatttttattttgttattgtaatcacatttatttttatatgcagatagataaatatcatcgtaatatatttagctcaaacacttctggtattaatccatgttaaaagaaaagaaaaaaaatcatatattcctggtttatcttcatactgaaaaatgacaaaaaaaaacaaaaaaaatgacacgtgtttaaagattttgacgatttcactctaatcttatctttcttttttattattatttaagtttgtttaattgattttgtctccaatagtttttatttttctctccctcgtaaaatctcaacccctaaaaataaaataaattgagatttttcgcacaattttctcgtcgtttccattattttctctcttcttgactcggtcgacgaaattcaccaacccgttctctctttctctttctctcttctttgaattcccaaagtgattgaatcaaaaacttcgtttgattacaattcgatttcccccacacaaaaaaagagatcttgttttaatttcgcggcgagggttcggtttggctttcccgttgatcgcgttgttcttcttcttctttggtgattcaatttcttcaattcaatcaaattcgtatctttcttcttctttgataatgtttaggatttaggtttcgtaatttctgaaaaccctagtttagtttttgttcgagaaaaaagaaaaggaaaacaaaaaaaaaaaggaaaaatcaaatttattcaattcattctttttgtgttacccaaattcggttgttaatacgtctcaatttcgaatttcttttctagggttttttagggttccaaggaagctctcaaaatttctggtgcctagtatttttttgttgccatctgaaatcaagagtttcctttttctctccatagatctattaattcatctttcgattatccaaaaaaaaaaataactttttagtttatcttcggatctgatctatcttctttagggggttttgagtttttctagggattgtgtacaaaagagggatttttttggttttgttaggtttaaagtgtatatagagattaatagaaatggctttaaatttttcacatagacctttttcttctcatctatctgaggaaccaatgatgatagccaatgggaattggtgttcaagtttcgataatggaaggaagaatactggaggagatgcttcttctgttgatatacttgatgttttgccatctgatccgtttggtatggatatcaacaatactttcacggctattactggatggcttgaggatttggaggatgattataataaccaatatggaagaagaagaagagatgacatttggattggtgatggaaaccgtcagcagctgtttgctggattgagtttcttttggaacaatgcaatgcagtttcagagtagtggttacagttatggatcagagtcattgtttggtggggcgtttgatgggtctctgttttccacatgtaaattccctgaaagtagtggggaaaataatgggtttggaggggcattagatggtgatggatcttgtcatggtgctttcatatctgctagtagtgttgatgaggtattgagccatgagaatgcgaggaatggtgaagttgtaggaagtagtgatcgctgcaataatggagaagaggatgcgtatgttcatccagcgattggtttttgtctttatcacttgcgagggaaggatcttctttcagttagtatggtttgcaagtctttgcatactactgtttgtgatgacacgttactttggaagcatatccacatttgtcgaccgttgaatgagaagatcacggaagaggctctactgcatttaactgagagggctcagggtactatgcagtgtttgaggatcgtagattgctgtagaattactgatgattgtcttaagcgggtggtggcgcgcaaccgacaagtagtcaaggtgagcttctttccttaatttactttaaagcgtatttggattactaataagtaatattgtaagtttttatagaagtgcctggtaattgaattgatttgtgggatcctattaaaaccgaatgttgttttgtggttggcagattggtgtgcctggatgcacaaggataactatcgatggtattttgagcgtcttgagggatctgaagtctgcgggaaagcttcaagtgaagcatttacaacttcgtggcctctttggagtgactaaagatcactacgatgaactgattgacttgttgaacattgacaataaagtcaagcagactattcagaagccgcgtttttaccatagaggagaagcttgtgtgtcctgtgatgatgaccgggcactagatattgagatgtgcccaaagtgtcaaaattttaagcttgtgtatgactgtccagcagaagattgtaaagggaaaaagaaaggttctgaggaatgccgtgcttgttctctttgcatacagaggtgttatcattgtggtcggtgcatcattgacactgaatacgaagaaatgttttgtttagagcttttgtgtgctgtttgttcgaagccgacccctaagttaactctctaggtataaaattccatctgagcctttctcttctctatgattgaatgactcagtctccacggttcaatggagatgatcttcaactatctctagaacctttttttttttaaacaataaaaatatgttccatttcatatttgttgaacactcttatctttattattggagatctattaaaagtttgcatctttgggttgttcttgttcttcatctaataatcaaacaagagagatcatttatgtaaatttaagataagctttgacaaataattaaagactcacgcgccttttatattaatctttgacatcttctgctatctctccttcttccttggagaaaacatg

SEQ ID NO: 2295 - DNA, 3000 bp, Unknown
  misc_feature (1)..( 3000): cDNA_ID_3066948_gDNA_ID_1620516_Annot_ID_159284 3000 nt of promoter + ATG
tctcactctcctcgctaacgcgacgtcgttttttctatacccggtgatcgtccagacgttctgacacgcgctcgtcgcctccgcgagtatcaagaggaggagaagcccgtgagctccgtgaccgacggcgaatctacacgtggcgaaaacgtatagggtcgcaatgtggtggaggatgaagatgaagtcgttagggaggaagattaagtaatggagaagatcaacggtgaaataagccatgctgaagtcgagtacgtttgattccacggcggtattgggagaagcgaatgagtgtacgtcggcgcgtggagttgtgagcagcgcgtgggaagccattataacggcgggagtgccgtggaagagtgacattaagcagctagcgcctaaatgtgatgattgtttccatgtacggaaaactaggaaatagccgatggtgtatacggcgaggaagaggaggagaaacgacgggaaagtagccagaaaagacgaaggattaaacgacgccgtttccatggttcttgttttgaaactgtttgagaggtttaaatgtttaagttgggtttttaaactgagaggtgggaatgatttggtgtggtgataatgtacagtgcatctacgatagtcatcgtagtcaacggatttgtagccgttggattaaggagtaagattagttttgacgtgcaagtgtattagtgagcgtgcttacaagttttgctctggtgcttatttggatattcttttcgtattaaagtgataatatttgtcaataagtaagattaaagaacactacatgacattgcaaaattgagttggtttacatatacataaggttctaatgatggcactgaatcattgaatatgcaacattaatgtaagaaacaaaactggtatgctctgtgaatatctgaatcacaatgatggaaacatcaaccttctgtgaatctatgagcacaattggggcaagtgtaatatgttgtctgtccttcatcagctgatctcgtctgcaaatccgatgaaaacatttactttgaaattgaaacaagaagacaagaacttgaaaccacataatcaaaaagcttgaggactatacctgtctggttgtgtatacaagctcaggatgctggcatttctcgcatgcctttttgatctgcaaagagaagtatcatcaaaaattacaagtcatggattcagaaaaaaacacgtacataaaaatctgtttcgtataaacaaacctttggtagctcagcttctgcctgcgttttttcaccaaacaatgatattcctagttctcttctgatatcctaccaaaagcaaagatcatgatgaaatattcttgcaagaataacaaaacagtcatccatttttcaggtctgaaagtaatcacatagcacagaactggttttctactgtgtgtgtgtattcataagcctaataacaattgactaacaacacaaatcaagagcagagagatttttgctactccatgaaaccgaaacaaaatgtatgatgcatacctcagcagaaactgtgtaagctatttccttgtcgatgatatctgaacgataaaagcacagcaataagattaaaccaaccaagaaacaaaaactttgttttgatttgatgatatcaagaaagattcatcaaaaccttttgcattccgtgttgttttgcaatgtggacattctgcatacttggttgatttcaagacaagcatagtcccacacaaattacagaacaagaactcgctttctctagatttctccattacagaacctttaacacaatgacaccaaaaaagaaaaaaacataactcatctctacatgtctcaattgcttgaagaaatttacaagtaatgagtaaaaagattaagacgatcctatgctcaacagatgagtaaagtaagcatctttaagctaaatatctccattaacatcatctaaaatttcaagagtagtactatgagcatcaaaatcatactcagaatcgaaagttcgagactttaaattccgttaaaacccaaaattataactttaacaaatttttacagttctatatacttcaaatgagaactaaaatggaaaaggagaatcatcgagtaccttagattacaacagatgctttcgctatcacagagcgtctcgggagagaagaaaaaaatcgctagggtttttgggattcagaggtaggagatgcagagattataatgggctggatatatgtctgtttggcccattaacttttcattttagcccgtttagctaattatgtcttttcttttaccaactctctctaatgatatttaattatgattaaaaattccgacaaagagaataatgttttatgtcatcaatggcgtgtatccggcagttaccaaacaccggtccactcacaccattttattaatggaatatttcaatggagaattggtaatatgttgtagaatgagatcatattattcgattgttttcttttttgatatacaaatgtttttttgttagacttagcattgtctctatcctaatttgaataagcatatgactagtcttttgaaaatttcagtaaaacgttttccgcaaactcatcacaagttaagcagaatctgaaccgaaatctaaatgatcaagtgatataacatggagattaaatcactataaatcgttatgtaatttctttaaatgattgcatattgtgggattgaacttgaagttatagcgattttacgcttttggttctaatccaaacctactttgccactacacacgggtttaatatagtattacttgtgtgtataattttattttattttgcaaacgagaagaagccagaatcaagtcgttaacccatgcctttcaattacccaatcacctaagatttttttttatattacttcctttgacaagttaatccacttccaaatatactataaagttgcacattgacaagaggttttagcagaagctagaagaagaaaggagaagaagaaacaaagagagaagatg

SEQ ID NO: 2296 - DNA, 1563 bp, Unknown
  misc_feature (1)..( 1563): cDNA_ID_2025638_gDNA_ID_1620516_Annot_ID_159269 3000 nt of promoter + ATG
gatcctcattgtcattgatagtcgtaggcatttttgttgttcacttgtgttgttgaagtcttcccctccatttaaaaatatgagtaaaattgggctgttattttagttgtggtaaccaactcacatttagaatttcagaaagctaagatttcaataatgatgtgtattgtaaaaggtttatatactcggctctcccaaatgttctaaacaatagtttgggtttcgtttttcccaattaccaaacaaaattttagatatatgtccatttcggaacgagaccttgtctttaccgtattcgtctcgggtttctagtcccatatccgctcgtataattaattgttttgagacaatgtaatgcattgaatatatatcaacttttatatatactaggtgatcatccgcactgcgctacagagttttctatatatttgtacatacaaacaaacgtgttggtcattatatgccattgtttcttctaatagttctcacaaatgtttaggcattggaggatagaagaacaaacgaattagagatatctaacacaacaatggtgtggtcatctgatcaggttgattagaatattcatgtggctgttcatacggtagctcgtgctcgcttccttcttctcctccatggccattggtgagatcttcaacttcgagaatctcaaccctccgtttcatcttcctttgcagttttaatgcaacatcggatggtcgaaaccgtccgcaaaggattacttgacgttcctttttgttgatcatgtgtgtatcaacttcttcataaaaaagtatccaaaacatgtgttagtattgaattttctataaatccaccacgactaaacctacataaaatggtgcatatagtaacatcgataaaatttaacgatgtctttctaaaattttcagattttccactcaaaaaatcctccttgaactttaaatcttattttcataacatccttctttgctcatttcatccacatattattttatataaccaatataaaccaacctttcatattgatgataatcctcctagcttttctacaacaagcattgcaatccaagttaatcctcatcacaacacaacattgcttctgcatttcaccaccccaaaaaaaaaaaaaattatcacaaatccaagaaaattattgttcaaacaaataaaagaaaacacaaaaccttttccgacatgagacgaaagagcaatattgtatgatatgtttttggttaagaaaacaaaagtatacttataaattaagattttggaatctgattctctaacttaggtagagcagagaagatatataagaaaactggttttgttatgttacctaatatccattgagaagcatctaaattttctttgtttctagatggtttaacctaaaccgaagtttcagataaattaatccggtttaattatatatccggttattaaactggtaactgatacaaatgtaggcgaagacgctcaacgaacttcaacctcgtcttctccgtccacttcactctctctaaactctctctcagatctctctctctctgtgattcaacaatg

SEQ ID NO: 2297 - DNA, 3000 bp, Unknown
  misc_feature (1)..( 3000): cDNA_ID_3066909_gDNA_ID_1620516_Annot_ID_159283 3000 nt of promoter + ATG
aagatcatgatgaaatattcttgcaagaataacaaaacagtcatccatttttcaggtctgaaagtaatcacatagcacagaactggttttctactgtgtgtgtgtattcataagcctaataacaattgactaacaacacaaatcaagagcagagagatttttgctactccatgaaaccgaaacaaaatgtatgatgcatacctcagcagaaactgtgtaagctatttccttgtcgatgatatctgaacgataaaagcacagcaataagattaaaccaaccaagaaacaaaaactttgttttgatttgatgatatcaagaaagattcatcaaaaccttttgcattccgtgttgttttgcaatgtggacattctgcatacttggttgatttcaagacaagcatagtcccacacaaattacagaacaagaactcgctttctctagatttctccattacagaacctttaacacaatgacaccaaaaaagaaaaaaacataactcatctctacatgtctcaattgcttgaagaaatttacaagtaatgagtaaaaagattaagacgatcctatgctcaacagatgagtaaagtaagcatctttaagctaaatatctccattaacatcatctaaaatttcaagagtagtactatgagcatcaaaatcatactcagaatcgaaagttcgagactttaaattccgttaaaacccaaaattataactttaacaaatttttacagttctatatacttcaaatgagaactaaaatggaaaaggagaatcatcgagtaccttagattacaacagatgctttcgctatcacagagcgtctcgggagagaagaaaaaaatcgctagggtttttgggattcagaggtaggagatgcagagattataatgggctggatatatgtctgtttggcccattaacttttcattttagcccgtttagctaattatgtcttttcttttaccaactctctctaatgatatttaattatgattaaaaattccgacaaagagaataatgttttatgtcatcaatggcgtgtatccggcagttaccaaacaccggtccactcacaccattttattaatggaatatttcaatggagaattggtaatatgttgtagaatgagatcatattattcgattgttttcttttttgatatacaaatgtttttttgttagacttagcattgtctctatcctaatttgaataagcatatgactagtcttttgaaaatttcagtaaaacgttttccgcaaactcatcacaagttaagcagaatctgaaccgaaatctaaatgatcaagtgatataacatggagattaaatcactataaatcgttatgtaatttctttaaatgattgcatattgtgggattgaacttgaagttatagcgattttacgcttttggttctaatccaaacctactttgccactacacacgggtttaatatagtattacttgtgtgtataattttattttattttgcaaacgagaagaagccagaatcaagtcgttaacccatgcctttcaattacccaatcacctaagatttttttttatattacttcctttgacaagttaatccacttccaaatatactataaagttgcacattgacaagaggttttagcagaagctagaagaagaaaggagaagaagaaacaaagagagaagatgaagaatgttatgctgattattgacgagagcaacgcaagttatgatttactcatttgggcacttgaaaaccaaaaagataccattgagagctccaaagtttatatctttgcaaaacagccacaaaattcctttactcctcctaccgtactttcttcatcagtcggctttgctcaaattttctatccattttcacctagtaagtcattttatcgactaatttgttgggagttttcaataaatatcaaattttctatccattttcacctagtactttcttttgttgaaaattgatcagtttttatgtgtgttttgcagattcagaactcataagattggctcaagaaaagaatatgaaaattgctttgggtatattagagaaagccaagaagatatgtttaaatcatggggtaataatctattgactgaatcatttaacttgttattaatacaatatcatatatatatttttaaataccaaagttttaaaagaaaaaaatgaagttcttttcatgacaaccatttgttgcaatattttagtctcatgatctcatcataatcatgttgaaaacagatcaaggcagagacatttactgatgatggagaccctaaagatctaatccgcaagataattcaagaacgaaatatcaatttaatagttacgagcgatcaacaaagtctcaaaaagtaagaaacatcttttaatttcaaaatatcagttaaaaaacttagtattgatggaaaagttgagataacaaacatcttttaattaaatgcaggtgtacacaaaatacagattgttctcttcttgtcgtgaagaaaagacttcgcaaagattaaagattaaggaagttacaaaattcaccaatatatataattttctatgtggttaattgagattgtgtaatgatttggggttgtagtttcaggtgttgatttggggttgtagtttgaacttataattgtgttatgtgtataaatatttgtgtttatatatatcaagttagtataaatactataatttcttatcgtttcttttattggcactggtgtcttgatcatcccgactaattcagacatgagcttatctgaaaacccactttggacacaaacgaattgatacgaacgagtaacgactcttttattgaaaacgaaaaggcctaaatttgctgtgaaaggcccaataaacaattaagtgattatgtaagacgatgtcgtttaactcttaagtttctcaagaaagttatctctctctatctatcttcctcaaccttatccttgaagctttgtttcatctgttgttccctgtgaccatg

SEQ ID NO: 2298 - DNA, 3000 bp, Unknown
  misc_feature (1)..( 3000): cDNA_ID_3066963_gDNA_ID_1620516_Annot_ID_159273 3000 nt of promoter + ATG
tccgtaacataacatgatcatgatcactctaataacttgcaaaatcatttaagttcggtccgatttgaaccgatcaatttaaacttgtattttagaggttaagctcatccattatttgatatcttacaccatgaacgaacatttggttaacctaaagaacacaaaataaaataaaaatttctaacattttttgctcgattctatttggtttcggtcctaatagttttgaaacaacttaaaacaggtcgcttccagattaatccaaaaagttaacatctctagattaaaatttatatatcaacttcaaattttatgatttttttgtaaggttcattacgattcgatcgattaaaaatttaaaacattttttactaaagaaataccaaaaaaatattgaaagtgtcattttctttcaattccataaaacgaaaggaactcctaatttccaaaattttgtttattccacagcttttttaacatatcgctcgcattgccacattggtccagacctactcccctttttatttacaagattgccactttaaagagttggataattaatttagtttaaactaaacatttttctgcaacaatatagtaggaaaacaaaaagctagaagaaaaaagaaaacagtgaacgcacgcctgaatgcatgtgattgcctaccctacgtgaagaaaagacgatgcaattacagaagtaagaaaaacattttctccaccaatatacaatgacccttactaattattactatttcaacaaaacgtttcctacgtaaggaaggcaacagattcatttgatgtcatttttcaacgacaatagacaaaaaaaaagtaaagcaataataaagtaaagttgtacactacatatatactttttaaaaattgttgaaacacaaaatgtgtgcaaatttataacagtgtatacaaaatggatgttcaactacgtcaaagactattcatgaagaaaaacggtcgtgacaaaatttagacaaattaacaatatattaaataaaaacttttaaaataattttagtattacagaaacattattagataaattcgcaatatttttgttctattgaaagaaaaacaaaaaagaaagagtaagggatcattacattgatttcacacatacaagtgtcggattatcagtgtcacgtggtgtttaaaatgtagacatttcaccatgtggactaatacattcataaataatgcagccatcgacgacgaccatcaagcaatttttatatgtggaaagttttttcaaaaattattagtaagtggacacgtcagacaaaacagagagttgaaaaaaaaaaaacataagtgtagagagagcgaaagacacaagtggagctggtcggaagttggaaagttggaaacagcttagccgcccacgtcggccctacaattgattcgacgttgttaagatataaagcccaattataatgtacttaactaaaaggcttttactttaggcccatatgtagatctttgttttcttttgttaaaagttaaaacaccaatatcaattagtgcttacattattcgaaaaatcattacaaatttacgtgtcattttaaattgatagtggaaataaataaataaataagactaggaataataatcgcaagaaaatcttccccacgttaacgatgatcacaattcacaagttcttagtcttccttatttatttgttgtttggccaaatttttttggtctttgttaaattataaaaatatagatctctatgtatataaaaatatgggtaatattagaaactaactatgaaatggaaaagaattgagagaatgacattgtgtcagaaaagttaggtaaataacattttctgaaaaagagaaaatacaaaaatatccttgtgtttacttatttttacaataatgccattggctttagttataaagtttatatgtatttgtctaaaatagcatgatatatttacaaaaatcatgcaattctttaaaatacatacagaatatatatacacgatatatatgtttctctgaaataatgtgtttctcagaaatagcacgaaatatttataaaaagcatgcaattctcttatagatcgcgaagtttaaaaaaacatatagaattgttacaatattacatgggtttttattggataacatgacaaatatttatttatttcatgagtttttattggatagcatgacaaatattaatatatcagtgttaataacatgttttgttcttaaaatacatgcattttaaaatcagacatttgttttaaaatcaaatctaatctcttatatcacaacgacattgacggaaaattcaggtaaaaagagaaaataaagaatgagagatagagagatttctatggaaaaagaaagagagaacatgtaggtgaacaaaataaagagatatgatgatatattttatgagaggtggtgaagattattttaggagagggagagagaaatagaaaaagaaaatgacatggtgaatctgaagaagatgaattgtgttaaagatgaagagagaaagagaactccatggctaaagtctcgtaaagaagatgaaaaagaaacaaaagaaggaagaagaaagagaaaggctaaaatagactaactattgccaaaatttctgtagccgacaaatactatttggtccaaggttattttgtgtattcttttgaagtcaaaagttatttcttacatatactctaaaaatatagccgataccaatttttccacacatggacttcctttattccaaaagtcaataaagtgtgacgtcatgatacttacgctttaaaacatcgcatgatgatgtcattagcatcaatctccaccgtccaatttatttagttgttgacaatatcgaccgtctaagttccacaccgacggctataagagtttcattataaattttagcaaaataaaatcagcaaataattttttcttgactaagcttaaacgacgccgttaacattttcttctggctaacatg

SEQ ID NO: 2299 - DNA, 2271 bp, Unknown
  misc_feature (1)..( 2271): cDNA_ID_3066997_gDNA_ID_1620517_Annot_ID_159322 3000 nt of promoter + ATG
gatctataatgctattgctacgcatgacccatcgacatttgatttcaatattacttgatcaatcactattatagaagcatgataacaactcctctacccaacagaaataatagaaagtataaataaggtaatttcatgcgtaaattttacgaatgaagaatcattatatgtctttgacttctatagagataactcatgtggcaaaagcgtaatcataatgcaacatagggtaaatttgtgtgtaaatcgtagtttacttttcttttgttactttttcataaacgaataattgtgagagaaaaaaaagtgtgtgtttaagcagagacaggttgacaaaagatgcggaggtttgggttggggtgtagcgagaaaagggtaagtaaacactttacaatgatgataaccacgctccaattatttctatcaacagagcatcatgagcatcctctaaagttattttccaaacatatatgtaacacaaaattttaatactatacgtggactttttcagtacaagcaaaatatcatacattcctttaaagtatcatataatgtatagggtttgtgtagtaagtaatacatggagtgataattataacgtaatttgcgtggatgaatcacatagtactatttagtgacatatagataattggttggtagtacatggatcggtaaaagcatgttttgtgtatcgatggccaattatgaatacataagtaaaaactttgagttattacaaaatgtaaaatacgaaaaagtgtttgtaaaccatcttgacgtgatacaaatagaagaagaaaaacagcgtcgtgttgtgtgtgttgcgtatttagcaagttcagcaaatttacgtctaaaaccgtttccacatactgtactttttgtttcactgaaaatgtctagctagtgtattagcaattgcaattatggctaaacagttccaaataattattaacatccactttgaactaacttttttccagtattatttttcaatcctatttaaaacctctgttttttcccctagccttaattatagttaagagtggaaacaactttgacatcatttatgtttgtgtcttcatgaaccaccgtggtaattaaaagatgtgcgccatgaacataagatatttctgtaacagtagtgattaagatttaagatagtaataaaaaacacgacttgatgtaatattttgcaactttcgtgaataaaatcccgaggtttagatctcaaactttaaaataacttcaggaaatcaaatacaaatccaagagatttgttttaagaaacataaaccttttagtcccctaaaatatcattattaatttcgaatgttacgtcgtgttattctgaagctttcacaattatcattttttttaacattcatttgttgactattccttaactaggcattatattttgtaataaaagttgaagtcttactttgagtaagaaattttttcaaatgtagctagtaaaatctcgcggtataatagaaatcttgtgttgaaatgtttccttgctaaacaatatagtatttgatatgtcaacatatgttccattatatgcatcaattacttgcatgattaatgtaatgtttggtaagcaaaaaatatataaatctcttctggtcgacggctctacgttgcttgtaaacaagggttatccaagacgggccttagtggcaacatcctcaacaatatttaaaatgaaattaaaattgtttttttataaatcatgcaacaaatccgattaattatactattcaaataacaatgctgaaattatacttggacggcttcgagaaaataacatatcaatatatctcaatttttcatgtcattatcaaatagctcttttgtacatctttcacaaatttttattataaattcgtcaaacaattataacttttgatattgtggaaattagggtgcattatctttttatgaatgcaagttaagcaattcgaggaattttccaactcaatgatttgaatcgagtttaataatattattttaacaaatcttcggcgcgacatcgttcgagaccatgacaacaattcctttccgtgtccgtatgattataaatcttaatcatatcatttccccctataataacgtacttaaaattattaatactactattattgttaatctctccgccacataataagaccactatataaacgtttactccattaatgtactgtaatcgaatcgacaagtctctctcttctctctctctattcaaaaattataccggcaaaaatg

SEQ ID NO: 2300 - DNA, 3000 bp, Unknown
  misc_feature (1)..( 3000): cDNA_ID_1557632_gDNA_ID_1620517_Annot_ID_159326 3000 nt of promoter + ATG
tttattcaaattcacttttttctactttatagattcatttgttggataaaggtctgcaagacacataaatccctacttcaatagattttttttgtgaatccatgtatactatgtgtagatccaagaatgcatttttcgtaactgaatttgttgctactaagtattccaaccttaatttgtggtgatatatattatataggttgttcgatgggggcgatcagtgtatgccaacattcagaagttcatccaatttcagctcacagtcaatgtcgccgctctcgtaattaatgttgtagctgctatttcgagtggtgacgttccacttaccgctgtgcaggtttgagtttctgttgcatttagctctttttgaatatctctctctctctaaatattataagtttgctcatatatttggcgttttctttaacatacagcttctctgggttaatctgataatggacactcttggagcattggctttggctactgaaccacccactgatcacctcatggggaggcctccagttggcagaaagtactgttttttccgccttctctcattcaaacttaataaaacatttggttttgtagacatagacttattgttatctttctttgcttcgacttctttttgcagagaacctcttattaccaacatcatgtggagaaacttgctgatccaggtaaaaaaatcagtgaatagactctgttatttgaaatcaccccgtcttatatattactaaaaagttgaaatgtgattctttcaggctatttatcaagtgagtgtattgttaacactcaatttccgaggcataagcatacttggcctggagcatgaagtgcatgaacacgccactagagtgaagaacacaataatcttcaacgcctttgttctctgccaagtgagttaattaaatcaaagtcttcccttactgtattaaaaccagaatgtcaacgtaaatgttaatcgaactctttgtttacaggctttcaatgagttcaatgctcgtaaaccagatgagaagaacatcttcaaaggtgtgatcaagaatcgtctctttatgggaataatagtcataactcttgtgctccaggtaaataatgatttggtgtatcagaaaaacttagtaagttacatttcacaaactcttatttctaaatcaaaaccgtcttattttcgtttgccaggttatcattgttgagttccttggtaaattcgcttccacgacgaaactaaactggaagcaatggcttatctgtgttggcatcggtgttatcaggtcactttcattataatattgtttacaattgaaaatgttgatacatatttataaataatatgtgcaatgcttgttgaaacataactaacgttatagttgaacctttgtaatttgaacagttggcctcttgctttggtcgggaaattcattccggtgcctgcagctcctataagcaacaaattgaaagtactaaaattctggggcaagaagaaaaattcttctggagaaggtaatagtaacttacagcttgtgattatcaattgaactagattcataagaaaagtttgggttggtcagcttgtgtagtagaacttatcctgaatttaaactgtagtaaggatttggtttaagctttatgcaggactgaaatgaatttgaaaatttgaaaataacaagtttgcttttatttttttctcaggttcactctgatttggaggccagtttattatctctcagacactgatgagattgtttgatactcttttaggactaacagaaaaaaaaacgtttggtttggtatgatggatttattgatatttttcggaaacccaaccccccaagtacagtttttcggggtttgttggtcgagcaactttggattactggttttctttttggtctttttttttgtaatatgatcgactacctttcgaatcattactggtaaagattttaaccaagaaatcaaaattcgaaaaaatggaaaatttttactctcagtgtgacctagttattcaagtggcaaagcgttgttggccatattattactacacctactgaacacggatgcaatagtcgttaagaaagttatactcatgagaaaacattgaagtataaatcaaagcattactaatgaaaatgttgaagtaaagtcgaggttgtttgttgtaaaattaaaaacaaccacgattttaagattaatgtcgaacaccggaaacatttttaatgtcgaacaattcaacacccgcatatgaatctggaatgtaaggagacatcaatcaattccacacaaacatcgaacagactgtgaacaactggttaacagaaaccgtaaataggtcctacgtgtcagacaggtttggccacgtcatatattcattatcggatacggaaatcactcgatgaaaagccaaaagagctttcctttgtttttctgtcgactgatattattatattcttttctttttctcggttgaatagttaattaatgtaatgtttatcccattctataattttattttgaaaataaagaacgcggaaaaaataaaataggtaaaaaattcacgcgtgaaagcaagaagaagagacagtagagtctagagactactaaagtgtttggtttactcattccctctccttttcaagtgacagagccagacactcactacctctgtgttttttttaatggtcggtgaagaaaccgtgatttgctcaaatcaccaaaataatactctcttcaatctccatcttcccgttatctccgccacgtgtttctctctttttgtctcctttcttcttctccctaatcttaatctcagaaaccaacaacatcagtagtcagtacccccacacacacagagagaccctttttcgattctccactttctcataaaggaacgatttttcgagatgtgggtcagtgttgatttctctcctcttggcttatgagtttcgaattcgaatctcaaactaaaaagctttttgaaacaagcaacaaatg

SEQ ID NO: 2301 - DNA, 3000 bp, Unknown
  misc_feature (1)..( 3000): cDNA_ID_3066984_gDNA_ID_1620517_Annot_ID_159329 3000 nt of promoter + ATG
gatgaggaagagacagagttagggagacaacaagcacctggatcgtgtccttattgtggaggtaaagtgcaaatgcttgatgtcgaaagaaaatggatgttctgtttcgttcctctttgtttcaagatcaagaggaagtactcgtgttcttcttgtgatcgtcgtctcgttttgtatcattaaaattataatattgtagttttttttattaatttcctttcttaataattaaagtcaattaattagcgttttaatcaagggaaataattttagtcggtggtatttggtacggttagtatatctagtcgtgtaaaccgacattgatcttttagaaatgttatagaactatctcgattcaaccttaatgtactttttcttttgtcttcgagtgtcttcttaagtcggtccaaattaaaaagtgtttcaaatatatgtaatcgtgttgttagtgtaatgatgaatctcaagtttggtgtatttgtggcgatttcttttctatatcactagatatgtttgaagcgggaaggaatctatgatctctagctagtctccatgatcttgcaactgaatttgattttcggtcgtgtaatttgataataaatacagataatagtaatagttgcatgcaagtacgggtgtcaataagtctgatcttcaatgcgagaggtttttattggaccggtccggttgaattttgtcgcgtgggaaaatatcaaaacaaggagcaatatcggccgaatttgagtggtaatataagattggactcgacttaatgaaacggtgttgaatgtggtggcgttagcgtatattaattatggtaacaacattactatttccaaatttaccattcacacattaagatgattaatgcacatttaaagcatcaactataagaattaagaaacgtctatggcatagaatattaatctttatgcgttactaatttgaggtccttaatattaggaataagattatgggcagtccaaaacatcattgtgtagcttgcatttatactttacagccatcaaatacgaatctgaaaaaaataaaaatctacatatacatgtatgagaatagtttaagaaaagatagagattcaattgggatgatctcatgataatgtaaaattcgctcgtgacttatttatgagacgcagagagagaaaaagatcacaactgattctgtcacatgcaaatgcaaatactgacatcagtggccagtgaattatgttgttttttagtcagagcagaaactgtattttgtggacatttcaaaagcaaattaatacagggaaaatgaaagaacagctcttatatttttggggattataaacagctcttatctactgaacagaataatagaaacagctcttatctatagtatattatagcttatatcaattctttatttgttttaatatatacaaggagatttcgaaccaaaacaacactttttatatatatcattctactgttctagttatatttttgatatgaatcttgttaatagtttcagtaagttgttattctattaccactgttacgttttttggactgaaacatgtgaaaatctgaaaacagaagcctcactgccacagccgtatttgtgaacggtttgctctttgtagcaacatagtttcatgattccctcgtataggctggtttaaggttttaattgttttaatgatctatatgttattcttatgataaatgtgctgaacgaattacatttttcttaaaagtaaagcgtattgataaaattaggtagaagaagttatatacatacgtgagggtgggccaaagtcgtatttatttcggaagcgtgtactataacattagataactcgtagctgcaacaagaaagttcaatgtacgtactttcgaaaatcaagtggcaattggagagaaacacaaaatttgtttcaacaaggaatgaactagggtttgtcatcacccgtatcacattattgtaagtttgtaacaccgtaacgtcgcgaataccgtgtggcaggctaagaacatcaacaggagcaccaactctcagtaatagacatttcatatgtaacatcaaaagtgtttaatgtagagttttcactaatgcagtaataaaattaccatctatcagtcgttaaacagaaatatataacctcaaaacaatttctaataatcccaaaaaaatgtattcagaatgaaaagtatagtttgcaatatttctctgtatttcattacttaatactatttatttatccaaaaaaaaacttcaccaaattttagtttcttcctatagcatctttggtatccaaaagaaaaagatacaaaattatctaaaagtctatggatacttacttgtatatttggccaacacagttttcaaatttcaaattctctaaaagtaatgcttctagaaaatattttctatacgaaatgtatagaagtttccatgtatagtgtttgagaaatttgtgaagaatctccgagaaaaaagtgttcagatacttgtctatttttagagatacacattttcaaaatcacctgtagaaaaagaaacaaacagtataacccaaaagcgtcttagataaattgactaattttggcaggtaagaaaaataaaccatagctgttacttgtttgcctgttattgattagagacaagtaattatgttattgcccattgggctcatacatttttttaatgacccattaaactcatactttttttgtaatgacccattgggctttaagtctagtaatgaaacaaaaaaaaaagagaaaaggaaaagcttgcaaaccataacgaaataaaccggtatagaatccgggtcgggtttaatttgcacacccggtaaaaaaccctaatttattttggttccaggcaatttttttttgtcttgagctcaaattgaaaacacgagcttcctaaaccctagcagcagagtcttccgtaaacccagctctcttagctctcacgcctcgtcaattgttgacctgtaggatagatatg

SEQ ID NO: 2302 - DNA, 3000 bp, Unknown
  misc_feature (1)..( 3000): cDNA_ID_2048012_gDNA_ID_1620517_Annot_ID_159335 3000 nt of promoter + ATG
ttccaaaaaataaaacacagacttatccactaaaccttttaaaagtgcagtactgttaccagttaaaatgttattcaagtcgcagtgataaaaatctcaaaagtatatgacaattttcattcgtagcacctatatatttgcatttttacatcttccacttcgaatttattgattgaggcttcgacctctactacaaatgttttcacgaatatatccattgcaaaaatttagccacagacgaacaatgccgataccgcattgatgactatactattactaatcttatggtacgtagtatagcacatttgttttaggattatagtttgtaatgaagaactacagctgttggaaaaaaaaaaaaagagttatccgacgatagaaaatgcagcatatagaatttgtaatgaaaaactacgtctttgagacgacgtaatctaaagcaaacactaatcttctatcttgttaatccgtttcattttttttgctgtgagttcttttatcggtcaaacaacaaatgcatggtggggttaacaccaaagtccttttaccacgtggttttaaactaaattacttaattatacacatggataaagacatatatgttgatgaagagaatataataaagcccttttaccatgaagtttctttttcgaattttgaccgaaaagagattcaataagatccgttatatagatgagaagtgttattgggaaataaagcaagagtggcaagtggacgatagtgtgcttgcacaatagtcgagagaaaaacacattattttgagtttaaggagtccattaacaccatgatcaaaccaattactatctattcaaattcaagattaatcactaattttctagctttttgagtaattacattcgcatttgattgttcttcacttaaatcaacttaattttatgatgaaccacaagactatatctatttaagtatttatagtaaaacttcaatgtaagttcttgtaatgaaaacaaagagcgtttttgtccactatctatatgttacaaacttacaatacaattcgtttaagaatgtttggtgggagattttcacatgcaacatatctaatgtgggcaagcaagagattgcttgaaatagaccaatcctcgagcgatatccgcgggcaaccattttaatcttggtccccttagccgctttttgaatcaaaatcttttaaagtttctttatttcatgaaatcaatcaatattaagaattttttggaaacatacaaaatatttatagttacagtagttagttcgtcattaccaatatgcaaagttcgaaacatgtattaacaaagatgattctaaagctaattttgggcgacattctaagtttttgcttctttttatagttcttttagttagtggggaaaaagaagtattaaagtgggttgttgggatttttatggtaaataacattgttgggaatttttgtatcagacaactcaaaaatatattccctctgtttcttaagtactatatgtttttgtgatttttgcacaatttaagtaattatttgcaataccaaattaagtttcaatttattaattgattattataagtttataactaagatttacattaaattgaatttaataggtatgagtaagaaaatgaaatattactgtcacaaaaataaatcttaacccttttttgtttgtaccgaacacatttcattttgttttccttcttcctttacttcttctctttatgcaattcttgaggatcgttctcgtcacacgttagcacttagccttagcagaccagaggagctacaagagtttttttttgacaaatacctttcacttaagaccaaaattgattgaagtttatataaaataataaatgattatgtggtataaacaaaaggagggagagatgagacagaaggttgcttttgcagtattccgggaatgcaatgctgtctctctccgaggattggcgtgagtgagtgagagagagagagagagagtctcattcatctcttttgtccttcttgtaattaattggttttcactattacaataaaaatgatactataattttcgataaaaatatgcctttattggagattaaacaaatgcgagtctaaataacctttttaggaccaacctaagatatacataaaaagatcaagaagatctttgtttggtcactcctacgcacatcaatgcaaaaagagacaaaacttctcttaaccaagaaatgaataaatttttactttttacaaatgtccaattcaattagcatgcattttaaaaacgattttttctccacaagttattaatgtgtaaattagtatatatttgaaaaaaagacagcttttttttatgctcttattcgctaataatgaccaaaaattaaaagagatatgatgagtacactgaagctgcactgttactgtaaaaccaaatgagaggagaggaacaaagaaaagagagaagacaaaaaagttgagtgaaatgcaaaaaatcaaaagcatacaaaagctgctcatttgtccaaaaagaaacccatcataaagtaaaagcattataatgagatcaaaacccttcgaaaaatttaaaaataaaaaccaactttttcttaaaaaataattcaacaataggaacagaaaacacacagcatgaaataagtataaaggaaccagcttggtctaatttccttatctgtctaaaactctcttaaacctctgtctcttctctctctttcttctcttacttatcttcttcttctcttctctcatttcttgagttctctctcaagactcttcttttcttcagtcttcaaacataagaaaggaagttccttttgtttcttctgttttagttctcttgtgggtttatctatttggggtggtggttaaaggagggagctttgggattagaagtttttcagtgaaatcagaaagctttcgagagaggtttttttcaatttcaaaacgtgggggtggggggttagggttagggtttacaagtt

SEQ ID NO: 2303 - DNA, 3000 bp, Unknown
  misc_feature (1)..( 3000): cDNA_ID_2048000_gDNA_ID_1620517_Annot_ID_159338 3000 nt of promoter + ATG
agaaagaatgcggctatgttaaaacttaaaaccctcgaataccataattctgactgtcctataaaattcaaaaatatttcatttgtacaatcagacattgtagacaacttgtttacaattatcttaccatgtagttatttcggccacatctaatgggtcttaccattttttgttcttatactataagttaacataaaccacacgagaatatatatcatagatgatacacaaaaatgaaatacatgttgtaggcagcaaaaagaaaaacaactctacagaaaacatatctcatcttataaaaccctatttaaccattcatttggatattgaaaaaccaagtaaaatgaaaacacttatagctaagaaaaaaatctacatgagactaggcagatctgaaaatgtgaacttatagatttttatcaaatgggtcatggctcaagagtaagtaacccaaatagttacaaacaacaagtgaactatttcttctcttacagattggaggggaccattaaaactatctatgtcttgctctatatttcaaattctaattttttttttattatcagcatgggtaataatgcaatagcacaactctttcatagattgccttccatgcttatgataaactgttgatatccaaagaaggaaaacaaacaaataagacaagtaactaactagataaatatagacaattcaaaagataaatgttagattgatagattgagagtaagaaaaaaaaaaaaacatacttcgagtatgtacggacaaatctataatacactttattgtgacttaatgtcttatgtttcaataaatgaaatatgaaataaagatactatgatacaaatcattatatacacatacaattttgaggtcaggagtcaggattcataaataacaaaaaaataaaaaaaatgaaaaacacagttttagtaatattggtagtatttagaaaatgggatttagctagtgtgggcttacatattgtgattgcttatacaacaattgtctttaagccgattttgattgttcgagtataagtgatgctaatactaattcaagccaattgtcattagaaagaaatcataaattcttttcttatggttatctagatagtcacttattctctcgttccttactcattcattggatccgaaaaacgttaaaagcttatcataagcatggaaagacaaaagtgaaagagttatgcgattgcatgattctccatgctcattccaaaataaaataaaaaatcgaaattaggaaaaacataactctctattggtcccctccaaaatgtaaaaaaaataaaattgatattttacatttgggctgaaatttgcattgtaggcccatgggattccggtttgataactttatattgcccaattttatatcgatttttaatttcaattttaaagataaaagtaaatgaactggtaagccactggttttggttctgctcttaccgttatcccaacttccatatccaaactgaaagacactggttttggttttgtcgggaaaaggagaaacttcaaaaagatgcccactttgaatctcttcactaacataccagtcgacgccgtcacttgctcagacatcctcaaggacgccactaaggccgtcgctaaaatcatcggcaaacctgaatccgtaaccaactctaaccctctgtttcggccatttctacgctaattcataaattaaaacttcaaattttgttcctgtttagtgttttgattacatgaaagcagagtagaatagaaatttccttttgttgataaggttcatgacgttggttgtattatgcacatgaagtgttcgatggaattcctctctgaattgcaattcctcataacttaactcttgagagttccctttagattaccaatttactaattcatggaactttgtggaaaccaataatacagtatgttgacaatatcactaaaggattcttaagcttgtgttgtggtcttaacttgtgggctacgtctgttttcttctttgttttcagtatgtgatgatactgcttaacagtggagtgcccattgcatttgccggtaccgaggaacctgctgcatatggagaattgatatctattgggggattaggacctggcgtaaacgggaagcttagcgagacgatatctgagattctccaaattaagctctccatagacagctctcgcttttatatcaaattctacgattctccggtaagtccccttttgcttcaaattcaaagctttgcataagaaagatctcattctcaagaacttatatatagaatgctgatttagattaaagctagatgctgatgatgggctatataaattaatatatggatacacacttagatgaaagcacgatgttctttagttcttataaacttgatcaatgaatagaatgttagttaaattctttgttttgcttttctttggcagcgacctttcttcggttacaatggatcaactttctgaaaagaggcgaattcaaccttgtaatgatatttgggttagaactgtttgcttattcatttcaaaagctgtaattctgaaccataatttataattttacctccctcaaagccaatatatttcgtatttaaactgcttttgggcctagtttgtcacttgtgtgatatgatctcataattttgtcaatactactaaaaatgtaaactgcagcccaaaaaaaaattgtagcccataaatccactttgacgattttctaaattaatatagtacacattggactgaattgattgattaattaagttacaggacaaatgtgtaatatagaataaatagttactgggagagaagaccgagtcactgtaacttggcaggtcttaccaaaaccggccgtgcaacttttcaaacgcgacttccttctccggcaagcaattcacgccgctgctcagtgattctccgtcactatttccctgattaaccatcttctccggaagaatctataattccggcaaagtaagatg

SEQ ID NO: 2304 - DNA, 3000 bp, Unknown
  misc_feature (1)..( 3000): cDNA_ID_3066988_gDNA_ID_1620517_Annot_ID_159327 3000 nt of promoter + ATG
ttcgatggtcatatttaatattcttacgatcgatcttacctttgtatgcttgtttccactgcatgccatggtaatggactagtaatgtcattttcatttgtccccatttaaattgtttcggaaactaagaaaccgtctaaaagtataatgattagttttctgtcacaatgaatgaataccataattagaaactgctattgagctaaaaatttgctcaaccgaagagtaatcgttttttctggtaatttcataacttcagtcggtttgccaatgccacgtaaagaatcatacttctagtaagtcgacacgtcatctcaataagaccaaacagcttcacacgtcagaaagtattaaatagtaaatacaaaatattgacgttaaaaatcgaaaagaaaccttttttttttctctgtaaagataatatattaagataaatatcttacaaaatacaaactgataaccataaacttagccccaagaaccccttattccggttacaaaatccggcatcagttaaacaggaaaaacaaacttaaagccatgtttgtggaatctctaaacttcttacaatcttaacttgtaattgctttccaaaaacttgaaaaatataaaacattaagaaacaatcaattttagaattgattttcaagtcttcttgacctcacttgataataaaaagacttcggcaattaagacttatgcttcccaaaattgcatgacggagcctcaattgaggtgaattgaaacagtctaaaagagcaaggaccggtttaattttaaaagaaacctagctgtcttaatttaatttatttttgtagcattttctcgcctgtctaatccacttttttattcgacatatttgttatatataccgtacatctggactatacgtatatctatcacacacccatattattatagtttgtaaatttaataataatatctgacgattattctaataattgagatattccgtcacaaatcttaatttattttgttacactttacaggtgttcatacttagtggtgtcgaaaagctttacagggactcatctacgcgtaatttaaaaaaggagaccccattatgatcttttctatataattacaacaacctctttaagtaaagtaaattttatttttagttgaattatattctttgtgaatcgtttattcgctttgcatacgtggaaatgaacatgatattgagtaggaatcgcttcttattaacgtctcccaaatacaaacaattttttcatcattcaacacgacgttttttgaacgttccgtttcactttccatgtttccgcgtttttttgaaacgcaatttaccttttatcgattcggcaatttttagtggatagagttataaaacaattaatcagaatggtgactataaacgaattattcgtaatgtttgttgtatactattgaagtagtcggtgcataaagacaaaacgtgcgttggtgttagttaattacttctaccaaggctctattaacagtatacgataatgaaaagttgaaaacatactaactaacatgtattcacaagtaaacaatgccatactctagtagtccaaagttcaaaatactctttacagtgtgtaaaaattcaatatgtgggctcgaactctgaaatagtcgaagataattttgtgggttaagacaccagaatatgcaatttttttacttatgttttttttgtctatttgttagtaaatgcaaatttccaaaataattgtaaaagaagagaccatacaagtaacatgcgaaataacgtaataatacataatacataatacttaatgtgactccaccactgtacacgtaagccaaacttttattcaatgttatgatatatttcaattttcatttttttaatataatttttacttaattattagatgatatgacacatatatttataaaatttcagttccttaaatgttattaaataatttaaatagtaccatgatttaaattggtaaaaaatatgaaggaaagcttttgctaaccttctttacttctgtttttttttctttttcttttggttagatagattccatttaacttaaaataataatccacagttttttttttttttttttaacacaataatccacagatttttttaatgagaataaaactaaaaaggaaatttgatgccaccagcatttaattagcgcgtgccacgtagtttagtttccaaacaattaaaaatttacccataaccggcccaagaacttttatttacttacctattaaccctagatctatatatttgctcactactgttttatcccaaactttagagagataaagcattctattagtttcccggcgaggactagtcacattttccggcgaacttaccggaattttctctccaggtagaacttgtttctcgtctcgattttctcttcaaccgactacgaaacgagtttcggatttcgagaaaagcttacgaataaaaattttaattactgttttgtttaaattaaaatttcgcagtgttggtcgctttgtctcctgttgttcttattcttcgtcttctttagtcttacctaatttgaatttttgttgactactactggagtaaaccgtttcacagcgtttttctcgtggtaggagtgacttcgcgttcatcgatttttttttttttttttccgattttacatgatattgttgtgatttaaggctaatgtcaaggatttttgaagaaatctgagaaaatatctgtggctgttttgtcgcactctggatttttcccagagagaagaagatactttgtttcgaagaagatatttatcttttttttttttcttactttttttttatcccggagaaattgcttttttcttgcttgatatttcacgtggttgtcgaaagcagaagcaacctttaaactgcaaacttacttatcttttgattttttctcagtggttttgagatttagggatttgagtggttttcttcttgtctcttgcgactgcaacgatg

SEQ ID NO: 2305 - DNA, 3000 bp, Unknown
  misc_feature (1)..( 3000): cDNA_ID_3066992_gDNA_ID_1620517_Annot_ID_159325 3000 nt of promoter + ATG
cggttggggtctagaactcacacaatctgatggcggagttgagactaaagctgccgtcagcggcggcggtatgccgggattctgcccaagcccggacgttgatacgaaagccgacaatttcattgccaggcttagagatgagtggaggctcgataagatcaattccgtgaatagaaagaggtaactgggctttttaaggcctattattaggcccattacgaaaacggcgtaggtttcaacctcttatgccctgcaaggctgtgcaatgcacaaggatctcatacgagaaacatcttcaagggaagtcggtaaaaattgttggagatattttatatttgattggcgaaattcgttgtgattttaagcaatgtgcagcaaggactcgagttcaaaagttacgggtaatattggcattattggtatagttattagtggtaaatggtttcaaactggctggttagttttttgggtttaaccggttgagggattttgctttggtgtgttttgattattcggtttgaactttggagtgtcagatgaaaactcaataacttcggtgttgaatgttttatattttggttggtacgcattgatgtatgtacaatgtatggcccattgatatgaaaatatagttgtgggctctgagttttgttgggcctacctcttgtgacctttccctctcccttacaagcaattcttcttcaagttggttgatgattgtcataatgactggttgtcgtatgtatctctaagaataaattcatttgtgtgttgagtgagattcttatagcttactagtaatatgtatatgatatgtcaactgaattcatgttttgcaaggatatcattaccagtaccgaatgatgtgacatatctgatgaggtttgaggtattgaactctcatgattgtcaagtgatggtcttgaagcttataaacgatcctcaaaaaagtgttttgatatttccataattctttagagtagcttgaccttattatataattcaaaactttggccttagataatgagattcaggcagggaggtgacgtgttactcacgcgcgagagctgcgcgttcaaatcataaaaagccgacttgctataaaagcaaacttgttgatgatggttcaaaatttcgaaaagcttttcaaatttctcttcatatcgcgcgctcagtcaaaaagcagagccaaagatgaagaaaccgtataaaggaaagttgccgacgggaactccgtctctggcaatgtcaacactcgtcgtcgttgcttcccttctcgccggagcctccgttgtccacaacatctacaaaccagatctcgtaagcttcaccttctctttctgtacatatgttagggttctcaaatgtattaggtttgctcactttcttcgttcttgataatgcccataagcgtgatcggtttaaaaccattcatttcgttctctggctctgtgatctctcttttattgtaatgcacataaggtgttcgatgaattgcccatgagagatttgtaatctgattgctttttacttttgtgcagagtttaccaccgttggaaagtagtgaagtggccaagaaggatgattctgtaaacaaagtttgaatctttcaatagtttcatcctgttttatcaggctacattcactttggttgttctctttcaattcatgagttaacaaaaaaacatggataaagtttaaaactgagatcacttattaaaggcttttattcttcttcctcttgtgaagatgtaaagaagaacaaactctttttaggtttcttgttggtcaattcaccgttttttttaaagagatataagaaatcgcgatgatcgtgtagatgacatagagaccaacgaattgatggagtctttgctacggattgtggaaaaccatgtcttcgatacatattggaacttcaaaagagattttagtgataatctagttagtatctccatcgttagatccataggtccattaggcccaaacgcccaatcacgtggcgtgataaatacgttaacaattgcaatatgaagaaaacacgacaattaaatatggaagagaggctaattattcatcggtccaattgccaatgtctttgactgtagttaataataaatcattaagagattttcgtttaaaaacaaaaatacaccgtttcaagattaaaagataagttaattacaattgtatttttcctgattaaaaatcagatgtttacagggaaccgcagatcgctcagaaagtgtagtaagatgctcgcaaaaaccatgtgcatgtccatcaaccttcgccgtctcaatagcttacacaaaaatcgtttttgttttcttattaatataaaacctaatctaaatttacaaatttgttttcttattaatataaaatctaatctaaatttacaaatttgtattacacgtacaagtggatccaagtatctgactctacagatattttgaatctaacatttgtgtaattataatttataatctctgaagcatttaattttacttacaaataatgttagaccacgagacagaaggtaaaccaatcttccttatcccaagataagattcttcaaattaaatataacggctttttgcagaagtaataaagatagaaggaatatctagtatcaacggaaaaaaagaaaaaatctagagcacttcgaaaaattatggaccaaagaagattcagactgaaattattactgtattagtatttgtccattcacaaaatgccgaggaagaaaaaaggcattttggtttatattttgtttatttgatattcaaatgtccaacgatcctctctagctaagcttagctataattcaatgtttgaacacgaatcccattattttaacacaaacaacattaattaaatatcgtctcaaggaacttcacttccttgtccataaatacgttatttcacaccacatatactcatctatatctctatttttcttcttcttctctctctcgccggaaaaagtaaatcaaa

SEQ ID NO: 2306 - DNA, 3000 bp, Unknown
  misc_feature (1)..( 3000): cDNA_ID_3067014_gDNA_ID_1620518_Annot_ID_159350 3000 nt of promoter + ATG
ggtgtatgtggaaagtgagggattttgggtgcggtgttgaactcataaacaggatccataaggttgctgaagcttctggtcattacccttctcttcacttggaaagtcctacccaagttcgagctgaactatttacctcttctatcggtatgtcaaatatttgatgttcgagtttgagttttaatatatggtttcttaagacggtttgttggatgaataatgcaggagggttgagcatgaatgatttcataatggcggctaaaatagatgatatcaagacttctgatctttcccctaggaaaagagcttgggcgtgatcttcttttcattattttggaacatttttgtttgatagtatgtaatgtatgtgatgtattctaaattgtgtgtgatcggtctacatgtcgagttatatagaaagcattgtcataaccgcataagagatatcacgcaacatgtctttgagattcattcatcaatcaaaagaagaaagaacatcaatcatatggagcacaatataagaaatgagacattattattagattaagacattattattatcatttcttcttctagaacattctgggactaacaaaaaattcgaaaaaacacaactacatttttgcattctaataggcggtggtggttggaggactagccattttggagcattggtgtttcatcataggagggaaaaacgggttggatggaagatttggtaagcagttagcttcagcgtcaaggaaagctttacaacaagcaggaccaacgccttcaaatttgccggacattacggcttgttgaatctcttcaaagcatcccggcaaatccatcactgttgaccaacatttgctcaagtcgggacttcctgccataccgggacttggtttgaacggatttggaaacgggaacatgattgggggaaactgcggtagctgagcattaacggaggctgcgatgcatacaactactaggagagaaacaacactcttgatcgacatgatgaatatttgggggactatgcaacaagagaaatagatgacttgagttttgtttgatgagataaagttattggctatgagatccaatttatactgtaattagtttggcgaaacgtatttttaaaagttgctttcaaaatcaaatttgtcgttttaattttggaagaaaatcaaaaatagtcaaaacgtttgatgcacattgaatttgatgctgtcatatttctcatatgtaaagaaataaatctttcctaacaatatgataggaaataatacaaagatgacagaagggaagcagtaacaaattttaagtctctttcgtctttattcatcttgatatatatcatctcctaattttttttttgagattttatttacattcatagcaagaaaaagaaaaaaatcttttcaatttaggaattgtttttcttccaactttttggaatcctctatatagtaaaagatgtggcaagcccataattgttctcatcatttttatttttcatttattgaatataatatactcattgtcaaacactattaattccactatccttatccttatccttattattttttaaaccaaacatattttaatattaaatacaccatccaaaaataatattttcggatttctaaatatttagcttatagaaagatttcttatttatcaaataaattaatttaatcaaatttaaatttactatttcccaaattactaaaaacttaacttttaaaattaaaacattaaattatatagcccatatttttatcctataaatttcatgcagtatactatatagtgtctatctattcaacacaatcatagttttttcctataatttgatttaaaaaaaatcattctcctctatacataagagagtctttagtgtttaggatataatcccacaatttttctcaagtatttttttctttaattctactatatatcattattaccaaacatttttaattgcaaatactatttatcttattttcttaaaactaatttttaaacactcataaaagatttttaatatataaatttaccattttaataaaagtaaatagtataaaatttacggcaataattagataaaatttgttaccatttaaatttgaagatatgtttgaccctatatgaatctcacatatgttctcaaacatttggattttagaataaactagaaatggtttcatacgttaaacaactttgtattggttctagtttcacttatttccgttgtctcatcatatgcaattgcaagattcaatacaaaggttacagaaagtgaaatcaacgtcatatgaacaaacaaagatgtcaatgcatcattttgctttgagttcttgaaatcatcctctcaaattgcaacactagatgtctggtctagccaaattgaaatcatcattttgttttatatggatttttgtttaaaaacgaaattaaaaatcgtaaaattaaaccaaataatttatattttgctttcgatttatgaatgaaatcaaacaacagaaaatagcaagaaacaattttttattttgattttcgatttgacaaaaattaaaacaataaaaactgaagtcgtgtaagatctgactcctccaccaagatctgactctaagcacattgtttaaaagcatcaaaccatataatttgtatttaaaccacatatacaacataattaatcatatatataaatccacactttaataccaaattataactgaaatcataaatatcatgtattaatttttttcattcactcaatgtcatttaaacacacaattattataattttaatcttttatttttgaactacacttatttttacaggaacaaaaacaaatataattcaattgaaattagtattttaacactaaccaaaaaggaaataaatttgactatgagataagaaggcgggcttagttatataatagcaagaaagaatctgtatatttgttgaatcaaaaataatcagtaacgctttgagtgaagatg

SEQ ID NO: 2307 - DNA, 3000 bp, Unknown
  misc_feature (1)..( 3000): cDNA_ID_2153372_gDNA_ID_1620518_Annot_ID_159369 3000 nt of promoter + ATG
aaagttcccttgtggctcctaagctgcaataccaagagttcacgtgggaagaaattattaacgcaacttcatcattctctgaagatttaaagatcggaatgggagcttacggggatgtttacaaatgcaatctgcatcatacaatcgccgctgtcaaagttttgcattctgctgaaagtagtctatccaagcaattcgatcaagaggtaaccaatcaaaacataattcttatttgaaatgtttctctgatttcttcaaaaaaactgacatttgtattcaccatttaacctcttagctcgaaatcttgagcaagatcaggcacccgcacttggttcttcttctaggagcatgtcctgatcatggcgctctagtgtatgagtacatggaaaacggtagcttggaagatagactgttccaagtcaacgatagtcaaccaatcccgtggttcgtgcggttaagaatcgcttgggaagtcgcatcagcgcttgttttcctccacaaatcaaaaccgacaccaatcatccaccgcgatcttaagcctgctaacatcttgcttaatcacaactttgtcagcaaagtaggagatgttggtctttccacaatgatccaagctgccgacccattgtcaaccaaattcacaatgtacaagcagacaagccccgtgggaacgttatgctatatcgatcccgaatatcaacgaaccggaaggatatctccaaaatcagacgtgtatgctttcggaatgatcattctgcagcttctcactggtcaacaggctatggcactgacatatacagtagaaacagccatggagaacaacaacgacgatgagttaatacagattcttgatgaaaaagcaggtaactggccaatcgaagaaactaggcaattagctgctttagcactccagtgtacagagctccgttctaaagacaggcctgatttggaagatcagattcttccagtattggaaagcttgaagaaagtagctgataaagcaagaaactcgctttccgctgcgccaagtcaacctccaagccatttcttctgtccattacttaaggtaataacttgtttgctacgttatctgtttacttgcaagagaagtgaggttaatttaaagaagaatgttgttatattgcaggatgtgatgaaggagccatgtattgcggctgatgggtacacttatgaccggagagccatagaggagtggatggagaaccaccggacgtctccggttactaattcgccgttacaaaacgtgaaccttttgcccaatcacactctttacgcagccatcgtcgaatggagaaatagaaatcagtgaggcaaaacagagaaaagcgcgctccattttggtgcctctctttgaaactgcgtagcgtttttcggcatagagaaacggcgaggtgttctcaccgcctttttctcttttcgtttgtttgttcttttggaattacctttgtactgcatttggatttattttattcacttttgtggattcggttgaaatgtaaagagttgcatactgtaatatgtaatttggtattaaccgattcataaaccatttcgatctaaatctgattagattctcataatctcgtgtttgcttttattacagcttctactttaatgcgtctagttttagatacaaatgaacttttgaatggttctataacttcaaatttgtatcaccaaaagataatatatcttttgacttgtccgaaaagtaaacatgtccaaaggacataaaaataatcaaatctgtatcccttatctttttttttgttgttgtgatcaacgaaaataattaaaattttaacacatgctaaatagtgtttattgactttttctccaaacgtgagatagttttggtcataatacattaatggtataattaatcagcccttataaacacgttattggttaaataacttgaaacttatgtcacaatcaattccattaacactccacgcgtaggcgtagcttagcgtgcgtgcaactatccgctatcataagttcccattatcactagtattaaactttggattaaggatcttactcagattttataatagtttatgaaattttgttacttttatagtctcttaaatcagaaattgacttcattaaacagatcgtacgaaattttctgatcagtaattcttttttcctttataattcatcacatacaaacataaaatgaaaaaagaagaagacattttagaaataacttaaactctacatctaaacttgaataccatgtctaaattaatgtattatttaacataataaaatgtctatttaagtaaaattaaagaataataaaactcgaatcacataacaagccttcattgccgaataatttagacattaaaccaaattaaccaaacattttttttttaccagactattatgtaatgcatatttaaaaactaattacgtcaggtgaaattaaaaaaaaaaaggtatgacgccgtcaaaggacccggtagtggacccaacggtgcatcaacggaatccggatctacccaattgtatcttaattttagatccgaacccgaaacgaacagattcttttattggattaattagtgaaaaataaataaataggctttcttttcttacacgtcaccgaccgaccactcctgtctttgacattctcctccactgctttaaatgaaagaaacagagcactgttccgattcttttcatttctccattgaaattacaattcaaagctttcttcttttgtacgttattccattaatccaatttgaaactttcaaaattttcccttttctctggctttcgagtttttctcgattcctttctccattttattctttcccctcttcttcaacatctcaatataaaccctaattttgattctagtttctcaattggtgtgaattctcagaaattcagaaaaccctaatttcgtttttttctctgttcggtttttttttgattgattcgatttcctttgattctccgatg

SEQ ID NO: 2308 - DNA, 3000 bp, Unknown
  misc_feature (1)..( 3000): cDNA_ID_2153383_gDNA_ID_1620518_Annot_ID_159371 3000 nt of promoter + ATG
ccaaggaaccatagagaaatcgatatcacattgctgaataaaaatgtaaggttttgacaagatcctgatttcaaacagagaatgcatcgatcaagagatgctttgatacgatcagaattcaatatctagatagaacaaaaggtcaaaagccacattccaaagtctatttagatatagacagctagacaatgcaattgcagaggaattttgtaactctgaacctgaattttgagatttaagcacataaagtttcgaaatttactagaacaaaagcttggaaacaagaaacccatcaagccaagcatgatcggaatctctaataaacaagaaaaagtcacaactttgacctacctgatatttaaaggatgcaactttaagctgtggcataagaagaaaagaaggtatctttctcactttgccatcttgaagttgaagaagcgatggagtcttctattctcacacggagacattgacacaaagaagagccaaagacccaagttcgtggcttcgttcgtgctcccaatttcagagacagtcaattccttttgaataaccacataatcttatatttatagaaacaagaaaaaaaatgaagataacttggtcatgcatatgactcatgattcattgttgaagattcttctttcactcttttttattttgtttttgataatagattctttcactctcgttatttactagctcacacaaggattttcttcattatcagagagctacaaagaagagggaggggcttatattatttctcattttttttttatgtttgaaagtttctgccaattctcaacaatcttatgaagggatttgctaactagtatttttttttagatttggaaaatgtctgttttggaaactaatattatttttgtgcacggctggatatactttttcaaaaacatgaatattattaattcatcaagaaattaaaattaaagatgaagtatatattgttcttacttcggaaaaattgcatcacatgatgttagtcactttatatgatatcttgaggatttaacgtttttaaatatttttgtagtccatgttacatagtgtaaaactgtaaagtaacaaaatgcgtattcttcttaaatctcacatagttctgccatgtatatataatccctctgcatggcacttcaaatgagaatattgaatggagagtcggagaccatatgaaatcatggatcacgttcatgatagagatctatatatcccaattcacatatatactatatatattctataatatatcatctaggaatacagatgaaactgttacagagaataacaaaatttcgtgataattaaatctaatattcatttattattcttaatactttgaatatatatggaaaaaacatttatctaaaataattcttctatttaaataggggacttcagatttttaaaatttgagtattttgcttgaagaaatgagtatttttttataaaactttccttatgttttaagatgaatttttcatcttgtaactagacatatgatgtaattccaatttcttttacttttattttttattatatatgtaattccaatttcatttggtttttgcggttagtttacgaatgaattctacatattacaaaaatatcataaaatacatataatgatctatattttaatggggttttcctcccttggttgctcgcatgatctatcttgccatcacgtctttttgtctcccgatccctataatataggtatgtgacaatgtgtgtctatctttttctttctcttttaagtttttaaccaatccaatttttgtcaacaacacaatccaatgaattctaactaatatactatgaaagtggcatattaatataagtttatatgaatgaacgagaaaatgcacttagacataaaagagggaaagagagatacatatgcaatgtcaacgttgctcagcttcacaaacccatgttatgaatctttttcttaggtacatcaagtcgtatgattctttttaaacaaaccatcaagtatgattcattatatggttatatcccaaataagaaaatatatagataaatacatttaaatattgcatgatgtcatgcaccaaaaagcaacaatatataatcaacatgatatagaacttcgaccccaactcctccttcttacttgaacttgtttttggaattgatattatttttgggtaaaattaatggttaattcatttgagtcaggtttattttcttttgaattcaggtcggactttgaatttctttttcttttcttagtcaatatcatcatggttagatgcgaaccatgaccgggacaatatcggctatgtattttctgttttggtacatgtcactatgtcaccttgtttaattttagttgttctgtttgtgtaactacgagtctacgaatacattgtctaatgaaatgtgttgttatgttatatcacatgtcatatatagtgtaactcacaaaagatgtatcatgtcattttctttatttaaatcgtgttacgtaatgtgaagaacttaacaatatattagcaattttaatacatctgaaaatcattcaaaaaatcgaaaaacagaacaaaattttgttatcgtaaacaaccaagttaaatgatagatgaacacaatagatcaaggataaaaaaaagttgagatttgagatgaatttgttttttttttgtttttgtcactgaaatctttattgaaagcccattaacttacagataataggcccaataaacaaaatttacacgccgtctaaacccgatttccgacgacctacagaaaaacttcggtcggtcagtgaccctttaaaggaaagctattagcgattgattcgagagatgtgcaaagcttgttgatttgaggctctctctctactagggtttgttgatttgagttttctattcctcctatacgtgttcttcgattctcctgggatttttttttgaaaaagggaatagaagaagaagttgctgaattctcgat

SEQ ID NO: 2309 - DNA, 3000 bp, Unknown
  misc_feature (1)..( 3000): cDNA_ID_2153376_gDNA_ID_1620518_Annot_ID_159370 3000 nt of promoter + ATG
aagtttttctgtaggtcgtcggaaatcgggtttagacggcgtgtaaattttgtttattgggcctattatctgtaagttaatgggctttcaataaagatttcagtgacaaaaacaaaaaaaaaacaaattcatctcaaatctcaacttttttttatccttgatctattgtgttcatctatcatttaacttggttgtttacgataacaaaattttgttctgtttttcgattttttgaatgattttcagatgtattaaaattgctaatatattgttaagttcttcacattacgtaacacgatttaaataaagaaaatgacatgatacatcttttgtgagttacactatatatgacatgtgatataacataacaacacatttcattagacaatgtattcgtagactcgtagttacacaaacagaacaactaaaattaaacaaggtgacatagtgacatgtaccaaaacagaaaatacatagccgatattgtcccggtcatggttcgcatctaaccatgatgatattgactaagaaaagaaaaagaaattcaaagtccgacctgaattcaaaagaaaataaacctgactcaaatgaattaaccattaattttacccaaaaataatatcaattccaaaaacaagttcaagtaagaaggaggagttggggtcgaagttctatatcatgttgattatatattgttgctttttggtgcatgacatcatgcaatatttaaatgtatttatctatatattttcttatttgggatataaccatataatgaatcatacttgatggtttgtttaaaaagaatcatacgacttgatgtacctaagaaaaagattcataacatgggtttgtgaagctgagcaacgttgacattgcatatgtatctctctttccctcttttatgtctaagtgcattttctcgttcattcatataaacttatattaatatgccactttcatagtatattagttagaattcattggattgtgttgttgacaaaaattggattggttaaaaacttaaaagagaaagaaaaagatagacacacattgtcacatacctatattatagggatcgggagacaaaaagacgtgatggcaagatagatcatgcgagcaaccaagggaggaaaaccccattaaaatatagatcattatatgtattttatgatatttttgtaatatgtagaattcattcgtaaactaaccgcaaaaaccaaatgaaattggaattacatatataataaaaaataaaagtaaaagaaattggaattacatcatatgtctagttacaagatgaaaaattcatcttaaaacataaggaaagttttataaaaaaatactcatttcttcaagcaaaatactcaaattttaaaaatctgaagtcccctatttaaatagaagaattattttagataaatgttttttccatatatattcaaagtattaagaataataaatgaatattagatttaattatcacgaaattttgttattctctgtaacagtttcatctgtattcctagatgatatattatagaatatatatagtatatatgtgaattgggatatatagatctctatcatgaacgtgatccatgatttcatatggtctccgactctccattcaatattctcatttgaagtgccatgcagagggattatatatacatggcagaactatgtgagatttaagaagaatacgcattttgttactttacagttttacactatgtaacatggactacaaaaatatttaaaaacgttaaatcctcaagatatcatataaagtgactaacatcatgtgatgcaatttttccgaagtaagaacaatatatacttcatctttaattttaatttcttgatgaattaataatattcatgtttttgaaaaagtatatccagccgtgcacaaaaataatattagtttccaaaacagacattttccaaatctaaaaaaaaatactagttagcaaatcccttcataagattgttgagaattggcagaaactttcaaacataaaaaaaaaatgagaaataatataagcccctccctcttctttgtagctctctgataatgaagaaaatccttgtgtgagctagtaaataacgagagtgaaagaatctattatcaaaaacaaaataaaaaagagtgaaagaagaatcttcaacaatgaatcatgagtcatatgcatgaccaagttatcttcattttttttcttgtttctataaatataagattatgtggttattcaaaaggaattgactgtctctgaaattgggagcacgaacgaagccacgaacttgggtctttggctcttctttgtgtcaatgtctccgtgtgagaatagaagactccatcgcttcttcaacttcaagatggcaaagtgagaaagataccttcttttcttcttatgccacagcttaaagttgcatcctttaaatatcaggtaggtcaaagttgtgactttttcttgtttattagagattccgatcatgcttggcttgatgggtttcttgtttccaagcttttgttctagtaaatttcgaaactttatgtgcttaaatctcaaaattcaggttcagagttacaaaattcctctgcaattgcattgtctagctgtctatatctaaatagactttggaatgtggcttttgaccttttgttctatctagatattgaattctgatcgtatcaaagcatctcttgatcgatgcattctctgtttgaaatcaggatcttgtcaaaaccttacatttttattcagcaatgtgatatcgatttctctatggttccttggttgtctagttttggtttggctcaaagatcttcatttcaattgtgatgttgttgaatgacagattgctactgtctcatttggttggaggaaagaataggcgatgagcagaaccgttgctgaccatcttgcgtagagctggctgtgacattgtagaggctctacaagccggtgctttgactttctggagaataaaatg

SEQ ID NO: 2310 - DNA, 1122 bp, Unknown
  misc_feature (1)..( 1122): cDNA_ID_3067034_gDNA_ID_1620518_Annot_ID_159373 3000 nt of promoter + ATG
cttcatcacaagtattacgaatctgagtttggaaactgtcatggctacttcaggatcaacaactacacaatcccttcagaccaagaagatgatcatcacaacggtgatgagcaagatttgatcgaagggctaggaatgcacactgacatgagttgcatcacgatcgttgaccaagatgacatcggaggtcttcaagtcagaaccagagatgggattggtctgatggatatcaaccctaaagatgaagcactcgttgtcaacgtcggagatctattgcatgcatggaccaatggacggctgagatcgtctcaacacagagttatcttgaaacgacgtggtttcgttggtaatagattctcacttgcttttttttggtgctttgacgatgggaaagtcgtgtttgcccctgatgaagtcgtcggaggttgtgagggtatgagggtatttcgatcatttaaatgtggggattatttgaggtttagagagagtaatgagaaagggaagttcgagaaggttggggacacggtcgaagactttgcacgaattgaagaccgtcgttaattaatttttccctaaaatgaaataatattaataatttttttttgacatacactgagtatatttgtgtatttttccaagatacgaaatagtcagaaaaacaaaaaattagtcataaataggctgataatgtttaaacatgctagaatatttgagattcaatgcatagatgtgaaccaaagttggagaccagtttcatatctcatttctcctaaaatcttatattagacaaaattagcatatacactaacattaacattgcgttttaaaaatttaaatgttaaaatctgtttttattagcttagaatttttaggtattaattgattttttatttataaaaatgtaaatatttaaactttttttttttttatcaacaaaatggtttaaaaattaaaacattctcttaactaaaagtgtaagaaaattgaatttaactatttgggcttataatgggccaaattccgcgactctgctcaatatcgttttcgataataatctctctcatgtaagtcgcgacatttcttgtcttagatctgaaaccctaactcttgagttttgctatg

SEQ ID NO: 2311 - DNA, 3000 bp, Unknown
  misc_feature (1)..( 3000): cDNA_ID_2153387_gDNA_ID_1620518_Annot_ID_159372 3000 nt of promoter + ATG
atacctttaagagtgatgttctttgcaagatctgtggtgatggtggacaccctactattgattgcccggtgaagggtactactgggaagaaaatggatgatgaatatcagaacttcttggcagagttaggaggaactgtacctgaatcttctctcaaacagagtgctaccttagctcttggtccgggaagttcgggaagtaatcctccatgggctaataatgcagggaatggtgcaagtgcgcatcctggcttagggtcaactccgactaaacccccctccaaagaatatgacgaaacaaatttgtacattgggttcttacctccgatgctggaggacgatggtttgattaatctcttttcatcctttggtgaaattgtgatggcaaaggtaatcaaggaccgtgtgactgggctgagcaaaggctatggttttgtgaagtacgctgatgtacagatggctaatactgctgttcaggcaatgaatggctatcgtttcgaaggccgaacactcgctgtcaggattgcaggcaaatcgccaccgcctattgcacctccaggacctccagctcctcaaccaccaactcaaggttatcctccctcaaaccagccgcctggtgcctatccatctcaacagtatgccactggtggttattcaacagctccagttccttggggtcctcctgttccttcctattctccatatgctcttccccctcctcctcctggttcttaccatcctgtccatggtcaacatatgcctccttatggaatgcaatacccaccaccaccacctcatgtgacacaagcacctccacctggcactactcaaaacccatcttctagtgaaccccagcaaagcttcccaccaggagtacaagctgatagtggtgctgctacgtcgtctataccaccaaatgtctatggtagctcagtcacggctatgcctggacagcctccatatatgagttatccgtcttactacaatgctgttccccctccaacacctcctgcaccggcctcgtctactgatcattcccaaaacatgggtaacatgccatgggccaacaatccttctgtctcaacacctgatcactcacaaggtcttgttaatgcaccttgggcacctaatcctcctatgccacccactgttggctattcacagagcatggggaacgtaccctgggctcccaaacctccagtacagcctcctgcagagaatccatcctctgttggagagtctgagtatgagaagttcatggctgagatgaagtagcatgcgtgttctgatgagaaactccttagtggagaggtaagatgtcctcatttgatgttattgtttgttctccgtaggataaaatttgaaatcgaatcaactggctttcaacataggatcaaaaaagttccaacgtttaaaaaaaaaaaaaaaaaaaaaaatctttctcaacctcatatatttagagttccagtttgcaggatactgactttttgtccataattttgttctcgaaagccttccttctcatgtaatatatctgttctagttttatcacataataactaactgctatagcttataatatggtcactgatgtgtttgtgagcaatgccacagctacaggagcatctgtcctggtattcaattctgaaacatagaatccgggagttggatgttcgaattttgtcagtctaccctttttgctctatgttttattcagtaacttttaatgtgttttctatcccacatgaaaagaatttgttttcactaatcattttttctattttacaacatctaaactgctactagaatagaatccaaaagtttgcccctgttattgtatacatctcattaacacgaatctttgttttgttgacattgttaatttttttcaggtgtgatgtttcttggagatcttgtaccctgatttcttacatctttcttgttggaagtttgggactcacatcctaacccttgctatgctgttgtgaaatatgcagagattcaggctggaagctccctgttcagacaattgcctttgcagaaaggccatgagaattttattaatgttactgataataattgctgctcttttgtaggactactagcattatggcccctgctatgcagggtcatagtatctggcataaaatatatcaaattttcaattcagtggcttgtacaaatattttgcttattattcggatgcgtgaaatattgaaaaaaaattctagatgaagaatatggagagaaaattccctctattttttctgaaaataataaatataagtagacacatggagatcgtggaacttgtgggagttaacccttgtaatatgatagaattgtttagggactattgggcagtatcatatgatatgataaacgaaaagcattgtactcgacatttgatatcacttatctctggcagcgatatgtatacaaactccaaaacagtaaacgaaacaatctcttttcaacaatatttttcaacaaaagactattggaaatcatctaaaatcagttttagtagctttctgataaagaattgctaagtttttaataatatagttgatttagaatgatattaatatgattgactaacatgagattgtatttatttggaatgaattaatataaatatcactatatcatgttcaataacataaatcctctagtataacggatttgtaattcaacatgagtgtattggacttttccaagttaataatgtcttttattttttggggacttttattgtcaattagataatatatatggacaaatattgaagccaatcttcggccgagcctagtgatgcaattggcccataatgctcatatgcagcagatcaacaaaattgtagccaatcttccgtccgtcttggctccgccgttcggtttccgttaatattttacaaaatcatttcattttcttttttaacttccaaaaaatcgaattttgttgaatcttctaagctcaagctaataccgatttcgaaatg

SEQ ID NO: 2312 - DNA, 3000 bp, Unknown
  misc_feature (1)..( 3000): cDNA_ID_2687670_gDNA_ID_1620518_Annot_ID_159366 3000 nt of promoter + ATG
ggctatcgccttgtagaaaagattttgagcattagtaagccaattaaagtaccaaataccaatgacagtaaatgctctaattcagtaatcttattcactttcacattgttttcatgatcatctggatgctaacagctagcacattcccttgtgtaggtttctttggtttgatataagtaaatcaaatgaaacagagaaacaaatgaaagattgattcgcaaagcaccacagcttcttctaatttcattcaaatcacaggggcttgttctccaaaggggtgaaggagaaattgccggagaatatggactctttatctgtgtatgacaaaaaagaaccatataagaaaaggcatgtctattcgaaatgcaaatgcgagtaacataatgaggcattccaactatagcgtcataggtacctgttaaagaaagagaaccaagttctctccggacatatcttgccattgcctgaaacacacaagcaatgtcttaacaagtttggtacacaatgcctaaactagtatgtcaatgtgtgtgtgtttgcgagagagatagagaggagaaaatcatgcctgtgctgtttttaaatctgtgttatcaggtgttgttgttccatcatcagaaaatacgttcctacaatccaattgcatataaggttctgagacaaatccgttatctatggctgccatattgtatataaattcaagccgagctacttagctgtgtaatctctaccgaactcattgcataaagcatgacgttatagaagctttacctccataatttgatttgtaggtcatttggtttagcttccggaagtagcgcagcatcataggcaacaacatttccataaaatattctctccaactccttcatccacttggctagcagcaagttaacctgtaatttcaagaaagattaagaccatcttattttaaggaatctaagaaactaagatatctcttcgaaactatattaaagcaaaaccaagtctagcacgtaccccggctttagataccctgagttcaacatcatgattgtagatctcatagacgtattgaccaaggtcaacaccttcctgtccatcttccttcaagcggcgtaaaacaagccacatatgaaggacaagcagcgaatacgttattttgaatgttttctccaagttgaatactgcagcagagacagagcacccgatatataaacaaagcacaaaatgtaaatacataactctgtttgcaaaagttgtgttggaaaccaaataaagtaccatcatatattgcaggtttatcaacttgtgcaatgatccgcttgtagatcacgttagccccacggatagacatgctctgtttgctatagaacatcatcatctttagtatgaaacgacgaatccctacatagtctggttcatcaattctgagaggagagtctttaggcagagccaatgaacatggctttgaccaaaacatcttatccaagtttatctgtcaaacatagaacaaatccttttcatcaaagaagacacgattgtccagaagcagttgactaaaagagcatgaatctaaatcacaaacatactaatgaaactccaacagaaaaaaagggatgaatcctaaatgaggtacaatggggaggcagaagtcactttagtcccgcattcgatgaaactagaaacagagagaatcaaattgagcttaggttcgaatactatagtgagacctaaacattcacaacaactacgcattaacagctacttctgaaaacgagatctttaatctgagtaaacaaaatgttaccactttaagatcataccggagatttactggggaaatccttctgcgacggaggatcagctgccgccggcgcaacagtcgcgtacccatatcgggagaaaaaggagagatttttcatcgatccattagtggtcaaagatcgaagctttgaggtttgagtgacgactcgagctaatctgggcaacattagagagaaacccttgtggttttactcaacagatgaataaatctgaagggagaaatttgaatgagtaagatcgaattctaaaaccctaggcgaaaaaccctctccgactccttttctgtgtgattgatgatggggctaggtagtcgtccacgttagcgtctatttggccagatattcaattacagtgctaacttacgccgttattaggaacggaaaaccttggttatgcaaaaacaaacacattttaccgatattggtgacacgaaactgatggtcgattttagatagtaagagttgatgataccataaaatatgtttgtttataccattatcattttagggggataaggaactatgactactttgtcatccatttttttggtggatctctaatttgaactcaagtggcttatattgaatagttaagaaattatgctttctcatggccattggggaatttagtttcaattagtgaaaagagttttaattagattttattgtgcaccgaattttactgatttaggacatggtttacgcttattttctcaagagcaaaaatatttacggtctcctcaacaatatcatcaatttacactttttattactcttcgaaacgcttcatctctctctttctctctctcaagctgtcaaagtcacctctgtattcgcgtgaagataatttctcacaattagggttttttttttcttctgagttaactgttccatctccatcctaatcttcaccttctccttgatttcgagatctctgtcaatttgttgaatctgttctttatctaattagctcaactccgagtctttgctggattttgaaggtcaccactgttcaagtttacattttttttcctgctaatcgcttgatacccgtttctgctgttgtgggatttattgggtttttcttctttacgatttttgttgcagcttttgtagctgaagcaaatttgtaatctgtgatggtgtatgcactgattctgggtatggtattgtactctaggatctcgtagcgaga

SEQ ID NO: 2313 - DNA, 3000 bp, Unknown
  misc_feature (1)..( 3000): cDNA_ID_1398026_gDNA_ID_1620518_Annot_ID_159358 3000 nt of promoter + ATG
cacaagtagagttacctgtttattacccattgaacccaaatgtggtgtagctacagtaataaaattcatagcctcgagtccacatattgtgcctttgggagtctcttgactactgtccgctaccgagtctttaacatcttcctgattagcgggcttgtacaatttcccaattgcatatcttgctgcaagccctcccaaagaatgtgcaacaaaggagattttacagatatttggttttctctgaataatatcaagaacctgacatgcattttcgttacatcaaacagagtccaactccacaaatgtaaataaaagaggacctatatgtgacgccttacctcagctgctagacgttcacccattacatccacaccatctagagtaagcgcagacacattcttttcactacctgcttacaaaaggtaagatcataagaatcttggagcaataaacctagcatcataagaatcttagaatttaaagataattgccagtgacacagacccaatagtagcaagaaatggaaaacagaacctattaatagctgaatgattagataaagggtccactaactaagtttaattctgaaaaaggaaactaatttcaattttggaactttgtaaatcatcattaatcaaagcgcaagacaacttacagtgaacaaagactttgtctggcatctttttgacgaactgctcagctccaaacttccaatcatccgtactgcagttctcaagaacaattctcattattgagattttggcgaattgcataaatatatcaagtaaaacagaacaatcaaaattctcaactccatcaaagtttgtttaccttcccaagatcccatggaccataacgacaaggtgatcagcggaagaagaatcagaattctgacaactccaaacatcaaggctaccatcaacagattccgccttgcaaagaccgttttcctcctcgtgcttctccatgggatccaaatttcaatcgaatccgatcagatcagatccaattacagcacaaacactgcttccaaccacccaatttgaaatcgtggatcagaaatggtgggaattagagttgaggataggatttggtaaaaagtagaaagtgtgaagtgggaatgaagagagagtacgtacgaagcagacttgccagagaaggaaacggaaggaagaaaacacgacaaaatgtaacgtggaagtaagtaatcgtgacgtgaagtcggcttcgatagagataccgacttcctgagaacaaactctctccctctacgcctttgcttttttcttaatttggggaaaacaaacaaacaggataactttgacttttttcctcttcttaacaacaaaataatatctttgactttactggtttcaaaacgtaatcaactggatcccgttattccgttacaacggaactctgctaagtactgaactgtattaaactgttaattatacggaagttacaaattaccatagtaactaaacgttttggattgccggtctttggatttttctttttcttcaactataccaatttttgattaagactaaaaagttcatacaatctgactacctttgaatcactaacggtgataacaaagtttgtgaccaatacttttgtataatatattttttacaggttttttcgaatcaattttaagtccccagccttcgtcattgtaggcaaattgggtgctcgttggaacatcgttggtaactgccattagtttctaagatatctgacgactgctctttaacaagaacacgccaatgtttatgaccaaatgctttcaaatcaatacacagggatcgattacttcggattcaactaggtacgggcactagataaaatagataatttcatacattaatttgatattctcagtgtcaaaacaatgttttcagaattggcagactaaattatctatttgttcgaatatggatgtcctaatcatattcgaacaaatagataactattttgtgtcgtgttcaatagacatttaatcagacaactattttgaatgtattagtcaattcttccgattaaactttactcgtagtttgtcattaaactgaagcaaatcacaattgaacaaagttagattcagaagctaacagttgtaacttcacttggagatgcacatagtatctctcagatcaagtgttggattagattaattttgcttcatcattatctaccatctaaattcgtttttactgaatagaaaaccaaaaaacaaactcttataaactatttatggggattaaggggataactcagtagtggctagtgatttaggttcgattctgccagcaattctcttcagcttaatcagaagagggagctgtacatcctcatcgtaatctccaaaatccccatcatcattaaaaaagcgcaaacaccgatttcaaaatcgataaaaacgtataaatcgattaccagagaatttcaaattcgaaaacgcaaacaaatcagaatcaaatgaaaagagaggaaggctcagatcagcggggttatcgacacagaaacgactcaaccaataaattggaagaaacgcctaattccggtctgttgagcttgaaatttccgagtcatcactgccaatctccctctctcgattagagaattataaagaaacttaaaaactatcaatcatccaaaaagacccataaaaacgacgattgaataacagaagaagagaaccctagatgctattgaatactgataatgatgaaacctccggcgattggtgtctaatttatagggaacgtaattagggttttgctttgatcttcggtgaaggcccattctcggcccgttaatggtttccgaattgtgctgctttgtcttcgcggatggttcggtttatattcggttcgctttaatttggttatattagaatcattttggtttaatctggtttatgcttgaaaatgaaatctggtttaaatagtttctctgtttggtttttctgttttaattaatttacgggcaatg

SEQ ID NO: 2314 - DNA, 3000 bp, Unknown
  misc_feature (1)..( 3000): cDNA_ID_2153338_gDNA_ID_1620518_Annot_ID_159360 3000 nt of promoter + ATG
actcttgttgtacaacatacctcggatagtcctgaagtagtgatttccaaagaaaggaaagagcgagtatggtcatcattcacaaagacttcccacttattgaaatctatcaagtatctgtcaaaaacagaacggaaaacaattcacaaaccccatcgtaatttgggtagtatggtaggcaagaaatgatcttacctcttctgcaactgaagcttttgccgaagcatagaaatcaccgagttaatctgatgaacacgtagtggaacgtttcttcctaagcttatgtggaactctctccccaaggcacgctcaaacttctgatcatccttgcatagaatgctgagtggcacatcagcctctaccaaatgaagatgaggaacaactgatgcaaccttctttaaaaaacatacaatctccttctttggcagtggaggtatacaaactagaatcccaaaaacaaaataaacaatgagtgaaagagaaagacaagtgatacacttcatcaggcctgcacttcatcaatacattctcaaacacatacgtatcctcttatactaaacaaccacttcagaattcaaaaacctcgaaactctcagaaattttaagctacgaaatgaacaaataccaggtacgtaaacgtgcaaagcgtaatttccatcgacatgaggaaagtttcttacacgaactccaggctctgttgagaagaaatccagtgaaccttcaagttcagacgaaataaaaaataagtgatgagtgaaatctctaagaatttgattgaggaacaatcacagagacaattgatgagcatcttcacctgtggatacaatggaatcgagaagcgcaagcggtggaggaggcaaggaaatcgaatctttctctccagaatttgcagtaacgggactcgccggagaaagatcatcggtatcggaatccgatgaagagtcgccgtaggacgctctcaatgcttccattgcccgtaaattaattaaaacagaaaaaccaaacagagaaactatttaaaccagatttcattttcaagcataaaccagattaaaccaaaatgattctaatataaccaaattaaagcgaaccgaatataaaccgaaccatccgcgaagacaaagcagcacaattcggaaaccattaacgggccgagaatgggccttcaccgaagatcaaagcaaaaccctaattacgttccctataaattagacaccaatcgccggaggtttcatcattatcagtattcaatagcatctagggttctcttcttctgttattcaatcgtcgtttttatgggtctttttggatgattgatagtttttaagtttctttataattctctaatcgagagagggagattggcagtgatgactcggaaatttcaagctcaacagaccggaattaggcgtttcttccaatttattggttgagtcgtttctgtgtcgataaccccgctgatctgagccttcctctcttttcatttgattctgatttgtttgcgttttcgaatttgaaattctctggtaatcgatttatacgtttttatcgattttgaaatcggtgtttgcgcttttttaatgatgatggggattttggagattacgatgaggatgtacagctccctcttctgattaagctgaagagaattgctggcagaatcgaacctaaatcactagccactactgagttatccccttaatccccataaatagtttataagagtttgttttttggttttctattcagtaaaaacgaatttagatggtagataatgatgaagcaaaattaatctaatccaacacttgatctgagagatactatgtgcatctccaagtgaagttacaactgttagcttctgaatctaactttgttcaattgtgatttgcttcagtttaatgacaaactacgagtaaagtttaatcggaagaattgactaatacattcaaaatagttgtctgattaaatgtctattgaacacgacacaaaatagttatctatttgttcgaatatgattaggacatccatattcgaacaaatagataatttagtctgccaattctgaaaacattgttttgacactgagaatatcaaattaatgtatgaaattatctattttatctagtgcccgtacctagttgaatccgaagtaatcgatccctgtgtattgatttgaaagcatttggtcataaacattggcgtgttcttgttaaagagcagtcgtcagatatcttagaaactaatggcagttaccaacgatgttccaacgagcacccaatttgcctacaatgacgaaggctggggacttaaaattgattcgaaaaaacctgtaaaaaatatattatacaaaagtattggtcacaaactttgttatcaccgttagtgattcaaaggtagtcagattgtatgaactttttagtcttaatcaaaaattggtatagttgaagaaaaagaaaaatccaaagaccggcaatccaaaacgtttagttactatggtaatttgtaacttccgtataattaacagtttaatacagttcagtacttagcagagttccgttgtaacggaataacgggatccagttgattacgttttgaaaccagtaaagtcaaagatattattttgttgttaagaagaggaaaaaagtcaaagttatcctgtttgtttgttttccccaaattaagaaaaaagcaaaggcgtagagggagagagtttgttctcaggaagtcggtatctctatcgaagccgacttcacgtcacgattacttacttccacgttacattttgtcgtgttttcttccttccgtttccttctctggcaagtctgcttcgtacgtactctctcttcattcccacttcacactttctactttttaccaaatcctatcctcaactctaattcccaccatttctgatccacgatttcaaattgggtggttggaagcagtgtttgtgctgtaattggatctgatctgatcggattcgattgaaatttggatccc

SEQ ID NO: 2315 - DNA, 3000 bp, Unknown
  misc_feature (1)..( 3000): cDNA_ID_2153357_gDNA_ID_1620518_Annot_ID_159365 3000 nt of promoter + ATG
tgagtggattgctgggcacctgaatcgagacacacttttcctcactcatggactttagctgcagcaatggacaagttataccagtaatattttcatttaaataatcaagactgaaaactaatggcaaaaataaaattcacagtagcaattacttccaatttactttttcaaataacaaaagaagttcaatacacagtccttatttcaatacagggagcataaagtcatagaacaagaggaagacttgggcaatagtgtttacctttatgaagcaaggctgcatttcaacaagagagactgtgtctactctctgtcccaagtccatgtttggtgatttctgccacgacgcatacagtgattgcagaggtattttgctccataaacaatgtcctcctatatttcctggcagaaaaaaacgcttccgatggtaagagttaatgaaaaaaaagactttcagaaactcttataattggagtcaaagaatccctaattcttttgttaataaataggactgagattttccatactattacatggaaaattggtaatgcccaaagatacataacttttcaatattagaatgttatatcaatgaagaaatggaagtacctgaatgaatcttgcctgaatcaatgccaaattgagaattttgcgcaccagctacaagaagaaaattatgtgatcagtttatctgaatactgtacatatataaatgtctttatataattttgtacacagtcagtcttaatcaccaaagctgataaacaagatagcgagtgatcctgattttgcctccaatgcgagtctattcatatcagggagaagaaagttggcttgggcttgactaactccatcaacccccaatccaccagttaggatacatgctcgactgaacctatatactgcagaatactataatttgagaatttcaagaaaaatgttagcaaagaataggtaagttacaaataataaagatcaatgcaaatctgtctgaggttcaaatgcatacctcagcgacaggcttaggagaaacgagtcttgccaacaaaatatacagagggaataatttttgagtttgtaccccagcatctatagcgcccgagaggaatacagtcatttgtattctgcaaagcagtaatatatattgataactatccgaaaacttagaaagcattcaagtccggaatgaattactaaggtatagtgtaatagttacccaaaagtaatggagattctgaacagagaaaggaaggaaaaaaaaaaagcttacctccttttatgttttgcctcaatcttataatgcaaacatcgctgaagaaacaagggctacaggggagacagagagagagaaatgattaggatggactgcatagcaagacaacacatacttgcttataccaaatgaagtcaactcaaactacattttcatgtaaattttcattgtcaaaactcaaaagtaaaccaatacatgtgatatatcagctgagctcataagtcataactaaacatattctgtctaaaaaaggtaggaaggaagacatacattcctaatagcacggcgttgaatgatattgtagagttcaacaggcttgcaataggcagccaagctctcttcagcagcaatctcctcctcttccgaaatacgcagacgggagtcttcatggcacatctgctctgtgcttcttgaacaactgtgatttcaccatcatacgcaaccaaaattgtaagcaaccccacaacaaaataaaaatttgataagtttgaattactaggattcctcagcttatacataagagaaacagtataaagttacacaatgctgcagagacattatagaagcattaggttgttcatgagacttacgaagaggtttcacgactaacaagaggaatgcctggcattctcgctacgagatcctagagtacaataccatacccagaatcagtgcatacaccatcacagattacaaatttgcttcagctacaaaagctgcaacaaaaatcgtaaagaagaaaaacccaataaatcccacaacagcagaaacgggtatcaagcgattagcaggaaaaaaaatgtaaacttgaacagtggtgaccttcaaaatccagcaaagactcggagttgagctaattagataaagaacagattcaacaaattgacagagatctcgaaatcaaggagaaggtgaagattaggatggagatggaacagttaactcagaagaaaaaaaaaaccctaattgtgagaaattatcttcacgcgaatacagaggtgactttgacagcttgagagagagaaagagagagatgaagcgtttcgaagagtaataaaaagtgtaaattgatgatattgttgaggagaccgtaaatatttttgctcttgagaaaataagcgtaaaccatgtcctaaatcagtaaaattcggtgcacaataaaatctaattaaaactcttttcactaattgaaactaaattccccaatggccatgagaaagcataatttcttaactattcaatataagccacttgagttcaaattagagatccaccaaaaaaatggatgacaaagtagtcatagttccttatccccctaaaatgataatggtataaacaaacatattttatggtatcatcaactcttactatctaaaatcgaccatcagtttcgtgtcaccaatatcggtaaaatgtgtttgtttttgcataaccaaggttttccgttcctaataacggcgtaagttagcactgtaattgaatatctggccaaatagacgctaacgtggacgactacctagccccatcatcaatcacacagaaaaggagtcggagagggtttttcgcctagggttttagaattcgatcttactcattcaaatttctcccttcagatttattcatctgttgagtaaaaccacaagggtttctctctaatgttgcccagattagctcgagtcgtcactcaaacctcaaagcttcgatctttgaccactaatggatcgatg

SEQ ID NO: 2316 - DNA, 3000 bp, Unknown
  misc_feature (1)..( 3000): cDNA_ID_2153349_gDNA_ID_1620518_Annot_ID_159363 3000 nt of promoter + ATG
tttattcaatttaagttacttcatttttgtttctttgttgtttatatagaccaacttgcctattttgaacaatgaaagtttgaatttcctgcatgcaagttatatagaacaacttgccaaataaatcagattagaagatgttcaataaattcatggtcaagctttgaaaaactccggcccccacaagagtataaacaaaatgctggaaataaaagttttacgaggagcatttcacgaatgttggttaatcacaaaagtcttaattacttacttcaaaaattcttgttgacgaacaacaatgaaaagaaaaaagatacaagattttttgtcaccatgcataggcccgaataatatacagaaacgcaagatggatacaaatgccaaggacaccgggtaagtcggagaagtgctggtcgagaggacctacaaacataggcggagaagagctaagggtagaattaacttcattaaaacaattaccaccaaaataagaaacattggatgagaatctaactcctacactaggtgctcgacatttggatacgcatgtcggatttggtttttttaagtaaagaaatttaggatccaataagatatatataaaaaacgggtttggtatcgattcggatttgggtcgaatttaagatttcataacctataaactcggtacttttcagttcaaatgtttttctatctgattgtacctgattactcgaagttttacttgattaactgatattatatccgattatccgaaatttttacctagttatccgaaatattatcagattttccaaaatattgtccgattttccgatgtaagtaaagcttctatccatataagtgtagctaattttgggtaatcgggttactcgttcgggtatcgggtaatacccgaagcgacctgatacccaagattacaattacataggatccaataggtaaattagttatatcctacttgacccaaaccggttttttgggttggtttcgattcgggttttcagtttcattcatccacttctgttaatttgttaaatctttgaagttcagaaaacacaaggagtaagattagtgttggaaaactagaccagattcattcgcattcaactcacgccgtcgatcaaaggtatctggcgactccaattttgcctccacatagtctcaaaccgataaatgatcacttctccaaataacctaaaatagctgcccagtaaaaaaaatccctaaacccaacaaccaaatcaccacgatcacaccaccatccagacttgctagacgcaaaaaagtcatcgtgagtttcatcatcgatctaaaatctaaaacctttcacttctataaggcggaaccaccatcttttaagcttaacaaccataacaaacctcttacattatcggcaaaaaaatgctagtgaccgatccaaattaaatatattttttttttttttcacaaaaagtgatactttttatatagatcaagtgttgcaaaagatacaactgtggaaacttccacttacaaacttaactaacaagttaaagcatacattgttaaaacatggatcttctaaagtgaatgaagactccattgaacataacccaaaaggttgcagctacatcttcagattccatttctgcttgaatctccagtctattcaaacggaattgctgcacactaaccattaggtatgcaaatactccaataaaatcctgagcataccaattattcaaacccttgcttcactgagctaacataccattgccaaaaggtgtttaacgccaaaaagtgatgacagaataattagagtggttaccgcttctttggaggtttcagaatccctccttctttaagctctgttactttctgcttttgattccttcgaactgcctctggctgttcaacttgtgtggtcttgcgtttagatgagtcaccttcttcagttggcctggaaccttccccaatctcagctcttcttgatgattcaccaatctctaaaattcttgaaaatctagaagtgacttcatctgcaattggtggagagagatgagattctgacctgaaacgtggtgtaagagttgccatttgaggtttttcaaccatcaagttctgaggagtagctgttcttgaagggaacaggtaaagtcttgcagctgcaagctctgcagaattcaaaggaggggtagcagtccttggaggtggagttataggagcaggaaaggagtcatctgacagttgtgattgagaattcatatccgacctgcaaagctcctcatgtaaagccgctcttgtcctttctgccatgtcttgacctctaccatcatttcttggtgcaggaagaggaaccatgtaaggacaatgattccgttgatgagtgaaacgaagacaccgactacaaattcttctaagacgttcatattggaaacgtatgattgcagtctctccagaatcaaaccggattcgttggaagaaccttagtctatcagttataccaaacctgactcttactctgatgtatgcaatttgattagaagtagcttcctggaagtctatgaggacaatatgacccaattcctgtgcaatctcactaacagtttccacacaaacatatggcataggaattcccctaatctgaacccatagatcaatattggctagaaaatccaagtcaggaaagaactcccacctttgattgatgataaaccaattattaaaaagccaaggctctcttctttgaactgagatcaaatcaaatccaaattaaatatagaagattaaaaactaaattaaaattgaaaattaaaaaaaccgcgtttcactttaaaaaaaaccctaagtgctcgtctccttcgctttcctctgttctctcggatttaaaactcaaaaaaatcgtatttctccataagagtaacatatcactggacgtttcccaattatctcctcctacgctcccgactagcgtttatcctattccggtcgccgccggagaccttgtatctccatata

SEQ ID NO: 2317 - DNA, 3000 bp, Unknown
  misc_feature (1)..( 3000): cDNA_ID_3067006_gDNA_ID_1620518_Annot_ID_159353 3000 nt of promoter + ATG
tgtatagaggagaatgattttttttaaatcaaattataggaaaaaactatgattgtgttgaatagatagacactatatagtatactgcatgaaatttataggataaaaatatgggctatataatttaatgttttaattttaaaagttaagtttttagtaatttgggaaatagtaaatttaaatttgattaaattaatttatttgataaataagaaatctttctataagctaaatatttagaaatccgaaaatattatttttggatggtgtatttaatattaaaatatgtttggtttaaaaaataataaggataaggataaggatagtggaattaatagtgtttgacaatgagtatattatattcaataaatgaaaaataaaaatgatgagaacaattatgggcttgccacatcttttactatatagaggattccaaaaagttggaagaaaaacaattcctaaattgaaaagatttttttctttttcttgctatgaatgtaaataaaatctcaaaaaaaaaattaggagatgatatatatcaagatgaataaagacgaaagagacttaaaatttgttactgcttcccttctgtcatctttgtattatttcctatcatattgttaggaaagatttatttctttacatatgagaaatatgacagcatcaaattcaatgtgcatcaaacgttttgactatttttgattttcttccaaaattaaaacgacaaatttgattttgaaagcaacttttaaaaatacgtttcgccaaactaattacagtataaattggatctcatagccaataactttatctcatcaaacaaaactcaagtcatctatttctcttgttgcatagtcccccaaatattcatcatgtcgatcaagagtgttgtttctctcctagtagttgtatgcatcgcagcctccgttaatgctcagctaccgcagtttcccccaatcatgttcccgtttccaaatccgttcaaaccaagtcccggtatggcaggaagtcccgacttgagcaaatgttggtcaacagtgatggatttgccgggatgctttgaagagattcaacaagccgtaatgtccggcaaatttgaaggcgttggtcctgcttgttgtaaagctttccttgacgctgaagctaactgcttaccaaatcttccatccaacccgtttttccctcctatgatgaaacaccaatgctccaaaatggctagtcctccaaccaccaccgcctattagaatgcaaaaatgtagttgtgttttttcgaattttttgttagtcccagaatgttctagaagaagaaatgataataataatgtcttaatctaataataatgtctcatttcttatattgtgctccatatgattgatgttctttcttcttttgattgatgaatgaatctcaaagacatgttgcgtgatatctcttatgcggttatgacaatgctttctatataactcgacatgtagaccgatcacacacaatttagaatacatcacatacattacatactatcaaacaaaaatgttccaaaataatgaaaagaagatcacgcccaagctcttttcctaggggaaagatcagaagtcttgatatcatctattttagccgccattatgaaatcattcatgctcaaccctcctgcattattcatccaacaaaccgtcttaagaaaccatatattaaaactcaaactcgaacatcaaatatttgacataccgatagaagaggtaaatagttcagctcgaacttgggtaggactttccaagtgaagagaagggtaatgaccagaagcttcagcaaccttatggatcctgtttatgagttcaacaccgcacccaaaatccctcactttccacatacaccttattttcagaccacccgcttcattatccactatactccatcccaaaacctaaaacgtttacataataatcattgagattgatgtaccacatcattagagtggtaaccgtgaaccaaaacaccaacatgagccttatcaacactaatcatttcatttttttttaatctcgtaaccattgttcctaatatgtccctcatgatactaaaattttcattggcttttctatatttttgggtcacaattctatctttatagattagaaatctgttaaacgcagaatcaataacattttcacaatattttgatcaaccaacaaacttgtaaaatcaaaactcgaacatttttatactaagagagaaatagtataagtaccttgtggaggagagttctggcatcatcgccggacaaaggaggctgtgaagacgaaacaggggaacactgaagctgggagagagacaaaacagatgcgtttggtatcaaaatcttgtgctcagtgctttggcatcccaacactttatctccgaattgactcgctatctcctccgggtaagggtcacgagctccgaagtcaccaagaaaatcctgcgccagattagaccgggtcaccgttaaccggccgagtttacggttattcctacttacaggtggtaataaaccgaacactttaaggattgagcgagaaggttgacggaggaggagggaggacgcggagatgttacacggcggtgatgatgacgtggcggccatcgggagctgtgatttgctctgtaccgaagataagagttttggtttttagagagcgaaacgattttcagaccactggactgagttaaatgggtgaggtgccacgtaatcactaatgactaatgggaaccacaataaactttcgtgggaccgactttacacgtcacgttttaatctgagaagcccattgggtttgattgtacttttgtgtccacttttggtgaatctacttaagatttcataattccgaaagtatcctttttgggtatctttaattacaaacaaaccttcccttctttcccgatttcaagccctaaaattccgagacttctgtttctcgctttaacgacagtcgccgagtgagagatatagagagagaaag

SEQ ID NO: 2318 - DNA, 3000 bp, Unknown
  misc_feature (1)..( 3000): cDNA_ID_3067091_gDNA_ID_1620519_Annot_ID_159387 3000 nt of promoter + ATG
cagtcttaattaatgttatcttcctttggatgtaattggtaacaaattgcagaaaaaagaccatggatgatcttcatggaagaaatggtcgaatgcacattggtgtagcgcaaaatccaatgcatgtgcagtatgaagatcacggtttgcaccatatcgacaatgaaaacagtatgatggatgaccatgctgatggtgggatggatgaaggagtggagacagacattccttctcaccctggaaactcagctgataatcgtggtgaagttgtagaccgtggaattgaaaatggagatcaattgacattgtccttccagggacaagtttatgtttttgaccgtgtctcgcctgagaaggtaactttaagttaattttggttctttgatgttttagttttggatacatatggtcaacgtatccacctggttggttttgtttttcgcttattgaagtgctgctcaatattatgcaggttcaagctgtgcttttgttacttggtggaagggaagtaccacatacactcccaacaaccctaggatcacctcatcagaacaatagggtactggtaataaaagatttaataccatatgggaaatcagtttattccccagtttgttgctgactaataaatgaaccagggtctatctggtactcctcaacggcttagcgttccgcagcggttagcttctttgctcaggtttagggagaaacgaaaagggaggaactttgataagactattcgctatacagtcaggaaagaagtagccttgaggtacgtttatgtcaagtactagcttttgtgtatgtcgagcttttgagatacgtctgttttgcaattaaggttttgtttgttcatgcagaatgcagcgtaagaaaggtcagttcacgtcggctaaatcaagcaatgatgattctggatccactggatcggattgggggtcaaaccagagctgggccgtagaagggactgagactcagaagccagaggttttgtaagttgaaaatgctttaaatttcttacaacagttatattaactttagtgaactcgttataaaacctcaattaagtctaatacatggaaacaatttatttggtaaccatttaatgacgctcttttcacttccataaactttgtctatatacgtcaactctgaaatttatagttatacttatcatgatggcatcactcattcgatacctgcaactgataacttatacttgtgagaggataaaaataactgaaccgactatgttgttgcatgttaagtcattgtagttgatatgaacttatttatagcttggtatacttggaaagcttgtctctgttcttattcttcgtcaaatggttgtgaacatgttaagatgtcgacactgtggaacaagtgagaagtcaactccaatgatgcgacgtggacctgatgggccaagaacactttgtaatgcgtgtggactgatgtgggcaaacaaggtaagctaagagtttcttagttcacattgatcacctcgtctcgtatcacttttttgactcattgatcaggcctatatatccgagtatgaacctaacaataacattccctttgactttataatatcaggggactcttagagacctatccaaagtccctcctccgcaaacacctcagcatctatctctgaataagaatgaggtgagccgtgagcgcagtatttcatagagctggagttttgatttgcttattaagagaacatacattcattttttttttctcaatcacttttgttgcaggacgcaaatcttgaggctgatcaaatgatggaagtaactggtgacattagcaacacacagtgagaactgagaaaccattggaagcaagaaaggatctcaaacaaaaacagttgttatcatttcatttgatgatggaatcgaatctgagttgtgtttagggtttctctgggttaatctcagtctatgtgggcacattttagtcttctacaaattataagacactcttcacttatttagaagctcactcatcagaaaagaaaaaaaaaactttgctcagtctctcatctgtgtgtttgattatattttcaggcagaaaacttttttttgttcttgtatttgattacaattagttaaatatttaagacttagtagagataatgcaatctatgtataaaaatagaaacaatgattggttatgtcgtgcaacccaagtgaccttaatgtcgtacacacgttcatcaggttaaaacgaaatttctcagcaacttcactattctctctgtcacattgttttattcttttccattatctttattggaaacttgattagaaagaactgattaaggtatgaagataattagtgtaccattcttcacatgatacgaggtgaacaatagtatatcagaatactagaataattttataagttataaagatgaatggtataccacttattacaaaacgaaaacatagttagatctgagaagaaggaaagatttttgttttaaaaaatgagatggttagatatatgccatgttaagagatgccaccatgttcttcttcttcttcttacccggaaaaaactctttcttcttctctttcccataaaaagaaacaaaaaaaaactaacttcccacaaattttgccaaaccaaaccaaaaatagtaatgatctcattcaatttgaaccctctctccattttctttcatagtttttttttagggtaaatcaaaatattaatgttggttagaaactcaaaaattagtttctcttttttttctctgtgattgacagagaggtaagagaaaaaaaagagagaaagtgtttcggtttttgttgccttctctcgagttaggccttctctcttccgtcacaccatcattttttttctccataacgaccaaatcataaaaccggtcgttcctattttttctttctctgcgttttttgtttcgaattcttcaatagaattttaaaagaaagaagaaagctgggtgagacgaaggaaggaaga

SEQ ID NO: 2319 - DNA, 3000 bp, Unknown
  misc_feature (1)..( 3000): cDNA_ID_3067083_gDNA_ID_1620519_Annot_ID_159394 3000 nt of promoter + ATG
gtgtttaattgtgtgtgtgatttaggttgtgttttataagagaatcaacaaagtgttcttcactgactctattcctaaagctccatcagggaagatattgaggaaggatctaagagcaagactagcaaatggattaatgaactaggttttatatgatccacgtatatgaatgcaatcttatcagaaaaatgaaacaaaatttcgttttgtgaacaaaggaattaaacttacacgtaaaagaataatatttgtgctttttcctttatgtgtatgtaatggataaatagttgtatcttttgtttggtgggaatgatgtaacctttccatattgtggcatattgctcgaatataatcaataattgccttaaaaagtaagcaaaactacattcacccaacaggaataagcatcctagaggggagggaaatacttgagtatcaaagactagagacggccacccatagagaatagaatcaagtgatcatgaagtcgtgatatatcagaatttggagttacaatttgcatagagacaatccaagggaagatgcccatttgtgagatggataatttggttagctgaacaataagtttcatttgcggtacttaaagagttactgaggttttgtcgtgttcctataattaaatctaatcggaccggtaagcagaatatgctcgtgtgttaggtgaagatttgtcgctattgcaatccattgagattatagtaatcaaaatgacactaaaatttatatgatagagaaattacaacacgttcgtggtctttgactattggtggttctataagtcttatatttgcaacttttgagtcaatgtcatatttaggggccaccaaaattccgaatattttattggtaattctacttaattatttggtgacaccaaaactatagtgacataaacagtttttttttttttttttgggaaaaggcgatacatatgtttataacattttttaatatacaacactatttacacccatgtcgtcattattggggatccattcattattgtttcctcttcttcttttaggaatcactcatccaaatcgatatccagtattagatttaatttaagtatgacttattgagaacttataagccttaaggtatgcacctaagacgcgaatttatgagcattgggacgagttagagaataatcatgtgatcatttataaaaatcaaagacatacaactacaattttaaacctagcaggaacggtggtagcaacttaaatttcattatttcaaggcaacaaccgttccaataaaatacaaaaaggtggaaactactgcaaggctaattcatattttctttacatttgtccttatattttggagaattcttatgttttagctatccgtataattcttatgtttttggcatttgccataataaatctatcacaattgtttttggaaaatattttctaaattgttttatcagaagatttaggttaattttaatctattgtatcaaatggtgaatattttgaaaagtataacccgatctaatgcagagtttgtaatttctccaagttgttttgcaatagtcaaaactatacatccatggaaatgagatccgggtcactataaaaaactaaacaacttggtaacgacttgcgacctttttttttgcttcaagtccctgttttgtttggttatcgaatacgcgttagtcgcttgtgaacatttcgtagaaactctgcataatcaaatatgtaaaattatctcatgctatattaaaaagatggttaattaagagttaattgcaattttcttatattaattagatatgaattattttagattatcagtcctgcgtttacaaaaggccaattagatatatcatcactactactttggaagattagtaaggtaaatacagttttgtatggttatttcttttggggtgttttttaaattgtccagagagcagtaaataatatcctaccaaacaaacaaacgaacaaaaaaaacagcaaatattattgaccaagaaatgcaaatagattatccttcgaagatgaagtcacaatcaactctataatttataaaatatcgtacaaaacttatagtcacgtttaaagtataagtgtataacaatagtatgaagtctgcatgctcaaatatgagtattcacattatgctcatggagaatttttggaggtcaactgcggaatgtatatagctattagctactacgcgcctttcttaatattctcgtataaattttggtattattaattttataagccaagttgtcaatttcataactaattattatattaaaattaaatttcatacaaggataacatattaagtatacactgagatatatattaacaaattttagtgttaattaaaaatagtttccgattattatgatataaaatacttattaagttataatattgacaatttttgatgaagacacgtagaaatggcccactcaccaactacgtagcaatggcttatatacaaaatcattaagaaaatcgcatctaatgggaaataaatcactattactataaaacaaaatcagccttcgtccattaattaataattactaatccaaacgtaccattataaaaacccaaacaacagaaaaaaaaaggaaagaaaagcaagtgttacattttgaaaagaaagaagtaaagaagaattagaatctccacacaaatggtgctccaacaacaaacgcattttctcacaaagaagatagatcaagaagacgaagaagaagaaccttctcatgatttcattttccgatctaagcttcctgatatcttcatccctaaccacctccctctcaccgattacgtcttccaaaggttctccggcgatggcgacggagattcctcaacaacctgtatcatcgacggtgccactggccgtattttgacctacgccgatgtacaaaccaacatgcggaggatagctgccggaatccaccggctcgggatccgccacggagacgtcgtaatg

SEQ ID NO: 2320 - DNA, 3000 bp, Unknown
  misc_feature (1)..( 3000): cDNA_ID_3067079_gDNA_ID_1620519_Annot_ID_159395 3000 nt of promoter + ATG
acaaagactgagatttccaaatcaaaagatataaaatctttctgataaaaccattctttttgcaggctctagagaagtgtcagctcaagacaacgattagcaatcttcctaataaacttgattcttcaggtaaatggtaaaaaagctgtaatattttcatttcacaaaaaaatgggtttgatgacacttaggtttatgttttttcattggtgagaagtgagtgatgaaggagaaaactggagcgtgggacagagacaactgttctgtcttggaagagtactgttaaagagaaacaaaatattagtgttagatgaagctacagcttccattgattcagcaactgatgcaatcattcagagaattataagagaagagtttgcagactgtacagtgataacagttgcacatagagtaccaactgtcatagacagtgacatggtcatggttctctcttttggtaaacaacattttctctcattctttcatctcttaaacctactcataatgaccaatgaatgagtttcggttttggttttggataggtgatttagtagagtacaacgagccttcgaagctaatggagactgattcttacttctctaagcttgttgctgagtattgggctagttgcagaggaaactcttctcagaatctccaattataagccagctgctactgaaactgaagtgtcagtgattgttaatcacgttcttcatctaccattgtagttttgagaaaaagatgtaaaataaaaattcaagcatggataatgatagtagagtagctcaccaacccctacatgaactttgagacagcgattacgaccaatactcaatcattgctagaaagacaaaactacccctacataaaaaaacatattacaataataacatttcaccaaccacaaattcttttatatggaaacactgatcatcatgctctgtttcaggctcaaacgttactttccaaaacaatcttttcagttttagataaaaatttgatattaacttctgattcatgacgacacaagatgtgatagtcaatgatcagaatgatcagaaacagtgtagtaatgacgtcattttccgatcgagattgcctgatatatacatccctaaccacctcccactccacgactacatcttcgaaaatatctcagagttcgccgctaagccatgcttgatcaacggtcccaccggcgaagtatacacctacgccgatgtccacgtaacatctcggaaactcgccgccggtcttcataacctcggcgtgaagcaacacgacgttgtaatgatcctcctcccgaactctcctgaagtagtcctcactttccttgccgcctccttcatcggcgcaatcaccacctccgcgaacccgttcttcactccggcggagatttctaaacaagccaaagcctccgcggcgaaactcatcgtcactcaatcccgttacgtcgataaaatcaagaacctccaaaacgacggcgttttgatcgtcaccaccgactccgacgccatccccgaaaactgcctccgtttctccgagttaactcagtccgaagaaccacgagtggactcaataccggagaagatttcgccagaagacgtcgtggcgcttcctttctcatccggcacgacgggtctccccaaaggagtgatgctaacacacaaaggtctagtcacgagcgtggcgcagcaagtcgacggcgagaatccgaatctttacttcaacagagacgacgtgatcctctgtgtcttgcctatgttccatatatacgctctcaactccatcatgctctgtagtctcagagttggtgccacgatcttgataatgcctaagttcgaaatcactctcttgttagagcagatacaaaggtgtaaagtcacggtggctatggtcgtgccaccgatcgttttagctatcgcgaagtcgccggagacggagaagtatgatctgagctcggttaggatggttaagtctggagcagctcctcttggtaaggagcttgaagatgctattagtgctaagtttcctaacgccaagcttggtcaggtttgttttcctaatttttgagctcttattgatatttttttcttggttattttgattatcatttatattttatttttctgaggaaatttaatatttcatgtttgttagtgatgttatgcaaattctgaactttattacatttgtggcccctgaattccgaaatattggacaatgaatattatggtgtttgaacccattttattcaaattttgttggtaaatgatttaaaacttttggactatattacttgatttgtactctctgcacaaaggccatactaattttctccagaaggatggatgcattttattcagtttatttactatatgaaaccttacatttggaatatggacattaatagacttactattttttattttgtttgaactagatatgaaatcaacacaaccaaagttaatgaaagatttttgaacatttttaaattgattttggactgttttaacttttagagcgtctactaactctctttttaaaaacgttttaatttttaaagccacacctactagtttcagcgttcataaaattagtttagctaaaaattaagatataagctttctatgataaggacttaccaatttcgagtttgagataattatttgcgccacttagttagcataatgaataccactcgagatcatttccttagttccacctataggctatgaactttttgatttaaagattattatacaattctaataactttttgtcccaaaagttataaatgtattttgaaatatttgttgggtaggtgagataagattttgtggtataggtcatgtggttggtcgatctttatttgaattttttatttatcatgcaaacacaaattgtgtttgaaagttttaaaaaattgaagactaaaacggctctgtttctaaacttaacgttttggatgttggttactacgagcagggctatgggatg

SEQ ID NO: 2321 - DNA, 3000 bp, Unknown
  misc_feature (1)..( 3000): cDNA_ID_3067072_gDNA_ID_1620519_Annot_ID_159397 3000 nt of promoter + ATG
attaatcataccgatagattaatgataccgtacgtttactgctaattttttcgtttttttttatagtgataaaaagatttacctgaaataaactaaagtgtgtatctttctgaccacttctgcgattaaaggagaaagtaaacgatcaaaatgaagtaaatagattaatataccaaacagataaaccaggaaccaatacacaattagctactaggtcaaacataggggtcgataagagattcgataaacaatcttcatatattaagagaaacttctacaaataatctactattaagtacgtacttcatattttataagatatgattaacaaatatcccggaatcaaaaaactcaaaaatagagagattcaataaccgattataaatagccgaatttcctgatatatgttagttcagtagaggcatacacacatagtcaacaaggtagagacaggaacaataattggtacaaagatgaaacgaaagagatgtgaaatggaagagacaacgaagaagaagaagatgacagagattggatctgccattgaagaactctctgttctttccatagccaagaccacaatagttaccaccgaaaaagaagccatcaacatcatcaatttacctttgaagcctctcctatctttctgcaacattatagtccaagttcttggtaatttataaatctccataaattaaaattaatccttatgcgtttttttccctttccataaatataaataattatttctaaatactatgttttaagttaacgttaaagatagtttctgctcttccgaatcttgttcactagtactgcttggtttgcttgaattagttcctccaatggttgtcctgaaactttgttgattcattgcagataagattggcccgacaatggctgttctccgacatgacattgatcaaaatattcaagtaattaattttgtctctttcctttattttaatactaatatatatacatcattttcaatgctcgtaagctcttgcgtaaccctctttagatatatactccatatatactaaattactaagtacatatttattaagaaaacaaagaatgctccattttttttatcttgttagaagaaaaaagagtatttgtatacatacattattttaccttgttacctaaaaaaatgcaatgtatatgttgcgactcgtctcccaatatctctttagacacgtagacccatcgatacctttacgttgctttcatggtcatttttgttatactctctctctctctctctctcgaatgaatggacctcgtttttttcctccacactcatttttcttattaattatcaacaattattgacctattatttttattgatttttgttgttgttgttttgtttaactgttctgtttgtagaggttagagaagatgtgggaatctgatcctcttgtgtactcaaatttagttgagatactgagaaaagaagccaaggagggatcctctaggaaacctaaaagttgtagtagagctgctctttggctaacgaggtacgtacgtatcattttggttcatatatactccaaattgaatatgaacccacaattgtttttaaactattgattcccaaactatatatatagagcgatggattttacattggcgctattgcaacggctggtgaaagacatgtcacaaaacatggaacaagccatagaagaatgttataatttgactataaaaccatggcatggatggatctcttctgctgcttttaaggtaattattacatggtcattataagttgacagtaaaaacaatttattctcaaattattttatgtaatatgtttgtgtttttatgaaaggtggctcttaaactggttccaaacaacaacacattcatcaatgtgcttgcggcgaaagacgagacacaccaaatggtccaagatgatattacaagtctaatttcgttgctcattccacttctaagccaactccattctattttggtaggcaattttttttttttttgtcaacagagaaaaaagttttgtcgctttgtgtatctatttataatttcgattattgttattgtttttaatttgggtaggaattatacgaagtgagcaaattaaagtcaccgtgaggaagagaaccgaagaaaaagactgaagggtatagttttggttattgtaacaaagtctaacttgtagcatcactcctctttgataagttttattaatctctcttttttaacgagttactgatctaactaactgttttaccatgcatacaatgatgatttccgtgtatatataagcccatgcatgcacctaatgaatagtcgattcataaatgttttaaaaaatctgaagattgggagcccatttacattactggcccaatttgtgaaacctgagtttttcttttttggtcaaccaaatggttcataaaaatataaaaaataaaaatagtgtggaagatgaacatattacacggctcgagaaagtgcaatgtcccacagacaccaaatccttaaacgatgcttctcttctcttacttactcagtcactactagcctacctctaaaccaaaactgccagatttgtgtcgtttttaaacgacaaagaaatcagtaaacacatgtcaaatgttaagtaaacaaagccagaaaaagagaaaaacagagtttttgttttcttctttctttctcacctctataaaatgacaaaagatccatcattatcgtttaattcacatcggaagttttataacaaacagatccatgaatttcattacgtaagcaattacgtaatagaattatttgtttagagatcgacgagaaatgccgtctaatttcgtttcaatcattctaacgaaaaaagtagatgtggacttcattcaatacatcgtttagcttaggtaacaaacatcaacctcacatttcagtcataaaggcacaagctttttctttctttttttttttcattgattgagctctcttgcttctcctacaatg

SEQ ID NO: 2322 - DNA, 3000 bp, Unknown
  misc_feature (1)..( 3000): cDNA_ID_2153493_gDNA_ID_1620519_Annot_ID_159405 3000 nt of promoter + ATG
caaacattctgatgccttaggaaatgttcgtaaatctgacaaaggggaccattttccacttgaaatgctttctagtcgctcaggaaaggccttcagggacaatcagagagatgatgttcatttgaaaaataagtttccaaggaataaaaaagatggtgagtcagccattcgaccttcattacctaccgagacatccgatagaaagcccgatgaactggatggaagtgacaaggatcccaagaatgtttcaggcttgagcataggttcttctcccttagatagccagagaacatatttggcgaaattacctaagggaaatggacctgtcctccaaaaacaagtttcggaattggagttgggtgaactccctgagccattgggtgaagatacagcattgaagccgatcgaagagaaaacttcgtttaggcagtcaaatttaaaaccaagcacttcagagaaattgggtattgactcggataaacgaaggtctaaaaaatctgactcaaaaaaggcagctcctccacatacagtaaatggtagcaacgaacacgttgttgaagattcagaaagatcccaaaagtgggctttgcagtcacatgggcagaaccttacaggtacagatactgaaatcagctcacagaataaaaatttagaagatgcagcttataaatctagacaaaaagatagtagagcaagagtagggaacagtgtggaaggttatggagaaacaaacaaaaaaacgcctgttgtaaagcatggctccaaacgagcatccacatcccgctcttcaagggagagcaaaagacattcgtctgtctcaaattcaatcaatggacacaaagatgcaacttcaataccaggtggcagtgttgtccgggagaaacaaatgacatctttcggtgaagaagactcttcttatttgaaatacgagaaagcttctcctgagcttaagggacctattagtgatcatttgcagtgagtaaaatgaaacttcaatgtttggagttataaagtatttctgttttgagtagataacaatggttttgtttttctatttcaggtataaagcctatatgcaggagtataatgataaatatgatagctaccactccattaacaagatattagagagccacaggtagctagatgaacactcagatcatttgtgttgtcctagattgtcagcttttttgaactttatgtttaccattattcgcagaaatgactttcaaaagttggggcaagaccttgggtttgcaaaaggaagggatgtggagagatataacaaaattgtggagcagataaaggaatcttattgcaaatatggggaggtaatcttctatctataaccacttcatagttatttgtctcttatattttgtattaccaaaatatgaaacttttgtaatatatcgttgaagatagaactcaacttatataccgaagttttctttgcatcagatgatttttagcgtcgtataaaaatttggaatgataaatttgtttgcttgtgtatgatttgagaaaatttgaaagacatgaggagctgaatattatcctattaaggtaataggttaaattggatttgggtgagaaattgttacctagattgatcttcatgagaagaagtgactatattatattgaaagggaatctctcagcttatgtgcattttatttacggatccgattatgtgagttttttttacgatacttgctgttgactcatacttaagcatttttccccctatttgattgtacactatgatacttgatgatggctttcttatatatgttatctctcactcaatctgcagagacacaaacgtttgaagaaagtatttgttgttctccacgaagaattgaaggtgagttacaaaactcccctataaaccgtagtgttggttgttcatctcccacatgcattcttactttagatgtaccgtgcatcttcatggatggatactaatgaattatgataacctcttgcagcacctgaaacaaagaatgagagactacgcatcatctcatggaaaagattgatggaaactggaaccaaaactctcctttggtggagtcatcttgttgaaacattagctctgtttttctttctttcttgtgaaattagaaatgattcataggcccaattttgtgtgagttgtacttaggaggacctttggtagattttattcttgttgcagttggtttagttggagcgctcgataaacgaatatgtacatacatgggtatcaagatcaatgtagattcttctggctctgctttaatttaactttgataagtcatcatggcattttggtcttccatgtgaagcttaacagagaaagcttaatgggtctgattggtggtgacctaaaccattaaggatgattgtacgtactaccattttctgacagcgccaccgccacggttgcataaatcgaaatcactgttgtagtcttgtagaaggtgaaaaaaaaaagtaacctaaaggaaaatctaaaacgcagtcgttttgttttcttagtttggtatcaaaaactctgaaatcaaaagaaagaagaaaaaaaagtctctgttttttctctcttccctgtttttctgtgtctttctcctccgtgttccgtcgtcttctctctctgcgttccttcttgaagccggaggaagcccaaaacccttggaataaaaaacaacggcctctctgctactgattgatagaaaacaaaaatctcaaacctagagaagaaagcgacgtactgtatattctcaagactaactggatctctcgttgatcttcaataaaccctttttgcaatcagtctcataagagtctacaactcgtgggcttctatttttcttgttggggtttcaacgttttcctctgtgaagaaagagattgactttcatggagatgaacctctgctggaatttgtagattcaattagggtgttttctgggttttgtggtgcttcgataggggtttttggtgcgttggtggtgggtg

SEQ ID NO: 2323 - DNA, 2479 bp, Unknown
  misc_feature (1)..( 2479): cDNA_ID_3067060_gDNA_ID_1620519_Annot_ID_159408 3000 nt of promoter + ATG
ctcttaatgtttctttatgaatagcataaagagattatagtgtataaatagaaataaaggatttgtcgggggtatgtccatgattctgcacccatgattaagagatgaaagtggtccattatcacatatacatgtcaaaacaaaacatgaaacaaaatttctaggagttaaagagcaagacgacgacatttttagaaaccgataacattctttctctttcagatactttggctcggtacggtttaaatggtccagaccggagctgtacagtaatctaagctatctgactcttcttcactcttcttggctcttgctctctcccttccattattgaatggttcacacgtgaacacaacgttctccataagcacgtggctcttcgtaattggttgtgatcttggaggatagtagtcccacgtgggaaatcagcatggcgtcatattgtggggactcacagaagttcttttcttttctttctttttttttggttaaagaggatctaaaacttttttttcgtttttgtttttgtttttaacttttttctttcctcttgtgtattgtaacatcaccccgttaatgaagttaaatattatcctgtaagaataaatgaatgttgacaaggaaacgagcttcgatcatatttgtaccttgacaaacacattcatatacaaaattttcatacgtgtaggcttgtagctccacattatatctataacaaaaatccggttaggttacattttaaaagaatcagaattctaaatccatacgaattgaaatttaagaaaataattttagtatataaacccatactaaatttagtttatttctcacatttttatttattgtgtttgaagtctcaatgtgctagcgtgatctgcaatattaagtttgactatatcttttcattgtattaacagaaatatttttttaaaattttgcttaataaaagaaaatttcatattatttttattagtaacctaattcggaagttttgttttatattcttttaacaaaaaaactttcgtaattttatctatagttgaacgcgttaaacagtcaactctaatgaataatttacgaggtagaataaaaagcttaaaatgatagaagttatcacaaagtaaaacaaactcatcaagaagttgttgtaattaaacttatcattgtatactattgacttagttaatttctattgttacaaaaatataagcaatgttatttttattagtaacctaattcggaagttttgttttatattctttaaacaaaacaacttccgtaattttatctctagttgaacgcgttaaacggtcaactctaatgaatactttacaaagtagaagaaaaagcttaaaatgatagaagttatcacaaagcaaaacaaactcatcaagaagttgttgtaattaaacttatcattgtatactattgacttagttcatttctcttgttacaaaaatataagcaatgttatattatcacaattcacaaacattatattacatatcattaaataaataaataaaaacctttaatcacgaaagtaattttcagttgtcatcaatgagatgactcacagtctcacacggtcactggtcacgttgcttcaccactgtctccaagtaagatgtctaaaatcttgcaaagggccccaaagactcacactaaatgaaactagtgggctcaagcccacgtatgcacacgctctcttaacacgtcaaaattttaaaaattccacaacgagacgtcgacctttcacgcgcttcggcacgtggaaatccatggtcctttcctatgggttttgtcctaaaccatccttcggtccgaccaaaccgcgtaaggtaagaaagactccgaccgaacacggcaccttctcccacaatagtgtaaagtgatcgtgatcagaaacagatatttcgctaaagattagcccaatttaggaaagatgatgatgaagttagccaagagagagataacaaaaacatgtggctgtgtatgtaaaagaccgagtcacccgaacatctccaccttcacgccattctcctaccactcggacctaaccaaccaataccttccacgtcatgtacaatccgagttcccgtgagatagggatctttacttgaagcaaccagacatgaccgcagagtcacacacacacacacccctaagctttttgtcgtcccctcgtatggaatccattgtgggacgacacaaaaatatcttcttttgcttctctgctttcttcttcttcttcttaaaatttgtttctttcaggtggatttgatctccatctacgtaaaacaaaaacaaagtttataatctttttggattttgggattgatctaaagtgagatttcgatcttggcactaggttttgcaaggttacctaacaatttctggttctgatttcatttctttaggttacgtgtaagggaaggaattgttaatagggtttgtttgtgagcgtagggaaaagatg

SEQ ID NO: 2324 - DNA, 3000 bp, Unknown
  misc_feature (1)..( 3000): cDNA_ID_3067068_gDNA_ID_1620519_Annot_ID_159402 3000 nt of promoter + ATG
tgactgcaagtcaatttctttattaacattaattgcttcgcgcccagatgtgtcccttaatacattatttttccaggctgatggttctttttcgatcatgttcactctgccctttgtctggactggtgtgacattctcgttagctgcatgagttttagccatattcccaatcccatatggaggggtattgtattgattactaggagacggtccgggtgaagctgatagcctatttttcatagtaggggtagaagcccctggtctgaaagaaggctttggacctccgactggaactgtcacagtaccacaagtgaaaaactgtagcattagaaaaacagcaagggaatataaatagcatccaacagtatttgaaaccctaatgtgttaccacaggctcgttgcaaagtttgtttatatatacctggtggtggatcaactttccgcttcttaggtggaggttccttcttctgtttatttgacattctccatggacttcctgaaagtacatggtagatgttacaatattattggtatacccaaatataatcacatgctagataataaaaagttttgaacccaaaagataagaaaacctgccacatagtaaaattaagcgcatgggtttcagtttcaaacaagaatggctatctactctcatgttcttaaaccgccgcattgaaaagaaaaggagaaatgttaccttcagcatgagctaactgcttcgttactgatggattcccaggatctaaaacaatggccctgacaaaagcaaaagtataagggtatttcaggcacaaccactttgattagactaaagttatggacacaaaagtatgcaatttgttacacacagtgagaaattttctgtgagtctggctttcacgaaacagctcaaaatacctcaagttgaaaaaatatgagtaagctaaaagagaaacccatttaagccataactaactccaaatgtaagtagagactgacatccacagcagcttagctgcaataagatgaacaatgcgtataccgatagtttgttcacaactccaccaaaggttatatccttatatgctactgtgccaagacccataaaaagactaccctacctatagaagactgcaaaaccagaaaaactaagagagcagacacctttgcagctaaaggacaggctatgcagataaaaagttatagacattgagatgcaacaaaaatgtttggttagaacttgtacttgcgtgatttggttctctgttcagcttcaactgagcgcatcttcatatggcttgtggttgactcatctagagttcgtaggacgttcaattttcgccaagcacatccagcctcaatcagcaaaccatttccatcttcaccactttgatgttcttcatatatatcacataactcacctttctccccagaccaagtaaatttgaactcctttccaccaacattaattatctgtttatatcaagatccaaaacagcttcacggtgtcaaaattcaaaaaaaactaaataaaaacccaaaaggatacctgaaggaaaggcatagtaacaacaaaacccagatgcagtgggagacaaatgaccaaaagaaatgcagaagggcgttgataaattcaattgacaaccagtactaccggcaaaaccacagttatacaaagaaacaaagttaccagtagagtaaagagacaccaaagcagcaattcaatgagtaaaccaacataccatacaatacatgctcaaccaataagcaagtcaacgtctacaaagaattggccaaggaatttatgatacaatagtcacccaagtagcaacggaatcttcatcaacaattctatgcaacaaataatcttctccagggctataatttagaatggcgtaaaaggttttccacaggataggaacagctatagagatgccaaacactattgggttcttgtccaatatcacattaccatctaatttctataggaacaattgtccccaatttcacttatctagggtaccttgattccagtgaattgccaatatgttcgaggggtataaactaccaaaggaagcaaattcaagattcagccaacaaaaaagagcaactagcttgaagcaattcaactcaatctagagaaatcctctatctctagattttagaattcagtagaaactcacattctcagtgctattgttaggaaacgcatcgaacttgatcttggcagctccaccttgtgcctccacacgcttgatctcatccaccaaatcaggagataaccttataatcattccaaaagccgaagaactctccctcggaacaagattaaacgtttcctcaaccgtccgcgacgacaccgtagtcgacgcagccgccttaacgctagtagaattactccgctggcgtggagcggcggagccaccaccaccaccaccagaagacatcctcccgatgggagaaggatgtcggtttgtaggaggagggaatgaattacggttacgggaaggtccactgcccccaccaccacttcctcctctaccgccacgtttcgacgatcctttgaacataattccggtcaaaattactccgccgtcactgcaattgcgttaccaacatgtattgatgcatacgtgtattgtagagattgaactgattgagacgcgcgagcagagaagagagacgagagacgatgatttgaagaaagagagagagagagagggacccaaagagcgcttctgttcttcttcttcttcctcttctttttttttcctttaattttagatttatttttatgtcagcaaaacgctgccgtattgggttttaggtctgttgtctttctgaagcaagatggtgatcaaacccgacccgaatcaacccggatcgacccacccggttcggatactggcatatatagagacgaagaaagaagaagaaggcaagttttttttttttgatatagcttgccttggcttcaagaaagaaatcaatctcgtttctcttcagcatcaaacaatg

SEQ ID NO: 2325 - DNA, 3000 bp, Unknown
  misc_feature (1)..( 3000): cDNA_ID_3067076_gDNA_ID_1620519_Annot_ID_159396 3000 nt of promoter + ATG
tatcggtgtctctcgaggatggtgtcttctatggtcaagcgtattgggtcaggttggctttgtagtttttcaggctgcatcaacatactggctggcttttgccatcgggatccctaaaatcacgaatacaatgcttattggagtctatagcattatatcaactcttagtgctggttttgtatatgcgagagctattacgactgcccatcttggactaaaagcttccaaagccttcttctctggtttcacaaatgcagtcttcaaagccccgatgcttttctttgattctactccagttggccgcattctcacccgagtaagatctctttgcttataattatatggaatacactacagctcaatgtatgatatagttgaatgtaacatgtgcaggcttcgtctgatttgaacgtgttggactatgacgttccatttgccttcatatttgtggtagcaccggctgttgagctcactgcagctcttctcatcatgacgtatgtcacatggcaagtaattatcatagcccttcttgctttggcagccacgaaagttgttcaggtacatgattcgattctacttctgtttttagttgttttatgcagcaaataagtctgtattaacatccgcttcttctttgaaaaaaggattactatttagcctctgcaagggagctgattaggatcaatggaacaaccaaagctccagtgatgaattatgctgcagaaacctcacttggggtggtgacaattcgagcttttggaaccgcagagagattcttcaaaaactacttaaacctagttgatgcagatgccgtgctattctttctgtctaatgcagccatggagtgggtgattttgaggatagagactctgcagaatgtgactttgttcacttgtgcacttcttcttatccttattcccaagggctacatagctccaggtacatgaattattataactcatcatatcttcctgcagcctgcaattttaacttacctgttttcacagcttgtgtcagtatagcgtgagcatttccttgaaaaatttgatcaaactgaaaggttgtgcatgaacttgtgcctttgtgttgcaggcctcgttggactttcgctctcctatgcattaacactgacacaaactcaggtgtttctgacccgatggtattgtactttgtcgaattccatcatttcagtagagaggatcaaacaatatatgaacataccagaagaacctcctgcaattatagatgataaaagaccaccttcctcatggccttccaatggtacaattcatttgcaggagcttaaggtgagaagtaaacataacttgttataagatgatagtaatagttatgcaaaaggcattgatttgcatcatttctttgtttcagataagatatcgacccaatgctccgttggttctcaaaggaatctcttgcacattcagggaagggacaagagtaggagttgtcgggaggacgggaagcggaaaaagcacattgatcagcgcattgtttcgcttggtagaaccagcaagtggttgtatattgattgatgggattgacataagtaagattggccttaaagacctgagaatgaaactgagcatcattcctcaagaaccaactcttttccgtggctgcataaggacaaaccttgatcctttaggtgtttactccgacgatgaaatatggaaggtgaaataacaaacaaagactgagatttccaaatcaaaagatataaaatctttctgataaaaccattctttttgcaggctctagagaagtgtcagctcaagacaacgattagcaatcttcctaataaacttgattcttcaggtaaatggtaaaaaagctgtaatattttcatttcacaaaaaaatgggtttgatgacacttaggtttatgttttttcattggtgagaagtgagtgatgaaggagaaaactggagcgtgggacagagacaactgttctgtcttggaagagtactgttaaagagaaacaaaatattagtgttagatgaagctacagcttccattgattcagcaactgatgcaatcattcagagaattataagagaagagtttgcagactgtacagtgataacagttgcacatagagtaccaactgtcatagacagtgacatggtcatggttctctcttttggtaaacaacattttctctcattctttcatctcttaaacctactcataatgaccaatgaatgagtttcggttttggttttggataggtgatttagtagagtacaacgagccttcgaagctaatggagactgattcttacttctctaagcttgttgctgagtattgggctagttgcagaggaaactcttctcagaatctccaattataagccagctgctactgaaactgaagtgtcagtgattgttaatcacgttcttcatctaccattgtagttttgagaaaaagatgtaaaataaaaattcaagcatggataatgatagtagagtagctcaccaacccctacatgaactttgagacagcgattacgaccaatactcaatcattgctagaaagacaaaactacccctacataaaaaaacatattacaataataacatttcaccaaccacaaattcttttatatggaaacactgatcatcatgctctgtttcaggctcaaacgttactttccaaaacaatcttttcagttttagataaaaatttgatattaacttctgattcatgacgacacaagatgtgatagtcaatgatcagaatgatcagaaacagtgtagtaatgacgtcattttccgatcgagattgcctgatatatacatccctaaccacctcccactccacgactacatcttcgaaaatatctcagagttcgccgctaagccatgcttgatcaacggtcccaccggcgaagtatacacctacgccgatgtccacgtaacatctcggaaactcgccgccggtcttcataacctcggcgtgaagcaacacgacgttgtaatg

SEQ ID NO: 2326 - DNA, 3000 bp, Unknown
  misc_feature (1)..( 3000): cDNA_ID_2153439_gDNA_ID_1620519_Annot_ID_159389 3000 nt of promoter + ATG
tactacaccagttgtatggcaatttttcttctcaagtatgtcgattctaaggtctactgctatgaaacggccaccggatttacggctatgagtcctcaaccgctcaaccattgattcagccactgcattcacttcaggttgcaactccaaagacccaaacattgctaaacaggctacaggatcagtttcgccatcttgtgaggattttctcaagtttacagaagggaagtatgatgcaactcgaatgtttcctttagatttaaagatgggatcaatgtgctctttaatgtaatcttctgtaactctggtagggaccttcacaatggccatgttccttagagaaacttcttcaggcaattttttcacaactttaacgacattttccaagcttttaatcagcttatccgcatcatagatatcttcaaaattcctagataaagcagttaaaattagtttagaaatctaagaaacaaattagtaaaccaaaaatgaacatacaaaaaacaaccctaacctttcatcaccaggtttgcttcctcttatatcaggaagtactagagttgctccaagatgcttagccaccattacagcatcagtgatctaaaccaagattagcagaattaaccacacaaacaagaagaagaagaagataacaacacatctaaagaacaccactttagagttgttataaagcatacctgagagatatggtactcaggaccattggtaagtgagaatgtaacataccctttcgatgatacagcgtcatctgcaacaatcaagtccttagtaaaaaagtccaaaataaatgatgcaaagaaaataagaaagacacataccagatagtaatgttggccaacaaggagtaagatcagtgttatcttccatccaaagtcctttactgccttcaacggttccgacaagaccatctttcacagagactttagatccttcaaattcaatatcttgtgcatctccctgagctttctcctgtacaaaaatacccaaaatgacaaagatttagagtaagattttgagttttggctacagaagtttcactattagtttacaccaaacgagatgaaatcaatcatgtcctaaagatccgcagaaaaaaacagttgagtctaatttgggtttcttatgatcaatgtccaatccaacttatgatccaaaaatggaaggtcttgttttgatcaagtaaatttcacagaacaactaaattttctaactttgaattagatctaacttcaaaaggcatctaagataagaatcaacacagaacctatctgaactaagctgaaatgagtatcacattaagagtgaaaaaagtgtcggcaaagaagattacctgaagagaatcaaagtaatctctatgaagcatctgtccaagcatcacaaacatggtaatggtgagaataccagcaactacttgcctcaaatcaacacccatttcttacctttctctctaacaaaaaaaaacagaggtttctgagttaaaatagactaagggaagaagaaagaaaaagagagtccaacaaagagaggtgtttgtggggcagatagagacaagctatcttcctcaaatacgaaatctcagttctctttcaattaatgttttgtcaaaaaagctctttttttttttgttttaagggagtgttattgtcagtgtgttgattgttgaagttgaagtcttacgctatcttacacacaaaacagccaccgacacttctgtcatggattttggtataaacactaaccggtggctggtttcactaaaccggtcaaactaatacaacattctaaattatttttggtaatctttacagttacattacattttagagtttaacagtttatactttagttctttatactatgtaaagaattattagaccttacactccaaccaaatgaactatagttccaaactaagaattcatgagagtcaaaatttttgttttaaactagactaattgtaaaattcaataaattaagctgttaaataatttatataacttcgaactcacaaattgttgagctcgttcaattggtttttacatttgttagtgttacattagcaactataaaaatattattttaaacttcaaaatgtggttgatgaaaaaagaaaaagaactttaaatcacggactcatcactaaccgtatcaaaaagaggagttggtaatgacacaatacataaactaaaatcccctttatatataataaaaatagttatttaacaaacaaattataagcaaatgataaagcactggattacagataggttttgaaacacattttaaacatatcataatgttagacatgagactaatttagtaattatactaccccaaaagcaattgtaatgatgcataattgcatatagtttttgttagagagcccacgtacgagttcaactttttgctaatcacacattgtttactaatcatttaattatcaatgtaccgaatcattagtagtacattagtcatatcccagaaaattggtggaacatgaggaaaaacacacatgctgatcaatgattataatccatgcatgagtcgacctgtttttttttttttttcgtgtcttctaagtttgtgaggggatcacaatgagcacttgattgattgttgaatggtagcgtaacgctgtgtgcaattactacaccacttcataactttttgatgtaaatctcttcttcttctttttttacccaatgcaggcgtcaatatatctatctacgcaatcatatactatcgttgtatatgattttggaaacacatataagcaacaaataaataatgaacgaaatcctattttcaagctaaaatagtctcggagacccattaaaccggggaaattttgaataaccggggaaattttgaatttgtttcggttaacatcgataccgtaccgatcctccggtttgttctttcggaaggtttatcttgttttcgtcaaacacagcgatcctctctatcagagcaaccaaa

SEQ ID NO: 2327 - DNA, 3000 bp, Unknown
  misc_feature (1)..( 3000): cDNA_ID_2153443_gDNA_ID_1620519_Annot_ID_159390 3000 nt of promoter + ATG
ctaaaaattacaatctcgaacttcattctaattagcttacatgctatactctctggtggttgtgttgtggaacaatagttgttgcctaatttaaatgcattgtctactgctctgaatttgctaaagtttctgattgtttgataaattttgtacctagtttgatgaatatctagcctaggtttggtgatctgatatatgtctcatgttgttttcaaatttttttcaattgcagaatattaaggataatccaccttgcaataccctatttattggtaatcttggggagaatataaacgaagaagaattgaggagcctgttgagtgcgtgagtatctgttccctttagtgagactcctgtccattgctttccttgagatcttggcctttttgtagacctgtgttctcaagaattctgcggtaaactgtactttcattttgcaggcaacctggtttcaaacaaatgaagattctgagacaagaaaggcatacagtttgctttattgaattcgaggttaactctgagaccttcaccatctgtgtatatgtgacagaaaatattcttctagcatattgttaaattcttctatctggacttgcaggatgtcaatagtgccacaaatgttcaccataatttgcaaggtgctgtcattccaagttctggttcaattggcatgaggatccaatatccttatatacttttactctttctgattatttaatattccagtatgccaagttcttttttcttttctgtttgattcttcttaacccaatgatacatattcaaagaatccatatgggaagagaaaggaaggtggcggctattctttctttccttctccgagtgctaatggagcccaaggagccctgacatatcagtaggccttgaagggggacgtactctcttccttatctcccaacaactgcacgaatacgatgcatcttccaggcagtctgcatttcatccatttccattctcgacatttttaagcatcagcattgctttgtcatgtgttgggtgcatatagtgtgacctcatcaacatataacatgtttcagtttctattagctctgctacatgcattcgcagtgtggtttttgatgattgtttgaattatataggagtttggtttgctatttgtttatcttattgcggctttaatacatcactttgtgggattcattttcatcattctgatcgattcatcctaatgaaacgttagctaggaaaaaacataacattacattagatcataacatgataacatccggaggccttccatcaacttcgtttcactgcatggacacggaatgttgctctcatgattgattcatcctaacgaaactccatttgctatgttagctgatataccattacattagatcataacatgataacatccagaggggtttgatcaacttcgtttcactgcatagacatggaatattactctcatgatctatcacatcggtttcattcttcagcatttcccatgtcgatcattctctgttcttacttaggctgatgaacaagcacatccgttttgtcagaagttgacagctgatataacatttgaagataggcattccattacattgtaggtttattatagttgagcaaacatatatacattcccagctctggcttggccttatgcagggacaatccgtaaagagaaagcccaagctctcgaatagagatgcgtttcacctacaaagttgaggtaaggtcatcttcggacgtccaggaacagagccaggagttcctaagagcctatctttttacaatggagtctacttatccaatccaacttatctcttttctaactgatgtttctgtacggctttgggctacttgactctggatgtgaaaaccagaagcgaatttagtgattcttcaaatgagaaagtttctcttccattttcaagaacaatgtgtgtataattggtcgcttacttatcagattttgaggtataggatctctagggcctagtttcatgttttgtttctctgaattcgaaccatggtaaatttgctgtaaagagaggtaggtaatataattaacccaagagacaacccaagaagaatcgataaaggagtgtctcaactctcaagtaagaaacatgttttcattattatgattggcgagtctcaagctttcatcactgtagacaacaaagaaaaagatttgttgcacaaaagggtttgtgcattccttagaccaactttccagagaagcaaaacatctaaaaccacaaaaccatggtcttaaaagaaaattcttaaacgtcaggtgtgtctgagcgcagaactgtcaagaaaaacaagataaagagttgggaggttaataaaaagaagaaaaaaaatataaaacggaactgagaggtaaaagattgaaacccctcttcaagttgttcaagtaaagatcatcaagcaaaaggtagagatgtcgatcaaattggtggaacaaacgcacggagagggaggagaatcgtgagtaacgtgcctggtttctgaggctttccatcggaccattttggagagggagaagtgaaccttgtcgcgattgattgtttcagctttgaatggttctttgagacggatatacgccgtccccatactcgttctcagcccattttaggcctttctgaattaggcccaaatacgtttacgtgtttttagaggaaaactttcaacgtgcatgtcaaagacaaattgtttgtttattttctcatcaagcaagacagagactactattttgctttttttaaaagaaaacgatgtagcattttccttgtcgagaagctaaggaaacctgacaaaaatgcaagggataacaaacgcattaaccaaagtataattttttacaagcaaagaaacatttgcacaaaacccataaatataaacctcattatcccataattagcaatgctgcataacacataatttaaaaaccctaagaaaaaaatcggaagtttgtggaagcaagaagaagaaatg

SEQ ID NO: 2328 - DNA, 3000 bp, Unknown
  misc_feature (1)..( 3000): cDNA_ID_2153530_gDNA_ID_1620520_Annot_ID_159425 3000 nt of promoter + ATG
tttatttgtatgttcgaagaaaatgtcattaaatgtaaaaaaatagtctcaaacgacggcaaaaagtctctctccattgagtatcctctacggttcttgaattggtttggatacatatttcgtgtatgaaaactgaggcgtatcaaggctatggagaatttaaatcataagtgggatcgttgttcctcttctcatcaaactcctctttctttcaaaggcaatcagaagcaggtttgttgattaattttcgagattctttgttatagcgtagagaaaatgtcaatctttgacattttaatatgttgctatactttggatctttttttacttgctgtgtacacttgaattctcaaattctttgtagattggacaaggtcagagagaagtgttcacacattttgtgtcacttccattagccatataccctgacttgacgaaaaatatcgaggcttttcagaattctgtattgggaaacaatgataaggatccattgaagtttcagagtactttagctggtaagatcacaaaccaaataaagaaatgttttaagtgtagaacatgtttctatgacatgtttttggatattggacagaaatgggaatagaaaaatcgatctttgtaactcccaaaactttccatttgactgtggttatgttaaagttagagaacaatgaatctgtggttaaagctcagaatatccttcaggtataagtgattcctattctaagagacatagtgtacttgttcttcttcttaggattgctttgatgattgaggtgttgtctttttctgaaaagcagagtattttttctaatgtgaggcaagctttgaaaaacagacctgtcttcataagactcagaggattggtaattgctacaatttctagtggcttgaaacataatctttgaatcaatcccaatggttttttgtcttgttaaggaatgtatgagtggatctttagacaaaactcgcgttctctatgctcctgttgaagaagttggtcgtgagggccgcctgctaaatgcttgtcgtatcctaatttctctaagcgcttatttttacttgtgtgaagacatgacttcaaattactatgcaagtgcttctgaactctttaactctctagtttagatgttatcattgatgcatttgagaatgttggatttgctggtaaagatgcaaagtcacgcttgaaggtaatgcttgtcacttttctgttgtttacgtctttgactaggacaaagaaaaagatggatataacaatgtttcagcttctccttcatgcttgttccttatttgcagctacacgccacgttgatgaatgcaagctacagaaaagataaaagcaaaaagatggatacttttgatgctcgagagatacacaaagagtttgagaacaaggattggggaacatatctaatcagagaagctcacatctcacaacgttataagtatgaccccaatggctacttccattgctgcgcttcactaccttttccacataagtgacattgacaacgatcaaatctcctccacatgatttgcattaggaaaattaatgtcaaaacttaggtaagtatggtatgtcactgtgtaactgtttttatatgtgtgtgtcacagcgattggtaactatgtgttgtgtaacttttgtttgtaagttaagttttggacagtaatattcttccttccgatgattggattagaaaattcgtgaaaagtgtttgattttgtattatttctgtttatatcgcatgttacttcttttggtaattttgtagaattgatggtgtattagggtttacgagtagatgttttctagaaacaaaagtatttctcctaatgtgaggcaagctttgaataaccaacccatcttcataagacgcatccttgagttatacatatttagtggcttgaatcatctttgactttgattatctatccaacttttaattcctaaaacatagagattcataataaatctgtaactttaattcgtctctttaccaattgaatgccaaatctagatagatcaaaaagcgaaccagctctttctagacgaataagctctttaaactctgtcgtatgtgttgtttcataggacctttcatctttttcttcttctcataattagttaccagtggcaaaaagggaaaagtctaaaaggaactctagagtgaatttagtatgcaattaaataaatcatttactagataagggtttgattacaaaccttaggataaatatttgattgtatctcaaagtataagaaatgtgtcaagcagattctgtgttttttttgtttcgattaaaaccgctaaaaccttgacaaggttgtctccacaaacaatattcatatcaatctcaaagaatgcaacatgcaaaatgttgtgcatattgtttgtggaggaccaccatcgtaagaggatttatgtaacataacttaaaagaaagtggctatatataactttttttgaaacctttttctacaaacaccttggatgttctttaaataagatgaaaaggctattattctaatgaacaacatgaagccaaaagaaaatccaaggcgtttgcagaaagaggttataaaaggctccgaaatatttcatccgaaccataaacttgttaacacacctaaagaacaatgatgcagtaatgggaatgaatacacacgtccatttgactgctgtgatggaaaggattttataaggtgagaaatttttagggttttgattttgaataacttaattagttttctaaaaattgaactaaaaaatcaaaacaaaatccgaaaggaggggaagtaaatatttctttcgaaatttgtggagatctatatttcccttttcaatactttgatctcgcttttttttttttgaaagtatacggtcaaatatataattttctaaacgtaatggggtttagcagcaaatagtcgtaaatactggcggaagaaaatgatattttacggctgaatcatcaccggagaatgagaggaag

SEQ ID NO: 2329 - DNA, 3000 bp, Unknown
  misc_feature (1)..( 3000): cDNA_ID_1830234_gDNA_ID_1620520_Annot_ID_159439 3000 nt of promoter + ATG
tctagtgattgttaaaaatcgttatttacttacttatttaaatgtcacatagagagaaaagagatttgcatacttgtaataatataatcgtgcttgtataagaaaaaaaaaactttatgagacaagaaaaaaaaactcgggtgtacgtacgtcgtaagtaaaagggccaatgcaagcaagctgtttggctctttccttaaagcaaaataaaagaaaaagttatctttttctccttttatttcaacttttttctttaattttcttttccattttttatgcttaatttttcaactccgagatatgaaactctctactttgtgtttagtttgaactcttttagtcataaaacaacaaactctgccgcaatcaacaaaaagcgaaggagtcaaataaaaacttctttttacgagtgaaagtgactattttacttcaatctcttttgattttcaaaactaagaaaaaaaagaatggaaatcaaagttgtgcatgttcttcccttagtcgatatgtaaaagtgatttgatagacattattgtatgtaaaagtaatacaactctgaaaaattttaagaaaaattgctagtatcagctaatccaacaattagttatatgttttggagaatgtgtaacatgaccgattataaagctaacatcactttatttattgaatttataagtaatgcaattatttaaataggtcttctcgaagaacatctagatggtatacgcttttgtgaggtgagctcccttttatgtttgatttaatagaagaaatgtaatgtgtaatgacttgcttcaaatgatttgtatgttcctattggataagggcatcttgattttatttttattttttgtatctataatgtgcagtaaactttttacttttcattttagtatgatagctggagtttggttgtttcaaagataggcaagtattgtgtttaacaactaaaaataaaacaacacatatttttcaatagaattatttacaaattataaatctaaacacagggaaaatgttagatacaaaaacaaaaaaagtatcaaagacaagcagtgtatcagacatatataatatcatattttcaattcattagaaatacaacttgccatatcgcaaattagtccataatcaccaaggtagggaacgattgtctatcgataagttatgattgaaagaaaaggatttcatgaagaaaaaaaaacttaatttttcttccagaatcgtgacttagaatttttgttaacaccgacgaatttagataacaaaagctactccctcattgactaagccaagaaagttgagtagttgactaacaatgggactaatattttagcaaaatcaatacaattttggtaattattttggttcatgaaaatgttcaatttttttggtctgaattgtggaattcacgatttatttagcctttttgcggtatatataaaattaagatatttttatgtaacactttgttttataaaggataagcttgtatagtttatatataacggctagtcatgctcaaagcctttatcatctgtgggcttcacaatcttatttcttcgacccatttgcttcaagcctcaaaccaaaacttggctgagttcttcgaaagctcattatttcttatatagtaattcttttacatagtgttggaaaatgaagtaaaagaatatcgaaacttgaacgcttagatgacgaatctgtgacattatgatttcaagtatcgacgtgttttatcaaagtgaaaagttgttaatgttggtgttgggtccgtgaaagctcgaagccatggagattaatttcaaacacttttgacctttgagccttgcaagtttggtttatttgttcaacgccagacacgtttgcacagatatgagttggtgagtgcaaatcccatcataccaactaatataaagttataccatcaatgatattctatcgtgaaaaaatatgtaaagtctaatatcattaagtatcatttattaaaagaatgaattgaagggaaaaaaaaaaaaaaagataggcaatccactagtgttcataatgaaagatgatggtcgatgtaatatgtatactaatattatatctctagctttgatcctcaatagtcaatatctatagtgtttatagtgttttaacagcttttgtataatgttaactgtgcaaaatacatgacataaaataaatgattttttttggcttttatgttataagtactattagttggttatctgttttaaaggtttttccttgaattagaggatcagatttacatgcccataacagaaccaagctggtcaccaaatccatcttatgtagtggcataacagaaccaatcttggtcaccgaatacagtagtttcacctttctctttctccaaatataataaaaaacttttttattttgtgcaaaataaactttagtgagatatattgagcaaatatgtatatatatataaagatttcttgagacgatatctctttgcctctttgggtcattgttaattccatgtatcgatttttagggttgaagagacttgtttgtaactttgaccaattgtctactctttttagaccacaatgttagtaagtatgtaggtaggacttgtttcgaatgtgatgatttatttaggcccagacaaattatttactagacccattgttgttctattatttactgtttgaaagaagttgtttttgtcgttgattgtttactagtatttcaaagaaaagggtatgcatagtttaaacttcaaggaaatcccttatatatagtaaaattaaaagaaattccacaattagatttcgtaatacaattttctataacaaaacctagttaattagtccacatgtcctagctcttacccactcagcccgcatattcctcacgctttctttttattttccgaaattttttaaacggctaccaaatcaaaatgcataaataaacaaacccttctcttctttaccaattcccaaatccaccaaaaaaaaaaaa

SEQ ID NO: 2330 - DNA, 3000 bp, Unknown
  misc_feature (1)..( 3000): cDNA_ID_3079737_gDNA_ID_1620520_Annot_ID_159442 3000 nt of promoter + ATG
tactatacattcaaacttatatatcaacacacatatatgatcatttgataacacctaccatttgtgttatacatatattttatagagaagttatagaaaattatactgagtatacatctatgtgtcatcgaaataagctgataataacgaatacacgttttctttttatgtctggagtagaatacagcattcatgcccttacgttgcaggttcccatcattttacaaatattctcttctcttttctactttctcttttttgatgtaatacgatctatttatttattctatatttcactatatatatctcagatgtccaacgtttcagtattgcattgccactcgaattacctaagataaaaacgaattatcactttgatttttcgcacttatagttaaatctattctcaaaatttaaacaaacatgcagaggcaagtggcactcatcaagcagtccctctttgatcaggttttggtcgtttgtttcttcgtattttcgtaatataacttcgtacgtcgtaccacttatatatgaatttcttcatataatttagaaaatgactaatataggaaaatgcatgcagggatatctcgacgaacaattcatggagttagaagagctccaagatgatgcaaaccctaattttgttgaagaagtttccgcattatacttcaaagattcagctcggttaatcaataacattgaccaagctttgtgagtattattttgttttctattatatatatattttttttttttcagttttctaatcatttttacaatgcagggaaagaggatcatttgatttcaatcggctggatagttacatgcatcagtttaagggaagcagcacgaggtaatttccccccttagtttttgactattctaattacgccttcaagaaataattttacttaaagaaatgcgaatacttaaatgtttataagataaaagaatgtaacgcaaaagtacattaaaattacttccattctcattcaggattcaatgacagaatctactttaaccagaaataattagattttatgatcgttagttatactgacaaatgttgcatttcttttttttgtagcattggggcaagtaaagtgaaagctgaatgcactacgtttagggaatactgcagagctggaaatgcggaagggtactttcgtctttatacttatataccttcatgcttctcgtttttaacagaaaactaagtaacggggtcaaaatgaaaataagtatagtttagatggctaaaattgctgcaattaatccgctgaaccttgaacttttactttacttcattttcgaccccctaattagttttcttcgctttttcttacttgcagatgcttgaggactttccagcaactgaagaaagaacactcaacgttgagaaagaagcttgaacattatttccaggcgagccaataatcaattatgcttaataatttacataattagaatgtgattagaagttatcatcaatcacttttgatatagtatttgctgaagtgaaattttttgtaatgaacagttggcaaggcaggcggggcctaaggagacagcacgtaggcccaagtaagagagaaagagagagagacagagataaatgaggaatcgtcgtcgaattttgtagcaaaactatataataaatagttcctctttatttttatatatttcgatgtacgttataaagaaggttttggacttttatattatgtccgttaataaacggtccaaatgtctctatgtttttccccttatatcgccaaattttcccttgggagttttatagctacgattacctcgtaacatatggcttcctctaataacggaatacagaaaagagtggaccaaaaaaatgcattttttcgattctatgatgaatgcattaccttgtttacaaaaggaaaaaaaaaagaaactaagctttacattattcggtttgtttccaggaaccgtgtccaaatcctaaatattcttacctatttttatatcattatgttaatatttgtctctactagtactgattaataaatatttaaaaaagaaaaaaaaaaccaaaatattcttaggtaaaagtctaaaataacattatcattatgttactatttgtctctactaaaactaattattaaaaaaaaaagaatgccatggcttagatgcaaactattcttagctaaaagtctaaaataataacattatcataaacaattaatattacacttttccatctaatttctcttacatgccctatttttcaaacgatgtcgtttaagaatatcacatagaccttctatttcatgaaaaaactaactcaccaatgcaaataaataaatcaaatgtttgtttgtggataaagtaaaacgttttctttcaatggcccagcatttactaaaatttatttcaagttcttccacgtaaagtctacactacatacactcatacaggcagtgtaacgctgattcgtagagctggagagtatcacaacaataaatttctcttccgaaagaaaacagcctaatattagggagatatttacatactctataagatgttctttaatctcttatatatattacatatgaaagaattaattgtttaattattatccaaagcgacgtgaaaccactctcatttattagccctagctatatctcacaacctccatcttccttactttaaaaacacagaccagatcctatttatagcatccatgtgcgccattgaaaggtaaatttatttaataaagtttacctataatatcaaattatgcaaaacacaggctggttcagttttttccacgaatcaaaaatggttggagaaatattgaataagagagagagagagagagagagagatagagtttcagagttgacacaacattgaagtaaactaaactcctaacctctttatctatgtgtatatataaaactcaaaagtacatataatcttcaccattcacacatagtcacataccaaagcaaaaac

SEQ ID NO: 2331 - DNA, 1433 bp, Unknown
  misc_feature (1)..( 1433): cDNA_ID_1830246_gDNA_ID_1620520_Annot_ID_159443 3000 nt of promoter + ATG
ctatgttagggaaatttcatggtatttattgacctggggaagatatggatgatggtcgatagggaagacttttagtttacatgatatggcaactcgtttttttcttctctttcttatttcttttatgagaagaaagattctcactatacgtaataaagatctgtatcttggccacgttcttcaaataagtataatctccccttgcatttttggcttaatggattggtagtgttgccctcaattctcaaaagggaaaccactttaagaattaatagttgtatcatgtgtggttgattaattgattgaagtaagatcatgtatatttaactatactaactaattctaaagctgatggaacgtgttcacgcacattctatttcatatagaaacaacgtttattcggtttaattcatttgaacctatccagtaacataagctgtcgaccaaaaacaaattaaataaatgaatatagtgggacgtaaacaaaggaaacgtaaacaaggggaattcttaccctttagaattttttttacagaatacaatttataaatatttggttgacagttaagttttccggacaagaatacaataattttgagcaggaaaataaaatataacttttcttttttaactcgtcgaaaagattattattatagaaaaattgtaaaataagttgtcaaatcttcgattgtttcaaattaaagacatgaaaatttcgttagggtgaattagtaggtaaggtaatctgattttgaacataatttaaataaatgactataatggcaagtaaacaagagaaattcatttaaaatatactactttgttatttgtcaaaagaatatgctactttaagattctcatacatcatatgaacaaattagattaaaatataatttctagaatacacaatgggaaaatatattaaacaaatcaatagtgtgtgagttggcattgacatggtaaatgcaaaatcaaaatacagcataacctatgcaattacatgatgggccttataaaaactacatactaaacaaacccaaaaatagaatactagccttattaatctaaaactcaaataagcccaaaattatttggaatgggctcacttccatatttggataaatttaaaatttcgggtatgagcaaattaacgcgagtttaaccactaagccatactcgcggcgcgtggagttccgtacgaaatatcgtaccgccgtctctgtgcgcgctatgattacggttataacagaacgatacatacatctatatatacacactccaagacaaaataagacctctctgctttctctcgtcttctccatttactcttttttctctgcagagtttttcggaaaaagaaattgttctttctcattgattctacatttctacagaacgagagagagataaggatttgtgagagaacaacaatg

SEQ ID NO: 2332 - DNA, 3000 bp, Unknown
  misc_feature (1)..( 3000): cDNA_ID_2153571_gDNA_ID_1620520_Annot_ID_159441 3000 nt of promoter + ATG
aactcgggtctatatttttattttacttttatgattatgattagtcgttatcggccgatttatttgttatttaacaatttgtttaggattatagctttttcggattgggaggaatcatgttcataatatcgcggaggtgtaattattcacgaaagtgatagaggataaaaataaatttgtttagcatatactttatttaacgggtgatagatgattgaagttacatctttcaaataattggatattattgaatttatattaatagttgagaagaatgtttttaattgagtaatcaacacaattaaaagaattaaaaatctgtttgtgtgtcgacatttgaacttttaaggagtcatcttcaatcacgaaccagtcaacattgtgccctttatacgaaatacttagttcaattaggtgctaatagctacttctaataactttagtagcacaaattctggcatcatgtatatccaacaaaaaatctcaagataactttccgaagaatatctatcatttaaaaataaactttctctaaacatgtattaatcttccaatcataggaattaatagtggaacaagctagccttctaaagtattacaagactgattttgtcttgaatatgaatataagttatattacaaactagcctatagtctagcaatttcctaataatatatgaaaactaaatctctacatattttctcccttcgaattaattagtcatttgtaccagaggcagagatgatagttacgagttcataataattaagagttaagactatatatagccttaaagcttagaaatatacaaaagatcataagaacaaaaaataattttcttttataaaattaagatcacatatatatataaaggaataattggattgtgtaacacatatacaacaaaatttagataaatgtcatgaattttgtcctcttttattagaattttatcttgtataatactaaaaggtaaacataataacatttgatttaaatacaaaattggggtttatcatgtaaaaccaacctcacaagttttggaatgaattgttttgtttcttctaattttgtggtattacatatttgttattagaggggaggtcggaattaaggagaataatcgagatgagacagcaagcaataataaaacttagattctaaacccacttccaccgaaaatatgtagtagacaagtcctttatgtgagattggtttggtgggcggaggaataaataaagctgatttttttttgtatatgatcaatctctctctcttctgtaattcgatctcacgatgcttgtctgagagagaaagagatatagaaaggaacaaattatgctgtaatgataaaaagatcttttatgtctttgtgtcaatcatttagatcacacttgttatgtgctcttcagtttttcctttttagatacttgttccttgtttccaataacagaaatttatggtttattttttactcgttggatatatgtataccttattctctctctctctctttttggtttcctacttctttctttttttgttacaatatagaagtaggaaacacacgcatccgcacaagtactagcctttccttggcacacaacaccctctcacctccacacattaatggaagaaacttggaaaagatttgcatctaatttttcaatgtttgttgcagcggtcaaagagaaagaaaacacatcaaacagaaaaccccaatagaaatctatttatttctggtcttgatcatgatactaaccttgactatgtttttaatataaaaatgtcgtttaatgtttatcacaagatataatccttacttagtaattgaattccggaccccaaactaaaatacttcgaattagtattgctttctgttgttgaaacaaaagataagcaataatagtgtttgctagtgtgctagattccaacaattttttcttccaaaagtacaacttttttttgcccatttcgtaaattcatatgtacatatatagttgaatgttgtgggtgtacgtaattggtaccattaaaatcaggaaatcacaaccttaaaaataacaaaaaaaaaaagaaaaaagaaaagacaatgatattatagaaaactttgtgaaaacatgaattaaattcagtaattaatcaagacggaaatggtctgttcagaatatttttcttgaactgtatactttttcaatctataactttctttttcactttcaggaaaattcgtgtccacatacattttactagtatatatttgcctcatttccaaaggtgtgtttcgtatagtatcaacgtttagcttttaggttctatattcgaaattttacatgtttctatgatgtacgtatatatataatattagtcgtattcccattcgtgagatcctttgattacttattaattaagatgcatttcagttatatttttgggcaatagatcaatcatccacagtagtttaagtttcataatggaccatactattaattaaacaatcaacattgaggaattctctaattgaaatctcttattcaaaactttaacataaacactatcttatatatataaaagattactatacattcaaacttatatatcaacacacatatatgatcatttgataacacctaccatttgtgttatacatatattttatagagaagttatagaaaattatactgagtatacatctatgtgtcatcgaaataagctgataataacgaatacacgttttctttttatgtctggagtagaatacagcattcatgcccttacgttgcaggttcccatcattttacaaatattctcttctcttttctactttctcttttttgatgtaatacgatctatttatttattctatatttcactatatatatctcagatgtccaacgtttcagtattgcattgccactcgaattacctaagataaaaacgaattatcactttgatttttcgcacttatagttaaatctattctcaaaatttaaacaaac

SEQ ID NO: 2333 - DNA, 3000 bp, Unknown
  misc_feature (1)..( 3000): cDNA_ID_3067113_gDNA_ID_1620520_Annot_ID_159436 3000 nt of promoter + ATG
aaacttcaaactatgtgtaaagaagaatcattcgggaaatgccattgaagtagcttttaaacaccgaacatcaagtcaaagaactttgagaccattgactttgacggagaggccatagcgccaccacttggttgaggagagaaagcgctgccgttttgcaagtactgaggacgagacaggggtcgagcagtgtttctagtggatgatggtggaggtaaaggcatgaatccttggttgttgagtctctcgtttaacgcttgcttctgtattgggtctactggcttcactcctactattacaactccgtttatcatcatccctgctttgttcagcgccttatgtgcatcagaccggttctgtatcaaatacacagaccattgtcagttcgttgtttcctttatataaaagatttgattagactatcatgtatgatgactcgtctagaagaactatgaatgcttatcaacatgcatcaaacaggtttgaagggaagaacagtaacctggtagaggatgtgcatccagttggcatttcttggaccaggaacatgtttcaagaccataccacatttttcaaactcccgtagtactaaatttgtatcacctggagaaaatctgaaggcagttattatgatcagttcttaagattgaaaagatgggagataaacacaagataaggcacttaataacactaccagttattatccatgtaaagagtcagaattcacaatgatcaaaacataaaatcacaatcaaaggctgatatttgagcatcatgatggtaaagaacagcatttattatgaacagttctctaagattgaaacatgggagacagacacaagttaaggcacttaataacactacccagtaccaatataactgttatcatccatgtacctagaatttcagagacacgagaatgttgacaaatcaagaacatttgcaacagtaaagtgagaaaaacgagagcaataaagcttaaatggccttacccatagacagtgacccactcttcctcatcaaggtttcctgtaggtataatctgcctctgaacctctggcctagcaacttctcttggcggcggaagagtgaccaatgcacctggctgaaccaccccttctacaggagatcccttccctttatcatcctgctcggtactactacctgcctttgactgcgaccaccaactcggactccctgaaacttgctgactctgttgtgcattcagtagagaaaaagaagggcttgcttccaactttcctttaccaggagttacaatattctttccagaactctggaatggtgttcttctgtcagacttagcatctggagacgcagagtagtctgcaataccagactcaggagagaaatcggaccggtcatccaaagtatacattggaggtggtggaagatcagatcctccgaaattctcacgccatagtgcagataccgcagctgcctgtcccggactcgagaatttccctctacgtgctgaaacaggagaagctaaatcttgaaatagcagagattgcctccctgatttaggagtcctgtgtgctgcagcactcattttctactcaatagagttttatttatctccctgcaaagacaaaaaatcatatagctttgagcaaaattacataagaaagctaaaaaaacaaaaacaaatcaattttgcgactttaattcacttgggcaagatcaatattgaatcttgcgattgaaatcactaatctaagcttagctacgggtttctagaggattaatcgaaagaaaattgaggaaaaagttcaacaaaatcgcaagttactgggttttaaacgagaaggtagtaagattgacgccaatcatcgaagacagtacacaaataggagtaatcacactatctaatggatcgatggagagggagagagagagagcaaaccttgaggatgaaaatggaggtgtttgaatttcagctttaggaatcccggagaagctcaggtagagagctcaagggcgcggagggaaggtaagtgaaaccctagaaaccaagattctgaaaacgcaaaattcaagcgccttacgaaaaatgacgaaagtagccttgcatttgtacaatgggtttgaattgggcctatttggaaagttgttggcccagaaggtttcttcaacatataaaggaataaccatcaaaattctcaatccaacatggtgtaaaattaaatggttgtaacttgtaagctaatttgtgttattatttttttggtcaacaatacataaatatctagcatatacttaccaattagtatccttaaaatgtgagaattctattagcattaatgcaatatctctcatcttatccttaacttaatttaaagagattttgagtatgttttcacaaatacttttctaaaataagaagaaatactcaagttagaatacgtcatcgttttaatacaaaagatcgttttgaaaggtttaagagaaaattgccgcgtttttttatctaacggttatacaaaaagtcgtttagggtgtgaaaaaattatcgcgtttgttatttaacggtcacataaaagatcgttatgggaatattgaaaaaattgtcgcgtttgttacccaacgattttacaacaagcaattgcgtttaagatacattatagatgaatttccatagttataaattcaatgtttaagctatataatttcagttgcatatctaaatttggggcactctaatcttacttcatttgtgttctttgtctgaaacttgatttctattccagaacgcgattttttcttaaaacgccaaacgcggtccttgtcttgttgtctcgtccaccaaaaaaatctggggcactagtgtcacaaaaatcacacgctcgtcgcgtgagaaagttaggcttttgaaatactttagcggcgcgcgattacttaggcgacattacacacacagcctccgaggaacaacaacaacatcgattgtctcgtcaatttggtcatcatcatcatcagatg

SEQ ID NO: 2334 - DNA, 3000 bp, Unknown
  misc_feature (1)..( 3000): cDNA_ID_2153534_gDNA_ID_1620520_Annot_ID_159426 3000 nt of promoter + ATG
atttatgtacttggtcagcttatttctattcactcatctgtcatgttgcttatttgctatattcttaaggattgtatgagaggaccattagacaagactcgtgttctctatgctcctgttgaagaaattggtgatgaaggccggcttttacgtgcttgtcgtatcctagattttagtacgaatgttatttatagtagtggcatggttagaccgttaaattaagagtttagtgtaaatgctttcgattttcttaataccaagttcagaagttattactgatgcatttgtgaaagctgggcttgttctcgagaaagatgcaaagcaaagcttgaaggtaaaagctttctgagtatgacgagattgttgcagtcacttaacgttagccaaaggctcagaactaatggaattggaagtagtgaatcgtgcttctgtttcatactttttcctttctttgcagctgcatgtgaccgtgatgaatgcgaggcacaggaaaaggaggtgattgattcccaactccagacttatgtttagataaagaaaacaatgttacaaacctctgattatctgaaaacccttttggtctcagaaagaacaataagaagaagatggagacgtttgatgcaagagagatacacaaacagtttggaaacgaagactggggagaatatctgatccaagaagctcatctctcacagcgttttgtgttcgaccagaacggttattaccgttgctgtggttcaataccatttccaggagaacagagagcctgagaagaatcatctaaccagcggccacagtctcaaatctcaagcatcttcacaggttttggtcccgtggtatgagcacttacaactttgagaagagaacctgataaaattgtaaagttgtaccggtcatcttgtgttaaccaaatagttgtcttcggtttggttctttcttggtctttgttcaataaaccgagccaaaacgttcttgtactctttctacaaggtaataaaaaggttcttagtacatttaatagaaaaatgattatttacagctttattagaggctattgattgatttagtaatgaactaataatgcaagtcaacagatctaaaattggaaagattattggcaatggaggcaggacaacgaaaatcaagcatattaaactctttaagattcgtataattccaccggcctaaccaaatctctaagcaattgttgtttatgtattataatatagttcaccatctatttaagcttaaacgagtgtctaatacatagacgtatatgacaattaattaatgatccgatccaaacgacccttggcgtatttggtaaggtagcagtgatgtgcttaattattaaccaacgatgtactgagtttctagaattagtaagaaccataagagttttaaaaagtgtaaaacgtaaaacatcaacacatgtcattccagttaacatacatatatctatatatatgttaacgtgtttgcataatttttttaattagagaaaaacagcacactatgcaaaagatcgttcatatatctaacgtgtgatttaatcgatctaacaactttttattcccttttatattaccaaaatatttatttccattgatcatatatttgaagtagcaaaaattggtaaaattttagttaaaaatgagggagatgaaaactgatatattatgtaaatctcaagtttttgtaatgcataagaaaaatgttatcaccattgcaactatccatggtagcaaccgtatatctcagcatatgatacaaaaaaaaaacaagaagaagctcatattcaaatttcttacgttcaaacgaataacttgattgctaaacaacaaatctagatagcattggattcatcagtaagagttaaaatcgtacagcattgtgaatcataaaatgttgtacaagattgtgaaataacaaataatattgtaaatttatcaaaaaaaaaggggattgtggatcaatgaatatgatggagaatgttcatagaagaggtaaataatagagggacccaaaataacattgttgaaatggaatataatcataaatgagtcacatcttcaaaatctgatcaaatcacttggaaaaaaaaagatcaagtcacatgcaaccagtaaccacaatcatattttggccggtctatcaccatacacattgtttacagctcacacttgtccctccttatatttgttcgtatccatttgttttcttctctctctactctaatctcatctttatgtttatccctttttgaattttgaagctactctgtcctttgggtccaccctccaccacctctaatttcaatcacgttaaaccggccatattactttaaaccgaccgttttctactaataggaaaatccgacccaaatttttgactaattataagacataccgccgctataccatgatattgtcaaagaaaaagtttctaaccaataaccactatagactaaaagatttcaaataatttgattgatactgcattgaacattctacaattctacttatattgtgtagttcaaataatgagaacatatcggaaagactagccgctattagattatgaatgcgtatgaatacattatacattatagtatatatatatatatatacacatatattaaaatgtattactatataataatttgtcttagtatagtactcaaagaaatagagttttcttacgtagatgtcatatattttagtcattttaggcaccttcctaactcaaatcacgaatagaacttatgtagcaaaatgtaaacacatgaaatcatttattaattcgggtccaacgtaacccaccacaccacagaaactcattaaatagtatttttttataaaacttaagttatatgcatggatacatgaacgatactcctatataaagagaacagcattcaaaaggtcttatcatcttcttcactaaacaaaaaaaaacccttcaaaacatttccttattctttcttcttcatctacaaca

SEQ ID NO: 2335 - DNA, 3000 bp, Unknown
  misc_feature (1)..( 3000): cDNA_ID_2153536_gDNA_ID_1620520_Annot_ID_159427 3000 nt of promoter + ATG
ctggacaaacaccaaaactacatatcagacaaataaattcaacagttcttttatgagaaagaaccatagttgagaagactcacgcttcatgtccagcgagaatgtgctgggcagaatggaatctcttcatccagcttcggtatgtagaactatttgttacagaagctggacttagatgaataatacaattaacaagcttagctccatctgttgaattgtcaagacatgaataataagtcttcatagacgggatagatagcagttcctcggcatgtgactctgttggacaatccacaagcaaaacaacaggaccaggaactgaaggtcccatcacatcactcggatgaacctatgattaagcgtgaacagtgttagtctgcttgtatagaaactgatattgggttgtgaagattcccaatgattgctctttgagacataccgtaatatctttaaaatctgacttgactgactgtccagactgaagataactgtactttggaccagctctcaatccaagagccatggccttctttggatcaaactttcctttgatttcaggtaattcacatacatatataactgctgtttcaccaggtttgctgccagattcctctaagcgacttggttctaggagaatggcggatattttcacaacttcgtcatccacaagaacataggcatcatctttgggtttacttaagccaatctgaggcgcagagtcagatatattcaatgatggaccaaaacttcttgtatgaaccatggcagcacgagggataaatgacctcatagcatcaaccaaatacttaagatctgaaggaccccatacgttgacctttgtaacaaaagagattttagaagttgagcaattccactcatataataattgtcataagctcaggaaaagcagacaggaaacatacaaagagatcatatgagaagaacactcacggatagtccttgttccccgataccagctagggtcagtagaagacctaaagcatttaaaataggaacaacacttatcactgtctaatgatctagcagcaaacacaatgcagctgatgcctaaatcaaaagaaaacaaacctggaagcccgcctgctgtctctgagcacacacgagacaaaaatatatgatctacctgaaaagagttaagcgaatcatcacatattaaactcgtctcatcacagacacaagtagtagtaagtccaaaagaagaagtttggtcacacctttgataacttaattttatgttcagtacaaaaacgttgcaacccctgcaattcaattctttaaccaataaaacactaacaaaaagctacacactttataataaaattgcagaaaaacttacctctccagcattaaagatgaatctttgtttgtcaaagaagagtaatacagaaggtgacgtatcctgtgtatccattccagtcccaaggatctaacaaaacagatgaatagttcaaaattatgcatcatctttcacagtttaagattggagtagatatgaaattgaaacctgaacataggcgatggtattggtagggttaagggtgcgagtattcctcttgagattcttcttaggcttatcgaccttatccaatccctcagctcttctcttattaaactcgaaagaatcagaagagtgattaaagctaatagctttatctttctccatcggagacctaccttttctcttctgctcctcgaaactactccatttgcgtctcggaggagaagggccactgcgacggtaaccggcggtgcgaggaggacgacgactcggagccggagaagaagaagcgaagattggtgggtagagagaaaagggtctgagaataagagcgaacgaagaagacttgagaggagaaaatccgaaaaggcttaggttttgaggcattgatgaagttaacatttttcctcaagctagtgagtgacaagctcaagcttcttcccgttttttttttctcagagtcttctccttcgaggatcgatttttttaatgaaattgtcaatttagcccatgggcctttgtattacatttccggcccatcaaatgtcaactacaccttattattcacaactcttacattacttacgtatatattttgtaacatttttactcaatggtgacaaacctttttggttaagttcaaagtgaaagtgtgttgatcaacaatgttggagatcgtaagtctatatttttatcatcaagaaaattttagacaaactgacttaagactaagaaaacagagacatgaacaaagttcaagaaaatgtgataaaattattagacttgcaatcttaacctaaaggaactaggacaaaactgggagaataaacacaatgaaaacaccagaaaccaaaaccaatttgaatcttcttgaaaaaatctcccgtgacaatatagatgcaagccggtccagtttcatcgtcgccaggacacaacattagggtggtctggtcatagaccaagtaactaatgccataacacttattaaaccgacataagttttatttaattgtaaaatcaaaaccctaatccacatttgtaatcccaaaccaatataaaattttatttaattgtaaaatctaaaacctaattcatatatataaactcaaaaccgatatataatttcgtttgattataaagttcaaattctacagataattaactttatttaattaaaaatctacaaattttgttttctcaaaattattgatttaaattaaaggagtgaatacgaaggttcaaccccaatatttttcctatatacgggggaaaacgtttcaacgtttctattaactaatttaatttggttagtcaatagactaaaccggcgcatacacacattggataagagataaaaagaggcaccactcgcctccacagaaacctcatggcatataaaacattatcccaattaaggacccaacctttttttttggttctgtttaatatcttattgtttaaaaaagaagaacaagactatg

SEQ ID NO: 2336 - DNA, 3000 bp, Unknown
  misc_feature (1)..( 3000): cDNA_ID_3067163_gDNA_ID_1620521_Annot_ID_159458 3000 nt of promoter + ATG
tcatgcaaacacaatacgtgaaaaaagatataagatatattcgaagtttatatcttatttttttagtgacttaacaaaacaatgagctgttaatgaaaaatcatgaatcacgtccacatgagctgttatcatctttgttagagaatatgcgttctgcaaatgaaaatcctcgaccatattcatattcacatcattttcgttaccacttcgatagctacttctttggccaatgatattggtgtggttctttcttctcagtataagatgttacactcactttagatattggagtattatcatgtggacatgattcatgattttaaattctactacaaaattattataaccctaaaatctacagtaacaaccaaaacatatgcatcctaaagtttacagtcaaattttttaaaaccacagtcggaaccaatcacactcatatctttttcatttatgattaaagaaataaaaaattagcaattcatgattttgaatttatagctggagttcgagtctactaatcatattaccccatataataaagattgttgaaccaaatatgttagggaaaaaaatatattcgtcgtggactattcattaaattttggttttctgtagactatatcaaattctacactgacatcataagcaataaatgtttcacccgaaaatgcgaaactacttgataatgcaataaaagttttgctgaacttgtcttcgttggagcttaaatcatccacgcaggtacataaatatgagtattgaatcaaaaggtttagaaaattaagaaaaagatatggcaaagaatttaggatttgtgttcttggttcttgtggttcttttggtgccatgctccatcaactatggtcttgtttctgcacaaccacaagagttactcccacaaatcggttagagctggttctaattatatatatttatctaaatttctcatttcgcatttttctatagtttatacatatgttatttaattaaaaatagtttgatcttagcttgaaatatccaaaacataaattccagaaaaatgttaaaaataaaacccagggtgctgaatctaacttttggctcagttttggtttgattcttgttttttttggatatatatatatatatatatatatataaaagaaaataaaaccaatttgattcttttttcctctctgtttagtctttagaatttggtttggtttatttaaaccagattagacacccttttattgactagatataataagttttaggttgtcaagctaatttcaattaatacatgattcttaatttatttaattacgatttaaaaatcagaatggagaagaatgatgatcacggtacgatcatcaagaagccaaataggtaggcagaaaagagcgtcgccttctccatcatcaccaccttcgttgttgtcgcaagcaccggggctttgaggaacaccatttcttgatgaaaagttgaaaacgaatagaatttacttaaatatcggtttttggaatcattgataagctatgcatacaatttacttaaatatctattttgttcaatatatatatatgatgaagttgtttatttgacaaaaaaaaataatgattgtcaaggttggttgggcaattttttttttttttttttttttgtgtgtgtagtatagacctacagtcaaatttaaatattaattagattgatttttccatcttttattaatgatctaacgatattatatatttatttctagcatgtatgatatattactatggatggtctatgttggacaactcttccgccaacacacaaatcattacgtaccttgcaccacagtgaaattcattacacatgacataagtacataacatacatagccacaatggatgaattacctacaacaagcttaacctccaataaattttgcatctatcatctaaaaattgcattctctcaataaacccttgagaccaatgggcttcttctgtacttgccgtttagcttgacgttaactttttcgttaactttggaagtccctttgccattaagccaaagctttaaaatttctacactagatcttaggtttgagtttttgataatgcaccttatcgaaagaactatccgtcgtggtatcatgtattaaagtaaagatgtccatcgtcgatataatgtagataagaatcattagttggagatccaatagctgagaggagagttgcacgttgtggaagttgttcatagaatcgttcatcacaatcgtatgtgtaacgtttacatgtagttagattcgatcagttgagcaaatatctctgatgattatgtaacaaatggtaaaaacataaaagaagcatcattgaactatacagacagattaaaagtaaatataatatctaaatacaggaataccatatattaaaaaaaaacgttgcatctaaattgttttgaattttacatgtaattctttaagacacattttgaaaatacaacaagcataaaaatcttcataagttaactcaaattctggtcaaatacatatagaaaataatataaacctgaataaaagaaaaatattgtaaactataaaataattgcttgtagctcactggtactcgattagtttaaataacacatgattttgacttctaaaagccgtgtgtaaattttcgtcgttgaattttcaacaattttttgtcgaatgccatcacccggttttgggatattcgaaatcaccatgagggttaaaaatttagtgggcttgggatgtcggctgcttgtaaactttctttcattttttgtttttttttcaataaaatccttcagaactaaaatacaaagaaagatcactataaagtcgttgatcaaaaaaaaaaaaagatcactataaagcaagagggtaaagtattaaaaatgattggcagagatttcatcagtttgctttttggctttttacgtgtcttcatagcttattggaatttaaaagattaaaaggaaagaaaaaattctgagagagag

SEQ ID NO: 2337 - DNA, 3000 bp, Unknown
  misc_feature (1)..( 3000): cDNA_ID_2157410_gDNA_ID_1620521_Annot_ID_159480 3000 nt of promoter + ATG
aaattttattcattcaattgttgaacccatggtatattgatctttaattcagatttctaattaagtgctgagtgaaagaggttagaaacgattcatacaaaaaataataataaaaagaaatagaaattgtcgacaaatttaaaaaaataaaaaataaatagaagaagacatgcatgagataagaagaaattcaggagagattaaagatagaaggagaatctagtttcagagtgcaattagaaaagtgataaaaactaggaactactcgtctacaccctgtttgcatgtcctagttttcacccaccttgtgcaggatgtaattgatgtttcatacttagaaaatcaacttaggttacattgaaaagagtgaaatagacatggagaaagataaacaatacgagtttggtgtagaagatgccatgattaaggtcaatagggttttggcgggaccgcacttgaaatatggcctcaacttggattttcacgataatcatgctacaattatgctattttacaatgatttaaaatgaaactaaaaacactttccaaattgtatgatttgcttatgtagttatatgtcttatttggttgatagcattttgttcaatattattcccggtagcgtatcaaagatcttatcaatctctttttcttatattccctgaaatagagaaattaagagtataagtaattcataccatatatattaaattgtttccaattggtaaaaaagaaaagaaaaattgtttcaactaatattagctcatcagtcatatgtatcctcggtcacaggtggatttgttacacaacaacactcgttaactttttttgtttgagggaatgatttgtctccattacttccaaatttttaagaagactttgataaatagtaaaaaggagaaatcgaatatggtaaaaaaaaagagaatccatgcacctttataaagggaagtacatttttacaaatgaagaaattcaaagtctatctttagcatttactgttcttttattgaattttgcttctaccatttttattaaattccttatggggatttactgtttatggtccctgaacccatttccaggtttcttaattgctctttaacataacccttctcttttgttatacctataaccaaagtgatgtgcttaattagtgaaatagagaaattataaattttgtgaagagtccgtgactatactaaatgttaggtaatataccatttttgaaacaacctctttaagcgtcttgtctagtttcttcatctatttaacaaaataactcttacaaagcgaagctccattgtaggccttagaccccattagcaagtcttgttgctttcttattttttcttttttgttggtgcatgtgtgaagagtccgtgactatatcagatattaggtagaataccatttgtggaataacctatttataagcttatcgtctagtttcttcatctatttaacgtaagaaatcttacaaagcgaagctccattgttggccctctagacccaattatcaaagcttgttgcttcttttttttgtgtgtgtgaaggtccgtgagtataccagatattaggtatactataccatttatgaaataacctctttaagcctctcgtctaattgcttcatctatttaacgtaagaactcttatgaagcgaagctccattgttcgtcctagacccaagtattaaagctttgttgctttcttttacgtttttgaagagtccatgagactctattgatagatgttaggtagctattttaatctctgtggctgtcctactgttttgtatgtatggatatataattatatatgcataattgtcttttttgtgaccaaaagcttagtatataccatttgttaaacaacctcttctctagttgtttaattttctgtttaatgaagtttcgggccaagatccatagtctcctaggataatcttttttttgtaaattttcccttaagattaataggcaatctctctcaagaagcctcaaattcagggagcagtcatctcactcttttaggagggagtctgacacgcaactagcccaattacttggtacatcttgtctagtctcttcactttttcattattagctatagtagtcttagaaagggaaactctattgatagtcccagacccaactataatatcttgttgctttctttttcttttggtgatgagtccgtgactgtactagatatgttactatgttaagctcatgagctgtcgtcttacctttgtcagatgagtggaatagtaagaccattcaatagaaccatatacaaagttatagacacatgtgtgtttgtgtgtgggacacttttaattcttgcattctagttgaactggtttactttgtaacacattatggttcctcaatactctagataatcattctcgtgttccatatatgatagcttatgaacaactatgagtatgcatatgcatacatatctcctttgtgactaagtgcgtattatatcattggtgaaactgaacaaacgtgatagacacacaaacacgagaattctccaaacctcggcgcacgagtttcaacttaattataaaaaaaaaattaagatgataaatgtttagtcaaaaaattggtcaaaattcgatatgttttcttgtagtatataaagttcctcacacatatttgtgtcctcccaagaaaccaagtggtagctaaacatcagattaaaaacagggaaaaacaattcttgtcattgaacatagcaaaactatacgtttttgaatattaatataacatgtttcacatacactaagaaaaatatgtaaatatctatttctagttatattgagttgatataataaagataaacacaagattaatttttgtaaactgtattaaaaatacaaaacaacaccgctcattaaatggagagaataataaaattcaccaattataaaagaagatcaaaaccgctcctcagttctctacatcaaatctatgaaaaaaaatg

SEQ ID NO: 2338 - DNA, 3000 bp, Unknown
  misc_feature (1)..( 3000): cDNA_ID_2157416_gDNA_ID_1620521_Annot_ID_159483 3000 nt of promoter + ATG
cacccaaagaccatcggaaattccattactcttacaaattacaatcggagacggcgaagaagaagcaccgtaattccgttggccggtggaagaaaaactcgaagcacagtactttaacggcaactgaaatatctgcgtcgtcatttcttcaaaaaaaaatgtgaaattcgtttctacaatttcacagattctgcatctctgaagatatagtttcgattgaaatttccagaggaagaagacgatcaaaatctcaactttgccacttttaatcttaagaaagggagattgaaaatttgaatttttatagattggagaataatacgagtggctgagacatgtagatagcctccgaacaactgctacttggataatactataaaattactattgtgttttccatatttaggattccccatatttaaggggttttgcatcgaacttgccaatttttttctttttttcttttatctctaaaagaatacatactcattttatgaaatcaaaaataataaataatataacttttatattttgcattcatgattttaatatctcaaaaaaaactaataattttaattattttaatataatattcaatatagagtgttatttcatcaactatttgtttaaatatttgattcttaaagtacaattaatttatcaattctagaatactgaaacttgaaatattggaaatgtttcatttaatatagtgtccacaaaatttttacatttgaatcactattttagtattcaagtttgataaccaaacaatatttataacagaacgataaattgttactcaaacaaactacacatcgtgcatatattaacctagttggttaatataatgtaatgatgcatgtttcatcaattccttttcttttcgctcaataactttctgaaccattttgccgatttctttggatatctcttacgtccatcgttgaaatccacgtaaactagtccaaatcggactgagtagcccgttgcccattcaaaattatctagcaaagaccacgcaaagaatcctttaacattggctccaattgatatagcgtcttgaaccatcttcaaatgttgagcgtagtaatcgatcctctcactatctttaaggtcgattttaccggtactagcttcatctctaccattctctgttatatacatgacaggatccttgaacttgtattttgcatagagaaggagatcacgaattccttttggatatatcaaaagccaatctgatgctgcctttggaccgataggcactccttctctttcacctgtgacgctagcacaaggatcagagaataatgtaacgttttcgcttgagcaaggaacatccttagcgtaagaagatgagtaataattgatgccaatgaaatcatatgatcctttcaacatcttagattgttttgcagtaaatgtaggtaagcgaccgtcttttacgttgttgaccatgtcaaccggatatttaccggttacaagcggctccatgaaatagtcgaatgtgaaggccatggctcgtgccgcagctaatctatcttcagctgattcggtataaggcaagttccaacccgcgttcaaagcgataccaacttgacctttttgagatgccttatatttttctctatatactttgactgcttctccatgagcaagaatgaggttgtgaccaacaatataaggctcggtagctccatttcccgcggtgcaattagggtttgtgaattttgaacaccttccaggagccattacaccagcaacatatccttgttgcacaactgttaatggttcgttcaatgtcatccaatgcttcactcgatctccaaaattcttgaagcaaatatccgcataatcgcggaagtcattcacaatctccgcgccaaagaatcctccgtaagcatcttcaaggctttgcggtgtgtcccaatgaaaaatggtggcgaatggcttaattcctttagacaaaagctcattgatcaagttgttgtaatagtcaataccagcttggttgatacctccttttagattcccacgtggcaagatcctcgaccacgagatagagaatctataggcaccgaaaccaatttgatgtagtaaacccacatcttccttgtaaagatggtaagaatcacttgcaatagatccattggtaccatcttttatcttctccggatatttttcagagaatgtatcccaaatacttggacctctaccatcttcatgagcagctccttcgacttggtaagctgacgttgcagctccaaaaataaaatcttttggaaaatcacttcttcttaatttaggtgttgaagagtgtttcttggctataacttcattagaagccaagacaataataaacactagcaaagaaaaatatttagttctcatttttatgattgattgttgaaacttggtttgttgtgaaaagatgaatagagctcagaattatataggcaagagaattgttatggcaatttgttatgttaatctataaatagagaagtataagatagagatagtataacaacaaatcttttaagttttacttgttcataattagtaaacagaacattcaaatgatcttatcaagttgtatttctaatgaagaaaaaatagcaaaacattcgtgaaggttcgttttcttttttttgttctatcgattttcttaataaccagaatcgattatctttagagtttagaataagcatggttgtcttgatcaaatatatatttgaaaaggtccattttaaaggtccaaattataagcccaatatataagcccaaagtttaggcccaattcacgtatcgctatactttttagcgggaaaatgttagaggaccccacctaaaactcccgccacaacaagctcgccatttctttgcccatagtggagaaaggttttgttttccgttcaaacgattttagggtttttgtcgcaaacagtttttggtagtgaagaggaaaatttcgagtgaggtagaatttgaaaaatg

SEQ ID NO: 2339 - DNA, 500 bp, Unknown
  misc_feature (1)..( 500): cDNA_ID_3610778_gDNA_ID_1620521_Annot_ID_159486 3000 nt of promoter + ATG
aatattaatcgaaaaatgacaagaaaaatgaataaaataaattagtttctaataatggcatatatatataaatggagaattctaacagcaacaaagagtctctatttataattttcatttctgaacaataaattcacatgaataatttttgttacaaaaatatattactaattaataatatgtaaaatgtatataatatttgaaggaaaatttgaacaaactgtgcaatttatttttaattttatgatattacaacacaactacatatttacctaattttttatgattatactagtaaacacaaaaaagtgttttttaatttacgtattcataaaattaaaaattataaaatgagactcttcaatcttcattactgttaaattctccaaattttttcttctctctctcttccctctgtcgcttcactttccctctgcttcatagttcatacgattcttcgattcgtcttcttcaatcagtgaagaagaactcaaaagatg

SEQ ID NO: 2340 - DNA, 3000 bp, Unknown
  misc_feature (1)..( 3000): cDNA_ID_2157424_gDNA_ID_1620521_Annot_ID_159485 3000 nt of promoter + ATG
ttgaaaccgaaactgattagagccaaaattgaaagaaattgggggaaacaaaaagcccaaaaacgcaaaccttttcaggaattcgaggaagacattctcgacttgaatcgcttgttcatccattacaaatccaccaaaagcttccatttttcaaattctacctcactcgaaattttcctcttcactaccaaaaactgtttgcgacaaaaaccctaaaatcgtttgaacggaaaacaaaacctttctccactatgggcaaagaaatggcgagcttgttgtggcgggagttttaggtggggtcctctaacattttcccgctaaaaagtatagcgatacgtgaattgggcctaaactttgggcttatatattgggcttataatttggacctttaaaatggaccttttcaaatatatatttgatcaagacaaccatgcttattctaaactctaaagataatcgattctggttattaagaaaatcgatagaacaaaaaaaagaaaacgaaccttcacgaatgttttgctattttttcttcattagaaatacaacttgataagatcatttgaatgttctgtttactaattatgaacaagtaaaacttaaaagatttgttgttatactatctctatcttatacttctctatttatagattaacataacaaattgccataacaattctcttgcctatataattctgagctctattcatcttttcacaacaaaccaagtttcaacaatcaatcataaaaatgagaactaaatatttttctttgctagtgtttattattgtcttggcttctaatgaagttatagccaagaaacactcttcaacacctaaattaagaagaagtgattttccaaaagattttatttttggagctgcaacgtcagcttaccaagtcgaaggagctgctcatgaagatggtagaggtccaagtatttgggatacattctctgaaaaatatccggagaagataaaagatggtaccaatggatctattgcaagtgattcttaccatctttacaaggaagatgtgggtttactacatcaaattggtttcggtgcctatagattctctatctcgtggtcgaggatcttgccacgtgggaatctaaaaggaggtatcaaccaagctggtattgactattacaacaacttgatcaatgagcttttgtctaaaggaattaagccattcgccaccatttttcattgggacacaccgcaaagccttgaagatgcttacggaggattctttggcgcggagattgtgaatgacttccgcgattatgcggatatttgcttcaagaattttggagatcgagtgaagcattggatgacattgaacgaaccattaacagttgtgcaacaaggatatgttgctggtgtaatggctcctggaaggtgttcaaaattcacaaaccctaattgcaccgcgggaaatggagctaccgagccttatattgttggtcacaacctcattcttgctcatggagaagcagtcaaagtatatagagaaaaatataaggcatctcaaaaaggtcaagttggtatcgctttgaacgcgggttggaacttgccttataccgaatcagctgaagatagattagctgcggcacgagccatggccttcacattcgactatttcatggagccgcttgtaaccggtaaatatccggttgacatggtcaacaacgtaaaagacggtcgcttacctacatttactgcaaaacaatctaagatgttgaaaggatcatatgatttcattggcatcaattattactcatcttcttacgctaaggatgttccttgctcaagcgaaaacgttacattattctctgatccttgtgctagcgtcacaggtgaaagagaaggagtgcctatcggtccaaaggcagcatcagattggcttttgatatatccaaaaggaattcgtgatctccttctctatgcaaaatacaagttcaaggatcctgtcatgtatataacagagaatggtagagatgaagctagtaccggtaaaatcgaccttaaagatagtgagaggatcgattactacgctcaacatttgaagatggttcaagacgctatatcaattggagccaatgttaaaggattctttgcgtggtctttgctagataattttgaatgggcaacgggctactcagtccgatttggactagtttacgtggatttcaacgatggacgtaagagatatccaaagaaatcggcaaaatggttcagaaagttattgagcgaaaagaaaaggaattgatgaaacatgcatcattacattatattaaccaactaggttaatatatgcacgatgtgtagtttgtttgagtaacaatttatcgttctgttataaatattgtttggttatcaaacttgaatactaaaatagtgattcaaatgtaaaaattttgtggacactatattaaatgaaacatttccaatatttcaagtttcagtattctagaattgataaattaattgtactttaagaatcaaatatttaaacaaatagttgatgaaataacactctatattgaatattatattaaaataattaaaattattagttttttttgagatattaaaatcatgaatgcaaaatataaaagttatattatttattatttttgatttcataaaatgagtatgtattcttttagagataaaagaaaaaaagaaaaaaattggcaagttcgatgcaaaaccccttaaatatggggaatcctaaatatggaaaacacaatagtaattttatagtattatccaagtagcagttgttcggaggctatctacatgtctcagccactcgtattattctccaatctataaaaattcaaattttcaatctccctttcttaagattaaaagtggcaaagttgagattttgatcgtcttcttcctctggaaatttcaatcgaaactatatcttcagagatgcagaatctgtgaaattgtagaaacgaatttcacatttttttttgaagaa

SEQ ID NO: 2341 - DNA, 3000 bp, Unknown
  misc_feature (1)..( 3000): cDNA_ID_2106497_gDNA_ID_1620521_Annot_ID_159482 3000 nt of promoter + ATG
acaaaggtaagacgacagctcatgagcttaacatagtaacatatctagtacagtcacggactcatcaccaaaagaaaaagaaagcaacaagatattatagttgggtctgggactatcaatagagtttccctttctaagactactatagctaataatgaaaaagtgaagagactagacaagatgtaccaagtaattgggctagttgcgtgtcagactccctcctaaaagagtgagatgactgctccctgaatttgaggcttcttgagagagattgcctattaatcttaagggaaaatttacaaaaaaaagattatcctaggagactatggatcttggcccgaaacttcattaaacagaaaattaaacaactagagaagaggttgtttaacaaatggtatatactaagcttttggtcacaaaaaagacaattatgcatatataattatatatccatacatacaaaacagtaggacagccacagagattaaaatagctacctaacatctatcaatagagtctcatggactcttcaaaaacgtaaaagaaagcaacaaagctttaatacttgggtctaggacgaacaatggagcttcgcttcataagagttcttacgttaaatagatgaagcaattagacgagaggcttaaagaggttatttcataaatggtatagtatacctaatatctggtatactcacggaccttcacacacacaaaaaaaagaagcaacaagctttgataattgggtctagagggccaacaatggagcttcgctttgtaagatttcttacgttaaatagatgaagaaactagacgataagcttataaataggttattccacaaatggtattctacctaatatctgatatagtcacggactcttcacacatgcaccaacaaaaaagaaaaaataagaaagcaacaagacttgctaatggggtctaaggcctacaatggagcttcgctttgtaagagttattttgttaaatagatgaagaaactagacaagacgcttaaagaggttgtttcaaaaatggtatattacctaacatttagtatagtcacggactcttcacaaaatttataatttctctatttcactaattaagcacatcactttggttataggtataacaaaagagaagggttatgttaaagagcaattaagaaacctggaaatgggttcagggaccataaacagtaaatccccataaggaatttaataaaaatggtagaagcaaaattcaataaaagaacagtaaatgctaaagatagactttgaatttcttcatttgtaaaaatgtacttccctttataaaggtgcatggattctctttttttttaccatattcgatttctcctttttactatttatcaaagtcttcttaaaaatttggaagtaatggagacaaatcattccctcaaacaaaaaaagttaacgagtgttgttgtgtaacaaatccacctgtgaccgaggatacatatgactgatgagctaatattagttgaaacaatttttcttttcttttttaccaattggaaacaatttaatatatatggtatgaattacttatactcttaatttctctatttcagggaatataagaaaaagagattgataagatctttgatacgctaccgggaataatattgaacaaaatgctatcaaccaaataagacatataactacataagcaaatcatacaatttggaaagtgtttttagtttcattttaaatcattgtaaaatagcataattgtagcatgattatcgtgaaaatccaagttgaggccatatttcaagtgcggtcccgccaaaaccctattgaccttaatcatggcatcttctacaccaaactcgtattgtttatctttctccatgtctatttcactcttttcaatgtaacctaagttgattttctaagtatgaaacatcaattacatcctgcacaaggtgggtgaaaactaggacatgcaaacagggtgtagacgagtagttcctagtttttatcacttttctaattgcactctgaaactagattctccttctatctttaatctctcctgaatttcttcttatctcatgcatgtcttcttctatttattttttatttttttaaatttgtcgacaatttctatttctttttattattattttttgtatgaatcgtttctaacctctttcactcagcacttaattagaaatctgaattaaagatcaatataccatgggttcaacaattgaatgaataaaattttagaaactaagatcgaaaattatattcaaagtgctaagagtaatcattattttgtgtttatattctggtttctacttttatgttcctattttttcttctcattattatatttttttggtttaacactttttcttttttccaactcatgttaacaaattaagctacaaaaaaaaatatgttgtaatgggaaacaaaataaaaaagaattatgttatgcgaaaaaaaaaatatgcggcaacaaaattttggcttgttttaggtatcaaataaatttggaccggcactgtttgcgagcgtagaagaaactgttcacacatactaaagtaatggttgacaagatcagtttcagagttgacgataagaaatcaactaggttaacaaaatgtaatgaaatcagaacatggaaatctgaacgtggcagataaatatacatattcaaactcttttctgttaatttgcgcagaaatgcaaattcaattgctaagcctatgcggcctttacaacgaatcagttaaaataatcaaagtaaatcaaataatctaatgatgatatatcgtgtttacaggtttatatggaggaaaatatagtgatatgataatcctcatttaaatcattatatagtgaagatactacttacacacgtaacctcctcgatcgtcttttccgattgaagtggtacagaatcctatatatatgactaccttcttgcaagttttccaccaacaccacatctctctctatct

SEQ ID NO: 2342 - DNA, 3000 bp, Unknown
  misc_feature (1)..( 3000): cDNA_ID_3067145_gDNA_ID_1620521_Annot_ID_159476 3000 nt of promoter + ATG
tatattcgtttacaacctaaaataaatttaactgtaagtaactaagtataataatattatagatgaaattaaatttatttaaatcatatcaaacaaaatatggatgtttgtaatcatgtatatgaaattaatatttataaataaatttatgtgatgtagttataaattggatgttaattttaatttataagttctatttgtattgtagttcaaggttggaaaacaaaatgtctatttgaatgattaatatatactgtatgttccgtggccattcagttgcttacgtgtagccttagagaccaacacaaatatctcttattggagagaacaaatcgtgtcgtttctaagcactcgttaaatctattaaaaacacacacaaagtccacaagtcaattagtcaaattcaatccacgtgtggtttgaacactgatattttatttaccaaatttggcttatagtttcaggttatgttatatgccgtttcaggataagttttggaccggtccgtttgtcagagacttgaacacaaaatttgacattccagaatcaaaaacagtgccgtttgtacgatcaataaacggcaagacacttaccgttgcaaatagtcaatcttgctttttgagctaaagactgtaatctgaagaaaggataagactttggacacagagaacacaaagagatcactgaaaagaagaaaaaaaaaatggcagctttgagttcttccatgaccatctcatatctacattcactttcttgcaacaaaagttgcttgcttacatctcaattttcaaaacccttgtttataaaccaaactcagaagaaactcagattctcgatttccttttgcctcaagcaaaacgaatctggtattgaacaagtcgaagaagaagaagaagaagaatttaccgttgtgacggccgtaaaaagcagatacaatgagattgttatagtggatacttttgcttctagatatcttcttcttgattccactagtgagaatttttaaaaccctaattcctctgtttttgatattagatcctctgtttataacctaagtttctcattatgtagggaatgtgcatagtgttatcaataaaggaggccagaattggactggagcttattgggtatgttacatttttacatcatcataaagttgcaaaaatcatagcttgagttgtttctctgttgataggtaaatgttgttattgtgtttaattttgaatcctatcaacatttttgtttgaaggacgagtctgcgtgtttgccgcctattatccctaatggtcccattgcaatctacggcttggtgagaaactacgtggtgaatcttataccgattgtctgagaagtacatgaacataggcatgcaatgagtcaatgatgtgtttaaatttttgttcatgtgtttgttagggtggtggaacagctgcaagattgattcttgagttgtggccttcaacggagcttgaaggttgggaaatcgatgaaattgtaagtaaactatcggattttcttgcggcattacgtttgcatattggaaaatcttgagttcacttgtgattttcttttatgaacagtagttgattgagaaagcaagagactatctcgggctgtctgagctagagataccgacatcaaaaggcggtagactttgtattcatgtagatgatgctctctctccttgtcaagatgattcaaaaagatatgctggtgagatttacaggttaatgtatgttgcttattcctttgttcttttatgaattcttgaattcttatgtcgatattttagggatcatcgttgatttgttcgcggatggaaaagtgcttgatcagctgcaagaggtactttaatttgttatggtgttagtattatatagtcaactttgtgacaccgagtattttgaattcgagtatgtacagattccaatgtggctagaactggctagtaggttaatgcctaacggtcgccttatggtgaattgtgcgggaatcgaaacagaagtaaagaatggaaaaccagagttggtgttagatgatttggcttggatgttgaattctactgtcaagatcttatcagaagcatttcctggacaagtaagtaacacatttcatcttcatatccttttgttaactacgcgtttaagataaaaagaaaaacatcgcgattatttattgttgcaggttagttggaagagaacaccagattcagaaggtctcaactttgtggcattaacaggaggcttacctgatcttagtgactggtctagtaaggttccagtccgtttaagcgaatcagtgaagctatggaagctttgcgagacggtccctttgcaactcggtgctttgaatgcatcttaacatcaagagttttgccaaaagatttgatcagaaactcacatgtggatagtgaaagttgtgtatgatttgttttgccaattgagtacagagatacacaaaaggacaaaaagaaggtacatatgaatttcacatttgaacttaagaatttttaaatccaaaattcgattatcataaaattttgaatttatacaagaaaccttttatgatactatgttatatatatgttactattagtcagacaaatgttttgaacaatttcttggttcagaccgatattagacaattgtttgacaatttaaccacttgacgaaacttgatatgttgctcgaactctaatacattgtccgcaggttaaaatctagtttcttactaaaaagcattttgatcgatattgttggcaacaaaggatcttattcaagagaacaaatcacgtcgtttcttctaaactcgtttgagctgttaaaacgtcaccaaagttttgactttctatatacacaaatcgtgccgttttcacagtcaataaacggcattacacttaccgttgcaagaagtcaattttgctgatgagactgtaaaactgaaggaagaagaaaggataagacattaaacgcaaagagatcactgaaacaaaccaaaaaa

SEQ ID NO: 2343 - DNA, 3000 bp, Unknown
  misc_feature (1)..( 3000): cDNA_ID_3067155_gDNA_ID_1620521_Annot_ID_159465 3000 nt of promoter + ATG
gccacggagaggtggagggggaggaggaagaggaacgcaatccaaacgcaatttgttcctttctaacaatatgtatgtaccacaaattgtatgattaatttcttcaaacaataaatatgattaaaactacaacagaaaactatgtatagagagtataaacaaggtaattacttttaaaaaatacgtaattagggaaatgataattgctagagctgctattagaaaggaaaaaggacaaaaataaatgtaacaaattaacaatgtaatacattattatttaaaaaataataaaataaatattcggttggtagtctagtacattgatataatactatttaacactatcaatactaatacaataaatcaaacttagataaaagataaataattatattcgataaaatagatgtccacataaaaataacgtgataccatggaaaaacattatgtgttctgcaaccttagatgttgagaataaaaccaaactaaaactccaaaccaaattataacagtattactatatgtggatgtggaatgtagctcgtttttaatagacacacaaactcaatacaaaagtaagagaggtagtgttaaatagttacgttggagacgtttggcctgggcgactccaacttgagataagataaacaagagcagaataaacaaagacagaagaagatgacctaaatttgatgtctttgtagccattacttaagtgctcgactctctcaaaactccattacaagacacatatataagataatgaagcataggtagtagatatggctactataaatgtagtactgggcctagtagccgacgaacatttccattcaacgcgctttgactttatgaagctgcgaaaagtctttgcaaaccaaaattatatgtataaatacaattgacgtagataataatttaatttttttaattaaatataaaacggtttttttatatatgtaaattgtaaagtgatgatgttgtaaccctttttatttctttctaatgtttaaaaaacgctttctgaaaaaaaaaattactttggtttgtcatttcattttgaagcattgtagtctttcaaatttataaagaatatgtaaattataacctgaaacatataatatgagaataataaatgttgttgagattggtgggagtcatggttgtgagattagctaccatccatggcatgggattatatatgggaggatatgttgcattagtaagagatattcattgcttgcaggttgtgatgtcatggactaaagttggtaacaaagtttgcgctgaatgttcttgaacaccacataacaataatcgaccaatgtaaggtctggtagtgcgaaaatcagatcctcttggggaattatgttgcatcaaagaatgttgctgattttgatctgcttttagcagagagcggttgcagttgatgacgtatttgctatgataaaaatgatgacggaggcatatgagtgtggctgctaaaaaaccttgcaagtgtttcatttaaaatattcagcaatcaaatccgatattatgtgctttcttaataaaaataagcaaacacatctttacacagaaataatcgtagggacgctatggcctatagcaaacagaggaatgcgtttggcctttttctaaacaccaaaaatatattagtcaagtcttttcgattttgtatacattcacaaaaaagataaaactacaattcctacatatatataaataaaaaaaatactacaaaataataatttctatcgtctcgtctaactgaagtcttcagcccacttgcaaataaggtacgtagatattaaatatagagataattcatttaggtggaaatagtatttttcttaagattagttttttttttttttttcttaagattataatataattcttctcaaatgggcttgggccaaagcctacaacaaaaaacagtccagttacaaaagtggttaatcgacaacattgccggaaaaaaagaaaagctctctgctcgttgatagatgccagcagaggaccggagccttaaatccggcgggctcaagagctaccgtttcgtggtcaccaacgaagatcgggaatctccaacgaaagagaccggttttcatcatcaaaaccatccctccgatgcaccaacccacaacagatctcccggaaagctagttgctccgactaggcacatcgacgaaatcggatcctgaaaaagcaacccaatccactgggcggtaacccttctcttccaaaccgaaagtagccaaaaaacctgagtttcgacgattcaatccggctcgatggatgctaaattgaggcagatctaaaggatggtggctcaaatccattgcctttaaacccgaactcctcaaccgccctctaagaccctatggatctgcagctaaccaccgtgcaaaccaattttttaagattagttttcttttataacaattttagttttaattagaaaaacttgacaagattttgaaggtttaataagataatttagacttctttttaaatattcatgatcaaatttacagctccaaatttttttatgtttgacatcaaaccacaaacgcattattaatttttacatttcctaactacacaaaattttaaaactcagcctaaaactgttctaccatttttaagtgtttgatatttctccactggtgacgctgaagttaaaaaagactaagacaaaatatatgaatggagaccgaactgtacagtgcagtgtgattccaatagtaacaaacatgattatggagtatgacataatcacaaaatattaaatgtcacaaagtttggtagactttgcggcaaaatggaaatgtccgggcattggacggtaggcccagactagactttgtggcaaaatggaaatgtccaggcgttggaccgtaggcccagacggtcagactcatagtaccacattttacatgtagtatataaataggtcttataatggagttttgagaaagtggaaaacctagctta

SEQ ID NO: 2344 - DNA, 3000 bp, Unknown
  misc_feature (1)..( 3000): cDNA_ID_2157396_gDNA_ID_1620521_Annot_ID_159475 3000 nt of promoter + ATG
gcatgtacataaatatgagtctaaactcgagaaaaaaataaagatcgagaaatgagaaatacaatttcctcaaaaatgggtcaagttctaattgtgcttcttctcctctgcaccgtcctttgccgtaccgagtcagctcttccttcgggtcaacattcagtcctactaaccggtttgtgattccatatattcataatattcatgcacacgtttgtatatttattagttgattgataagatccatgaatcatatggtctaattacatggaatatatatataggatgtatttaggacttgttaaaacattttaaagctgtatttgtgcttatgataattaggttctcacatatatagaaagttagagaaaacctaaactgatacatgagtacatgtaccaatccattcattgttaattgcgtatcaattaaaaacctatgaactgtataatagttactttcataatactttttgtttggtatgaaacatatacatatataaaaattcgatttatatgttttgttaatttctcaatagtgtaatgtatatgtgttaataaatacgacaagtaatcttattaatttacaacgtctaactatcttaaatataataaaaaacgaaggaaggagattgatgggttcgggcgcttcgggaccagtaagatcatcgcagagtagccaagctggtggacgttttaatgatgctgatcctatcgccatagattacggaaaatattaaatttctttttgatttcagtttttccaaatttaatgatgttttaatcgttttctgctgctttttcatcagtttacagtcaactgttacgtgatatttcccttgtttgaagtcatgaaatttcttgtatcgtgatctatattatatattttgtgtttttgtttgttttcattgttagaacatatttatttccttaaaacatggaaacgtaatctatatttggaaaaactaatgtcatacgattttttagccaagggaacagaaccatcgatatatggacaaattaatggtgctcctctctaatttcgccatcatctcttcctaatttccaatttttggtttaagaaatgtatttttttgtattttagctatcggccattacaagtccagtttttttttacattttgataaaaagaaaaaacaaatccagtttttaaagtctcagtgatgtacgtgttttcagatatatatatatatatcacatatgggattgttgagatggtggggtttttaatggaggatcgagaaggacgatctaaaccaagatggaacggtcgagatgactaaccgatattatagaaatagcgaagatatgattatagaagaatcaaccatcttttggtttcttcttgatttttctataatcatatcttcattattttcataatattggttaatcatctcgaccgttcgaactttgtttaggtcgatcttctcgatttcccaataattttctagttcattattttggatgtggtggttgggaagataaaaagaggaaacaaaagatttgtgaaaagcggaacaaagattagaaaataagaaatgattagagtcatttcaatatccagtgagcaaaaactctaccgaaattgaaggaattgaggagttttgaagaggaagaagtagtggcgggtgatgaaatggcaattgatggagaggaggaattagggcttcttggtgaatttgggggaaattttgagagtgaagagagtgtttatgtcattgaagaaggcgaggaggcaaaaaactgaaatgaaaggttcttatttagtttatccgttgcaatgtgtgccaatctttttttctaatttattattaaactgtataaactttttttttgtttattttctgtacaacaaaccgaagaaacataaaataaatagttagtatcttatatgcgtatataaaatctaaccgtctcacagacaggttagttaactatgctttgtctttacttatagatttgcatacgttgcagttggttcgaatggatgttgcaacgatattacatgatgatattgttggacaatcgcgtcttagactagttccgatgtaattgttttttttttgtttttgctttaataaacacatctccttgtcactcacaaaaaaagaaatatgaagaaacatgggacaagataattgaaactatcgaaattggtttgcctataattttgttttaaaacaataatgcagataatgtgtaccaggatacaaacactgtgtttaagaaacacggtagatgataaattctagtgttgtttaatcgaaatttatgtggtatattcgtttacaacctaaaataaatttaactgtaagtaactaagtataataatattatagatgaaattaaatttatttaaatcatatcaaacaaaatatggatgtttgtaatcatgtatatgaaattaatatttataaataaatttatgtgatgtagttataaattggatgttaattttaatttataagttctatttgtattgtagttcaaggttggaaaacaaaatgtctatttgaatgattaatatatactgtatgttccgtggccattcagttgcttacgtgtagccttagagaccaacacaaatatctcttattggagagaacaaatcgtgtcgtttctaagcactcgttaaatctattaaaaacacacacaaagtccacaagtcaattagtcaaattcaatccacgtgtggtttgaacactgatattttatttaccaaatttggcttatagtttcaggttatgttatatgccgtttcaggataagttttggaccggtccgtttgtcagagacttgaacacaaaatttgacattccagaatcaaaaacagtgccgtttgtacgatcaataaacggcaagacacttaccgttgcaaatagtcaatcttgctttttgagctaaagactgtaatctgaagaaaggataagactttggacacagagaacacaaagagatcactgaaaagaagaaaaaaaaa

SEQ ID NO: 2345 - DNA, 2922 bp, Unknown
  misc_feature (1)..( 2922): cDNA_ID_2157321_gDNA_ID_1620522_Annot_ID_159494 3000 nt of promoter + ATG
atctcttgcattgtatcattgttacccacacgtttaccgtgatggagaaaattttcttatcaattcccgagtctttccacttttcaagaatctcaatagctaagtatgcacaagtatgcggaggaggcaaagcacaaaacactaagatcttgttcttcaacttccaatttttgtcgatataatttgttgtcaagcacatatacccttcatgcgtgagtgcagaccataaatcagtagtgaagctaattcttccaagaacttgtgctaattctctctttaacttatctatcctagactcataaaacctataaacatccgcagttgctgtgtttcggctaaagaacttcacatccggattcaaatatttccaaatttctctaactctatcatactccacataagtaaatggcagatcgtgctggataacatgctgatttatctttctagcttgcaatcttgcttccgaattaaccatcatctgcccaatatcaccatttttaggcacaagcttacatttaagcaaatgacgtctaaatgtgtttgtaccaattttgtgagcattgtacgcataattcttcttgcaaatgcatgcattgtactcttcctcaagctattaatcttggtaatcaatgcgaaatgttcccaaacttctgagtattgccttctcttctttggttttgatgactttcccttgtcagcatcatcttcatcatcatcaataaacccctcatcatcataatcgtcgttatcaacatcatcatcaccatcatagacttttatttttggttttctagatgattatggttcatcactacttttctttttctgcattttaggtgtttctgatgcaccactcactttcgttttctgcttttttgatggttctggttcaccactcactttccttctttgctttttagatactccagattcatcaaaagcagctcttccctcttcttcagcattcagaacattgacaagtctttgagtttccagatctactgatctcatgtcgtaagaatcatgtgactcttatcaataagaaaataacaaaaactatgtcaatcacctctaccttgccgcaaattcatttgtttgtgtttcagtatgtttttcagctcactatacacagtttttggaaagagtgaaacgggagacggcatggtgagtcacccattccagctcccaatctcgccaaacgaatcgataagaatagatagaatcagttgagtactttggttgcttctggatcacccgtcttcgagggcgggctgcgatatttgttcaacacccattgtcgttagctcttcacttctgtttttatctttttgagtatgctttcaaattttttgcttaacgatgcatttattgtaaaaccgtcttttttggtggataaattttaaattcataaaaaaaaaaatcaaaacataatccaatctaaggtcaaggttcaagtatgaaacatcaccattatagtcacatatgtctttagatgaatatagctccagccttcaagtcttcaacgttactcacaaaagaaaatctctcaagtatcaaaagctgaattgtaacgagacactgttcagtttccttgttgggcaaactcatatatatgtctagggtttttcattttaactccaaaactctctaatagtgaccaaatgttttaaatactctaagtgaaaaagaggttttaaatgaattgcttctactttggcgggtcaacccgctaatccgctgtccgcaacgggtcaatccgcttcagcccgcaacccatgatgggccaacccgctaagcccgataattcatggacataaatattgatgtccaagcccgccccgccacagtactacttgggctagtcccgtgggcattaggtccgctttatgcatcacaatttctcctctttgcacccaaaagtgtgtgattcatggcttcaacctgaattgactcaaaccaataactacaataaatctttataaattaataaccattataaattaattaaaatttaataaaataagaagacaataaaataatatattttttatgaaactcctatgtaaatctattctctcacaaatatcataaatttagaattaaatacagttattaatatatatatatatgtataattgtaatgaaatatgactatagtgtttttgtttttttttcttttgaattagcttttttctactgtatccaaactttttgatgttgttttgtcgaattacatcaaaaatttgtgaatgattttggatgcaataattttctttacgtgtaattagttttagaaaaatatggattttaacaaaacattcttattttaaatatattattttaataaaattatgaaagtagacaaatctctctgataattatctttaaattaatttatactagtatttttgaagtatattttgtatatggattaggttacaatatatccgaaattgtgaaccaaatattctatatataataatataaatatttagaagatttggttaagatttaaatttataatacactaagttaagagaaatctaaaaagattcatgattatattgtgattcaaaattttaaaaacaaatatatattatctaattaattaaaaagacgtgtgtttaacgtctgtatacattagtttctttcgtaactacctttctgtatattaacgtgagactgtatagactatttattgaccatcttggactaataaaatagcaatgtagtgatatctcaccaatttacctaaaaaatataataacgaatttatttagtaaaaagacagaaccacttcagtttagttgggtttatcgaagacccttcactttcgcgattcaacagtctgactcaagaagatcttctttttgatggtgtctttgttctgaagctctttttgttaaagacataaacaaaatg

SEQ ID NO: 2346 - DNA, 3000 bp, Unknown
  misc_feature (1)..( 3000): cDNA_ID_2157334_gDNA_ID_1620522_Annot_ID_159499 3000 nt of promoter + ATG
aaatcaaatgaaaataaaagggaaaagatctttctttttgtcttctatatttattatttattgcaaattatgagaaatgttacatacacaattctaacacggacaatttcttccgacccttattagatccacgatagataacacatccttctccatgctcttgattttaattcatttaaattctttgtcatttattgtcgaaagagtttttctaaatatttaaatttcaagtccaaaactacaggatttataacatccaaaacactaattttatttagataaaattgtcttagttcatttttcataaaatttaaacaattgaataaaatctttataagttaatatcagtatacattaataaaatagcatggtactaacattatcaatttatagatgttttattgtattattgatgagtaaatatgcatatttatgtccactgaaaataattaattgataaatttaaaatatattgaaattatagtaatcttaattttaaatttaatttcatgtaatagtatttgttttgtgcccatgatgatgagcccatataatttgacatcatgttgttttaaaaaatcaatcgttgagttatataaatgattgcgacgtatcgcacgatattaccatcgatagaacgaaggaaacttccatttagcagttttttttattcaaaaaacatatctttcatataatagaagtggaaaagttacaccaaggaaaattgaacctacaatcgaaataaatgagataacaaaagtattacaataaatttattgaaagacaccaaaccagatgaatgatccgttgagctatccaacaagggtctagatgacattgaagaatgttaatgataaataatgagaactgaggctggctttgaggatgaattatgcaatcttgcattgcgcttttttccatatggagtacagtgaggcttgataggcaattcgaagaatcaaagtagttttcttgtcacgacaaggattcttcaaccatctaacttcatcctcaaattgatttagaggagaaagatgggctttatcatagaaatagtgtcatacctttgcaacataagagcagtcgaagaataaatgttagcgagattcatccatcaaattacagagaagacacgacgaaggagtagtcatgccccatcgaatcattttgtctctagtgagaagtctatgatgagactttagccaagcaatgaaagcatgcttaagaatccttcctggaaatcacacagattcaaaccgatccatctttgtgtcaggaggatgaagatgtgcataagtttttttttgaatattaatgtgcctaagttttagcagcagagaaaatatttgatgcatggatatcatcaccttccaaaggtaaacatcatcctctacatcctcttgtaagttaacagtagaataggaaggaagacattctttaagcaactgaataatgggactgcgacttcgagaatttgtaagccactattgtctctttctcaatgcatccgcaaccacaacagaacgagggagaagagaaattcttagtcataaatcttcaggttagctcgacaaatatggtcccaaaaaaatccaattatcagtccagaaattacaagttatttctgaaccaatttcacaaacgatgaaaaacctagttaagggtcttaacttgcaaagattattccaaatccagcttctccaagtgatacactccatatcccaaattttttaaaaattattcaaacaagatccatgtgtattagttttctcttttggtaagtaaaatagtggtatccataagatgttggattatcgggcatctatttgctaatgattgtttctaaattagaacttagatttgcgaatctaataatacatcacttatcaatagataaacctttgaccattttttcaacgaactcataaaagatccaacaaaatattttttgagttattaaattaaatactactataaattatctttaaataaatcaaattatgggagtatttggtgtttctttcatcaatgaatggagcaaaaataaaaagtatttaaaataaacaacgctaacatttatgacaactctattatctctctctcactctctcacttcaaatactataattcattgtccttttcatcgaatccaagacctcaaaaaaaacaattattatttttcaacgatcaagatctcaagagtcaaatccaacggtcaaaaagaagtgactctggtactgacaccacctctcataattctcgttagtaggacctctcttcttcttccttctctccactgtatcggatccgggtcaaatccgggtcgggtggagtcgggtcgggtctcttataagaggaggaaaaccacttactcactttcttcttcttttctctctctctttcacccccacgcactcttcttttctctctctgacacatatctttttctctcactaaccatttctttctctctctctcttctgtttttgaaagccaaagtgtctctcttggacagtgatggaactgcttcaagagatttaattttttacccacgagagaagtcaagttgttgaagaagaaagatttgttcttttgtcttgtttctttcattttttcatccacaaagatctcaaagacaagagtttttttttttctgttggggttgcttcaatgcgtacttgtagtagagagcttgtgttgttgttcatggtttgatgatgagaagaaacagattctggttttgaagaaatggggtttgttctgtttcttgtgtttaagggttttatggatggttttttgattcgaagctttcactgagtcttatggttgtgagtgagatttttgggggtttgaacaaaggagatggagaaagacgagtttgtacttccggagctaaagagttatagctactgtagtagctggaagtgaagaagattttttaatagattgtacggaaaaattagggttttcaaagtttggtttcttgaagttgaattagac

SEQ ID NO: 2347 - DNA, 3000 bp, Unknown
  misc_feature (1)..( 3000): cDNA_ID_3067199_gDNA_ID_1620523_Annot_ID_159501 3000 nt of promoter + ATG
taaatttttagtatatttatatgtgagttacgttgtagacgaaaacatatagcatatatatctttgctttgttatcttaagtaaagtcgtcgtgactgggagtggctaagcctgtctaagacaagcaactatgaacaccgtgcgtacattaaaatagtaatttctgattagtttttaattattcaaatagtacattagaaaaatcggatagtgatatttattaaatttgccaaatggactttctgcgacaagcttaagtgaccttttgaacatttaagatatggtatcttttccttttcattgcgctttaaagtttaaaccccatctcactttaaatgttgagtggaagaaaaaaaatagtgcacaaaattgttatttacatacatatctaaaaattgaaatatctattgaaatgttaggtaactaatactcgtgcatacattaacacagaaaaagaaaaagaaaaaagtaatcgtgctcacacgtgacatgcctttcttagcttaatttagtgttctaatgaaattcatcatttgatttagcgtctaatttagacgactctgtaagaaataattcatcctataaaaccaaactaatgaagtaattcctcgtcggtggatgggaaaatagtagttatcactttgcaactaaaagaaaaagtgattcctcttttgtgtttttaatttattatatatttcgatcttacttttaaattcatcttttgttagttgctttgttttgcttatgatgaatatccacataaaggactttcttctttcttttatggtgtccctaggaatggtgatttcatcttattcgaaaagtagctagctgcatttcaatcttccatcatcactcatcagtgacaatgtataatgatctcttagtaccaatactcatgtatattgttatgagctgccaactacaaatatttaatctttgttcccaaatttcaaacttcaccgagaaaatagcttatgtctatccaaatatgactgactgaatcgaataatttgattttaaaagcaacaactagtaatagacattttactattaattcttgtgagacataaaccagttttcgtagagaacaaaagatagtgacattaaagactccatgtatttgtgagactccgtgctatataattatagccaactccattgctactataagtaagtaattaacaatagatatatcacgtattgtggttagatacagtagatttttatatccaaattaatactacaagctacttgcacattacaaaatttgatcattataagctttcttggaaactacagtctctgatcttgagctgcgtcagtggacccataataatctatgaaatcaaccccacgatcgacccaccaacatacaaactttatactattaatctatacacacaaacatatcatatagttttcttaccaaactacattagggtaaattaaaattgaccacacgattgcatttatttttggtgcagctctcgtatatataagatacatctagaaccagagaatatactgtacattatatattgttataaatttcatacatcagaactatttttctatagctagtagtcaagtcgtgaaataatcgtaagaaccactgacagtatgtaaatatatttttattttagaaatcgtctcgatataatttgtgatatttgtaatatattcaaatcattgtagttatctaaaataaacatttttttttgtcaaaggtctacagtaaaggccgtaaaacaaagcaaaacatgtgatttattttctgtgatgttaatcatgtgattaaatcattcacattgtgttgacattatactgtatatctaataaatgctaatctttttaaggaaaaagtggaattaaattgtttttggagtataattttgtcagtttatggtggaaatcttatgctaatgagcacacgtaaacatgtgaatatatacatgtggggaccaccctgacataaaccattcccgcgccccttcctcgataatctcaaccgcatgatttaaccctttccttcattctccaccgtccgatcatcttctctcccagggtcacaatctctctctctgtagcttttatgtgaatcgatcacttctctgttttttttttttggatcttcacttttgctgattcactctccttagtatttttgaatctctgtttctcactctctgtatcttcgtcttctccgtcgccgagtggttgtgtcggttctgcattttctcttcgctgtttgaggtaattttactcttttcttttcccacgattctcgggaaagtttcttcgctttgggtttggttgaaacattgccgtttcgttaagctgataaaccacttcaatgccgttcttctaggttttatcacgctttcgttttgcttatatatgtacaatctaactaaacctagattaaattttatgtttcgaattcgattcaaatcggagcttgatcatttttgcttcgttgattttaagaacaaattcttagcgatttatgtatataccgtcgtctctttcttctccgagcttacgattttggttaatttccgaaatttttgatttctcctttttttcttggatccgtcaaaagttttgaatcaaatctgaaatttgtttttgtcgtttcttattgtttgtgatacttgttcataaatgcacggacgcatcattcagctgtttcttcgggtccatgatatgtatttttagcattatcgaaagatgttttgatatcaatcattattatcttcttcttcctgcatttctttctgcgtccttgaggaccactttttttgtttttttttgtattctttcttctctttgataccgtgatcattgtagaaaagaacttttcagaaagtgctttcaatacactttttgatgtgattgattttggtgtttcttcaatttttcagaatccaggaagtcatataagttagattgatgtgaatccattggttctgtgactagctactactacaatctatg

SEQ ID NO: 2348 - DNA, 3000 bp, Unknown
  misc_feature (1)..( 3000): cDNA_ID_2048071_gDNA_ID_1620523_Annot_ID_159511 3000 nt of promoter + ATG
acccgaagatttgatgagtaaacacatgcataaaatattttttagctatatttggtatctttacgatgtttatatttttttctttttgataaagtgtttttgaaagatatgcctccaatttgatataattaataatataagatgagatgtagttttgagttttattcccccgaatggaatctctcttcctaacaacgtgtaaagtttgtaaactacgtgtattcacgtgttctttcacaatgcatgtttattatctttcttactatttttgtttctttctgacatttacgttttgttctgtcatatactcatataggctttaagttgggttaagatgttcaaataaatatacatgtaagatgaaactaaaacaaattacattaatatcagatttttattgttaaaggtttgaagatattttttcctgaaaactaaaaagtatgttcttaacaaaaaaaaaaaaaaaaaaaaaaaaaactaacaagtatgttgtttactgaaaagattagtgactgattttgtgagccttgacgataaaaatgtagaaaagtaaacacttcagcaagtggataatttataggtacctcatattctcgtcttttgatcaaacgtttcttttcctataaaaattaattacagataaaaagcgtcatatattaattaaccaatataatagcatatttattttggtgtattactttttctatcaattaaatatataaagggaaactatctcaaatctaaaagggaatccgatttaaagaagcttaacttcttctgttctcttttcataaaaaataaatataattacagatataaagtttaaacaatacaatagtatatttattttggcacattacttttttccattaaagaaattaaaggaagctatttcaaaactaaaaggaatccgatttaaagaagcttaacttcttctgttctctcgtttgcactttggctctacgtgatcaagaaaggtcggcaacttatactcagtctctggcaacctataagttgaatgacctgagatccggcgcagaacgttgaagaatctcactgtttgtaggcaaaatgtacctccttgtggatttgaggattgtttggtagacaactaattgagaatcaaaattggcaacaaaaaaaaaaatatggttaatccaaaatagtaattacgttatggaaatttggtaactgtcagagaaaacagactgtacctacattttggatcgtctttctccggaaacttaaacctttgtcgttgactctatccctcgttaacctggatccttgtggacagatcacgctaaatattcaccaaataacgatcaagtagtactcgtaaaaacaaggtgtgaatacatgagtgactttcatgtggaccgtatatgtaacctcaccataaataaaaaaaataaaaaaaaaaaaataaaatgaaaaagggtttaacgtccattcaccatatcagctatttttttgtttgtctgaaaatgtatgaccatatcattatgacattatctgctaattaaactgccttaataaattaacttcgtatatattttgctaatgtatctctaataattattcgttattatcaacttctttaaattttattatgaagatacgatatcaactctagttaaaattttcataacacagaagcgactctgatgtgatgggagtgaaaactaatacagctccacattctcacatgatgcataaacaatgctaaaacctcagataccataacttttcatggaattatgtttctcgattacaactatgtacccttccagatttcagaccaaattttaccatattttttctaataataaaagaaaactttatcttacatatatgcatttagccttctgtatacgcatttgcatgcatgcattaatgagtttcttctgatatacatgtgtgaggatttgtatatttaattcaaaaatatttgcataatggtcttactttttttttgttttttttctttttgacggcacttactttttatatattaaaagagttttttaacatgtgggttatgacaattttctcagtaactttaatttattttaatcacaaaaatatactatatagtggaatataatgttgtttatgctttattgtatgtgagagtctgggtctagtttatttattttaataaatgtgttacatctttctctttgcaatattcttgcttattgtttatggcgtcgatgttgtttcatggaccaactgaaatatataaaaggaataagcatctaatcgactaatcactttaaaatactccatatagtactaatcaaatacgtaccccataaaatagtccaatgattcaccacgaacttaaaaaaactgtataaatgggattcccacttttcctaaagccttgtgaccggctgtaccaatttaaaacgattttatgctataattcatttattgaatgttagggtaagatttgattaaaattaccctaaaatcatggtaaattttgatttaatttataacaataacgacacaaaattagagacaatgaaataaattttgatttttagtatgtggtggagatgtcaaacagaatctccattcaatttttttaaaaaaatacttatatacatataaattagggcatataattatgtataaatacatacaaatatgccttatatttatcttatattctagatatggggttttattccaaaaaattatattgtttgtatcattcactaatcataagtcttaaaatatattgcaggcagaaccgtctatcttagtttcaagtgttacggattgtttatcgctgggctttcgcggaggacgacaaaataacatatattaaaaatatatactcttaataatttttaaaatagggctgcaaatcgtttgagacaactctgaacacggtgcatgtatgatctcttctatataaagagatcttaatttgcacgtatatcatcatagaaaataaaacaattactacattttacaaaacaaatg

SEQ ID NO: 2349 - DNA, 3000 bp, Unknown
  misc_feature (1)..( 3000): cDNA_ID_2048171_gDNA_ID_1620524_Annot_ID_159524 3000 nt of promoter + ATG
atttcaattccaaaaatttctgatcgccgtgtaaacgtaagaagaaacagagaagcttacttgtttgggagatacaatagagaaacctgagagttttggaatagtaataaaacttgttccatgaactcgccggcttatcactctcgtaatcgcccacatttcttttcccggcgatcgccggagacgatgatttttaagcttctagcttcattctaactctaaacgtactttattgggcctaactcagaagcccattggatttggttatattagttttatactagatgctaaaacggcgtcgtaaggagagaactaagtgctgattagtgattaggtcctaataacttctgcggccataataactagtagttattaactactggtctaactttagtcaaaggtaaagcaaaatcacgcctcaaacggaaaatcaaacgtaaaaattcataaaagccgtaaagaacttacaacatgaaaaataaacacgcaaagtatccgtttttttttgttttttcctactaaactacatatttttgttgttgttgttgtattaaactacttactattcaacgtcaaagaaagtgaagtaaacgaaaaccgtcaacaaaaagtaaaattcgtatccttaaaaaagcaaataaatatgatcggagaccaattgttttagtgagccgtctttttttctccttctccaagttcgtaactttttttcttctcttttcatattcttcatacgtcaggaataaataaaattttgttacctttttcttcttcttaattgagaaacaacaaaaagaggaataacgtaaattcaaaactcttctcatcatccaaaaccagaaactttgaccggaaaagaatcagagaagtaaagaaaaacagaacaaaattaaaacagaatttcttctctaatccattacgccggcgatttcggcggcgtaggagatgaaagttcgtaggaaacttggtggtggttgcggcggagacgtcgttgtttcatggcggacgttcttttggttcgtgattctgtttgtcttctccttcgttctcttctccaccatgtttatttttaaggggaagtttcgtccggtggttcgttcgacgataagcttctcaacggctgttacggcaagggcggttttccgtgagtctatatcgtcttctccggcggttacgattcgtgaagcggtgaaattacctgaacaaactctggttttcctaaaataccctcagtctcgtcggttatttacaaaagacgatctcatttgcgttttctccggttcgtcgaagctacggaaagtgtatccgacggctgtggacagagacaaatttggaggtcagatcgtacggtgtcctgagacgccacgtggctacaccatttcgcttgccgtttcgagatggacgaccgatgatcatctcccggctggaccaactcaccggtatgattggctggtttacgacgccgtgatcgactacgataactctacggtggtttttgtcaaggggcttaatctacggccaggaagagttgctgacgtgtcgagatatgagtgcgtgtacggttgggatttcgcgaaacataatcggttaataagatcagatgtcatcactgcggctcaggagatcgtacggtgtagaacaccgttagctgtgttagacggcccaaaagcggcccgtgggcctgttaaagtctcggttagaatcaaaggaggaaccggaatgcttccttctatcgctcagccggttcggatcattaacccgccgcgaaagaaaccctttcaaatgtgcgtttgcaccatgacccgaaacgcagccgcggttttgagagagtgggtgatgtatcacgccggaattggcgttcaacggtggttcatctatgacaacaacagcgacgacgatatcatcgccgagatcgagaatctcgaaagacgtggttacaacatctctagacatttctggccgtggattaaaactcaggaagccggattctctaattgcgcgatccgtgcaaagagcgattgcgattggattgcgtttatcgacgtcgacgagttcttctacatcccatccggtgaaactctaacttccgtcatcagaaattacacaaccaccgactcaatcggtgaaattcgaacaccttgccacagtttcgggccatcgggtttgagatctcggcctcggagtggagtcacgtcgggatacacttgccgtgtggtgttaccggagagacacaagagcataatccggccggaagcgatgaacgcgacgctgataaacgttgttcaccattttcacctcagagatggattcacgtttgctgacatggataaggatataatggtaatcaaccactacaagtatcaggtgtgggaggttttcaaagagaagttttatcggcgagtcgcgacgtacgtagcggattggcaaaacgaagagaatgtcgggtcaagagatcgagcacccggtttaggaacccgacccgttgaaccatctgattgggctgagagattctgtgaggttaatgatacggggcttagagatcaagtgtttgagaagttcaaagacaaaaaaacgcagcgtttagtttgggaaaaagcggaagaagacgacaatgttagatttaaaaagggctcttcggcccatcatagaatagctcgaaagattaaaaaacagattaataataaagcccattagccataattttgctctctttttagttttgaatttctacagtggaactttttgccagtgtcggaatttttttttcttgtaatttttggtcgattagtgatgtaaataaggaaaatcaaatctttaccaaacaaaaaaaaaaggaaaattatgaaaaacatttcaatcaattggcccaacaaaggcccatttacaaattaagatttttaaaaagattccgaccgttggggaaatagtatctttcacatttttttctctcttttcggggagcgttctctgaaatctctcaaaccctagatccagagaatg

SEQ ID NO: 2350 - DNA, 3000 bp, Unknown
  misc_feature (1)..( 3000): cDNA_ID_2048133_gDNA_ID_1620524_Annot_ID_159540 3000 nt of promoter + ATG
aactatgtttagaatatggttagggtatttttaactagttgtttaaagagccgtctttaagtattttaagacgactaaaaataaaaaggctgttttacacatattgataataaattattatttatgattaaactaaatataaaactggatatagtttaaacattctaaaaaggaaattgttaaaattagcgtttctagtgactcaaaccttagtgttgaagattatttagaaccagcctttaccactagactacctaacaaatacaaaattataaagctgaaattgtttttatagtatttgcggccgcaagtttgggtttggcacgcttgtgcttgtgaccggtttgtaagtgtatgtgagaagtgaaagctatataaaatcatatgtatttaaacgtatttagagcatctccaatgaaaagagttcctcataggatctctctatttttttaagtataaatttcaaaaaaagttaaaaagagagctttagtatttttaaaaaaaattcatactccagtcaaagtttctcttagtggggttctcagaaaaaaatatattattttaaaatttttttatttaataagacttaataattattgtaattcataacatattaaacatacattattttgaaatatttttttaaaatagatgtgcaaaaacaaaattgaatatattatcaaattgttgatcgagtaattgatcaaaactttactctatgacatcgtaaaatggaatacgggacgaaaaagccatatcgtttgatagcttgtggtagaaaaagaaaaaaaaaattaaagaatgaaaacaaaaaaatctctttattttttgttaaaaatatgcgtccaatcacaagacgacaagtgtcagactctattaaattctcaaagctctctagagagagtcaatgctctcaattataatgagtttagaaatatttttttgaaataagtgagagagaattcatcaaaaaaataaaaattgaatagaactccccattgttgatattatggttctcttcttgttgttgttgatttagactataatttgtaacgctatacctaatatatgtgttgctccccattgttgtccttaaggagatgctatatacatatagatactagccatgcaaggatcattagaaaatgaatgtgattaaattacaaatagacccttcgaacaatgagaatctcatggttattgttataatgactaaagattacataaacataaataacacaaactaaacatttgtaacaacatcaaatatcctaacctccgtactatgcacgaatttaacgtgtgaaaaatcgggccggagaacaaactgttttaaaataaacccaaaaattgaaatatgaaacgtataatataatcttaaatgtagtatgaaatctccaagaaaatactagtaatattcaatcatatgaagaaaagccatgcaacggctgcgagaacagagcccgagacagagatcacaagcgatgaggctcctgccgcaggagccgaagcttcagggccgtcactggcgccagttccgtcatcggaagatggagacatttctggagtcggagctggcggagaggaggcggtaggtgcgtcagaggagctggtaggaccttcggaagaatcaccggagcttgagtcagggcttgaagccggagttttggctgatgatgactttggagatggggaagatggggaagggcttggagttccggtggaatttttcttggccatggttggagcagctgtaggcggtgaggttggggcggaggccgtgggtgattttggggatgctgcggcggcgggagaaggagaggtagagttcttttcgccgttggctttcggtgcgtttgccggtgttggaggatcggcggccaagacggcggtgatggccaaggcagccacggcgagagataggagtttaagtgtcattgtcattttgtggtgaatgtgaattgcttttgtggtgattaattatgtatttttgtggtttatgattagtgctaaaaaagattaaaaagaagaaaagagttatttttgagagattaaggaagaggtaaaatttaatttatagggaattctacagatttgaccaaagttttggttgaccgggtccatcggaacttgtcttaaaattttattggtttgatcttttgttagtaaaaagagaacatgtggtaatgataattcccaactttcaagaaacaattgagaacacgtgactattgagattgattttgtggtaactaaatgagcactgtttcaacaaaagttaattttaatttaagctatacaaaatactaagaattaaaacttgattaacgtaccagttagtcaataactcaatattaagtggaagttcaattgttcaatacaaattcatacacgtaactgaagaagcacatttaaaagtcaacgaaacatttacatttcgtaaactaaaaataaataaatctactgcaatcttgtgaatgagtctaattagagatgagaaagtaaactgagcccaaaataaataaggcccatttaaaatgtaaggcccatgataatactcataagctttgtaatccacgacgcacgtgttccataatggctaacataaaaacggcaagcagtctacttttttgtcgttatcactttttaacccttttcggcttctatccgtcgattcaaatcggcggcagttcccagcgacattaatctccggcgagacagtttactcggtgagtttcgcggctacatagtttttttgaacttccttgaattgttcattatttcgggatataaacggaatttgcttttccccgatcgtcgtatcactgtagagaaaccgatacttgattggttcttcgctatttttctctattttgatatgcaattcgatttcacactctcaaattcataatcctagtttgtatagtactctatctcgtgaaattgtctgcttttatcgattaaggcgttgttgcgtacattgcagtgtttattgaagct

SEQ ID NO: 2351 - DNA, 3000 bp, Unknown
  misc_feature (1)..( 3000): cDNA_ID_3067227_gDNA_ID_1620524_Annot_ID_159542 3000 nt of promoter + ATG
aatcattgcatagcatctggcagagatttcaacgataaggttatcgtcaaccttgatcaggcggtaagacacaatccgtagttaattgattctctggttccgatgagtattaatggaaaactaacagcatttcaaccaaactgtgttttcttcaggacaaggtcatgttatggagattgcatttctatgtaggagcagtcaagaggcccagaagctcgctccctagctaactttggctgtatatatatggactgggatgttgagatggtgtgatgggctaaaccggtttaatatatttcctactttttttgttttcctgattagtccggttaagccgtgtagtagttggtcttacatggacggttaacaaatgaaaatcggttctgatttggtaagactttgtccttcgtcccatgaagatttctctaacaaaaaatcattgaccacatcatgacatgaatccaaagaaaacacatagtttgctaatgtgtctgttagacgattaatctctttagatagtgtgtatcaatttcattatttttgttttaatcgtctgtcattgtatcagtttcggttagaaactaagatagggaaaatatttctcgtcctataagatgttttacctaagcacaaaaaatcattaaaacggtattcaagacttttaaataaatcaaacaaaaacaaattttgatttcaaagtaaaacgaaaaaaaaaatcgtaacatgaaaaaaaaagatatttttattttattttatttggaaataaaatctgaataattattttatgacagtcaataaaaagctatgaaatatttctagagctttactaatgggggaagtttgaactagctgcttgatattaatataataatttgattatcaacaaaaaagttatatttaagaattaagattgatatatgttaaacttttggtaattttgttctaaaaccaatattctttggttgacttgactattttattaatatattagtataaattgagaatgtgaatctcctttccaaactattcttataggttttctatatatataatttcctacatagcatctaacagatccccgaaaaaagatctcaactacatacaataccaacccacaacaaaaatttgctttttcgatcttctcaaaaatgaaactaaaacaaaccaaagtgatgtttttcttgttagtcctaatctctgcattaatattgcaacaatcgaaagctcagaaaaattattgttcgagaaccaacatagactatataccgggatgtttccatgcgttgcaattagcgtataacaaagattatagtctcctaacaagaaattgttgcagagcagtgttttcacttcctactacttgtgccttgcttgtctatcctggcaaaacttaccctattactacctttagattaatttgtatttatagcgatcctcttccagcaatgtctccattaagtctataagttttgtttatctcttaataataatataataataaaaatcatatttacattataattttttaactttgttcaagttacacataaaatccctaactctctatacgtgttgaatgtttgaggtctcatatttatcttactctttcggttttcaaaaggatatcaacataaatgtaaatatgtaatcattcctcatttgttggaaattaatttataaattttgatttcaaaaatcaactaatccatttgtaaactatgtaaaatatttatcaattatattattatttttgccaccttagaaatatatgttaacatttgtgtagttaaaagaaatccccaaattaaatcatgttttgactcacacttataatattatcggatttcataaataaatggataaaccatgtaaaagatgaaataacatacgataaaaaatgatcttagtcaaaacatatgaaagccgataataataatgacatttattggaaattcaagtctaaaaataaataataataataataacaacatacgagatgagatcgagataatatagtatataataaattaaatataaattactaataataatgacatttcttacaaattcaataagtgtttgtttttactcatgagtgtttttaacccatttatactcttatattttcataaataacctacttgttatcaccatattacaccagttaatatatttgtaaaattttgaaaaagattgtatatatcaatctctatacatgactcataaggttaacatttaacatcgtttaattgttttggaaggtagatttaaatccaccaacaattcaaggatgtgaagaatttttagatcaaatatatatttaaatgtacaagtgtttttttctaacaaaaaaaatttgaggtattgaacggatgggtaattttcgggtgtttttgccgtgttattgtagccgtcgattagttgggatgtatacttattgggcctaagaagcttaataccttaattgtacaatcggatggatatataaatgggctcaacaacaaggaaaaaggcccatttaaacctaagagttcaagctctatttgtagaaagaccaaagtatccctagatgtttaagtatgtcctctgtgtctctaaaggttaattggggaagaagaaaactctccttctttttgtaacttttgcttcacctctctcttcttctcttgttctattttttttcccgattcaagcaaaattcatcaaggtaaatttactcttcttctcaagctgagtttttttgaattgttggtatcttccttcatcactctcgcacttctcttcttgaagtctctcttgctcgattcgattctacggtttctctcgatccgagggtttttgattgaacttttattggtctctttgatattgaagaaattattcaaccctaatctcaaattgcttcagaagatttcgggaaactagtttattcttatgggtaatcgttttgatgctaaagtacttaactttttgtgattgtagacttgtcaatttgaaaaa

SEQ ID NO: 2352 - DNA, 3000 bp, Unknown
  misc_feature (1)..( 3000): cDNA_ID_3067231_gDNA_ID_1620524_Annot_ID_159535 3000 nt of promoter + ATG
ttaaaataattatagtcaaatttgttatcaaatttttaaaaaacaaaatattcaaaaatatttcgtataaaaattccgaataaatattaatatcttcgtttgcaatatccaaaaaaatatgttcctttgtaatttagtgtagagagatcatttgagtatatttgaagcaaaaagagctgttatgttttaatacaactggcactttattattaaaataaaatggagtttaatgattgcacacttgttgattctgtttgtgacaaaagaaaattgattcattatcaaatgattcttctttttgtcattttataatgttttgagacgagggaatgaatggttgttttataatgcttaaaatccatacggcagattaattcgttttatatacacaaatggcagaaattattacaactagctgtgtctcgtgttgtctagcaataatccgctgtgatattcgtctttttctatccaccatgcacggttgttattacttttaaattaatgataaaaaaaggagaagataaaataagattgttacgttcgcaataaaatgattgaaatttgtaaacctgtttattaatccgatatacataaaatctcaagctaatcatatttgaatactaagtgtcgcagtagtatttgatcacatatagtctgcagtgcgcaaggatgaaatatatggttaaaaccaagtattcatggtgtttaacttttatttcccaaaattaaattcaaaaaagtgtagtataatactatcgatgatcgtgtgaaatgttttcccataactgctggaggcccggttcatattttattttagctctatgctaaaattaaaacttaagcccatatatacttgatagattatctttaacaaatcacgtgatatcctgacatggcaaatggcactataaaccactattaattgcttccaataaataatagaaaaaaaatctagggttttcgcttagattcgcaatcgcatttgtatttgatttgcttcaatagtgcgacacaaataataacgtttgtgatctatgttttaaaacgaatagaaagaatattgcattttgtgtgtgtgtgtgtgtatgtgtgtctactgtgtcatatgtaacgaatagaaggaaatttgcatgtctagttcttatatctagtcatatgtaaggaatcatgttaattttgatcacaaaaacgccgatttattactttgacaacacgattgtggtgtggaaaaaaaagaaaagaaaaaccgtttgtgggtgggggcaaattttgggagaaaattttgtgaagtgttttctgaactttttatacccacccgactttagattttcggaatatttcggggagggtttcatctttcagttgtcatattatggggtcttattttcgatatccatcttcactattgagaaaacattgtggctcatcgaaaactcttcggggcagtagaaatacgtacataaaatttatgttaaagtaagagtagcaagccaatctagttcaaaagaatgatctaatttgaaaatggggatgtgattatatattaccaatcattgttttacttgtataatatgatttatgatcatttgagagacatgggagctacgccgcataagattgtgttgaatatctattcaggatatatgaagttgtcgtggaggtgatacggaatataaatatgattctagcttagtgtaccaaagtttttaaaactccaaatcacgaaccatataatctagaatatagacgtttggataatcatttcttgtcatgtggtttggcagagatttctcttttccgaaggcaaataggggtcataaatcaaatcattcatttggttgagatgaaaaatgaagaagagcatgtagtttttgtgaatggtcaaactattagtatcgaaaaaggaaacggttgaggaaaaagaatggcttcacgagatggacaaggtagaatctttataggctattagtgtggttccccaataatcaaagacgattcagaagtggtcacaaaggattgctaaaatagaaaagaaaagaaaaaatgcttttatgttttttcattgttggaaggtagatagaagaacaataacttggaatgtggagaaagcgtatcgaacggaacagatcaagcatatcaggcggatcaaacgtatcaggcggatcaagcagctttttagaaaagacgttaaatgatggaaaaaataaccaaaaaagattgtgaggaagctaatgaagaagtttattggagacataaagtatgacaaatggaaaaagactccaatttttttcattcagcttctaaaagacgtgaacaaaaaatcgaatatttggtttaacagaatcatggtaaaaatagagatgaatataatattatggtgttacaatatgtttaggatcatttcacaagcaaaacatatgatgtaatcataaaacatatgatgtcacaaacaaatagttccttggatctgaaaatgcaagaaaaacacaacagcaagaaacgacatcgttctcaatgtcaaaaaggttgacattaggcagtcacttttgactaccatgctcaatcaacggttagtaggtttaacttttacatagacattcatcatttcgtttaaacacacaaaaatggttatgtgattttgtatctttgaatgcacgtgaggaagaaaactgaaaaaactacgaaaacggcatcgttcgaggtcaataaggttgactttaagcaaatacttttgacaactaaacccaattaacggtttcacaacattaaccgtatgttaatcacctgaaattacgataatgtaggtcccatagtaaatttaataaaaactatataatatctcacaatactaatttaaaataaatcacgccttcactcccggaactctcctcttcctctttaaatactttccgacaatagcaagcttcaacaaaaaaaaaaacgaaccaaaaacttcctctctcttttataatatctttctctcaatctatgtttagaaga

SEQ ID NO: 2353 - DNA, 3000 bp, Unknown
  misc_feature (1)..( 3000): cDNA_ID_3067247_gDNA_ID_1620524_Annot_ID_159527 3000 nt of promoter + ATG
taaaattcgaagtttattgaattagttaggccgtcgacgacgtcgtttattttttttttgcaataaccaatgcattcttatttcttaattattattttttcattatattttcatgcattcttaatttctagtgcaagaaaaagtggaaacgaatataccaaacattggagaaaattaaatgaaatatgtaaatctctaaaatctctaatcggttatacctcttacttcatctacttatttccaccaaactcacaaatgaaaaataattaaaatacaatttaaaatattatctccattttttttatatttgatgtttaaagttttatacaatgtttgctatagtgtatagtggaaaagaatatagcaaacattggacaaaattaaatgaaaaatgtaacgagtgaagttttctcatcacatcacatcacatgtttgcacgtgagttacattcggttcgtaaaatctactccattaggcgtggttatgaaaccacgaatattttgcaaaacgaatagactaaaaatataacaaacaaaatgactttttctaaccttgaagtctccttaatttcttatattataaggttaataataaacaaatatctcagtaattgtttatactaatagtgtacacatcaaactctatgtaattattttttttgctttcgatttcaagactttcattgtcatcaaatcgttttcgtatgtaaatattaatatttgagctatcagacattttctacacataaccttcttggatataaataacaaattttttgtcaacgcatatctttagttttttctttcttttagctatttataagtatatagtaagtgggaagaaatagtgtagctttctttgatggttgaattgttatgtatggtactactaactacgaagagacagattacttgcaacttaaatctgttttgttttgtgtgtgttacaaaatactcttaatcggttatacacaccaacgttgatacctcttacttcatctacttatcatcaccaccaaactaaccaacgaattttaaaactgtagattttattacacttacattgatttaattagaacagtatttgataatcgtaacaattttattacagcattttttgaagacaactaactctcaattttgttttcctgaaaatgcagtattttttttttatttttttactaaaatgtagtatcgtttgcttacgatatcttaaacttaaggttaattagctaatttatttatctttccaagacaatatgaaattactaactttaattgtgagttcttgagatacaaaatcttgacaaaaaacttcttggaaacaaccattttaaatcgctttgtccaaactccaaagcattgtaataccaaatatcaataaaactaaagaatcatcaaaatttgtccaaaaaaaaaagaaccatcaaattgttagtaattcaacttttattgatacaaatatcctattgtttttgcaatagtacaaaagtttacttaatgattgctataaatctaatacaaaattgtgaaatatattaaacggaattagatagtgtgtgatcgcggatattatttagaaattaaacgtttttgttattaaacaaatttaagccagcagcgttacacattttaaagtgactaaatgtgataattttattaaaaaccactactatttttaattgattttttattttaatcatcgatttttgttgaatgaactaaatttattttactctttagtgatttgatggaacccctaatttttttggcagatgatttagcgacgtgactaatttgataatgtcgacaaaagataacaattaaattaagaaatcaacaaaatcgtatagtaaaaaagaaggaattgtaatttatgctggtgggtaaaatatttgtaataagctcttatttcttcaagtttcaacaatttggtaaatataaaacaatgatctagacgttttggacgatactaataacaaaacaaaacatgatgctgtaatatttttttctacaatcatatcaaatctgtccattttcattacatttcctaaactttattttttaaatcagatatttaataagttactttttttcgcattatttttccacacttgagaaaacacttttatgttgtttattggtctatatatatttgaaaatcctcaaatataatagatcaattaaaacttatttccgtaacatcttcgaataacctaaataaaataaaataaaaattggctgacaaaaaaaaatccaaaaaaaaaatctataaaggtatatattgtcttaaagacattttaataacaaagtcctcattacaatatttataagtaacgtttttcatttacaaagaaattctggattaataattaattaaagtaattatcccattgatttttctctttagttaaataacattccaaatatagcttataaaaaaaacgtttcataaatcaaacaccaagtttccagaatttctcagtttttttccttccccacaagaaaaaaaaaaacaaaactttcttttattttcctttcgcttcaattctcaaccacttcaatttcaacgaaccacatcatcgtaaaaaaaaatcatttcttcccagttcttataatttcattcctatcctcaaaaaaactctgaattatttatttttttcttcaaattagtatttgtgtgtttgattttatcttgttcatctcctagttcgtgggacccagattctaaatatattcttttgagatcttctttttcccccaccacatgtgtttagcttcttgagagaaataatctcacttcttttcaacgacacaacacagaaactattttttcctttcgaattttgaatcccatagacgttacgttgacgagaaatacactctcatcagaaaatcaaaaaaaattctcatcctcagaaaataaaataaaagcttcaacttttttctgggtttttttttttagaatttggttttgtgtttttgatcttgaggttgtaaa

SEQ ID NO: 2354 - DNA, 3000 bp, Unknown
  misc_feature (1)..( 3000): cDNA_ID_2106946_gDNA_ID_1620525_Annot_ID_159556 3000 nt of promoter + ATG
agtctcgcgattgctatctcaatatgtacgcggagaagaaacctgacaaggttgatcctaatgagcagaggctctccaaatggttgaattgtgctttgtctaacgagcctttggctgagccgtgcgtgattgatctccttgggaatttgttcaataaagaagttttggtgcacgctttgttgtctaagaggttgcctaaacaattctcgtacattaagggtttgaaagatatggtgaatattaagcttacgcctgttgctggttctgatggttcatcgcaagatacgactagtgcacagtttcagtgtccggtctcagggcttgaattcaatggaaagtacaagtttttcgctttgaggggatgtggacatgtgatgagcgcaaaggcgttgaaggaagtgaagtcttcttcttgtttggtgtgtcatgcggatgtcaaagattctgataagattgtgatcaatggtactgaggaggaagtagatttgttgagggagaggatggaggaggagaaagctaagctgagagagaagaaaggtgtctcaaagaagagtaagaacggtgctgctgtggtggctgatacaggtgcgaaggtcgcaaagagacagatagaggatgggaatgtcaatggcaatggtataactgtgaagaaattcaaggcggcggataaagtgccggttaatgctactaaggaagtctatgcttctctctttacttcctctaagaagaagtctgatttcagggagacttactcttgcaggtcacttcctctcggcaggaattgatttgttggatcaatgttgtttacctgctcgcttcatttgctctgtaatctgttttgattatattgatatatcaacttgcttttgtaatttcgcctactggataatataatgtttttcttttccttttgcaattggtaaaaacagtaaacatgtttgcatccactatgctaaaactagtaaaagtgttgtatcataagctgcaattgtaacaagaggatatgtatgttgtttacatcaatgcacgggtcaatggctttgcagctcaattcaaaatgttatatagtcatccaaaaacagatagcagatttgcacaagcagttcacataaagccaatagtttccagatcgtggaaactcgtgaccatagtactctcattggcttagccgtgcctctctcttaagcacctgtgcggcatagaagtaaaacaactgtcaagaattaagtttttcccacaaatctagatgaggaaaagagatgaatgtaggcattaacctcatcagcaaacttgatcaaaatagtagttcgaggacgttgttgtccttcaatgggtacaaaatgagccgttaccacagcaggaaaccctgcgttatccagaactccctacatagaggaaaccgtgtcaggctcattatcttcttcctctaccaattaaatttgaaccctattcgtgaatatgtcaagggagcactcaccttcactatgccagcaacaaacgctccgcagttgaatgttcccatgtcttttggaatcgaaatgaacctacactttcacatttgttatcagttttcttgaccttaaaaaaattacattatctcagagtgtttatggaaagagctggagcagtataaacctgttaacaagaagctccttttcactgatcatgtactcatcttcatgttctgttcctttttcaagtgaatcagcaacctatggcatgttcgttaagtgtgagttagaatccaggaacaggcatgtcgatagaaacactcaacaactaattgaatttgaaatcgccactcacctttccaaacaacactttccacacagtactgtgaacgaaagacagaattcccagtaaccgtgtctctcttctgtttccctgaaacaatgaaacaatatatccataagacatgattgaactctgcattgctcttccatgaacaaaactagaagtatggaaacgttcttttttttttccagtttttgaggcaaaacacacaagtaagaatatcagattgcaaaaataagatgtaccttttcccggttgcaaagaagctctagaactcgagatccaactgcatacccagcatcctctagtctgagagtcatcataaaagaaaacacattgttaaggatggaatgtaaatgaattagactaataaaaaaaaatcatatgtatttctaagaatccaatcagctcaccttctttcaagttcagctatattgtcaacctgggtttgattgtactgaacgagctccgagaataagaaagcaaatgcggtcaagctcacctacaacacaagtacagttccaaaacgactaaccaatcagcagatgctcgaaatcgaatgatcacaataaagagatcaaagaagaagaagatcaaaacccgagagatttgaaatcgaaccctcccacaactattagatccggatccaaattgaacaatgttctcaatttccatacttagttcagtgtaaaagtttctgaggaaagctccgaaattggaagagaaaagtggatctacgtagcgaaaacgtacctcttgcttgcctttgctgagaggcttgtcaaggacgttggagtactgtttcattttcccgactccgatcatattcttcggttttccggtgagaacgagcttcccagaaccagaaccctaaacacagaacctttcttagttttccggtgaaagaatctgaagatgcttttgtttattgcaacctggtttgtcttttggttcgatgaaagtacaaaaaaagagtttatttacatttttgttaatattaatttttactttttcactaatcctaattggggtagaaaaaaaaaggggtaaataagtgtataaataagaccctagcgatgataaaaagaagccgagacttgttgagaagaagcccttaaagcttcaccgtctctctctctctctttctcgtgagcttcaattcgaatcggccgttcttcttcttcttcctccaatctctttactcca

SEQ ID NO: 2355 - DNA, 3000 bp, Unknown
  misc_feature (1)..( 3000): cDNA_ID_2157479_gDNA_ID_1620525_Annot_ID_159566 3000 nt of promoter + ATG
ttaaggttcgagaaaaaaacgttcatctcaattttagacagaaaaaacatacaatgggattatcagggagacgaggatcactgatgacgaaattcttctctatgcgctcaagagtggtagctagatcaatcccttggcgtatatccctttctctatccgataggtcccaactgtccctctgccctattacttctgtgctcaacatcaattcttcgggttccatacgtaaaagatcttcatgcctgttattcgagcttttgagctttgacctgcacattacacgaagctagatcagaaatccttgagtgtatatgtatacatatatatacacagcttcagaattcactacccaatccatgtcagaggatacattctaaggcccagcacaaagttacaaaagtacacgagaaataagaaacagaacaatagtaggagattgcaactgcatcttcgtattcgaatggaaattatctatgagttaaatattgactaacacaacaactagattgagattgtgtagtatatattttaccactatttggcaatgataatagcaagttgtttctgcaaaactttggcactgccatcacactttttgggcaatatatatgccttattttatgttcaggaagactactgtaatctggtggttagtggttacgaagactcaccccgttggagtagaaacacgtccaggtgtcctgaaagactttgaagcctcatctgactgtcttgtttgtctaccaggtgtaggtgtagtagaactatcaggctttaccatagtgtcattgctcacggattcctgaacttgagacttacgatgtcttatagtttgcacaacctctgtgatggaatccaaagctttctccttctggcgagctgatatcatcatcaaaaccattacatgttaaagattgtggatcagcactctttgctaaattatatcattgtttttggctaaaaaaaacttgttgaattaacgaagagatgcaaaaaaacagataccatcatatcgaatcaaggatttggagagtccattaggcctcaatgctttatcatttaccccttctgtgtatttgctaacttcaacctgcatcctgcagatggaaatgtgaaaatgattgatcgagggacagtcgattaattagggaaaaacagggaggaattaagggacgtacccaatgaacttgatggtattgccctggtcgtccttgataggagtgactgtgagaagattccagaagggagttccgtcctttttgtagtttaacagccttccacagtaactttttccattcttgacacaatctctgattttggcaacctcattcttgtcggtgtctggcccttgcagaaaccggctggcgttttacccacaaagattaagagcatttcagagtaagttggcatgggtttcaaaagcaatattattctaactaataactgggaatgaaactagaagcaagatacgagatgagcagtaccagtttcttccaacaatttccttggaagaataaccagtcatggtaaagaatccactgctggcatagactatgggacagtgaggctgtgtagcgtcagagacaacaaaagtctgctgcaacgtggatagagcagttttgagctcctgggatactctagggaaggcccctgattcagaagatgtagattcttcggatgacctcctagacatgttcttgcttcgttccacttcactggacagcttgaaactaatgccatcgtctcccgaatccggcttaacagctgacaatccccattcagcggttctttctgtaatcttagcggaatcttgaaactccatccacttactactactacctttgttgttgccatcaagaggaggctttgaagaagaagaagttgatccatgtgtctcttttccactcgaagggttgaaaatctcaagagatctacgttcacttaatgactccgcatcattcaaaggagatggaggggctcttggcctctccataacgtttctttattctctttcttatggcgaaacagagtaatgaatagtctgcaaatcaaaaccagacaccacatagacaagttagatagaaagaagaggcagacacaactgtaggttcgagaaacaaagtaataaatgccattaaaagtctttagaagcaaatcaacaaaacacgttaaagaaggtgaagtagataaaataaatgaaaaatatatatataccaaccagagtagctttatcagctgcaactcatggaaatatagtacacagtctttaaaaggagcaaagacgatgagaaagatagagagatagaccaattaaaaaacacaactgtactgtttccaaaacccagttatattattatttgagttattttaaaaagacaatcatgtttctgaggctgcaaatgagcgatgcggaagcctgggaggatagacatcgctatcaataatcaaactcacatggaccctttttcaccctcaaggtcaaggaccacacaactctgtttcctcttaatacgtgcactcttgttcatcattccctcttctttcacaaattttcttcataatcaaacgaatttattacacccctcacatcaatttttccagtacaataattcagacatgtttcaatgtaaaatgaataaacaataaatagataaaacccagtaaacttacgattgtagtagaacagaacatgcgccatgatttgattagacgaaaaatgaacacgtttaagaaaatgactgtggcttcttctctcccagatgctttcgcagacgacgaatccacaatttgtttcttctttcactgtctgtttcaaataatgtcgatgaaattaaagagaagggacccctaaaaacttgttaggccttattattttcccgctaaaagcccattaagtcctagtgggtcttctctaatgggccttattagttaagattaagaagtaaggaaagtgagggagaggcgagggaaaactgaatccaactgaagcaagcagcaatg

SEQ ID NO: 2356 - DNA, 3000 bp, Unknown
  misc_feature (1)..( 3000): cDNA_ID_2157465_gDNA_ID_1620525_Annot_ID_159561 3000 nt of promoter + ATG
acctgcaaaaccttactctgaatgagttcggctgcatctttaccaagagatagctgttccaacttgttaagagcatcctggcatgcattaaaccactcagcctgaaagcaagacaacaatcaacactgtaaaacacaatagccaacactgtaagatataataaacaccagatactcgaagcataacagctctggttctctaatgtaagtatagtcattgcaacacactgcggaactaaacacattgccaaaatcaacaactgccatatcttacaaacattgaggttaatcaatggaataataaaacttgaacataagagtggctaaaataactaaccgtatcagtctcctctgcatttgtccaggaaaatttcagcattggatgtctgtcgtacaatggcttcctcaccatatcaaatgctacaacatactcgcagcaggtttcatataagaaaactggaatgtacataatcaatggagacatatcattgttattttccattctgtacctaaaatattttctgacggttttccagactgaagaagattttttagtatttccttgttctgcgagaaatagtaagagtaatatgaacttggtaaaaacatagaagcacttaacagcgaacttaaccaagagatcactccaaggacattcttcttttttagtgaggattgtttatgatgtaattgctttcaagcatgaaaagattgacatacctctttcagataagatatctctgactctgaaaaccctctcctgcaaaatccttttataagtctagtatgttcctcgactgtattacaataagatgatcatatagacagcaggtgctcaccggtatccatatttggcttttttgttatcgtgcttgggattcaaaataaaaaggttgtatgcatcctcgagatgaaaatattcgacaaggctagtgaaaatgaattccatcatctcagcatccacttgcagtagagcactttcctcatctctgttaccataaaacgagatagtttaatatagaaccaacacaaaaaataagaatcaggacaccacttaaaaaagttggaagcaggtagcatgagtgacataaagttactagaaccaagtggtctgcaggctcagatatcgctgcatataaattgacagaaatggacgtccatacgacataaactgaagcaaaaaaaaggtctttgtaatgcattacttattggtagccacatcatctttgcgagctaaaactttgattgcgtgttcaattactgatgtcaccttttctcccatttgtatagcatgaacagaaaagctgacaaagggaaacaaatgcccaattaaactttacttaaagccaacaccaccgtgaatgaaccaccaggaaaaaagttaagaaaaagatgactgtacttgtagttcacgcgactgatgataggaagatggtgctgcacctccttttcaatgttaatcttgtaaaagggattgagaacttctttgatttgtggaactcgtgtatgttcaaacatgtgatcaagtttattaaaccaacgctcaagttcctcgggacggagtttgaagtctggaaagtgtgtggaaaaagttacggacaaaagagaaagtcaagtgatagctccaattcaaataaaagcaagacaggcagaagttattcaccttggttcccttttccttcaaaccctatgaagataaaattaactggcactggaagatagacagaatcgacttccataagctctaagtaactcgcaatatttcctgaaaggatgcaatccaaatcagaacgtggtgttgcgaattgagctagtaagtcctttagccattcacagaaacgaaaggcaattacttacctgacttagtgtaattcagcacaccagaattcgagtgaacggaagactccaaatcatcaaaatctgataacagcacgaaaaattgtgatgcaaatgaagacataggaaatccaaaagcaaagagaggcctggaaacagaacacataccagtacgaaaaacagactcgctccaaaatctgcttttatccctaagattgaacaaggaaaacacagaagacttcgccgtcttccggttcccttgtgaagctccatacgatagagatggtatgaactaagccacgaaatcaatcaaacaaattacgcaaactcaattgagaaagagaaaggtgagtttaaaaacaaaagcattaacagataacatcgcagctcatcatcaattttcaaatttggttttgatcaaatactaatcttgcgacagatcgaacgaagggatcgtaccaggatagctacacaaatggtgagtacgagcttggaaacggatctgttcccagccccgaatctccgcatcgtcttcttcttcttcttctcctagtagtcgataaatcgcagtagggttttgctctctcgtccagcaaaaattcccacactggccactgtgctcgttttttcttgtctttccacagatttctttttccggccttcgattagccaatattttcttaccgtctcaagttctcaaccaaaaaaaaaaaagtcttactgattgattattttcaatgaatttaaataacattgactaatataataaactgattgattattttcaagaaatgggcttgcgatacaaaagcccaccttatccgtaatgactctatgagagcactaaagagacaatataaactgattgattattttcaagatatgggcctgtgatacaaaagcccacattatccgtaatgacttttgagaagaccgaactaaaacagtttagactttaaagacatcgtttgacgcgtagcttacgtgtcattttttgtcgttatggggttgccaaaaagcagcggcactcgctcgtgcgtggccgctttaaaacccactggtctggaggaaatagtaccagctaagctcgcagctcaaagctcagtgtttaataattgtatagcttttttggtgaacgaagagtcagatcggcgagcctgagatg

SEQ ID NO: 2357 - DNA, 3000 bp, Unknown
  misc_feature (1)..( 3000): cDNA_ID_2157469_gDNA_ID_1620525_Annot_ID_159563 3000 nt of promoter + ATG
tccaaactcagtcactgattccaattaaccagctagtacagtacaaatgtgaaaccctaataaaggaaagaaacagaggaagtacctgatgttgacgttgtcggtggagatgtgagtagagacatttttagcaacccatttctcagcagctttcaggctagaggcgagagtcgcaagcatctcattgggaataccaaccatgacttcgattccggatttgcccaaagctctgagagtgtcgtattcggcgtcaaagagctttactttctgaataccattctctcttagcatccgcacaactatgtccggtggaagtgggtgcgacgcctgtgtgccccagttagctccgattgaacttgccctctgacaaagaagagccaccgccagtaatagcaacaccgaaccccaacccatctcaggctcgccgatctgactcttcgttcaccaaaaaagctatacaattattaaacactgagctttgagctgcgagcttagctggtactatttcctccagaccagtgggttttaaagcggccacgcacgagcgagtgccgctgctttttggcaaccccataacgacaaaaaatgacacgtaagctacgcgtcaaacgatgtctttaaagtctaaactgttttagttcggtcttctcaaaagtcattacggataatgtgggcttttgtatcacaggcccatatcttgaaaataatcaatcagtttatattgtctctttagtgctctcatagagtcattacggataaggtgggcttttgtatcgcaagcccatttcttgaaaataatcaatcagtttattatattagtcaatgttatttaaattcattgaaaataatcaatcagtaagacttttttttttttggttgagaacttgagacggtaagaaaatattggctaatcgaaggccggaaaaagaaatctgtggaaagacaagaaaaaacgagcacagtggccagtgtgggaatttttgctggacgagagagcaaaaccctactgcgatttatcgactactaggagaagaagaagaagaagacgatgcggagattcggggctgggaacagatccgtttccaagctcgtactcaccatttgtgtagctatcctggtacgatcccttcgttcgatctgtcgcaagattagtatttgatcaaaaccaaatttgaaaattgatgatgagctgcgatgttatctgttaatgcttttgtttttaaactcacctttctctttctcaattgagtttgcgtaatttgtttgattgatttcgtggcttagttcataccatctctatcgtatggagcttcacaagggaaccggaagacggcgaagtcttctgtgttttccttgttcaatcttagggataaaagcagattttggagcgagtctgtttttcgtactggtatgtgttctgtttccaggcctctctttgcttttggatttcctatgtcttcatttgcatcacaatttttcgtgctgttatcagattttgatgatttggagtcttccgttcactcgaattctggtgtgctgaattacactaagtcaggtaagtaattgcctttcgtttctgtgaatggctaaaggacttactagctcaattcgcaacaccacgttctgatttggattgcatcctttcaggaaatattgcgagttacttagagcttatggaagtcgattctgtctatcttccagtgccagttaattttatcttcatagggtttgaaggaaaagggaaccaaggtgaataacttctgcctgtcttgcttttatttgaattggagctatcacttgactttctcttttgtccgtaactttttccacacactttccagacttcaaactccgtcccgaggaacttgagcgttggtttaataaacttgatcacatgtttgaacatacacgagttccacaaatcaaagaagttctcaatcccttttacaagattaacattgaaaaggaggtgcagcaccatcttcctatcatcagtcgcgtgaactacaagtacagtcatctttttcttaacttttttcctggtggttcattcacggtggtgttggctttaagtaaagtttaattgggcatttgtttccctttgtcagcttttctgttcatgctatacaaatgggagaaaaggtgacatcagtaattgaacacgcaatcaaagttttagctcgcaaagatgatgtggctaccaataagtaatgcattacaaagaccttttttttgcttcagtttatgtcgtatggacgtccatttctgtcaatttatatgcagcgatatctgagcctgcagaccacttggttctagtaactttatgtcactcatgctacctgcttccaacttttttaagtggtgtcctgattcttattttttgtgttggttctatattaaactatctcgttttatggtaacagagatgaggaaagtgctctactgcaagtggatgctgagatgatggaattcattttcactagccttgtcgaatattttcatctcgaggatgcatacaacctttttattttgaatcccaagcacgataacaaaaaagccaaatatggataccggtgagcacctgctgtctatatgatcatcttattgtaatacagtcgaggaacatactagacttataaaaggattttgcaggagagggttttcagagtcagagatatcttatctgaaagaggtatgtcaatcttttcatgcttgaaagcaattacatcataaacaatcctcactaaaaaagaagaatgtccttggagtgatctcttggttaagttcgctgttaagtgcttctatgtttttaccaagttcatattactcttactatttctcgcagaacaaggaaatactaaaaaatcttcttcagtctggaaaaccgtcagaaaatattttaggtacagaatggaaaataacaatgatatgtctccattgattatgtacattccagttttcttatatgaaacctgctgcgagtatgttgtagcatttgat

SEQ ID NO: 2358 - DNA, 3000 bp, Unknown
  misc_feature (1)..( 3000): cDNA_ID_3594379_gDNA_ID_1620525_Annot_ID_159564 3000 nt of promoter + ATG
ttatgtaatttatgtttgagaatgaaataacattgctaccaatcagttttacttcatcctaccaataacattgcctacagtttttcaatctagtttctatatagatgctgaaaggaagtcgtcactctgtaattttattgatgtagaaagttcgacaaatcaaacagctaccggtggatctcaaggccctcatggatgggctttcttcgctgttgttaccttctcagaagcctttgttcagccagcatatgtatgcactgaaaggcttgatctttctaaccctctttgataaactgtatctcaaactatggttaaagcttgaaattagtagcttttcctggccccaaaaaagatagaaacgtatttattattcttaggtgatatttccccctctgattcttgtatgcaactccttgctatattgacgtgtcaataacaattgtgataggttaacactctctgaggatcctgcattggctatggctttttcagtggcacgaagggcagcagctgtccctctattacttgtcaatggaacttaccggaagactgttcgttcatatcttgattcatcaatcctccagtaccaattacagagggtgaacgatcacacttcccttaaaggttagctaacaacagtaaatctcgctctgttaagtagtttttaaaaaaaaactgtcaccattcatctcttttgttgtagcaccgttgtagtcatgaaagaagcctttccttgatgctaaactagaaagtagaaactatcttctaccagttttaagtgattttgtgttccttttgtctgctaaatttgtatattaatgtagagactatggctcacacatctatatagatgaataatgttgagaacttttctccgttttacatgtctttcaagttttcgtcctaaggtagtatgccgtggtaagaaaactgcataagttctgaactaccgtattatttactgtcctaaagtttgtgatatctttatactgttttcttcgtgtagacttgatccgtttgagcgattgcttttatcctactgctcagcatttcacttcagatgtctttattcacgtcctattcaaattttgtcaagttatttgctacttgatgtcatgcattggtgatgttgatataatatcatgattggcattaacgctgtaagtatccttgtatataactcaggaggtcatgcccacagcaggtccactcttgaaattcctatcttttggctcatcagtggtgatccgctactgattgacaagcattatcaagcaaaggcgctttcgaacatggttgttgttgttcagtcggaggcctcttcatgggagagccatttgcaatgcaacgggcgatcactattatgggatctgaggtaataacacgtatatgttagcagcttgttatgagcagaaattttatgatactttcctagttaaattttgctcgtcatgagggaattagagtagatgagtttttccttactccttcatttttataacataggagccccgtgaaagcagccatggcttctgttgctgaacatctagctggattgcttcctcttcatcttgtctacagtgtagctcatgaaagtgcaattgaggtatagaattatgcttagatgattctaaatagcactgctttgtagttccatgaatattatcctgttcctggtaactactgcaatcttgtgaatccagcacaaactctgattaaaactctccagataaagaagctgataatctgtcttaccatctcttaaaaattgtgtttcacaggactggacatggtcagtaggttgcaatcccttttccgtcacttctcaaggttggctcctttcacagtttcaatctgacacaattgcccggagctatatgattacagcgcttgaagaatcaatacaagctgtcaattctgggattcatcttttgcggctggagagaacgagtatccttgggagattttttatctctgttttatgcctacagaacagtagaggttttgaaatatgaagaaaatttattacctgctcatctttatttgctagtgttaatatccttgattcagaaacaagataaaaagacgtttaagctcttccaatcaagggaacgtgagctgatgaacaagtacaagtacgtggttagcctgtggagacgagtgagtacacacctctgttcctatagtttgatttatacggttatgaagcctatatgttactggaaggcttcaaatgatgtgtatactaaatgtttaacagctttcgaatgttgctggagaaacacgctatggggatgccatgagatttctgcataccttagaggaagctactagctcgtaagtacacacattttactcttgctacagtttttttaaaagaatgatttgctaatcaatcaggctttccattttatcagatttgtaagagaagtgaatgcaacagtgggtgttttgcacccaattcactgcacaaaagagaggaaggtgaaagtggaagtggacatgacaacaatacctgcctttatcatagtactgattttactttacgctgtcttaaggccaagagctcctaagccaaagatcaactgatgtcaaaagactcccccatacaaatttttttgtcactttctgagacagtaaagttcatcactcttctgtatctttacttgaacaagaattgttgtaatctaaacctgattcgttactgcaaattgcaactgtagaatttagcaaaagttagtacagtacttgaagagattaaaataagacaagaatgaaagaagctgtgtttgggtcaacagtgaacctgtgtttgggtcaacagtgggccctttaaagacaacaacatctttaagccacaaacaaagactcgaaagaaaataataaaataatttggatctgaggcaggaaacttccggagacatcggaggaaccctaaattgaatgagaagaggagagtgagacgggagagaaagccagagcgagcgatagagcaaagac

SEQ ID NO: 2359 - DNA, 3000 bp, Unknown
  misc_feature (1)..( 3000): cDNA_ID_4254289_gDNA_ID_1620525_Annot_ID_159558 3000 nt of promoter + ATG
ttgcttgtcgagtgtggaatttgtaagagcagacttgactacgtctacgactcctaagcctttcttcgaggctaaataagcagcattctgtcaacaaaaacagtgttagtggagcttccttgtgttagtcaaggagcatttggaagttaaatggcttgcctgaatgttgattaaaactccggtgactgcctttgctttgccgagctcaaggaagtccgcaagagtcgtgaacttcccggcgttcttgtttgcggggtttctctggaagcccgtggcagtgaaggggttttctatttgtgctgaagacaaagatatcccaatgctcagtgacttagttgagaataagattagtttaagaaatctatagaaaagaaatcagtttcttacgcttcacagactggatctcggcccatgtaagatcaaaagagaagattccgttggtaggctggatctcaggaacgctggtggctcgggacatgaaagtagtcctggcggtggtacttgctgagaggtctgcagcatcatggcagaaagcgattccgtctttggacatctgaacagagcagtcaattatgtctgctccatcgtcgattgctttctggtaagccagatcagtgcagcctggatagtctccgcttgctccattgtgagttataaccaatgcatgccctgctttggggagattgccgttttggtgagaaaagcaagctgcaagaaaacagacgctttagcttcttcttaataatcagctatctgaggaaacatatatagcaagtcatctcactgattgattgtgatgctgttggcgggaaatcggtgatgacaccatcaacagagaactggccattgtccacaaactggagatactcagcagagggatcatagctgtagttaaagctggtgcgcaagtcgttggcaaaccctgaagcatagacctctagaccggctttgtgagcatcagccacaaaagtggtggcgggcttaaggtacttagctgagtcaatgggccaaatgtagtctttgggcacaagaacgcctgaagcaaaggccttgatggctgcgaggttctgctgaatctcgctgtacttcttgttggtggtgggctcaactgcctcggggtctttgaactcaaatatgagctttgtcttggccctgcccgcgtccatcccgatgctcttcaagaaaccaatctctggagatgagatgacattaatgccgcggaatcgcaagcttctcaggtactcggctgggctcagcttgtgttccatgtagaaggcatcgtactgcacatttgcattgtttgttgttttgatgaatcaacaaaaaagctccatatgttggttaatcatgttctcaaagagaagaaaacatacctgaacgctcaaccagaacttgggaggcttggttccaaggacatcctccactgcagaaaccgacatttggccgtcgaagatgctaggccgagagaagatgttctggaccactgctcaataatacaaaacatgaaaatgtgtggtggtggtggtgagcattgaagggaggaaatgaaagagaagaagacatacgagtgactttgttgaatatggtgtcggcatcgtaatcaatgacaaaccagcccttgaggtcctgaccgttgaccttgtaggtcttctgggctttggggaagaccgaggagatggtggttgcattgtcaagtctgatatctgacaagcaaaggcccacaccgtccttagtcatctgaaggttgcacaacattgtgaagccaggcgagctggtgccaatagccaagtcgtttgcagagatgcttgactcagggaaaagacccgagaagccccctctggccacaacggcaggctcttgtcctggaagacaaaagacaggtacggattcttagaaacaaacaaacaacatggtatcttaagtcttaacattaaacaacaacaaaaaaaaaaacatggtagtatgcaatatgggcatactctgtaaaaggatgcttaccgttaagggtaagccatttcttggcaggaacagctgcggcagcagcaggagtcttgggtgccgcaacagaagagtgtaagaaaagggagaaaagaatgaaaaacctcagcatctctatctgattgatcctgcatttgtgtgtaacgtacgtaccccaatggaaaagcaaagtcaggatacatgtaacaaaaacagaattgtcacatttaagaaaattgtgaaagagagatcttacagcgagaaaagaacatgaatcccctctcctgcttgttttcctcgtttagttagaggaaaggaaaaagaagagaaagaggagatgggtcaaacaaggttaattaatggtaaaaaaaagtaacttgctctcatatcctccatttatggccatttactcctttctatttttatctcttcttctccaccattcccttcttaaccgctttttctttttttgatgctttcttacatcttctttgcacaaatgggtgtaacacccctcagttttggactttgtactatattcatttgtcatacatgtatgtagttaaaatgacaatattagagtttggcattcggaccaaaccaagttgtccgatctaaaccaaaccaatattccgttaataagaaaactcgattggcaaaaattaaaatattctttggtttcagtttttgcctagacttaaaattcttaaaaatccaattctatgtgatggaaaaatctttgattccggtccaattctgcatcaatatatgctaaaccgaaccgagactgcccacataaaattgaattgaaccaaaggtttttaatttttacttcaacatagcgaataagaaaaagagggtatatattcattattcaatgttaatgagaaggcgtctgcgtttggttcgacacctcaaaacttgttttgcctttagcatctccgagtaaggaatccaggtccaaagcctcttctcttcctcctcctcgcttccttctcacgcaaccttggatccaccgcagct

SEQ ID NO: 2360 - DNA, 3000 bp, Unknown
  misc_feature (1)..( 3000): cDNA_ID_2157495_gDNA_ID_1620526_Annot_ID_159571 3000 nt of promoter + ATG
tctatctgtttgtacctaagtggtggtattctagtatttgttggggcactgacgttctcaaaaataacataaaattttaaaacaatcatggattctaaaatcaagttgtaatgtgttctatgttctacatttctagatttcatgtcaaagtatgaaatttatatgattagttaatcatctaaattctaacctgattccggaaagataccacagataaggagcttgattagctaagaggtcaaactcttttttggttttatttatttatttatttacatttagaacaaaaccataaatcatcagttgcatggaggctttttcgaagtacgatttcagcttttatagtcataattaatcggaatttaattagctctcaaaagcataaggaaacaccacagaggtgcgtggttgtatgacaaaaaaatcatatcagaaacacgatgaaatcttgcctttctagttttgaactgtggtggaatgtttgtgtttccatttcgatcgttaatgcagtggaagcttacatttctgtattggaagtgcgaaaacgtaaataaataggaaatgtatttttacgtacacacacttttgatttaataaaaatgattaagaaattttctacctgttaatatttcctctaagtccacaaacatggttatcgttatagcacttaagactcaaatccgcatggaactagagatctgaaatactatgaatacacctaatgccatgaaaatccaaggagttgtcatttaatttttaaaaattcatgttagaagaagaattaaagagatagataagagatgaatataaataaaatcttgaataaaagaaggaatcacaagactttagagttgattacaaagagaaattaagaaaagtaggtttaggggtttaaacatatttatagagaaaagaaaataaaccgggtcaactcagtttaagcacccaatcgaccaagttttggttgtggatcagaggctggattagtcccaatcgacctcttcttgaatttttgtttcttcacttcttttagctccttcttgctctatttgcttccaaattccatgttccactccaagatcctagaagtgagaaatgcaatgcaaacatgcacctaaagacctaaacatgaatgcaaaatgatggaaactaaaagagacgaagctaaaaaaccaacaaaaacacaagatatcagcaaactagacaaaataataaatattttgttttttttgttgttgttgaaatagtggatatatttttgtgtttctaatattaattagtatatcatttaatacttataagtttttttgggttaatttaagtgtaatttaatatttcacatgtaacaagaactccattttattcttgtccggttcttgaataagatgtgaaagtattgtatcaattgaaaagttattttcacacagaacaaagatccagaaacataatcaaaattgcacaagaatggacgcatggtttttaggtcgagaagagaattttaattacaatttgtgaatgtgagcttttgtttagttttgtgtcctatatttttcgaaaagtgtatttgcttatatatatatcaaaaggaccattcttttcactttaaaaatcgaattaaacatcctgctctactacctaagcacgtgttcttccactgaagacggctttgtttatatgtaattttttttttgtaagtataccaaagtttgtctttaagatattggatggaaaatcaggagatatacaaacatacttttcaaatttgtacatcgacgtttgcacatataaggtaatacggcttgtacaaccaatacacttttttgttaacactgaaaaaaatactaaaacaacgcaattcaaagcaaagtaatggtgaccaaaaaaaaatcctgaagcaaattaatagaggagatatatgatcaacctttagtttggtagctaagggtattaatattctttcaccttttaaagagctttaaaattctatgaaaactagagaattaacaaaattcacactttattccaaaaaatttaaatacattaaagatgaatgaacggtggaagattattattgaacaagttcgaataatattcccaaataataatataaaaataaagtgaaaaaattaactttttactttcttacactattttttcctttgacataaagaactactgatttaagtatttaacttgatttccaattctaaaccaattgataaggatcggaatacagtgattcctttctttctttttttttttctttctatttaacatgtatctaactactataaacccaaattatgacgatactattacaattcattggacgacatactatggtccttcactttctactttctagcttattcatctttcttgtattgcgtaaactcatgaataagatgatgaaagagagttttgaaccttaatctttcttagtatagtgataaatccatgtcccatcctcgtcatgtttgtaagatgataatcattattaacttatcaccatcaagagtgaagtaaaaaatggttaaatggacatgaggttatgggtaaaaaacgtgggaaaaggcaaaaggcaaaaggcccaccttctaagcactctcttttgaatggtaattcgtgcctgtcaaagcttagactatgtcggaaacacaaccccaaagccacttacttcatctctttctctcttttttatttatttattttaaaacaaaagcttgagagataaagtttaaaattctacaaaccccaagaaaccccctaaaaataagaggaaataaaatcaaactgaaaataacattagtagtttttttgtttgcttgctctctgttttcctctgtctggagtctggccattgggattaaactaacttctcattctcattccaccttcttcttctttgttcttgtgtgctactaaaaatcaagaaagcacaaggagacaaataaacctatccatttcattaccaaacaagccgtacattctctagttatg

SEQ ID NO: 2361 - DNA, 3000 bp, Unknown
  misc_feature (1)..( 3000): cDNA_ID_3067273_gDNA_ID_1620526_Annot_ID_159581 3000 nt of promoter + ATG
tctggtaacaccatcaccatccaaaataagaaaaaaaaaatacgaaaaatgattaaagagagcgtctcccatcccaattactaaaaaaaaatgggaaagaaaccacccggcaattgctggtagccgtaaaaaccaaacaagaaaatagatattacttttgtcctcccaaagattttgtccagttaaccaacttttcgaagccatgtcttacgttttcagtatatgcctctaaggcaacttgtattttctcaaagtgtggtttccatattgtcataactcggcttacctagaaaaacaagtaacaatggtcacaatgtatagtgcaatgtcaaaagagaatcagacataatgaataaagatggaaacatattaacctcaagatagtcgtaggaaacgtcgaatggttgggtgaaatgtggggtcaaaagcctgcttacatgtatgtaacacctcgatggacttatcggttaagtattgaatttttggttggagataaatggttaatgtcacatacacatctttgatgcttggaatccatttctgtgatatctaagagaagaattcaaaggttaataagaataaagcaataatgacttgtcttataacgaaaaccaaaaactttcagaataaaaccttttgaagagtttggctaagatcttgttgccgcagagtcactatatatgcttgcaaccataataaaaaaaaagaggatcatttaagattgatcactatgacaattttatcgatgttaattatgaaccttcttatagagttacctgagttttatttaggtttagaccaagcaacttcccatcgatctgaacacaagtaaaaaaaaagtaaagaaagcttttgaatatgtacatacatcagatccaagggacaccatgtttcttacattttcaagctttgagccaagttccgcgactttcttttctgcgatttcagctcgagtttccacttccagacttctcttgcgttgcatttccacttcttctcgtagttcaagtatctgccaatgcagaactaaattgaggtaacaaaacaagaaggaaatacacacctcaaactacaaaacaccaacctgtttctgaagttcataagccgttccttctgcttcactggattctcagtctaaataaaaaagcatcaacagcaacaaaagtgtaaataagtttcttctatacataacaattttgaatacatgaaccaaagattaattaaaaatatcacttgaagagatccaaccacatcaaagatgatgcagcttgagtaattgttaactctttccaactttggaaagagacaaaacgtcaaagtgatttccagaaacagagaacggaagctcaaaagtctctcttgtgccaaatatattaaaccctaaaaaattcaacttctatccgaatttctcagaaacaaaacaaagacacataacttcatatgaaattccagtgaacggttacctgaggaagaaccttatttgttatcagtgtaaaataacagagaagaggtacgagtaaaagaaacaaaagtgacttaggaaacgccattgttggagactgctcactggaagatagagagtcgtgagagacagtgataaagcgtatcaagtcatatagagggtcttcttatctttttctttaacatgtgagggttgagttaattatgcgggctgattatagagtttttaaattgaatttacgattgtttttttcttacatataaatgcaatctatatttgtgttcggaataacccatctaatattactccatgtattaaactaaaatattttgcatgttttggtagatcaactttttgaatgatcacagacctacaaacatcaaccctctaattatccaattttaccataatccacgagctcttaaaattcatttttaatatatataattaaaatagttcaaacagtttaaactttgtgaccaagttaaaatatttaaaatagtttgactttgtgatcaacatatttaaatataatcaatattttcatttttaagccggaaaatcacgtcttacaaatatatttctgatagacacacctataattccaaaattttgacttttaaaacaaacaaaaaaaaatctcattaataccactacatacgtttttacaaaaataccattaaaagatattttttcaaatactaaaaaaaactaaaactaaactttaaacctataaaacactaaatcctataaagtttatattcgagtataaaccttaaaagttcaaccctaaatcctgaaagcaagaccctaaacccaaactcaaacttttaaattataaatccttaaacaaaatcatttttagtctttatggtatttttagagttaacagtttgtagttgtatttttgaaaaaaaaacactagtgataggtttttagaataaaaacttaatttagtggtattgaggatatttctctaataaaaattattcacaaaaaatatgtattaaagcaaagtgctatgcttattccatgcaatcttttttgaaaaaaaaaatattttctaaccgattagtatatcttctagaggattcatagaaaaagaggatacaattacaatatgtagagtatcttataggtgacgtaaccatgaaatatagaattctttggaatctgaaactgaattattcagttgataaatgataaaacaaatactcatatctcatcctttggcatgtttaggagccatctctcagctggacggagacaacacagacacttgtgccagagagggaacacaatcttcccaagtcttcgaaagggtaatctcagaccaaaccgttgactttgttctcattaattgtttatgctaaaccacaagatatttggatcaaaagtattaccataaatcactatataaagacataaatgtgcaccccacttttcttatcaatcataaaagtcagcaaaacacaaggcatattcctcttctcttcctcagccttatttttctgatattcagtttcaaggatatatcc

SEQ ID NO: 2362 - DNA, 3000 bp, Unknown
  misc_feature (1)..( 3000): cDNA_ID_2157541_gDNA_ID_1620526_Annot_ID_159587 3000 nt of promoter + ATG
caactttcagaaactgtatttgagctttaattcagcatccgaagcgttgagaataccctcttagtgttcttttagcaagctcacagtgatatgtttaaaatctattttcgaaaaaaaaattgagcaatacactcaaatgaccttagaaaacaattatatacggtaagaaacacgtgtcatcaaatgcaagttctttgagagaaagaacaccaaaagacaaagagtacacacgcccatccttttgaggaaacatacgacgcattgagttatcaaaccagtgttaaacctgtttcataatcatgtccacgtacaaacgtacccgtttttatcagccgatgccaatggtttcccgatcccactccaagaacaacacagtataggagatgtttgctccttgagaatgctcactatattgcctttagatagcgaccatacatgaaccgaaccatctgcagatcccgcagccacataatcatcatctggacttatgcatgaccggctccaattcgatgctaatctgttccccgatgctctcagtgtcccacatatttccaaagtccgggtatcaaatacattatgcacgttgtctctcccgctcgtcaagatcctatttccgttccgggacaatgatactgaggtcacagcagaagaatgtccagctacttcggacagaagtttcccagtttgaatatcccataacctaagattcccatccatgtggcctgagaataccgtaagcccatctatgctgaggcagattgcattgcagttgctggtaaagagtactgtgttagtgcagtaacctttatgcaaatcccaaagttttatggtacggtcatatgctgcactgacaacatgtcggctagagaatttgctcacatccacagcacaaaccttatccgtgtggcctgtgagtgtatggcgtaccctacccgagctaacatcccatacaaacaaattatttgagctggttgctgcgatcacggatttattgtcgtgggttacggccatatcaagtatattcccaagggaaccgtataagcttttgattaaagttccgctattggtgtcccacatttttactgctcgatcttgcccaccagtaaacagagtaccagagttgtattcaaagactattgaaccacagccaccttcatgagcatggatacgattcgcacatgttgacggaatggttgactcaacaaagtgatcggttccatcttcattgcggcggacaataccatcaacttgctgccgagcaagagtttccaaaccatttgccttcagcttagctagcatttcttcatagagatcatttgcctacgtaagaagaaagaattaaggccatcctaaccaaatcgaagaaaggggacgaacaaactctaccattaaagactcatgaaaaataaaagtccctatgtacctcattaagacgttctgcatcctgcatcttctgcaacatccaccgatcaattaacattttattctcagtctctgctttttgcactctacttgtcatctcctccaactgagaccgtatttccaggttttcagcaataagtacatccaccgtcttggtcttttcctctaactcttcttgtaatcgtgtacaatcctccctacagaacaactctagttttaaatatcgcacaacataattccttacagtcactgtaaaaccattcttaccttctttgtgttaattccttctgcaagtcattaattaacaactccttctcttgtaaaatagcctttgaagttctggattcagctacttctatcaccagttgttcagatagtcgagattgagctttgtaacattgctgtaactctgtttccagcttttctgttttctccttccattctgaaccctgcatacagatactcaaaccagatcaagacatgtgtcaaatattccagagcataaaagtagaaagaaccaaatctacagagacgctgaaccaaaacaaaaggattcaatacaaactttgaggcatactatataattgaagcaagtataaacttaactaaactacatatacttttatacttctctgtgacacatgaactcacaaaatgcactgaacaaacatactgagagctacaattgtttttttttctgaaatccaatgaaacgcattacaagaatctacaaggattaaaagagcctttgttccatctaactacttattccatagtgcaaatctttcaatgtttactagcaatttgtatacttcgataacaaggtataaagttgaaactggtgaaatctgaagcaatgaagaaaggaacaaaacaagattacctgagagattaaaggcttagagagagcagaaatcgcaggagcatgagctccttcttccagaagatgacgcttccgcaaagctctcaaagcgtcatttattgcttccatagctttctcctcctgtaccctgaaagttccgacactcatcggaatcaaaatttcaacaatcgcaaaagcttatgcaacaagaaaaggagatcaaatcaagacttacatctctcgattcagatcaaaaagagtcgtgtagtgaggaattagggtttgcgtataacggaagactttgatcggaaccggtggcgacttgaattccaccgccgcttacgagttacgacccaaattagagaaattacaaaagctgcaagtgaattggggattttcccccacaaatttagtttattgaaaattgattataatcagtttttgtattaatgattgattaattagaatttaattgcaccgttttacctgaagttttgttagtagtagccggaaagcaatattattattgggcctataaaagcccatttacattgtgttctgttcctgcaaagtgcaaagagtagagatcacgtcatggtccacgtggcaaccaatgaatccaactctggagaatgaacacgaacacacaaacagaacaacagatcatcagagaagaaactagaattgacaaaattattaaaaagcgaaaaaagaaa

SEQ ID NO: 2363 - DNA, 3000 bp, Unknown
  misc_feature (1)..( 3000): cDNA_ID_2157549_gDNA_ID_1620526_Annot_ID_159589 3000 nt of promoter + ATG
ctacattggaattgtaagtgagaacatttctaatcataactcacaatattaacactcactgagctatcaaaatcaacgccttgttcgttcctcagccacgttcactttaattgctctgccttccaaattctgcaaacacagagagcaatgaataaaagaaatggtaaagtcacaagaagataaccataaacgcatggaggagtgatttcttttacctgtccatcaagagcagcaatggcaacgttaacttcattctcattcgacatttgaacaaacccaaacccacgtgaacgacctgtctctctatcagaaaccactcgggcatcaactactttcccatgctcgctaaataatcgttccaaacgaccactatccacatcccatggcaggttcccaacatagatcctaaacgcagcatcatatacacgaggttgtcgttcaggtcttgatcctcttggagctgctctgtttactgtcaaacgcctcccattcacttcctacagttgtataccaatcaacttcaacatctataatcactatccaaatgacccagaagattgagaaacaagaaaatgattgcttacaaaactattgaacttctcaacagctttctctgcttcttcaactgtactcattgttacaaacccaaatccacgactttgatcagtgtccctattgtatataacctgcaaaaaccagatttcaaagcagacccatgaaacataatcattcctttaagccaaataaactataaaaccagatttcaaagcagacccatgaaacacaatcattccttcaagacaaatcaaactatgaattcgaaacactaaactaactttctcaagaagtaacaatgccacagaaaaatttagttccaattttctcaaccatttggattcaaatgtcaaaaagcacaaattagcaatatatacctctgaaatctcaacagtaccagcttgttcaaagagcatagctaaagcttgactatcaacatcgtacggcaagtttccgacgaataatttagcctcttccggtggctccgggaatccaacaccgtcttcagactcgaaactctcatctacagtgactgaagtacctccgatgcttccatcctcaccttcttcttcctcagcccaattcgaagtttgggaaacgaaagtaacaacaggagatgagttacgaagagttttggatttgagagagagtgtgagattaacgggtcgtgaggataaggaaaaattgaagcggtgagattcagaggacgagatgttgaagatagaaggaatacaaaaaagggtcgaagaggaagaattcgtcatagctaaaagctttaagcttggggttagtactgaagaagtcatttttctgattttggagagattacaggtgaagaggaagaagagtgagataaaaataaaaaaatgttataatctgattagactaaagtttagtctaatatcttatataaacagtaatctattattgggccttacttgacccaataggcttttatatttccttattcacaccgacctactccaccaaaattaagactatatagtacacaaagagccgtttctagcaagatttctttcctcggccttatcgcgtcgaattcaagccggcgaacgaatacatttatttttctgaaacaagatggattatcggttacagattttagaagcaaacgcaattcatgacactgcatcctctttgtagtgatgtgatgtgcgtgttagctgtgtgtgtccgcgtttatcttttttttttttgttacttttctcctaacttagttgttattacgtgcttttcccaatatcaagttaaatcacacacacttcccaccaccttccttcattttctttccgaaatttagcattttagtcctcttttgacaaatagtatcttctttcttaaatttaagatctttctttagtctttagacaacagttattgtaatgtcttttagttgaatgacataagttaggccaaaataatttgagttcaattttcaaaagcgttgatgaaagctaaaaccaatgactaaaaatgacatctaatcggctcctgaaaaccataatcagatatcatatgacaaatactaaaccaaaatttttacctttcaaataaaataatatttgcagatagatttaaaatagtaaaggttattgaaaaaaaaatacaatagaaaaacataatattacctaatatttattacattttaaaagatatatagaaaaacaaaatcttagtttcgacgatggaatttttttttttatatagaacatcacataccaaataactttagttctcttattgtgaaaacaatggaagaaattgactttttaaaaataattttgaaattgatttctttgttcacataccaaacaacttcgttttattatcgtgaaaaaaagataacgtaaatggttagccacacatgcacggcttttccaaattatcataaggatccatatttgtaaaagaaaaaaatacataatccacataattaatcatagtgaggttacatgaataacagagttcctagctagtaaagataaattgttgcgtacaagttgtgctttgattaattatcactatacgtgcttcatataaaaatgtcattttacacttatatatattaagtcatctcatcgccgactatttcccaaaatcatcaattattgttaccaagaataagaaaagtaaaatgagagagcttgcttgcgccattaaatcaacataaagttcaattatagtttgaaatctttatgaatctccattaattaatgtatccatgtcactaaccttgaaatctttgttgaatcccacaagtaatcctttaaccccttttggtacttttcattacatatcgtcatcacaataacctctcaccaatgtatctataatccctatataaacactttctctttagtcctgattaccatcaacaaactcaatcacaatcacaagtaaatacaaaaatcaccatagaaaaat

SEQ ID NO: 2364 - DNA, 3000 bp, Unknown
  misc_feature (1)..( 3000): cDNA_ID_3067283_gDNA_ID_1620526_Annot_ID_159591 3000 nt of promoter + ATG
cagaaccaaggatgcaatggaggtctaatggaccttgcttttgagttcatcaaggagaaaggaggactcacaagtgagctagtgtacccttacaaggcttctgatgaaacttgtgacacaaacaaagaaaatgctccggtagtttcaatcgatggacacgaagatgttcctaagaacagcgaggatgatctaatgaaagctgttgctaatcagcctgtttctgttgctattgatgctggaggctcagactttcaattctactccgaggtaagaactcacaacacatatactaattaagttcaagaacttattaaaaacattttttgtcttaacgcatgcaatggtgtcatagggagtgtttaccgggagatgcggaacagagctaaaccatggagttgcggtagtagggtatggaacaacgatagacggaacaaagtattggattgttaagaattcatggggagaggaatggggagagaaaggatacataagaatgcagagagggattcgtcataaagaaggactttgtggtattgcaatggaagcttcttatcctctcaagaactccaacactaacccttctagactttccttggactcgcttaaggatgaactctaaattaaatctctttatattaagattaaatagacattgacaagtttgtttatgatgattgttttttttttaaatatatttctttttcattaataggttatggttttcaatgtatgaagttgatgggaatcgtttgaattcgttaaatgaataaataaatggttttatgtagtatatttccaatactaaccaatgcgacttcaaacgagttaattagcttcttcttttttttgggtaaaagaagcgtaatgaagagtcatttgattctctcagtggaagttgaaacgatcaaagaattttggaaaattgcaccgctcacatcaattatttaaagaggattttgtggcagtaacaaataatatgttctttttctccgttggacgagaagggtttcaggtctttgccccattctttgaatttgtaagattatcagtctcacttgtttgattccgaagtagttactttaagaatattctttcttggttaaagatgagttggatttcgttttcgtccatttctattttatgggttctatatctcactatggttttgcttacctttcgctgttgctatgccttatttgtttggttcgattttttgatgtttcaggcttagtataaatctcttatggataggataagtgggctgcctgatgagctactcttgagagtattgtcgttactacctaatgtgaaagatgttgttgtcacaatggttttgtctaaacgatggcagtttctttggatgatggtgccaaaacttgtttatgatgatagctatcagaatctcgagtatggaaagttttcacggtttgttgacagatctttgtttatgcgaaaggctccaggtatagaaactttgcatttcaaactaggtcaaaactgtggtaatggagatattcaatggtggattagagctgctagtaaattttgttttcgtgagctgatcatcgaaatcaactgctctactagtgcatctccatccatacttccaaggagtttgtacacagagtgtagaatgcttgtgacgctgaaactaaaaaaagcggttcttgtagatgtttcttcaccgacgtgttttccatccctcaaaaatttgagccttgtatctgtgaagtaccctggtaatgaatttgtcaagagtcttttatcaagttgtcatgttcttgaagacttggttgtggaacaatgtataaatgataatgtgactatcttctccgttaaagttccttctctaaagagtttagtcttgcgtacatcaaaagagagagctccagatggggaaagtgggtttgtggtagaggccccttctttggaatacttggacattgatcaaacgggtgggttttgtgtcattgagaatggaatgcctaatcttgctgaggcatatgttagtgttcttcaccatcatccagtgaagttcctgagttctattacttcagtcaagcgtctctatttatgtttattaccacacaggtaaataataatctgtttaactttactttgtttctatcatttaccgcactaacattgtttattcagtattctgtcttgtatgcaggatatgtatcctattagatgtgtcttccaccgtcttgtacatatcacgctatgcacttgtgacgatgagtggttgaatctacttgcgtgtcttctcaaaggttcccctaaactaatatctctcaaacttgaaaaggtacatatatatattccatcccaattattagatcagtgtctttgatcaggttattttccaattcattcagtgtcttatgtaccgtttatctcagcaccatggccatttgatttgttcaccaagccctttacgggatgatctgagttcagttcctgaatgtgttttatcgagtcttgaaaccgttgaatgggttgactatgaaggaacagaagcagagagacaactggtagagtttatcttgagaaacggaagctgtttaaaaaagttcgttatctcccccgaatccgttaatcccgacaaaaaatatgagatgatttaggagctgacgttgtcgtgtaggcgttcacccacctgtcagcttgcattcgactaaagtcagacatgttcaatagtgaacttgcattttgtttgttagtctttgatattatatggtctttgcttatcgttttgtatcttcactctcttgacatctctctttattaggctaggatttgaggttaaactttcattttctttgaatctttcactaactgggcttctctactgctacttacttatagatgggtttcaactttcaagttaaataccaaacctaattataactttaaagtttgtctcacgtcttttgctcttaaattgtgaattttgagcctttagcttcgctagaaagtggaagctgagccatgtcc

SEQ ID NO: 2365 - DNA, 3000 bp, Unknown
  misc_feature (1)..( 3000): cDNA_ID_2157545_gDNA_ID_1620526_Annot_ID_159588 3000 nt of promoter + ATG
ccataacctattaatgaaaaagaaatatatttaaaaaaaaaacaatcatcataaacaaacttgtcaatgtctatttaatcttaatataaagagatttaatttagagttcatccttaagcgagtccaaggaaagtctagaagggttagtgttggagttcttgagaggataagaagcttccattgcaataccacaaagtccttctttatgacgaatccctctctgcattcttatgtatcctttctctccccattcctctccccatgaattcttaacaatccaatactttgttccgtctatcgttgttccataccctactaccgcaactccatggtttagctctgttccgcatctcccggtaaacactccctatgacaccattgcatgcgttaagacaaaaaatgtttttaataagttcttgaacttaattagtatatgtgttgtgagttcttacctcggagtagaattgaaagtctgagcctccagcatcaatagcaacagaaacaggctgattagcaacagctttcattagatcatcctcgctgttcttaggaacatcttcgtgtccatcgattgaaactaccggagcattttctttgtttgtgtcacaagtttcatcagaagccttgtaagggtacactagctcacttgtgagtcctcctttctccttgatgaactcaaaagcaaggtccattagacctccattgcatccttggttctggtttgtatcacaatctactagctcttgctctgagagtgatgtcagctttttagttcttatttggttgatcccttccaccgcaacaactgttgaaaacgcccaacaactccctgtaataaccacaaaccaaatctgtgttaattctcattttccatatatcttttagattgaaggatcaatgaaaagaagagttttaccgcattggccttggtttttgacaggagtgacggctccattctttctccaatcaacggaggttgggagagtatttacatttgcatacatgaagctctttgtggcctttttttcgccttgaaacatcctatgatgtttgatgtttgaaccagcgtatgttctcctaaattcttcactagtcatgtcaccaaacttgtttagcttgagcttgtaagatttatccttcttgttggtctcatggatgtgcttcacgttgtgcttgaacacgttgaacctcttagctttctcttcaaggctcctagcaacagtgtggtgactcctccaccgttcgtatagctcccacaagctattctctgattccacatctttgttatggaaatctaaaccctttgtggtttcaagaaccataagcatgcaaagcgcaagaacaataaatcgcttcatatttttctatggtgatttttgtatttacttgtgattgtgattgagtttgttgatggtaatcaggactaaagagaaagtgtttatatagggattatagatacattggtgagaggttattgtgatgacgatatgtaatgaaaagtaccaaaaggggttaaaggattacttgtgggattcaacaaagatttcaaggttagtgacatggatacattaattaatggagattcataaagatttcaaactataattgaactttatgttgatttaatggcgcaagcaagctctctcattttacttttcttattcttggtaacaataattgatgattttgggaaatagtcggcgatgagatgacttaatatatataagtgtaaaatgacatttttatatgaagcacgtatagtgataattaatcaaagcacaacttgtacgcaacaatttatctttactagctaggaactctgttattcatgtaacctcactatgattaattatgtggattatgtatttttttcttttacaaatatggatccttatgataatttggaaaagccgtgcatgtgtggctaaccatttacgttatctttttttcacgataataaaacgaagttgtttggtatgtgaacaaagaaatcaatttcaaaattatttttaaaaagtcaatttcttccattgttttcacaataagagaactaaagttatttggtatgtgatgttctatataaaaaaaaaaattccatcgtcgaaactaagattttgtttttctatatatcttttaaaatgtaataaatattaggtaatattatgtttttctattgtatttttttttcaataacctttactattttaaatctatctgcaaatattattttatttgaaaggtaaaaattttggtttagtatttgtcatatgatatctgattatggttttcaggagccgattagatgtcatttttagtcattggttttagctttcatcaacgcttttgaaaattgaactcaaattattttggcctaacttatgtcattcaactaaaagacattacaataactgttgtctaaagactaaagaaagatcttaaatttaagaaagaagatactatttgtcaaaagaggactaaaatgctaaatttcggaaagaaaatgaaggaaggtggtgggaagtgtgtgtgatttaacttgatattgggaaaagcacgtaataacaactaagttaggagaaaagtaacaaaaaaaaaaaagataaacgcggacacacacagctaacacgcacatcacatcactacaaagaggatgcagtgtcatgaattgcgtttgcttctaaaatctgtaaccgataatccatcttgtttcagaaaaataaatgtattcgttcgccggcttgaattcgacgcgataaggccgaggaaagaaatcttgctagaaacggctctttgtgtactatatagtcttaattttggtggagtaggtcggtgtgaataaggaaatataaaagcctattgggtcaagtaaggcccaataatagattactgtttatataagatattagactaaactttagtctaatcagattataacatttttttatttttatctcactcttcttcctcttcacctgtaatctctccaaaatcagaaaaatg

SEQ ID NO: 2366 - DNA, 3000 bp, Unknown
  misc_feature (1)..( 3000): cDNA_ID_2157537_gDNA_ID_1620526_Annot_ID_159586 3000 nt of promoter + ATG
taactcatctcctgttgttactttcgtttcccaaacttcgaattgggctgaggaagaagaaggtgaggatggaagcatcggaggtacttcagtcactgtagatgagagtttcgagtctgaagacggtgttggattcccggagccaccggaagaggctaaattattcgtcggaaacttgccgtacgatgttgatagtcaagctttagctatgctctttgaacaagctggtactgttgagatttcagaggtatatattgctaatttgtgctttttgacatttgaatccaaatggttgagaaaattggaactaaatttttctgtggcattgttacttcttgagaaagttagtttagtgtttcgaattcatagtttgatttgtcttgaaggaatgattgtgtttcatgggtctgctttgaaatctggttttatagtttatttggcttaaaggaatgattatgtttcatgggtctgctttgaaatctggtttttgcaggttatatacaatagggacactgatcaaagtcgtggatttgggtttgtaacaatgagtacagttgaagaagcagagaaagctgttgagaagttcaatagttttgtaagcaatcattttcttgtttctcaatcttctgggtcatttggatagtgattatagatgttgaagttgattggtatacaactgtaggaagtgaatgggaggcgtttgacagtaaacagagcagctccaagaggatcaagacctgaacgacaacctcgtgtatatgatgctgcgtttaggatctatgttgggaacctgccatgggatgtggatagtggtcgtttggaacgattatttagcgagcatgggaaagtagttgatgcccgagtggtttctgatagagagacaggtcgttcacgtgggtttgggtttgttcaaatgtcgaatgagaatgaagttaacgttgccattgctgctcttgatggacaggtaaaagaaatcactcctccatgcgtttatggttatcttcttgtgactttaccatttcttttattcattgctctctgtgtttgcagaatttggaaggcagagcaattaaagtgaacgtggctgaggaacgaacaaggcgttgattttgatagctcagtgagtgttaatattgtgagttatgattagaaatgttctcacttacaattccaatgtagcgagtatgtgaaaccaaacttgagttcaagcttttgtaaacatattttctttattacccatcaaaacatattacaaaacattacacaaccttttatatgtacactaagacgtgggatgtagagttttctctttgttgttgttgtcaaaatcctcctaactgttcgacacggctagtgaggggcacataccggactgaagtttcggtatgtaccttgattgaaccatcctcgtttttgtcgattaccttgagctcttgaaaataggttcctagtggaatcaccattcgtccaccgggttttagctgatccaaaaggggctgagggatttctgatgccgctgctcctacgtgtattgcatcatacggtgcaaactcttgccaaccttttcttccatctgccataagatacaattgagtcaaaagatgccaggcaaggaactcataagggagagcgagtacttacccccaacatgtaaggagagagatcctttcttaagaaaggaagcagcaacactcttttcgatattcttgatagacatatcaaccaattcagggatatgatccacgccaacaacacgtccctcagctccaaccatcaaagcaaaacagccagtcaagtacccggttcctacaaacataagctgattattatcttcacttcccaaactcgactttaacataccaataacatcaagtcaaagacctgagccgacatctaaagcgcgcatcccggggtggagcttatcttccaagagctgcaagcaagtagcatgcatatgcggagcagaaatggtagcattataacctataggtacaggagtatcaacataagctgaagaaccaactggtacaaagagacctctatctaaagcctccataacttgagctactcttttcgacgatatcacaccgtaccgcttcaaattttccaccatccctctcttgccgctcgagccagttccactctggaattgctaacaccatcaacatattaaaaatcgtctataagcacaaaatcagtcacacaacacagagaaacaccaaataacccatttgtataccttatgtgttgagaataaactgaagcagagattcctggcaagagaacatacctccatgtggaagaagagagcaccggagaagcgagagagattgagattcagaaactgagatgatgatgatgatgaattgtagcggtgaagtctacgtggcgcacaatagagacgaccataagctgttattgttggacataataaaacctgagctctcattttcttttttcgctttttaataattttgtcaattctagtttcttctctgatgatctgttgttctgtttgtgtgttcgtgttcattctccagagttggattcattggttgccacgtggaccatgacgtgatctctactctttgcactttgcaggaacagaacacaatgtaaatgggcttttataggcccaataataatattgctttccggctactactaacaaaacttcaggtaaaacggtgcaattaaattctaattaatcaatcattaatacaaaaactgattataatcaattttcaataaactaaatttgtgggggaaaatccccaattcacttgcagcttttgtaatttctctaatttgggtcgtaactcgtaagcggcggtggaattcaagtcgccaccggttccgatcaaagtcttccgttatacgcaaaccctaattcctcactacacgactctttttgatctgaatcgagagatgtaagtcttgatttgatctccttttcttgttgcataagcttttgcgattgttgaaattttgattccgatg

SEQ ID NO: 2367 - DNA, 3000 bp, Unknown
  misc_feature (1)..( 3000): cDNA_ID_1712122_gDNA_ID_1620526_Annot_ID_159579 3000 nt of promoter + ATG
cacttttgacttcacattcacaaagctatggatctttgcaaaagtagagcaacaaccaccattactctctcatgtctcatcttctttgtttcttcattctacacaatctccaccgctaaatctgtcacgaatccgctctatcaactccttctgttcatcggcttcttcctcgctgcagccttgtcgcttgttttactggtggcagcagcacgagccaccatggttgcgtggataacggtcctcgtcttactggccttttcgggtacacgtcgccgtgttttagcgcggagggggaagacgatcacggcggacgtggcgatgagcttgttcagggttctgattagagaagcaaatcctcgtggttagtctcatgaagattgtttgttgttagagagtatttacatatcacttttgtatataacaaaaatatatgtatttttgtgaatgatttttccccttttgtgtatttatttattcgaattttaattttaatatatacataatgtatgtgtgctttaaatgtttattcaatacttctatagttacaattttctatagaattaatctttagatgttaaaaaaatgttttaatctttctaatacgaaaaatatttattgagttatttcatatcataatcggggattctgatcgcaattttgatattaaaaatggttaaggaaataaaaccaaaaatgatcttaatttcctgccactgcatatttcactataaataaatgggatcagaaagtttacagttttcttctctactatactacaaaattagtttagctttctaaaataaaataaggaagaaaaccttaagtaaaaccaattacatgtctaaaatatacttacaaaagatcctcaattataaattttaaaaaggttgttgtaatatctcatatccatttagatgacgtcacatacaatttgctacctcttgtcactcatttaaacatacaatacgttgtactacgttgcgacactttcactagactggtgagatatttagaacaaatacgtcagcccgataagaaatatgttttatattcttttacacaaatctaagaatggatttgttaacttgagatatcttatggtttttgtttatgatttatatcataaacacgcttaagttacatcttcacgaagatacaaatctgaacaatgtagatgatgatatgatgcctcttttctcacgtcatggattgattctgcgattaaacgtaaggtacaacatcttcatgtttgttgtccttcagatggtatttgtaatatccccatgtttttctagctgcaagactcgggtatccttaaatctcgttgatgtgaccatggatgatgccgagttcgtttctttaccttatgctgttatgcatttgtaacgtatttggtctcccagtgaggccacctttgcaagacttgtctcttgctatcctgtattggaagagttaaatattgttgaatgttggaatcttccggaagtcattccggctgaatttttttgtcactgatcaagagactcaaaataaagctatgcgattctacggttgtacaagtacatataaagataaatatggagttgtgactgatgctcctcttttacgcgatttgtttattgatgatgaccaagctggaagttatttaataaacaatttgagttccactgccaagttaaatgtttatctcgcctttggtttggacagttttgatgaagcaacaagggtttcatcgaggagaagtagcatccacaattttctgctcgggatttcaaatgtcggggaaatgatcatatatctaaacactttaaagctatatatgtcatgtcaattccagtataagacatgtacgttctctatcatgattcatgaaagtttatgacctacattacttttctttttggttcgagatcatctatcaatactcaaaattagaaccgcttcctcggtttggttacatgtcccacatgtatgctgatatttatgtacctaattggaaatggttaaaaacatttcttgggagttgcccaaacttgaaaatccctcatcttggtaatgatctgctaaactctagctagtgtgaatcaactagtgttcatgtgttgttgtagcaaagcttctctgatgatgaaatgcaaagaagaagctacagaactaaagaagaacaatggaagcattataggtgtgtatagtactaatgaatctctttgcttttgaccacaaagcaacctacttggttcatgttacacaatcaaatttggttccaaatgtcacatataaataataattaagcataaaaattccctatttatagccaatatttgcttctgaatattactcaaattaaacctaaaactcagaagaatgttttgagaaacaaaagcaagaaattttgaaccatgtgatatgtttcaccaatcaatcatataaacttcttctggtttatctttttattatcctatcattaccactccatactcataactctctctgtctctctatctccctctccacatcaagaagaagtctctgctagttccaaaacagaacaagtgaatccctcaagtttcttattacaaaacccaaaaaccaaagtgaaccagtgttgttgtttgtactcacagatccattctccactgattcatttcttgctctgcttcttctctcttagttttgttaagaatcttctcttatccattgtgttttttctattttataaatacatatataattttagttgggggagagcttgcctggtgtcgccttcttctctctctaagacttgtgcttaatttacggacatgtgaagatacttcgcttttgcctcatcgaagggcatgttagctatttacttatctcttctcttctcttctttgtcttgtgagctctcaaatcttcatagatacaaatcaagaaagtgatcaaacaaaaaaaggacaagtctttttggtatttcagatcgagaaaaaatgtggttgcaaggtttgaagtaatcttgca

SEQ ID NO: 2368 - DNA, 3000 bp, Unknown
  misc_feature (1)..( 3000): cDNA_ID_2157503_gDNA_ID_1620526_Annot_ID_159574 3000 nt of promoter + ATG
tatcttgtgtcttaacaagacaaaacacttcttactatcatgaaaatgccaacgtcactaagacactaattttttcatctttacttttctttcctttttcaataaagaaaaatatcaattaccacatcgaagggaaaaaattataattaattactactatctgtgcattttttttttgttagttacacgaaatattatcttttatataattacaatgatgacatcggtttttaaaaatatgtatgttttagaaaatgctttcaaatttgttttttttttttgatcaaaaatatgtatgttttagaaaatctgtatgtaactaacccacaccaaaaagtaacaaaccaatgatgacatcggtttttaaaattatgtatgttttagaaaatactttctcaatttttttttttttaatatttaaagctgtttcacacatgttaaagaatttttaatttttatttattttaaactaaaaaattatttatctaaatataattcagtcaataaaacaacaatctgcataatataaattgtcaaaaccaatataaaaataataattaattttatgtttaaatattatattttaaaattttcttctaaaacaccaaatgaaaaatatggagggattatattacaaacctcatctgtccaaccgcgacaaaaactgttacttatattaaagaaaattaaagaaagaaataaacatcatctccgtgaatgtcattgcgaaaattggagaaaaaaaagaaaaacaaaattaaagatccgacccaaattccataacaaacaaaaccaaccaaaatttaacccagcccaaaacaaatatgttaaattgaacccaaccacctacataacccaacccgaccctccccaaatgacataaatcaatcagatatattttactcgatgtaattagtaatttcataaggctcacattcattgcatgtatacaaatttaactaaattgaaaggaaaaagaatattcgtgtgcgacaatatggtcatattactcccgactacaataacatatgtaaagtagtcataagatacgaacttgaactctctatttatttttgttcataattaattttattggttttcaattatatatatatatatattttgactagtaatctataggttaattcagtaacgaataaagatagatgaacggatggaccattaatccactacgacgcttagggaccaactttccacaagtgaggaaataggaccgcgactaccacttcctacacacccgtgataatattgtcaacgtcattcatgctttttcacctaaatttctttatcttagtggactaggcaatcaatttgaaaactctactacactgagttccaaagtttaacaaaaccataaatgaagagtgctacaaatatgtcatgtttcgtcgtacaacaagtttcccctttggctatacactaaaaaaaaccaacaattttccctgattatacactaaaaaaaactaacaattttccctgattacggtcaaatgctagctgatacacagtgtattttacacacctcgtcgtaatgatgaaagttagattcttgtttcttgacagtcgacttgtcttcgacgtaaattcgtcaaaaaagtcaatttccaatggatttctaaatgttgtatccgtcaaaactcagaaatgagttcttttattgtaatatatatggttatactatagagttaacaatcgtaaggtgttttattaacatcggaaacttttcaaggagttccacccctctttcatagtccctcatttaaaacacaaataacataaaacttgtcctaaggaaacctaaaatcgataactctatagaaaacacaacacatctttttctgttctttataaactgaaatttttcaattgggaacaagtttgtttacttagtatcatttggtaaaaaaaaaaaaagatgctccaataaacccaccaacatcttgggttggtcatttagatactctttgaattatatcagagaaaaatatcttatggttggtatggcagacgaccgataagaacctgtatagtataaccatatccgacaatgacttctctgttatccgaagacatactagacgatcaccaagaaaaagaatttgaaggtaaaacccataaaacatcataagtttgatgtaacaatcaaatttttttgtctctttcccaagttataaggacaacgagaaaataattcaccgaaaaaaggacaacgagaaaataaaataaacattaacttttttttactcataaatgaagtgtcctggaccatgaagaatgcaagagaatacggggtagggagcatttctagggaaagacgggcgacaacaaaacgtcaaaacctaacctataaaaatattaaacgcgaatcatatatagtgaaccataatgaaacaagaaaaaattaatagtgaagaattcaagataaaaccaagctagctaccaaaaacaaaaaaaaagataaaccaagctaatgatgagtcttttgaaaataacatagtttcacatgtaacttaacacacacaaaaatatgtttataatgaccaagaaataaactgaaataaactgaaataaactaagggaaacttaaatgatttcttaggacatatacatgatgaaaactgaaaacgaacaaatgctaggaagtgcattagcaaacaagagattcttaggaaaacatgaataacttagacattttggtaaagaactaaaactcccaaaagtcattctttttgggcataatctataaagtttaagaacttaagaataaataaataaatcataaaataattgaatacacagtaaaactaaaatctacatctcttgatagttaaaaagagagttgtgataaggtggtggggcctttcatttggccttcttttttttgagtccatatatagagaaattggaagaagttgatcaaaaggttcaaaacaaaaccacttttcaaacattggaactatctaagtattgaacacaaag

SEQ ID NO: 2369 - DNA, 3000 bp, Unknown
  misc_feature (1)..( 3000): cDNA_ID_3067300_gDNA_ID_1620526_Annot_ID_159575 3000 nt of promoter + ATG
tcgctgcaactattctacaacggagacgaaaacataaagaagcaccaagaatgtctaaagaagtagtaattaaaccagaggaaagaaacttcaccgagttaaaaccaattcctattactgaggaacatgagatacatatcggagaaaggccaaaactcgaaggtacttgttaattaaaactactatcttcttgagtaataatgtctataaagtttcatgtatttatttttgtaacacagagataatgtcggagtttgagaagaacttgagaggatggtcgagtgttggagttttagtatgtggaccagagtcagtgaaagaagctgtggcatcaatgtgtcgccaatggcctcagtgttttggagtagaagatttaagaagaagcagaatgaagatgaatctaaattttcattctcttaatttcaacctctaatctaacaacattttctaagtttgtatcgttagtttctcattctcctgtattttttatcttatagttgtataatttttgggtctctatcttattttaatgtttgcagtttgatcttttttctcaaaggagaatttgcataaaatgcatatttgtttttttttctttatctagcattttcttttgaaatttaaatagaacaatgtaaaaatagcttcaaacgttttcatttggaaaagttaaactaacatgtaatagtatagcaaagtagcatgataatttttgaaaatcacttataagaatttttgcatatagatatagtagttgtgtatttagtttgaaaatttatttttgaatatgtgagggtattttaatcctaattttgcatttataacattttttaccataactcatgattaatactgatctcgagatagaaatttttgcttttgtcacaatttatgtatttattataaactgtcaaaatttgatctctcacaatatggttacagtttgattttgtttatgatctctatcttaccattatgtttgcagtttataatcaattttctcaatggagaatttgcaaataagcaatttgtttttttgttcttaatttcgcatttctcatggaatttaaaaacaatgccactaaacctgcagtagtccagtaattaacataacaaagttttaataaccaaataaactgactatgttttagattatttgtgtcaacaagaccaaggcaagataggtttcttccggggaatcaccaggaaaaaaaacgcaatttaagcaaacgttctatcaatccggccaactttaaaaacaaattaaaggttttgtggcccaaaaatacgtgtaagacaaaagactgtgacacatgggccttacttcatgtggaagttttggtgcagttatgtgacttacgtacgtcaagcaaaatattagccgccttgaaatttcaaaatttgtggattaaatctaataatcagaaaccatatactataagatttacgttacatccttaaatttgcaatcgtacgttttgggcaatgtattatgtatacattgaatagaagagtcctgtattaattgagttacgcgaacggtttttttttttttttttctgatctagcggatggaggtattaaaaattcacatgcaaaatgttgagaaacaaatttgcaatataacgtagcataatagatttttaagaatatacctcaaaggaaagcaaaatatttgaaagaataaataaatcctcataaattccgtattttaaacaagattttattaagaaaaaaatcctaataaaatcttatttgaaataaggaaataaacatatcttagaattgttcaaagtacatttacataggaatataaaatagcataatgtatgtacaaaaataattatttacaaatcatttatttccaaatgttgtttaacattgtctaagtaatattaattatggtttaaattaatatttagttatgggagccctatattattattgaattattatatacaattagttgatgtaagtatcaaaaataaataacttaagaagtttccaaaactagtattctttatttgctctattcattatatttttatatttgtaacgtcccgaccgtctttattaggtttcgacaatcacttctcggaaggtcgtccatcctgaaattactctatcctaaacatgtttaactataaaattctctcgaaacttttgtaacgtatataaccacataaattctcttaaacttatttgcatacaccattatatttctgaaatcgatatgttacaatattatttaatatttagattacttttactgaatcgaattaaatatcaaatcgaaacaaatctaatctaccaaaaataattttgttataaacatttcttgcctagttctacctcatatacattttagttaaagaaagaaatcacaacaattcccataattcaataattaaatccacaaaatcttggagtaagtaagagaaataaaaagatagtatcttaacataaacaattcaaagatgctctctcacacaattcacacacacttacaaaacaaaagacagaaacaatgttttcattcaaatcaaaagaagttataacactagtacaaaaaaagctcaaattctaatagtaactctttttatttcccaattacccaaagattctctctcacttcacaaaactagctttgagagtcgtgttccacaaaatccattaaagctgaaacggttttgctcaccattcaaacaaatacaaaattgcaaaaccccaaattataacaaaataatataaaaattaaaccgctaaaaagagtgaaccaacaaaaatcgccgaatgtgtgtgtaatgagaaaaccgacccatcatcccaatcatctcttcccgtgtcactctcttcctctcccacgtttcttctctcttccctttatgggttttaacttctccttcttcttcttcttcaatcttcagttttcaaattcaacaacaattcacattttgatttcttcatcatctctctctctctcgcttctctctcaaatcg

SEQ ID NO: 2370 - DNA, 3000 bp, Unknown
  misc_feature (1)..( 3000): cDNA_ID_3067337_gDNA_ID_1620527_Annot_ID_159601 3000 nt of promoter + ATG
gctaattttaagggattgacttaaagtttgtttggattaaatttgattgataatgtggttgacaatttcaatcaagaatttaaaataaaattaattattttggaaaaaagatttaatgctaatggcattgagttgtaaataagtccaaatccaggatttatttattaaaatggctgaaaaaaatgtatatatagataatagaggtttccacttttgctatgaagaggactagaagaaatgctcatcgataccagaaaattgagaaattggccaagaaaatcacaaacttttaaaattagccaaaaaaatgttcaaacttttccattagaattttaaaaataccaaaaaatttaagaagcagccaaataatgcttacgattttatgacattaacaatgtttaaataaaaaagagttttagttctatgaatatgatacaatggttcttacaaattgattacaagagcttacatattataacataataatttaaattattaacaattaaagattttttattttaattgaataacactacacttttaatgactttataagagtactagattttaatataccgcgagatgatttattttttaaaagtaatatatattaaaacttgcaaattttatttttataaaatatttatatttttacagtttataattattattaagtatttatatatattatttttttattaaaaataataaatcaaagatttaacctgtattgaaacggtggattaattatattttactttttattaatgttgattcaaaaacccgttcctccaaatccgtcttgccaaaaagccatttattttattaatattgattttatttatgatataagtctgaattataatctaaacattttagctaataacataggagtgcaccatatttatttaataggggaatgtaccatatgacccgaatgcacttttacccaaatccaccaaaaaagtcttgcaaaactactatagacccgaatgtaccatatttttttgtgctaatttttatgtgattaagatttaattgatttcgtatataaaatattaaattgttttacgaacttatttgtttataatttggtaacagatagataattgaatattcagtatattttgcttcagtttaggaaatctttaatgacccgtctttaaatccaataagccctataattaagagatgaatattgtcgttaaatgattttggtaatcttaatgatgtcattaaaagattttgtttttgattaaatttttctaatggcattgtcatgtaattaattacaaaaattaaggttacatttaaaatgtacttcccaaataatatagtaggacgatatgcacttttatccaaatccaccaaaaaagtcttgcaaatatactatagagataagaaacgatagtcggttttgataggtatatgattagcaaatatattagttcgcttaaattagttaaagaatacaaattgaaaaggtatattacactttattcgaatatagtatcaaaacttatatagagatttgataaatttttaattgttgaatactttttttttgtgctaattttatgtgattaagatttagttgatttcgtatataaaatattaaattgttttacgaacttatttgtttataatttggtaacagatagatatttgaatattcagtatattttgcttcagtttaggaaatctttgatgagttgtctttagatccaataagccctgtaatctagatattaacttgcagtataccgcaggtaggcttatattttagttcaactaaaaacttttattgtaaagatgatttaaaaatatatgatattattttatttgattttaaatgtatagtaaactgtgagttgtatatattttttgatattatctatattgtttagtgtttaagattatacacttgtagtttgattgttaatttaagagtttcacctgtagtataccatcttgtattaatatcgatctaatcccgtcaattctaggattttccagcttgtattaaaaattgaatcacatctaatatgttattaattattgtagtatataagattataaattttcaatataatatgtatgaaattgaatataaatatttcaaattatgacatgttactcagtagaaagttttcttaaatctatttttcacccgttataatattttttcatgtattgaacagtttatattcgtttttaaaaattcaaattatggcatatgcgaaaaaactctaattatttttctataatgatgatattatttttcggcaaaaatagaatcatataaagatgagaagtaaactataataattaataaaaaattaatatgataatttagatatcaaatctaatttgttgattttaattggttacttttttgggaattaataatgtattttgtttttctaattaaattaaattaattaaaatttagatatcaaatcttatatgttgattttgattggttattatttttggaaattaataatgtatttcgtttttaattaaatttaattaattaaattagtatttgactttttaatcctcaaagagataaattaatttactctttaaaattttatttctaatgacatacctatgtaattacttacaaaaattaaagttatatttaaaatgtacttcccaaataatatagtaggatgaatctaataacccaaaatttataaagatttaaattataatcaacagtttgatcatcttgttcatacaaaatttcgtataagacattaattaacaaagcaaaaaatcatatatcaaaatagacacatattaacaaaggattaataatttaatagttgtgaaaagcctttccagtttcttccacggcctagctcctccgtctttacgctctctcatcaaactcgagaaaaaaaagtggcgcctctgcaatttcaattttcaaatcctaataatttttctctcgcttcccggagaacggaaccctaatttctcgacgcagac

SEQ ID NO: 2371 - DNA, 3000 bp, Unknown
  misc_feature (1)..( 3000): cDNA_ID_2157614_gDNA_ID_1620527_Annot_ID_159609 3000 nt of promoter + ATG
agcaaaactttctcactttcaccagattctgtgataccgctactattcaagagcttgaacatatacgtctgtagaagaaattggagcaaaatcaaaacataaaccctaatggaaatcgaatcaaatgaatcaggggatttgaagcttttcattgtagaaatttgttaccttgggagatatatcatagacgttggagcatctcataccgattaatcgcttcaagcacttgacttcggcggcgacgtccgccgtgttcattcgtaccttcaccatatcttagtctctctcgaaatttcgtgattcagtgtcgaatcgaagaaaggttttaatctgtttgtcaaagttagaaattaaaattcggtctgtgctaagctgtgagaaaagaggaagaaggagaagagaaatttgtgagctattcatgtgtgttgggccgactagaagggcctataagcccaatataaaagacgatcattagttatctaaaccaatcaaaattacatgcttttttaaaaccggttagtctaatacactaattagagaagtttttaatttgtctcagtttgaatattgataattgataaataatccacatataacagttgtatgtattatttatgaacaataaaatctatgcagcaaaaataaagtaactaaaatattcaactcctattcaagaatcaaattgatagagtaagctgcaatttatggtgaaagtagttttaccataaggttttctcctaattattttaagaatatatttatttcccacaattggttaataaaattgtgaatgaatacattttttttgtctacaacttgtattattgggtttagactcgaaaatgacacattgataacatttgcacaaataactagatcatatgtttttgtcatattttgagcacaatttgtgcatatttcaagcaaattttgaacatatatcaaatccgtcataaccaattaatgttattattagtacttgttttcattataataatgacgtcataatcaatactgaacgtaccagcgaaatgatggtacatatcggctttaaaatagtattcaccaaatattgctggaggcttgtaatcttttttgctgaagacaagtcaattagggccatttccatttgactaaatctatttgtgcctaatggaaaaatagagatatatactttaagttgatgaagcttttcgtttgcttttatgttcctaatggcaacggtatcaactcgatgatttagactcttaaggaactttaccatatctttatggagaattaggaagtttgtggtgttggataaagggtagaagggaggaaccgcgaaaaagagtgttcttgtgaatggatacacacagaaatactatggattcgggtttttttcctgctcacaagatgaacagtgaatagaagtggtagagaatgtagatattagttctgttaaagctgaatgtgtacaaaacaatatggaaagttagataaataagatctttaggtcggaccaattgttagaagccaaaaataatctctaaactctctttattaaaactgagaaaatgatagcgtaacaagattagagtaaaactcctcaaagagaaactacgtcctcttctcctcggcctaattcgacagaatcctccaaaactctcaattgcttggatgcttttcaaaaacgagactacatccttatttataagtaaacgtaaacaagcattcaaagaaaataaggaaaaataaaaaattataggcaacttcctaaatctaaacagaaacgttgattgttttccaattcacagattgacttgttcttgattattctttttccacatacgtgaataaacaatccacggtttagacttctagaaacattcatatcagatacttcagttttttttttcactttttttttgttgttgtgcgaaatcagatacttaactatacgacatatgcaactatgcaaatctgaaatgtacttacagtttgttgtgaagacgaaaagcaagatcacgattatgattcttgaactgatcatcattcttttcttttcctctgcttataactaatggctcaagtttcttcattttggtttatgtgtattattttattaaattacgatagaagaaattaggaattaaagtctaactactagaatctgcaaaatcagatcatatattgttttcctaatttagttcaaggccaatctctactagagtctgcaatattagtgtgcaggaggggggaagtaatcatttaaaccagcaaacagtaaaacactgatgtgtcgtttttacaagaactggtaaaagaacatcctgttttgtccaaaacgaaaaagaccacccggttattgggactcttagttaaatgagaattccaaatatcaaattaatcaaccagtttggattaataaccggttttaatccaattattgggactgcttgtaaacctcataataaaactaatatgatcttttaaattaataggggttaaagagcgacggaaaatgctttggtcaatataaaattttcccggtttacgcaataacattatgcattgcttgcttgaaattcaaatcgttgatttgtggtgaagaacgatttcgaatatttgtttaaaactttttatttccaagaaaatttaggggagacagcttcatatcccaatttattgcttctactagtaactttccaaacccaaagttaaaaccattttaggattgatcaaaaaaaaaaaaccattttaggaatgcttttaaacctcatagcttcactcgctaatagacaaaatagtaataaaatgtctattgatttaaatacatttggaacaaaaatttgcaaatatttacataatttataaattaatttgtgaaaaagtgttcacgcaaaaaaaaaaaaaaaaacaataaaaaaactttgggtgggccttgtaacacaagacgccgccgataaaaggaaatctcacgatcgtatcatctccgaaacaaaaactcgtggaggagat

SEQ ID NO: 2372 - DNA, 3000 bp, Unknown
  misc_feature (1)..( 3000): cDNA_ID_2157630_gDNA_ID_1620527_Annot_ID_159612 3000 nt of promoter + ATG
atggtgttgggacagatactcaaagaagctgtcggactgatcgcgctgggcttataagtgctgctccatggtaagaatttcagaacaaggcttgaacattgaatgtctcgctgagttatgttagcaaaaaagtattttctttaatgacctgtcagtgaatacaagtgtggcttagcattttacgcttattaattgtgcaggataagagttccgtggcctttccaatggggagcaccattgtttgatgctggtgaagcatttgccatgatgatggcttcttttgttgctcttgttgaggtttgtttcactcatcttcaccttttttaaatgacattagacaattatttatgatatgcatagattttcatatccatttatatagaaaggctgtccttaatagatgaatttcataggttgcatactcattaacttttaaagtcaatgagactctctcttcattctttcgaattttcttgctctttggtttaatctcatcttgcttactcattatgttgacttgtttgtcaacaaaaaacagtccacaggtgcttttattgccgtctcaagatatgctagtgccacaatgccgccaccttctgttatcagccgcggggttggttggcaggtaaatactcacttcataagcttcattttacaaataccatctcgaggttttctcggggcaagcaagtggccatttatctaacgttgtgcctcaactatgttctcttctggtttagggagttgcaattttaatctcagggttgttcggaactggtatagggtcttcagtttctgtgtaagacctcctatccttttcccaaatctaggacatgagctgattttgaatggtgtggtgagtttgttttcacatgaatgcagcgagaatgcgggtctgctggcactaacaaaaattggtagcaggagagttgttcaaatatctgcaggctttatgatattcttctcaattcttggtaagcttgtctctctcacaaaaattcattaagaattgaagtggactacgttaagtaatcgtcttaaataaaactaatgcagggaagttcggggcagtatttgcatccataccttctcctatcatagctgccttgtactgtctcttctttgcgtatgtaggtaagtattgtttcttttttagcttggtttagattgaagcaatttggttcagattggtttgcttaccaacatatagagctagagacttgttttagctatgagcatctttaatacaaaaactgttgtataggtgctggaggactgagtttgctgcaattctgcaacctgaatagcttcaggacattattcatactgggcttctcaatcttcctaggcctatcaattccacaatatttcaacgagcacacagccatcaaaggctatggtccagttcataccggggcaagatggttcaacgacatggtcaatgtgcccttctcgtccaaggcctttgtgggaggatgtgtggcttacttgttggacacgacgcttcacaagaaagatggttcgatcaggaaagaccgaggtaaacactggtgggacagattctggactttcaagaacgacccgagaacagaagagttctatgctcttccgttcaacctcaacaaatatttcccttctgtctgaaaaaaaatccttccaaactttatggaatgctgttttgctagttttgtgtcccttaggaggacacaccttatctagctaggttttatgtgcatattcggtgaggagactataaaacgcaactagatattataacccaaagtgttaagtaacattttagaaatattaatgtgatgtttcttctatgtttagatgttttgcattaaagatgatactcgttttgccaaatttagaactagagtatgtatgctctgttttaatacaaatgattaaaagagaaaattttgtgagttttggaggcttttcgattctaattctataacaaaaaaaatttcctacaaaaatttgtaatgctagatttgacgttgaaactcttatgatatacttttgaagataagtaggggttcatgtgcttcattctctgtcgtccatttaaacacttctttggttgcatataactagttgataggaagttaacgataactaaaagtctaaaacagatggttagccacaacgatgagtatttgcacacaaaaaacagagcctcaatgatgaatgggttttgtatttagttgtgttatactgtatttgttttgtttgattggtagaataatatgtgcttgtttgtggcacatatataaatacatttttgactgataaaatttaaagacgtcattagctaaatcggttaccacttaccaccttaggttaaggtataagaagttataaactattgtgagttacttaataataatctacggatcaaaaatgttagaatccaaaaaagtgcactagttcgaaatcatttatgcgggtctatacatataattcgtaggaggttacttgaaatgatcccaaccaatttgttcatattatctatgcttagtgatttggtttaagacaaaaaaaattaccctaaccaatatggttaaattctcaacttatctcgaaaaaagggtaggcaagtgtcctacactatagaaatggataatgttgattttattgttttctaattaaaacattgctaaaatagagatctgaagaaaataaagaggacgaaactgtaaagtgtaaaaacattgatggagacaagaaagcagaaaaaaagagttacattttactttctagtaagaaaaaaaaaacatgaatattaattatttttgtacataaatataagaagacaaaacagaaaattaaaaataaaaaataatccccaaataatggagacgaagtggagagagaaagctcccactctctcacaccccaaagcttcttcttcttcttcctcttcttcctcttcctcttctctaatctgaatccaaagcctctctctttatgacacaagatcgctcagaaatg

SEQ ID NO: 2373 - DNA, 3000 bp, Unknown
  misc_feature (1)..( 3000): cDNA_ID_2157618_gDNA_ID_1620527_Annot_ID_159610 3000 nt of promoter + ATG
gttttcattatatcagatagtaacaaatgagtacaagagaaaaagagaaacacaagcatttcggctaagacttaccaacatatcaggcttaattcctccatcttcatggtctccttcttcaacgtgccaaccagagggaatatccacagagacaatgactgggtgtttttgaagagtctgctcatagttctgtaacgatactaatcgccggatgaggtcatcaaaaggaggcctgggagctcctacatgtgcaaaaaatggattttcaaaggccaactgaaacatgatgcaaatgaataaggtgcatctctgagactttgattccaaaacttgctgttcaaaagtttgatgaatttacttcttataattgtttcatgctttgaagaattctaacgattcatgcacaaaaatagttaccatggaatgaaaacccaaacattgcatctacaataacatcaaagtcctttgacaagtcatccggcagatcctcaacggaaacaaaagggactgagagtgaatccaactacaaaaacaggcaaattcagcaggcagtaaagaaacggagaaagctaacaaagatcccccataaattaagcactggttacacaaacctgagtgaccagtccagtataaagtggcttggctgtacgtttgggataacaaataaacggtttatatccaaagtggtgcaaatgcctcgccgccaccaaaccatcaccaccattgttcccaggaccacagatagctagaacccggctatattcttccggtttataaacctggaaaaacattgtagacttcaaatccaatgtacataacaaaaacaaaactctgtaatgctaagataaacagtgatacccaagtttgggttcaataaagtcagattatttcactgaagttcttaacttgtgagactcatccaaggaaaagagagagctttagaggtttatcggttcaaaggttaaagctttgagctttacattcagatacctacaatgaaacgtctcacacatatgtctagatctaaagtgatcgaattacctcagcaattgaagctgccacactaagaccagccaattcctacaatcagaagaagaagagcaaaatcaatcacgaacaggtagcaaaccatgggagagaagaagaaggagaagaagagaaaaatggaggaccatgagctgatcaatggagaaaccaagaggacccatcaaggtctcatcaatctcagcggcttctcgctgagtaagataagagagtggtggtgatcctgaatcttgcatgtttggtatgatgactttggtacacaaagtccgtagacgagagccctggcttggagtgatgaatcgctgcgtttttgataaaggagaagaggaaagagagaattgaggaggagatggagaaattgggagtggtggtgattggagaaggaaggtgaatgtcattgttgtgactctgcgtatcacattcctcatttagcccaatgacttcccacaccacaacaacaacaattaattggtagtctctttatgacccaaaaactctcaaaaataagccaccaactttgtttggttatttatatccatgtagcctatgacatagttcattttgattactagagtctagatataatatatacaattctttagatgatttaaactgtagctatagtttgaaatggaatagtttctgtaactttttaatttatatgtaagaaaaaatcgattagaacatgaattcatgtgttacactgttatataagtgtaaacatatatatatatatatatataaatacgacattatcctactttattaagtatacacaaccagaactcaaagaattagcaaaaaaaaaaaaaaccgaattgattatcaaattacttttaaatattatcgaatatcctaagataaaatgaggattttttttttttatttgctttcaactattttaattcttaattgtatcatcatctaattttaatttttgtttatgtaaatttataaaaaatttgttgatataatataggtgtatcaaaatcttattcggaagagacaacattgattttgaaatcctattcttatcatatgcaatctcgagcatcgatccctccaattgattttgaaatagaagttgaaatattaccagatgaacattgtttcagatagaaacaaattgcataaattgcattatctacttttagtcgcttatggcctctaaaacggtaggaacggctctgcagatactccattttatttgatatataatttagtttgcttattgtttttcatttctgatcatatgactggtggcatgaaactgtagtcttcattatgctcatcttgaatatgtatatataagtagacctggcagtaacaccatgcacactatcatatcaaaatcgcatcgtttgaatttttgactcgggataccatgatatagttatcgtcggttttagcaaactaatttctgaagttgttgacagtcatcgcataaataaaagaatttcatatccatgaacaagaccagcttttgattcacttcacactctctctatgtatataaactcttcctcttaacatttttgctccggcaatagaattttaacatgggacttattaaaggctcgcttgggacattcattgtggcggtaaaatgatttgcaatgtaaattttacacaaaccatgttttgttaagttttatataataggattgtatataaaaatagaaaaattactaatttacgtatcatttcaaatgaaatataataaatttgatagaagaaagatactttctaaattgggtatcaaaaagctttctccctccatttacttttttggcatttgtttattcaaaaactgtaacaaaaagagacagagagctaaacaaacagtggactgacgaagaagctctctctaactctcagatctctcttcttccatgttccaaatttcaatcattgtaactgatctctgtttctcaatttacttacttcaacccgatg

SEQ ID NO: 2374 - DNA, 3000 bp, Unknown
  misc_feature (1)..( 3000): cDNA_ID_3067325_gDNA_ID_1620527_Annot_ID_159606 3000 nt of promoter + ATG
aagtggattacaaggcctagctacaagaccaagagcgcgttgggagctcaaaatctgccaaaagaattcggagcagagacatcgatacaatgagtaaacataaacaaataagcgtgtgaagaacaaagaacgagattaaaaatcgaaggaggagaaaaagtcaaaaatcacctgaggaaaaggaagaagaagactcgaggatgaggaagggtctatggcttgcggcggcgtcctggaaatggccgccggatttagcgtcagcaattgcatatctcctccacgagtttttgtttcggagatgatacgatcgtgagatttccttttatcggcggcgtcttgtgttacaaggcccacccaaagtttttttattgtttttttttttttttttgcgtgaacactttttcacaaattaatttataaattatgtaaatatttgcaaatttttgttccaaatgtatttaaatcaatagacattttattactattttgtctattagcgagtgaagctatgaggtttaaaagcattcctaaaatggttttttttttttgatcaatcctaaaatggttttaactttgggtttggaaagttactagtagaagcaataaattgggatatgaagctgtctcccctaaattttcttggaaataaaaagttttaaacaaatattcgaaatcgttcttcaccacaaatcaacgatttgaatttcaagcaagcaatgcataatgttattgcgtaaaccgggaaaattttatattgaccaaagcattttccgtcgctctttaacccctattaatttaaaagatcatattagttttattatgaggtttacaagcagtcccaataattggattaaaaccggttattaatccaaactggttgattaatttgatatttggaattctcatttaactaagagtcccaataaccgggtggtctttttcgttttggacaaaacaggatgttcttttaccagttcttgtaaaaacgacacatcagtgttttactgtttgctggtttaaatgattacttcccccctcctgcacactaatattgcagactctagtagagattggccttgaactaaattaggaaaacaatatatgatctgattttgcagattctagtagttagactttaattcctaatttcttctatcgtaatttaataaaataatacacataaaccaaaatgaagaaacttgagccattagttataagcagaggaaaagaaaagaatgatgatcagttcaagaatcataatcgtgatcttgcttttcgtcttcacaacaaactgtaagtacatttcagatttgcatagttgcatatgtcgtatagttaagtatctgatttcgcacaacaacaaaaaaaaagtgaaaaaaaaaactgaagtatctgatatgaatgtttctagaagtctaaaccgtggattgtttattcacgtatgtggaaaaagaataatcaagaacaagtcaatctgtgaattggaaaacaatcaacgtttctgtttagatttaggaagttgcctataattttttatttttccttattttctttgaatgcttgtttacgtttacttataaataaggatgtagtctcgtttttgaaaagcatccaagcaattgagagttttggaggattctgtcgaattaggccgaggagaagaggacgtagtttctctttgaggagttttactctaatcttgttacgctatcattttctcagttttaataaagagagtttagagattatttttggcttctaacaattggtccgacctaaagatcttatttatctaactttccatattgttttgtacacattcagctttaacagaactaatatctacattctctaccacttctattcactgttcatcttgtgagcaggaaaaaaacccgaatccatagtatttctgtgtgtatccattcacaagaacactctttttcgcggttcctcccttctaccctttatccaacaccacaaacttcctaattctccataaagatatggtaaagttccttaagagtctaaatcatcgagttgataccgttgccattaggaacataaaagcaaacgaaaagcttcatcaacttaaagtatatatctctatttttccattaggcacaaatagatttagtcaaatggaaatggccctaattgacttgtcttcagcaaaaaagattacaagcctccagcaatatttggtgaatactattttaaagccgatatgtaccatcatttcgctggtacgttcagtattgattatgacgtcattattataatgaaaacaagtactaataataacattaattggttatgacggatttgatatatgttcaaaatttgcttgaaatatgcacaaattgtgctcaaaatatgacaaaaacatatgatctagttatttgtgcaaatgttatcaatgtgtcattttcgagtctaaacccaataatacaagttgtagacaaaaaaaatgtattcattcacaattttattaaccaattgtgggaaataaatatattcttaaaataattaggagaaaaccttatggtaaaactactttcaccataaattgcagcttactctatcaatttgattcttgaataggagttgaatattttagttactttatttttgctgcatagattttattgttcataaataatacatacaactgttatatgtggattatttatcaattatcaatattcaaactgagacaaattaaaaacttctctaattagtgtattagactaaccggttttaaaaaagcatgtaattttgattggtttagataactaatgatcgtcttttatattgggcttataggcccttctagtcggcccaacacacatgaatagctcacaaatttctcttctccttcttcctcttttctcacagcttagcacagaccgaattttaatttctaactttgacaaacagattaaaacctttcttcgattcgacactgaatcacgaaatttcgagagagactaagatatg

SEQ ID NO: 2375 - DNA, 3000 bp, Unknown
  misc_feature (1)..( 3000): cDNA_ID_2157589_gDNA_ID_1620527_Annot_ID_159603 3000 nt of promoter + ATG
cctgaccctagaagtttgaatgcagagaaacaaaacttaggcacacatggtgaatcaaacagcaaccatgttttacatggcaggttctgatctcatccatataaacaataactgaaatatacctgtcgagtaagtcagagcacaattcttcaaacttgcccctggtgagagtggtttcaatgtgcttaggcccatcagccgttgcagtgataaaaggcaaactggatacagaatcgaaatcagttaatatcctacataccaatgggaacgaggtaaatagatttgagagggaaaagtgaacctcatgtttgtctgagtcagtgaggaaagctcaattttagctttttcagctgcctccgtcaacctctgaagcgcttgcttgtctttgagaagatctataccttcatccttcttgaaggttgaagcaagccaatcaacgactctctgcattgcaaaagtcgtatctaccagtgagtaagatgatttataaagcatttcagacagacaaagtctgtgttttgactcaccttgtcaaagtcatcacctcccaaatgtgtatcaccagaagtcgaaagcacttcaaaaacaccgtcaccaacctcaaggactacattccaagaaacaaaaacccagtaataattagaatactccaatacctaaaaagaaactaaaagccaaggactttgcgatcccaagtagaactctagtaaaaatacctgagacatcaaaagtaccaccaccaagatcaaaaacaagaatagtttcattgcttttcctctcaaacccataagccaaagaagcagcagtaggctcattaataatcctaagaacttccaatccagcaatacgaccagcatctttagtagccgtcctttgtgaatcattgaagtaagcaggcacagtgatgacagctttcgttactttatcattcaaaaatctcgaagcatcatccacaagcttcctcaaaacctacaacacaaccacatatcaaagctccattcacccaaaactcaaaatgaaaactttaagaaaaaatcaacacaaacctgagcagaaatctcctcagcagcaaattgtttaccaatagcaggacaatcaagcttaacattaccattctcatctttaataactctataagaaacctgcttagactcttcagcaacttcattcattcttctaccaataaacctcttaacagagaagaaagtattctccggattaacaacagcttgacgtttagcaatctgaccaacaagtctatctttactcttagtataagccacaacagaaggtgtagttctttgaccttcagcgttagtcacaatcgttggtttacctccttccatagcagcaacagctgaattcgtcgtgcctaaatcgattccgacgactttctcgttaaccacacggactggaccaacggtgtatcgggaagcgttgttgtttcttcgtcccatacgaaggaaggcggaggttggagtagtgaaaggacttgttctgttgccgaagaagacgcttcgtggaatggaattggttttgttgtcgaggtttttggtggaggaggaagaagacgaagtagggaatccgattccgccgaggatgtgaatttgggcggcggaggaagccatggttggaaatgagagattgataaaacctaagttaggtagatgaagaagaagaagataagaagaaggaaggagaagaaaactatgtgggaagctaagtaagaagaagtggaaggttctagaaaatggttggtggtggtaacatatacctttcgatttgcatttatttataattatttgggcttcgtataattgagcccaacattctcatataaaataacttggcccatcataaaccattcggaacacggttcaaacacaaattaattcgaaccggagattcaaaagcaagaaactgtcaaacacacgtttggaatagagttcgtttcgtgatgcttgctctattcaaagtcatgtcggtatgttttgttaaggacattaattgatttgcgtcttatttaatcactttactaattaaaaacaaagatgcaatcgtgcaaggcccaagttcttctaataggtccacatatcaagcatgatgatgcaaagttgcaaacacaagtaacgtgtcagacattgtttcactactttgttacttgttgtcctaaataacaccattgtgtaattgcgtcatgagtttaatgattactctcagttttcattagtattaataattacttctttatttttgtcagtaaatcttagttttacattgcttgaaagtaaagttttgagatcaaaaaggtagttaagatgttttggccatactgtattaataaaaagatttttggtcagggaatctctttaataaaaagatttttggtagttacaaatagtgtgttacattaaatattaaaattgctttaaagtaaagttttaaaatcagaaaaacacgttttgacccaaattaataagacgattttgatctttaaatagttgtttgtgcctttgtggtggcgactggcgaccatatctggttagtacaaataattcaggagatattttattaaattctaatctcaaacacaaaaaattcataagtcacaaatacacacacacaaaaaaaaaagctttgttgaaaaagtcacgacttttcaaattcactttacgaaagtttatatatctatcttcttcggcttgatcgttcttctctgccacaacaattctcacggttttattcttgtttaccatatttttctgatccaatccaaccaataaccaatcacgattcagagcaattgctttcaggtactctcatcatgagagtctcatgttttctatatttgttaatttctttcgtcttcatgaatgatcgcaatgctgaattattgtgtacggtaattgttagtgtgattaacttattctctactttgccattaactatgtttactttctcattaccagtttttgtattccttaaattaacctcttcatg

SEQ ID NO: 2376 - DNA, 3000 bp, Unknown
  misc_feature (1)..( 3000): cDNA_ID_3067333_gDNA_ID_1620527_Annot_ID_159604 3000 nt of promoter + ATG
tataaagggtgaaacttgacgacaaacaatcctaagctctggatcaggttcacctatagaccatcaaatattaaagtttcaggctcctaccatagacacatcaatacttacaagtgtgaagctgtattcaaaagcatatatattaccctcatacattgtccaagacctcggatataaagcatggtatgtagacttgtctcctttcagattccagtcccaagaaccaatacctgattccgaatcttgtctgttcgaatatataaacttcaatcatctcaaaaaagaatattcactgcaagctaacaaacaagagagagtactgcagtggcttacttgtcaagctttgggttcctaggacataacacactcgagtactttttaccattagcacgtgaaacaaatgcctgcatcaaacaaatccaccaacttagtagagaccatggagagaaatttcaaacagagcataaccatcctgaaactctcttctatcatcttcctcctgcaaagtctatatttgtaacttactgagaattgatttgctaacactggttcatcttcacattttggagggaatagctgccatctctggaattcacctttaaaactccttcctatgcttccagctctgcatgtaaccatagctaaataagtattaagagaacttaccaatatctttacagtaagttctgtatgacaggttacaaatatgatcagagagatggatttctccgaacggttgtttcaatgaaacagttattacataccaatgtggtaaagttgattggatataaaggaaacatacccaatacctccaagtggaacaccatgggaagacgttacagagtgcttggagaatggatctatgaaggccaactgtaatcaatagattattacaatataactgtgtaccaaaaagaaaaagcatatttcaaagactctttggtaaaactgaactaggaaaatgtgtttacccttcctttagcagcttcttctctgcaaagaaaccataaccgaatgccaacaggagcctaccggaacaaaagcaagtctcaaaaacatagttttgacaatcctatcaaacatcctacagaattttaataacagttatatcaaaaacgttttgttttccataggtgtaccagctggaaaatctctttaacactcagattgaattcccgtggagcttttacgtcactatctatctttctttgccatgtcaaagatgcaggtactgccggatcaacctgatttgataagtgggaacaatataagacatcaagccacctttacttgaagattcaggtatcaagttgacataaaataagttacaagtattgtttgatgcagatttaaggactcgaaagatgatggatacgagactaaaacagaacccagaagtttaagctatccaaattagtctaatatatctcaatgaagtccctcaaaacatgaaccacatataagaaatatggaaaaaagcttactttagtatcagaagagtttaaaggttttacatcttcaccaatatccatgatcttttcctcaaacattggtcctaaaaaaaacacagaaacaattcagtgtacaagtcaacaatttcaagtacttatccatctccagttgtcagccatgaagaggttaatttaaggaatacaaaaactggtaatgagaaagtaaacatagttaatggcaaagtagagaataagttaatcacactaacaattaccgtacacaataattcagcattgcgatcattcatgaagacgaaagaaattaacaaatatagaaaacatgagactctcatgatgagagtacctgaaagcaattgctctgaatcgtgattggttattggttggattggatcagaaaaatatggtaaacaagaataaaaccgtgagaattgttgtggcagagaagaacgatcaagccgaagaagatagatatataaactttcgtaaagtgaatttgaaaagtcgtgactttttcaacaaagcttttttttttgtgtgtgtgtatttgtgacttatgaattttttgtgtttgagattagaatttaataaaatatctcctgaattatttgtactaaccagatatggtcgccagtcgccaccacaaaggcacaaacaactatttaaagatcaaaatcgtcttattaatttgggtcaaaacgtgtttttctgattttaaaactttactttaaagcaattttaatatttaatgtaacacactatttgtaactaccaaaaatctttttattaaagagattccctgaccaaaaatctttttattaatacagtatggccaaaacatcttaactacctttttgatctcaaaactttactttcaagcaatgtaaaactaagatttactgacaaaaataaagaagtaattattaatactaatgaaaactgagagtaatcattaaactcatgacgcaattacacaatggtgttatttaggacaacaagtaacaaagtagtgaaacaatgtctgacacgttacttgtgtttgcaactttgcatcatcatgcttgatatgtggacctattagaagaacttgggccttgcacgattgcatctttgtttttaattagtaaagtgattaaataagacgcaaatcaattaatgtccttaacaaaacataccgacatgactttgaatagagcaagcatcacgaaacgaactctattccaaacgtgtgtttgacagtttcttgcttttgaatctccggttcgaattaatttgtgtttgaaccgtgttccgaatggtttatgatgggccaagttattttatatgagaatgttgggctcaattatacgaagcccaaataattataaataaatgcaaatcgaaaggtatatgttaccaccaccaaccattttctagaaccttccacttcttcttacttagcttcccacatagttttcttctccttccttcttcttatcttcttcttcttcatctacctaacttaggttttatcaatctctcatttccaacc

SEQ ID NO: 2377 - DNA, 3000 bp, Unknown
  misc_feature (1)..( 3000): cDNA_ID_3067329_gDNA_ID_1620527_Annot_ID_159605 3000 nt of promoter + ATG
acaggagaagactgtttctgcccatgaaaaggcttttagagcagctgagaaaaagacccgccaccaactttctcaggtaagcttccaacctcgtcgctgttaatcttgtttaatgtttcttcctcgcagtcaactaatcatttgcatttttctggctgaaaggaaaaagtggttgcaacgatttcacacatgagaaaagtccactggtttgagaaatttaattggttcattagcagtgaaaactacttggtcatcagtggtcgtgatgctcagcaaaatgagatgatagttaaacgttacatgtcaaaaggagatctgtaagttttaatatatagaactatttatctagtctttgtgttagtattaaatattcaaagatgatgataagtttttaaccatgctttcttaggtatgtacacgcagagcttcatggagcatctagtactgtgataaagaatcataaacctgaacaaaatgtaccgcctctcactttaaaccaagctggatgttttacggtaagcaatttcatctactattttggttgtttgaattatgtgaatatggtgcaatgtcttgatggcagacttttggatataatatgatgcaggtttgtcatagtcaggcctgggattccaagattgttactagtgcatggtgggtttatcctcatcaggtcactaaaacagctcctactggggaataccttacagttggaagtttcatgatacgaggtaagaaaaactttcttccaccacacccactcatcatgggttttggattattgtttcgtttggacgagagctccttgggagctcatttgaatgagagaagggtaagaggggaagaggaaggaatgaatgatgtagtcatggaaacacatgctcctgatgagcattcagatactgagtcagagaacgaagcagtgaatgaagtggtttctgcctcaggagaagttgatttgcaggaatcaagtacggcattgagccaagatacttcttctttagacatgagttcatctggtattactgaagaaaatgttgcatcagccacctcacagcttgaagatcttcttgatagaacccttggtcttggtgctgcaacggtggcaggcaagaaagatacaatagagacatcaaaagatgatatggaagagaagatgaaacaggaagagaagaatgcagtagtgagagataagccttatatgtcaaaagctgaaagaagaaagcttaagatgggccaaagcggcaacacagctgctgatggtaacactgggcaagaaaagcagcaacgaaaggaaaaagacgtttcttctttaagccaagctaccaagagcatacctgataacaagccagctggggaaaaagttagccgtgggcaaaggggtaaacttaagaaaatgaaggagaagtatgctgatcaagatgaagacgaaagaaaaatacggatggcattgttggcagtaagtacttcccttggattctccattttttgtcatagaccatcattgttctcttatcagtacttcataactggtaaattaatttgtctcccctttgcagtcgtctggaaagccacagaagactgatgttgaatcacagaatgcaaaaaccgcggtcactgaagtgaagaaaccttctgaaggtaaaaaatttcaattttgtcttttttcttctgaaattgtttccgggcatacactttccattagactggaaccatatgatactgatagttgctttgggttgctgtgcagagacagacgatgctgtgaaaatatgttacaggtgtaagaaggttggacatcttgctagggattgtcatgggaaagaaacttcagacatggacaaagtggtgatggaagaagacgatattcatgaagttggggacgaagagaaagaaaaactgattgatgtcgattaccttactggtaacccgttaccaaccgacatccttttatatgcggtccccgtgtgcggcccctacaatgctctccagtcatataaatacagagtcaaagcgattccaggcagcatgaagaaaggaaaaggtaacaacacattctcttccaagtagttgtaaatgtagagcttttggactgtattgatgttgacttttgtgtttggacagctgcaaaaactgcaatgaatctgttcacacatatgtcggaggcgtcagtaagggagaaagagttgatgaaagcttgtacggatccggagctgatggctgctcttgtcgggaatgtgaagatcacagcagcaggtttgacgcagttgaagcagaaacagaagaagggcaagaaaagcgggaaacaacaacatagctaggttttaggtaactgctgcgttgcagcgaagaaggcttttacaaacatatagcagattggttcatatctttgtatgttcactcttgcaaaaacgaaacatcatgttacagcccaaatattatcagaatcaaagtgatttgaaaatttagtaaattttggctaaagagagctctagttatgaactaatacatttcattatcagtaaaatccataaatagctgaaaacaatctcaaaataagcttttaaatcctacggcatggattcttctactcctgttttttttgcttttaaaaccttttctgcttcattttttcttgttttgtagagaactcagaaataatttgcgaattacaatttgatcaaacctctcttcttctcctctttcttcttccttcttcatcaaaactattacatttctacattatctcaaacatctccaaatcattatcttacacgaagaaggaagagataagagcatcaatttttaagtatcggggtttcaatttgcattcgatcttttattccatattttactatttgatttgattttaccaaaacctaaaaaaaaaatctgcaattttgggagggaaaattgtccttcaaactattcttgatttcgtctctgtcccctccaaacaataaccaaaagccaaaagagaagtgctacaaaacatcaatg

SEQ ID NO: 2378 - DNA, 3000 bp, Unknown
  misc_feature (1)..( 3000): cDNA_ID_2157585_gDNA_ID_1620527_Annot_ID_159602 3000 nt of promoter + ATG
tcaagtgagaaactctgagaaacccataaaaacacttgtatatcatttattggtcaaatattattttattgttaaaatttaattatataactaatatttattaaaatactaatatctttcttttttgagaaaccaagaaaatatctcactgatggagatgcccttaataattctcactaattcaagaatcacatgcataactttttgctcaaaaactctgcacgaacaaattagattacatatgacatatctacaatttgttcctccatttaagaaatcgaaatgagaaatctagttaaattcaaattttgtaattattactattaagttgaaaccattttatggcattggaccaatactctagaaataaaccatcattagttagtcattgctaatttatttatggcaatgatatcatccactatattatctaagtacggctagcttcaaccatccctaattttcttaacatatatttgatgattacaagtataggactaaattatatggattgcattatagtgtaatctgctcaattctttattttctaatggataaaagaatcatttttttttcttgtttcttttcttttgtgcaaaggataatgaatccttctttagttctttatgtttgggataaagttgacgcaaacgttcattctcatgcgtacacgtttatccgatgcataaaaaataattccgacgatgtatcatttaattaaacatgcttaattttatattgatgatgtttctgttctatatattgttgcgtttaagacttcactacactatattaataatctagaaaactattttttatatagtaaatgcacgttgtagttgataaataatggtagtctgacaataagtcgacgaagattgattcaaaattctatcctagaaccttgatgtccacgttattaatgcaactaccctaaaagtttaaatcctagatccttcagatctgcaaccatgtatatggtatggcctttggaatattcaggatattcccacggtgctcttgcagttgtgcccgtcgcttgctctcacccgcgaacggcccttaaatccaaactcatatgatttgatttcaaaagcattccataaaactgttttcttgtatacaaagatataggttatggcttgtaccactagcatccatattccgcaacatgtcaacgaagatttctatagttttaacacaatcattttttttgtagatatcttagggtgtcttcaactccacttaaattttccctctatatttattagagtaaaatcatttttaattccacactctatacatcattctaaaacacagtaaaggatatgattactctatatatatgtggagtaactctaatgtttactctattctttttagaataaaatataataaaatgatacatttgagaaaacccctactctattttagaattactatattctagagtaaaaaacatacattggagatgatggtcttttagctagataggatttaggagcttccgcttgatcaaaaaaaaaaaaaacagagagttaggagcttccaaacaaagttcaactatcgtgagtacattaactcattgcggatgttaatatatcttagttgtggctttcaccattatactcaaaataaaagaagtggagacactaagatgtcgactggcctatcaaatgttgaaaaaccatcaaaacaaagatcgagttgattaataattatacagttgtggcagattttaaaactaaccccacaatctattaaaacttgagagtgttccttggaatgaattcaacatgtgtattacaacacaatcaagaaattaattcggtaggaaaccatgattttgatgagacaataaacgattggatccgatcaatttccccataaatttttgcaataataaaatatgtcaaggtcaggttccataactaaaggaaaacaatatctgcatttctttatcgtgtttctccatcttgcatgaataagaagaattgttaaaaagtgaatgcataccttgttgatctaataactaaaaaaaaaaaaaaaagagaaggatcaactgatttacaccaaagacatcttaatttgattggatctagccagtagccacctctcataaaagtttaaaagactttctaaccaatagatgttgttttttgttttggttttaatgttaaatccaatagattttgttcttctcttgaattgtgtgatgtttcaacaagtctggcaaatacacagtggttcgtataattggacgatgtctaccctagtttgggctcatttggtttcttgttgaaatccagttttgggaactaaaaatcattataaaattttaacaacaaaattttcatatctagaaactaaataaacacacatgagaagtaagatttcaaaaatatctgtaattgagttagaatcaaaacaaactttacaagatcatgtgaaaaaaatatacatatattatttttatataagtatatcggacacagttgtaaaatttgagagaaattatttatgaaaaatcaattcaaaataatatatataaaaaacaaatagttttttcccccataaaatatcacgattgtatacaaatttgttgggcaaaaacaatactatgaaaattttcataattagataatttatttatgcaagtttttttttgttattgacttttttatttatttagaagaatatatccttatgaaaatcataacaaagaaagagagtttagttttgcctaaattaggatcaaataaaaaaacaaaattcctgacccataccactctacgacctccctcaaaaaaaaacaaaaaagaaaaaaaaacaataaaaaaatcgactttttagcatctgcttgagcgcgagaggttcatgattccaggaatctcgtgcccaattatatagctttccatttctgtggctttgtaatctgatcggaaatcgaaaacaaacaattttattttcttaaaaaaacaagatcgtggaggagagatg

SEQ ID NO: 2379 - DNA, 3000 bp, Unknown
  misc_feature (1)..( 3000): cDNA_ID_4255192_gDNA_ID_1620528_Annot_ID_159621 3000 nt of promoter + ATG
gcaggcccttttgcatgcttctgttgcatgtcacaagaagcttgtcatagagtgggttgcagctagtgaccttgaagagataactgcacaagaggtgagcctggcactctggtttttgtttctctcagggtacgaaaaaatgtatttactctcatgagcttttgtatgacgtacccttgcagacgccagatgtccataaggctgcatgggatcttttgaaggtacgtgaattttaatggagcctggcacaccaatttggtaaatatgtttgactcaacacttcggttgttgcagggtgctgatggtatcctagtaccaggagggtttggtgatagaggagtgcaagggaagatacttgctacaaagtacgcccgtgaaaatcaagtccctttccttggcatatgcctgggaatgcagctggctgttgttgaatttgcccgctccattcttggttttcacgatgcaaacagcacagagtttgaaccagaaacttcaagcccttgcatcatatttatgccagaagtactaaacaatctggctctctcatttgattgattacatggttttcatgtattaagtatctacttatacttgttcaatctctcaatagggatccacaactcatatggggggcacaatgcgcttagggtcaaggaagacttacttccaggttgctgattgcaagtctgccaagctgtaagcacataatacagtagcacatgataactcgtaggattcatttccaaaatctatataacttctaatctctacattcaggtacggtaatgcaaagtttgtagatgagcgacacaggcacagatatgaggtaatatttcagcttcttctattatacatgttattttccttgagatttcttgtgagttgttgacagtgaaatatatatttttggcaggtaaatccagatatgatatcagaaattgagaaggctggcctctcctttgttgggaaagatgagactgggcgtcgtatggaggtaatatgcttgtggaaaacatgtttaatgtgtgactctgtctgggattggaacaataattgaatgcttttgtgatgttatgcttcattattctactggtttggtgtgcagattgttgaactaccaagtcatccatactttgtgggtgctcagttccatcctgaattcaagtccagacctgggaaaccttctgcattgtttctaggtaaagtctaggttatagtttgatagcttttttgagcaagaatctgtggtaatgtggtggcttactaagaaacactttgattcaacaggtcttatcgcagcagcgtctgggtgtctagaatcagtattgcaaacaggtggcaaggtgaacatagtttcgaaaaatggagtagccaatggatctgcaatggggaaagttcatcagaacggcaatgtctatagcaatggaaacgggcttcaccactgactcgagaaaggaacaattttactgcactttttaagcttttttgcttttaatcaaagctttctttaagcaagtcgacatgtatagtccctgagttttgtttccttgtcttgaaaacttgtttggtttcgttgttagggtttggggagagacatggatatgaatgtgcttcctgttcttgggttactttttacctttcatagctaaaaactaataaagatctatattctagtttcttctggctcgttgaataataacaaaaatttgcagtttgtgttttgtaactaataggtgctttcaacaacttaagtaaagataatatccaagaactttgaatgttacatttttctgtctttattgtatcgctcaatttatttttcccatagaacttgtcaagctaaatcttttcgtactttttagtgttcatgtttttgcagccatccgagctgcgtctgttttatcttttttttttggctttccttacaaaaacctgaactgatctgtttagttctttgcacactgtttctcatcgaagtcgagccatgaaccaccaaatgaatgacatcaacagcgtaaacgcgaaagcgggctgagaatcgtttcttgaaactccattagctgagccggcgttttcggaaggttcatcagcagcagcaccaggagcagaggatggtggctcgtcaaaatcttgaccatcatcattaggtgattctgcagggcgtggtggagatgataccggtgacaaaggagaagcagtaggtgcattatcacctttaacatcaatcattatagcactactaatatgaagcacagagatgttaaacggtagtgctgctacagtgtcttgaagctgagcatcaaggctagacccaggaaccgcagaaccaaacgccacgtctccgtttttcataacggttgcgttcaagaacccttgttggcctctggctagaccgctagattggaaaagagtggtgaggagtactgttttcttgctcagattcttgagtttcttctggtcgtagtaatctaaaacaatgtgaaggctaaggattttcttgatgacggaggttggttggccagagagagaggagagtgcaccgttggaaaccacaaggacggttatggtttgacgtttgttgatggtagaagcgagctgagtttcggagagaagctggttgaaatttgagaaatcatcgtgctcgtttaagatgttagtgatgttgaatgaatttgatgaagtgtagaggaatgtggaagcaaaaaagaagaagaagattgtaagtgaagaagacattgttgtgacttgtgaatcgcttgatgagtttatttaaaaaatttggtggcatttggcttttatattgaataggcatgaggaagagagtgtgtttctccaaactttgtgggaacttggtgttttgtcttggattaagagcacttgtaggtaccgattatattgctcaattcactttagagtaagccacttgttgcacatcgagttctatgcattgggatatacgagtaatctcatagagcgatgatgataatgtaaatggtcatg

SEQ ID NO: 2380 - DNA, 3000 bp, Unknown
  misc_feature (1)..( 3000): cDNA_ID_2157699_gDNA_ID_1620528_Annot_ID_159638 3000 nt of promoter + ATG
ggccttccctgaaagatcaaagtgttcaactttagttcaggtgatggaggaatcaaacgtaaggagtgtgtgggaataatattaccagatgagtggagaggataactttagcaccattttcaatcaaatacttgatcgttggaatggcggcacggattctggtatcgtcagtgatagtctgattatcatcgagaggtacattgagatcagctctcacgaaaaccttcttccccttcaaatcagctgaggtcagatctccgacgctcttcttcgccatagaaaccactcctctgcttcccttcccacgcaccgattcaactttggaagcaacgtggagagagaaacgacgggaatctagagtggcggagaagcctagaggacgcgcggaaacagaggtagagggaattggcagaagggaggcacgtgcgcgagttccggcggaggaagcaacagcgccggtggacttaaggagtgaaaaggcggaacttgcggcagcggaagccatgtggatcaatcaaagaagataaaaagatgaggagatgagaaacagagagagtgactcacaatgttcttatttattagccatttgagattttatgagtttggaatatttctctcttatcactgatgagaggttcaaaagcgattatctttttgatcatatattcgttactgttttgcctcttttgcaaagaaagctactttattgtgcataagatagtttgatctacataatcttaataccattttctcagtctccaatgtaattcaataaaccaaaacattttttcaatgtgcacttatttgatatctgaaattcaaatgatctacagcttgctggttgggagaccaacaggcttggccctagacctcttctccaccgcacgagagagttgcttcaccgcttctttaggcaagtggcgaggtttgctaagccacagtcctccatctaccaccattgttagtccgctcacatatttccctgttaaacaaatcaagcaatgagttacatcatctaaccatgtatatatgttttatattaaagagtgtgctttatttaactcagcataccagaatcacagctgaggtagagtgcagccatagcgatatcccacttctctccaactttataaagaggcatgtactctctggttttgttttcaatctcctcaggtacaagtttactcattccaggtgtacctccaataggacctggagcaatcccgttcactctaatatcatagtcagttccccactccaatgccaagtttcttgtggtagcatcaactgcagcctgtttcaagtttcaaactcctaagatcacatttttgctacatcttttgttcctattacttagttcttgattctctaaccaaaactcaagacattgaatgactctatcagactaatcaaattaccttggctgcagagacatgtatttggtaccaagaagccgtgtagtgcaaagtcgcgctaatgttaataatcgaacctccaccgcttgatgagtctcttccaggcgctcctttcttaagatacttgagagctgcgtgacacatgttgaatgttcctaccgcatcaatgtctaagactgcacatgcacaacaaaaaaacgtttccttgagctaaattgacaaactttcaggcataattcttctcagatcatgatcaaattaatgagaaaacgaaaaaggaacctgttctgaagccattaggagacaaatcctcagcagcagccagaaaattgccagcagcggcgttaacaagaatatcaagtttaccaaaatgctgaaaagttgcttccacaactcttctcgcatcttcttgcttacgaacatcaccttccaatccaatagccttcaaacgaaacagaaatcagacagattcaaacacatatccaacaaacaaagtcctcaaaacaaaaatcgctgattacctggattccaagagatcgaagagcagagacggcgtcatcgaggacttgttttcgtcgtcccatgatagcgatagaagctccatgtttgccaaactgagaagagatctcaaaaccgataccggatccaccaccggtgatgagagccacttgacctctgacgacatcaggtttgaacggagagtccataaccacacactcacacacaagcaaactcgccaaaagctttaagacaaaataaaataaaataaaaggagccagtcgcgtgtctgtctcttcttcttattacttggacctcttcacctactaaccaaactttactttaaatatctccctatttttagtgccaaattacaaattcattatctttctactaattacaatatttgttaccatatgacttcgattgatagtcagcgttttcgttatttaccaaatattaataaccacaaaaactttttttttttttttttaattaattacgaaagcttctttttttgggtgaatattaatacgtaagttttatctaaatccgaatttggtatataatcctagatattttaaaggaatttaataaaaataatttatttttttacaaataaaaaaaaaagggtatcgagttggaattttctacatctgtttgcgccgcgagctcgggtttctttctctctgaagcagaggctcttctagattaaaaaaaaaaaaaatctcaaaaccaaagcttcttcctttttttaccaattcgtatctcccatttttagttttcttcgatctcaaatcacaccatcttagtaagaatgaagtgaagagatttgagaagaaaaaaaacactaatcttgttcccgttcgattcttgaggaaaacaaatttcagctagatttaagatttggaatcgaatattactgtaatgttttgggtgacgggaacctagtgatgaaatcgttgcttgggtttttttgcgctgaagtggaaaccctaatttcttgggctttgtgcagtcacacagtttgcactctgcagtcactaaccatcttcttcttggaagattttgcttaaaggcgttagta

SEQ ID NO: 2381 - DNA, 3000 bp, Unknown
  misc_feature (1)..( 3000): cDNA_ID_3067364_gDNA_ID_1620528_Annot_ID_159637 3000 nt of promoter + ATG
atttcgatgacaaatcagacaatgggattttaaaaagacatacaacttacagaacgacgaacacttgggttcccttcagtttcttcagaagctgcaagattgttcttgtctgctacaaatgtaaaatgggacgaggaagtcaaagagcagttgtattgctttcaatacattataggaacttgacaccactcaccctctccatgatcttgacctactgaggccagattgtcctgattttcatcttttactgggctggttactcggctaactgaggtcagattgtcctcattttcatcttttactgggctggtttctcggctaactgagggatcaaaataaaactcttacacaaaagaggatgcaattcaaatagttgatatttcttaagaatacagcttgtataattcaaagtaaaaattgataacgtgagcaaaaaggtcaatcaatagcgagtgtagatttatgccaacctcttccagaggtataacgtctgagcagctcctcaactggtagatccacttcattttgcaaagcttccaactcttcctgtctttcacgtttggtgaagtgtttttcatcctcctcaatagtatcttcatcatcttcctaagtgtaatcgtgggtttaaaatgagatatggaaaatataactccccaaaagatcagaggtaaataactaataaataaacaataaccaattcaatctccacaaaaactattcaaaactagagtatagcctgtatattggggtgcagggtggtgtcatgacaaagaaaacgatttccttaacaaaaaaatcaagctattctccatctacctttgatgtgcagctagattcaaggagtgatacacagtaactgccgataagtggtaaaataaaaattaaaagatgataaagtgaaactcacggtctcatcctcagattttagatcataatcctcatcgagttcaggacttcctgattcaagacctgcagctaccgcatcaagagaattgttaggattcagctcacttgcttacagtaaacactaatgctgtgttaggtaataaggtgctcacaagaatttatctctggaggtatctgttctgccctctcctcatcactttttgattcgatagttagtagaggttttgaaggagtattttggccctgtttataaggctccactaaattttctgccaacatggttgagtacctgacataaacaaacaggtcaaattctttaaaatctgttctagaataacaaaactatgaaagaaccattcaatagtaacctctcagtttggcctaacagaaattcaagttgcttgtccatagccttcttcttcttctcattgcgtaccaactgatgcttgtaaagcacctacaaagttgccagaccatacataagaacaagtgtcaatacaaagaagttatgccaaaccttaaatttcaaggcccgggaagaaaagtaaaaaaactaccagcttctcaactttcatccaaaactttttcatgtctttcgagatattgagggctactttccgaagtcgctgttcttcttcctgtgatcgacaataaggtcacttaaaaactaatgctggaatgtgtaagtactctgaaagagaaaagaaaggaagaagagagaacctttagcttcctttcttccctagatgcctgatctagcattcctttgctggctctcaaagcaaccttcttcgcctgcgccagcttccatttcctctcagactcaaagtcctacaaaaacatcaacaattagcatagaaacgtcatgcatgcataacaattcttgcagaatgatccaaatagccacccttcaattacctttgacagccaagccatctcctccaatacatggtcccagtgagttttaggacgacgtggttctttaggagcttcgagcgtcttaaaagaaaaaaaaaaacagaaaccgttaacactttcaaatagtgatcagctcaaactagaatctaccgtaagaagatgaactcagacgtaaaaatgaaaacttggagctaaccttctgacgcttagctctggattcattatcaggtttagatttcccactcttggacgccattactatatcaggtttagatttaccacctttagacgccattactaacgcctttaagcaaaatcttccaagaagaagatggttagtgactgcagagtgcaaactgtgtgactgcacaaagcccaagaaattagggtttccacttcagcgcaaaaaaacccaagcaacgatttcatcactaggttcccgtcacccaaaacattacagtaatattcgattccaaatcttaaatctagctgaaatttgttttcctcaagaatcgaacgggaacaagattagtgttttttttcttctcaaatctcttcacttcattcttactaagatggtgtgatttgagatcgaagaaaactaaaaatgggagatacgaattggtaaaaaaaggaagaagctttggttttgagattttttttttttttaatctagaagagcctctgcttcagagagaaagaaacccgagctcgcggcgcaaacagatgtagaaaattccaactcgatacccttttttttttatttgtaaaaaaataaattatttttattaaattcctttaaaatatctaggattatataccaaattcggatttagataaaacttacgtattaatattcacccaaaaaaagaagctttcgtaattaattaaaaaaaaaaaaaaaaagtttttgtggttattaatatttggtaaataacgaaaacgctgactatcaatcgaagtcatatggtaacaaatattgtaattagtagaaagataatgaatttgtaatttggcactaaaaatagggagatatttaaagtaaagtttggttagtaggtgaagaggtccaagtaataagaagaagagacagacacgcgactggctccttttattttattttattttgtcttaaagcttttggcgagtttgcttgtgtgtgagtgtgtggttatg

SEQ ID NO: 2382 - DNA, 3000 bp, Unknown
  misc_feature (1)..( 3000): cDNA_ID_3067377_gDNA_ID_1620528_Annot_ID_159624 3000 nt of promoter + ATG
tctaaattatatattcaacacgtaatgtttaaagaacagatactcccggatgatttcacttttttctttcgtctttttagttagttcattcaacaagaaaacaaaagtaaacctttgaaatgtagctaatggtcaacaatgacagatatactgagaaagatctgttctcaaattattgaatttctcacttcatttcaatagaatttttactgttgaatcctcctcgagttatttgttttacaactcaaaaactgaaattgcattcaatgttatttcgttgttctttttgtttaatttaagattaataaaaatgaaaagcccccctaattaagggttagtagtagtaactagtacgtagacttttttttgtttgacatcatagactaagtagtaacaaaactagagtttgcatccaacaaattaagtcggtttttattttactcatttaagacaactaggaagaaaccgaaggtatgcaaacgtattttttttgcgcgttatgcaaacgtaattaagggtaacacttacggcaataattaattataagaaacagacaaattaacgaccaaaatacgtttgatatgattgagggtaggtataatactatatggttggatggattatacgtggtgaggacaagaggggcagagagtcaaagtcacaatggcgagagtaagatgtatagctgtcataatcttattggctgtcatttgcgtccttggattcttctaaaatttcttagattttataatcgtcggttcaaattaaaaacttaaaaaactgtattttagaagatagagagacacaaaacatgacaaatatatataacttggattagccaaatcgaaagagatgcgtgtacactgtgttgcgttgaattccaatccaagctacaaagtgtctcttgtcttctttaaactcaaatttataaacaaatttatctcattaaatcatatccgtaacactgtcgtgtactcgtagtgtcacggattaacaccatctcccatcacttcgtctacgcgtgtgtatatattgaacaatcagtgatatgtttgttattttattcctttgtaatatagttgctaatttagtcggtatcaccgaacttctaaattaagactataaaagtaaaagtaatatctagtagaaaatcctaactgctcgagaaatatgtaacgaacgacaaagacataggaggaggaaaggagattaattcaaactgccagtttgcacccaataattttagttatatgattataacaatctcaacgtgacgacaaaaaaaatattataacaaccctaaaggacttcatggacagccttacaaaatttttcttacattgtcttgattcattaatatagcaattgcaaaaaagtgagaaaataacctataattatgtaattagcatggtccacctcgacccctattttattaccaatgtaaattgtgcactgtgattcaaacagcaatatgttgttacatggcggcgttctactattttttatatataataattgtcataataactcgacagagttgaataatacagggaggcattatttggtttaatcacgggtcttttcggtgtttaaataaatcatacactagctaacaagtaacagggctttatcaggaagaaaaaaagaagtaacaaggctctgcggattcagtaaaatccaaccgttgatactaatactgaacctggttttattttaatgtgagaaggccaaatgtaatgagaagttggtaaaggataaaggcatgaaaggccggtgttgattctatgccgcaagtgtagaaaaacgacttaccttaataattatgagcaagtagccacatgacgatatttattttgttcgctagtcattaataaccatttatatggtaaacgtgaaaatgaacaggccagagaaacacatgaaaccagatatgatacgtaaaaccaaattgaatatttcgaaattaaagaaaatgtattcgttttttctaggatcacatgagggggtaccatcgttgttgtggatgtactctaattttggttggttgaatgaaaagtctcacaatccatgttattaccaaacgcctcattgtttggatcccacgtatgtatgtcatcacacaactcacccctagagatgtaggaataggccaaacggttcgtattggactaggcttagtctgatttatatgatttttatttagtcatgtttgtttttgtctggttttagatccaatattgatttggtccgcaaatcacggatcggtccacactaaagtagaagaaaaaacagctaatagcattcgtgtgacaagtgaatatacaaatgatcacttgattagtgtatattttgctagactaagtaattatgcattttggtttatagacgtgtgggagataaacacacgtcaaaagaagaatgaccgtagttatactcgcaccttcgttaactaggtctaattaagagtgtagacgacgtatggtacaaggaacgatggagatggtgtgtaaattgtaatgtcaagtgtgtatcaatgacatcatccatgccccgccattgcttaatttccggatcatctatcttataattgatttttgtacttatctcattgacttatacacaaacacaactcatatttccctcatcatctaattacgaaaacggtccaattattcaccttttttcttttacaaaaatgtcaatgcaatgttcccccatcatcagaaaatagtatacatctttatttatattaaaaaaatgttaacaagtaaaaaaaaatgaagaagaaactgttttaaaaaaaaaaaaaaaaaaacatacaaatatgggcctaaattttgtacggcgaatgctgaatattactaaaatgggccttcttaaacagggccatgattcgttgaagtacaagtaaacgtaaagcccaatcataaattcgccggtcggtggtggtatctcctcctctccccgtttttctgggttactgttattcgtgagccaatg

SEQ ID NO: 2383 - DNA, 3000 bp, Unknown
  misc_feature (1)..( 3000): cDNA_ID_2104905_gDNA_ID_1620528_Annot_ID_159626 3000 nt of promoter + ATG
taggggtgagttgtgtgatgacatacatacgtgggatccaaacaatgaggcgtttggtaataacatggattgtgagacttttcattcaaccaaccaaaattagagtacatccacaacaacgatggtaccccctcatgtgatcctagaaaaaacgaatacattttctttaatttcgaaatattcaatttggttttacgtatcatatctggtttcatgtgtttctctggcctgttcattttcacgtttaccatataaatggttattaatgactagcgaacaaaataaatatcgtcatgtggctacttgctcataattattaaggtaagtcgtttttctacacttgcggcatagaatcaacaccggcctttcatgcctttatcctttaccaacttctcattacatttggccttctcacattaaaataaaaccaggttcagtattagtatcaacggttggattttactgaatccgcagagccttgttacttctttttttcttcctgataaagccctgttacttgttagctagtgtatgatttatttaaacaccgaaaagacccgtgattaaaccaaataatgcctccctgtattattcaactctgtcgagttattatgacaattattatatataaaaaatagtagaacgccgccatgtaacaacatattgctgtttgaatcacagtgcacaatttacattggtaataaaataggggtcgaggtggaccatgctaattacataattataggttattttctcacttttttgcaattgctatattaatgaatcaagacaatgtaagaaaaattttgtaaggctgtccatgaagtcctttagggttgttataatattttttttgtcgtcacgttgagattgttataatcatataactaaaattattgggtgcaaactggcagtttgaattaatctcctttcctcctcctatgtctttgtcgttcgttacatatttctcgagcagttaggattttctactagatattacttttacttttatagtcttaatttagaagttcggtgataccgactaaattagcaactatattacaaaggaataaaataacaaacatatcactgattgttcaatatatacacacgcgtagacgaagtgatgggagatggtgttaatccgtgacactacgagtacacgacagtgttacggatatgatttaatgagataaatttgtttataaatttgagtttaaagaagacaagagacactttgtagcttggattggaattcaacgcaacacagtgtacacgcatctctttcgatttggctaatccaagttatatatatttgtcatgttttgtgtctctctatcttctaaaatacagttttttaagtttttaatttgaaccgacgattataaaatctaagaaattttagaagaatccaaggacgcaaatgacagccaataagattatgacagctatacatcttactctcgccattgtgactttgactctctgcccctcttgtcctcaccacgtataatccatccaaccatatagtattatacctaccctcaatcatatcaaacgtattttggtcgttaatttgtctgtttcttataattaattattgccgtaagtgttacccttaattacgtttgcataacgcgcaaaaaaaatacgtttgcataccttcggtttcttcctagttgtcttaaatgagtaaaataaaaaccgacttaatttgttggatgcaaactctagttttgttactacttagtctatgatgtcaaacaaaaaaaagtctacgtactagttactactactaacccttaattaggggggcttttcatttttattaatcttaaattaaacaaaaagaacaacgaaataacattgaatgcaatttcagtttttgagttgtaaaacaaataactcgaggaggattcaacagtaaaaattctattgaaatgaagtgagaaattcaataatttgagaacagatctttctcagtatatctgtcattgttgaccattagctacatttcaaaggtttacttttgttttcttgttgaatgaactaactaaaaagacgaaagaaaaaagtgaaatcatccgggagtatctgttctttaaacattacgtgttgaatatataatttagacgaagaacagtagtactttttattttagaatattagaggaaataaacaaatttaagagaatgttttggtttaatactgtgttctgtttagccgttttatgaataatcgccataatgcatgtggaattcaaacgtgggcgtgtttcttttcgtcttaagtaacactttaagcgtctcgtaaatggttagtatttacgattaaattagaacaaagttaactaagtatttgtcgttaatttactagataatgatttttaaaatataagtttcgagttaatacaaagggaagtaaataatatggcttatacatttagattacgttattttagttttggatctaaatttgtaaagaaattagctaaattaaaggggaaaagggatatgttttttttttttttgttaaagggatatgtaatatttagtcaacgagaattggttaattgggaaacaaaagttattggaagagatcaaaaattttaaatattaatttttgagtttatacaaagggaaagaaatcttatgatttaaacatttagattacattattttaattttcggatttaaatttgtaaagaaattagctacattaaaggggaaaattggagagattaattgccccccataaccagaattggttaattgggaaacaaacaattttagagggggcaagagagaatctttttatggggtgcaattaatttaattccttaaaatgcttaagaaaattcaaaaatttagggagggacaactgccccatattaattaacaaagatcatccccatgagagaaaggcgtttcatcaatgtatataaatactctgttttggaaacagaacccaacaggggacaaaaaaaatcaagaagaaaaa

SEQ ID NO: 2384 - DNA, 3000 bp, Unknown
  misc_feature (1)..( 3000): cDNA_ID_3067368_gDNA_ID_1620528_Annot_ID_159633 3000 nt of promoter + ATG
tgctcattaccttttctctttttctcccaaaaagcagtccctcgaatcaatgaatgcggattattagctggcctctctgcctttaactattgtttgtatctatcaaaggcagtcattgtgttcaagatagaatagtattgattctgagattagaaacaccattacagattcgagaaaaagagcggcatttggtttgtttgtttgttagtttcagatcaagaatcaggcccagatggcgaggagagacatggaacctgcgcctaggacgagagagagataagcagccaagtgaagccagagattggattgcaatcttggattcataaaatcagtagcaagaagatcaacaagtgacatgtatatgagtatcccagcagatgcagcattcaacattccttccaccattattgcctctttgctctctttcctgtagcctaaaccacttgacatccccaaccctattcctatcccaagtggcgccgtcaccgagaaaaatgtcgccattagcactgtcgatttcgacttcatatccgcctattcatatacacacaacatgatcatcatgctatcatcaatcaattgaattttgaacaatgaagaaaaaatgattgttgtgacacgattcgtctaagctaagctacctatgaccataaacgatttggaagagactaaccagggagatgcatccaccgaggccaagaccttcaaagaactgatggaaagatagtgcagccatgagtggctttatggtgtctatgctctgtgaagctccaagtgatatccctataataaccgaatgcacaactatcccaatctcaagcacctgcgacactatacgtcttctgatcaactcggtcgaaccatgtgtgtgtccgtgactagcgtgcgtgtgaatgtgaacatgacccgcatgctcttcttcatctactactacgttcacttgcttgctcccatggttattgctaaaatgttgcctcttgtaataccctgtcgcgaatgtgtcgatcataagagtccccatcgccgacagcatcgctacaaaaccagcaaacgggaacttcccagctgtagtgtcctcaagacatggagagctcaatctctcgaacgcgtctggtaagatatgaacgaaacctgtgcagaggatcactcctgcagcaaaagctttcaccatgaagaagatatcattttccggttgtaacgccggaatccttttcccgatcaacggtagactcacgccgactcctccggctacaagaagtaaagctatcgaaccaagctttagcttcgtcgctttctctgcttcgtcttgagacacaggatcatcgtgacttgtacaatcactcgaggcacaacacatatgcaaacatattatcaatactacacaaattctcaacatagttgttgccgaaaaacatccacattcagacatgagtttaagatatttatgttcttgttctgtaagaaagtaaagtttgaagagttatggtgaagaaagaggagctttttatagagagaaagcgagagagaacctcacttttgaagcgagtggtccataaatgttagtagcagaatctctagttacgtagagttgaccactatacacatttctttgtttgtcgcacacaaaaaaataattaaattctgttattactcttattgtataccattaagtctttaacaatgactagataaaataggatggaacatttacggaaaaaggctgcgaaagaattcattggttagtataagaaattctgcaagcatcttagattgtagtctatggatggttcaagtaagacgccctttcgatctcttctaatcattacttatctatttatacatttttgagatatacaaacaataataaaacaaagacgacaattcaaagatagatgattagggaaagatcatagagactaaaagtgagtttggaacattattggtcttaaactttaggggcgtagaatagggtggaaaagagattagctgtgaatgctaatccttgtaattattaggttagtacatatcttttcactttaccaaaagcaaaatatatgtgtattatgaattgaaaatttgaagacttttttactagaaagtaaaatgtgaagacagaatgtcgtcatgttactatgtgagccgtgaggagagtggttttggtttgatttgttaaatctacttttggattcaagaaacgtaagatggtctcatcgtcctctcaaggtgggatgggtgggtaatgctggcccaatcaaaccacgtgtttcaaattcagatttcaccatcgccacttgagtgtgatggttacctgaacctaatgattttggccttttatatcttgttttcgaaaactctgaactataaataagatatagaggtttgagaaaacaatggttgaattttcataagcaaagaaattggaaagaatccaagtttgatcacacttgactatcatttcactttttttttgtttttaattcctaaaattgatctaatagattatatataaacatatatgtacctaattaatctctggtatatgtaagacattcactttttatttttggttggtaattttatatcgctgcagtatatgatttaacgatttaataattacgaatcataataactatatcaaagcgataccaaaaacgatatagttaaattttataccattattgtctactattttttttaccatttcaagataattttatatcgtttaccgttttttcttcccgcgaaaaaattcataccacattctagctccaattgaattaaaatgtatcaaattctctatcaaatcaggattttataaactataaggtacaatttatatcccagctgattaactctagtccaaagcttaaagacagaacagtataccggactaaatttccggtccattttgtatagggagacattttactaaacaaaccggtttggcgaaccggagtatttgcataactgaaacaacatttataagaaagaaaagtagaa

SEQ ID NO: 2385 - DNA, 3000 bp, Unknown
  misc_feature (1)..( 3000): cDNA_ID_2157664_gDNA_ID_1620528_Annot_ID_159628 3000 nt of promoter + ATG
ctaaactgataattataggattttaagcatgcaatgtatgacaataactagaaacacaagttaacgagatacatagatgattttgttaaggaaagtgacgtgaactactggtgtctctaatcaggcttccatttgaagacacacagagaaaaaaagagaaacgacacaagtttggttaatcatatatagtagattaattctcccaagaaagatattagtactgatcagggaaaatacatcaaatagtgaccaccctgctggttaatcaacaccaagagaccttgtaatatataagttaggaagatgagagagaagtgggaaatgaaaagagatgaaatgggacatcgatgttgtggaaaacacaaagtgaagagaggtctttggtctccagaggaagacgagaagcttcttcgttatatcaccactcatggtcatcctagttggagttccgttccaaagcttgccggttttgtatcttctatctctacttcccttttctttttactattttttgttcatgagtctaaacatacaacatgtgaaaaaataatagtctttcaattcaaaactaattagcaatgagtgaattagcctatgttttttatatactatatgctcgatgtggattaatcctaacagtatctatatgtgtgtatagggttgcagagatgtgggaagagttgcagattaaggtggataaactatctaaggcctgatctgaggagaggttcgtttaatgaggaagaagagcagattatcatcgacgtacatcgtattcttggtaacaaatgggctcagattgctaagcacttacctggacgcactgataatgaagtcaagaacttttggaactcatgcattaagaagaaacttctttctcaaggcttagatccttctacacataatcttatgccttcacacaaaagatcttcttcttcaaacaataataatatccccaagccaaacaaaacgacgtccatcatgaagaaccctactgatcttgatcaatcaaccactgctttttcaatcacaaacatcaatccacccacttccactaaaccaaacaaacttaaatctcctaaccagactacaatcccatctcaaaccgtgatccctatcaatgataacatgtcaagtactcaaaccatgatccctatcaatgatcccatgtcaagtcttttagatgatgagaatatgattcctcactggtcagatgttgatggaatggcgatccacgaagctccgatgttgcctagtgataaggcagtagtgggagtggatgatgatgatctcaacatggacattttgtttaacactccttcttcttctgcttttgatcctgattttgcttccattttctcctctgcaatgtctatcgatttcaatcccatggatgatcttggcagctggaccttttagcttttactctacaatattttcattttctcaagtgtatatatatgaataattgccactttctgcttttcactagttttgaaaagctgagaattttccaaatcagtgtctcatttttttctccatcaatcccactaagactttgttatgtgcaaattgaaattttcaccatctaataaaggctttttggctaatctatacttgcaccgcccatattaacatgcgcctaaatgggctatgttaattgtaaatatgggtgtgagattcaaccaataaagaaagtagcccactagaggcccaatagattcaataagtgtcttgcgttcgcgcgctatgattgatgagagactacacggcggtattccattgaaataataatgctagtttttaatgaaacttcgtgggaagagcgaaggcaaagagggaacatgttacattgccacaccacattcttctaattaaattgcgggcgtacacttgtacatgaatatgcatacaggtgttgaaaaggtcaaattatagtaatcagaagaaaagattcacaaaatgggaatccaattattacgtcccgcgtttgattgaaatgaacaatacggatgaagcaaacataataatctcatgaatattgaaatgattgaggagcaagcaacacgaagaccgacaccgaggcacagtagatcgagaataaaggacatgtattaagtagtgtttattattatagtattggtaataatgtatatacaagataagtggaaccacatggtctgtctccttatcttcatcgtaaacactttagttacttaggatttggtcctttaatttcatcaagttcaccacaatttctcttctacttctttcgacctacatgtataaataatgttaacatttgcatttcatagaaaatctaattgtacatgaagagatagattatatatggaaagtaaatgaaacgagaacgacagtagatgcggtgacatacaattgaaagaaaaatacttgaataagttgttgactaaaatactaatatacagttattcttgtatataacagaattgcctttggaaaatatgggtttaatgtttgattaaaaatctcacaaaacaaaaaaattgctgctaaaaaaatcacataatatcggataccaaccataatttttaaatatgacaaatataagaaagcagcctaaaatgatacaagaaagaatatcgaagtaccaaaagaaaagtaaacacaaatagttaggggaagacttaaaggtcacatgggatgatttggtggcatcattgcatcaaatcctgcacatgctctgcttcttctcttttctatattccttctctctttttattttgttgttacttgttgtcaatactaatacaaaatttatccacacggttttatttttagaataatgttcacatattattattacgagtatataactacctttcaattctctctgcctctcatagttaatatatatacgttcacaatcacttctcttctctatttcttattcattatctcaaccctctctctctctctctcagtacaacttatcatccatcaccatatatagagaatatg

SEQ ID NO: 2386 - DNA, 3000 bp, Unknown
  misc_feature (1)..( 3000): cDNA_ID_3067381_gDNA_ID_1620528_Annot_ID_159623 3000 nt of promoter + ATG
tatctttcttttattttcactgttatccagtactatataaaaacacaacgctgcaaatatggttcaaagtgcaaatttaatcatccaagagaagaggctgcagtaagtgaattttccttttccaaataaaattatccctcgggttgtgtatttgcctgcagacactcgcataaaatcttgtgcttgtaatatgtactgctttagttttttcttgggctgtgcatgcacctagaagcttgatgctcttctttatttcaggttagtgttgaaactcaagattcattgcctgagaggccttctgaacctatgtgcacagtaagatataaacataattgattgacctatcctatttttataaatgctcttacatatgaaactaatatcgattattaatttggcatttctactctgcatcagttctacatgaagactggaaaatgtaaatttggtttgtcatgcaaattccaccatccaaaggatatccagctaccatcatcgagtcaagatattggtagcagtgtggggttaaccagtgagcctgatgccacaaacaatccgcatgtcacatttaccccagcattgtatcacaactcaaaaggactacctgttagatcggtaatgaattcatcttcactttgcataagactgacttataatcatataggcacaatttgtgactttctactatcttattggcactatacttagaactgattatggtttgctagcattgtatgctgacctgttctgacgtctgagaatgaagtttcactaattagattgtagctttttcagggtgaagtggactgcccattctatctcaaaacgggaaggtgaatatctcttgtataatactattttgttgtttagaacattgaaacaaagaacgtgacattaacgttctaacttgttttccttttccataatcagctgcaagtatggagccacttgtcgctacaatcatcctgagaggactggtttgtgatcatgccaaaattttgtggtttttagaacctttaacgtattacttttatccctaaattctcataatgtgcgatgttttgattctgtgcacagcattcattccccaagctgctggggtaaactattctctagtttcatcgaacactgcgaatttgaaccttgggctggttacaccagctacctctttctatcagactcttactcaacccacggtaaaagcctttattcatgttgtgagaaatattcaagagcgcttctttagttgataggggtttaattagagtggaaattgtttcagcttggagtgatttcagcaacttatccccaaagacctggacaatcagaatgtgacgttagtatccttgtttcttttagagattgctgagctttttctcccacatgttagttgaaattttataccaaaagctctgtctttcaatattacagtactacatgaagacaggggagtgcaagtttggagagagatgcaaattccatcacccagcagataggttaagtgcaatgaccaaacaagctcctcaacaaccaaatgtaaagctgagtcttgcagggtatcccagaagagaggtacctataaagtggtattattagaagcctgcatgttgtgagtttgtgtggtaatctcatagacaaaacaaaaactgttgcagggtgcgcttaattgcccttattacatgaagacaggaacttgcaaatacggggcaacatgcaagtttgaccatcctcctccaggtgaggtgatggctaagaccacttcagaagccgatgctgctggagcaaccaacaccgacactactcaatgagtttcccagctttgtgtaacataagatgatatcttgttgtaatcctagtttacttcctatgtactgcatctgtttcgtttcgaaatgcttatcgctcgtgagttctctacttctctttatcatcctaaaacaaaaaagatatcgttgagtgagtcttcttttactcagttgagctcataaaagcaaaattgttcatcaccactcttctctcctcaatgatccaattgagcatttatctgccgttgattcggttctcttggataaatatcgtttccattgtgattttgtttatagcaattgtcagtaaactccaactaatctccacaataagatgaaacaacacgtaacaacaagatgtgacagagtgacgacagagagccagtgcatgaaacatgcttcttcagcaagacacatgtcggtgctaactgctaaatcaaaagtgggtccaatgttttgttcttaagagtcgaagaagaggacatgacatgagaaacagaggcaaaggaagaaaacatggactagttgtctccgtgtctctgattttaagttttgatgaaacatgtggaaggcctctattaatggtataacgacaaatgatgaaagtagcaaaggaggactcaaaaagtttgatgcctttttgattggatcttttaaaaatatgagcacacttccctataatacttctataatccaaaatactcttttgggcctatcttaccaaaattatgcaaacttccacaacacaaacacgagtgtcacaaaccctaaatctaatctcaagagtctggagcagaaaaataaatttaccatggttttgaaatttaccgtttcagtccctttttattttattttcttactcaagcccaatgttgatgtattattttgagattaaaaaacttttgaccaaataaaaaaactattttgatttgctttcaatttgggtttaaataagagtgagggtctcgcaggttagcttataagccgccgccttgaaaatccagaaggccatttttgttggtgaaaggtagaattcgtaaatttcttctgctcactttattgtttcgactcatacccgataatctcttctatgtttggtagagatatcttctcaaagtcttatctttccttaccgtgttctgtgttttttgatgatttaggtgaagaagaagaagcagagacaaaaacgattatg

SEQ ID NO: 2387 - DNA, 3000 bp, Unknown
  misc_feature (1)..( 3000): cDNA_ID_3067445_gDNA_ID_1620529_Annot_ID_159657 3000 nt of promoter + ATG
cggtggggagtcgaggcgggagaatgaggtggtgatcgaaacatctctgtcgggtcctagcgatccagagatgtggatcacggtggacggtgtgccggcgattaggatcatgaatttgaattggagatttagagggaatgaggttgtgactgtgagtgatggtgtttctttggagatcttttgggacgttcatgattggctgtttgaaccctctggttcgtctagtgggttgtttgttttcaagcctaaagctggatttgaatctaaatgtcttagttttaatggtggctatggtgatggtgaaggtgaggatcatgatgtggaagatgacgattcgtcgcccaagtattgtcatgtcctatatgccgtcaaagaactagaatttccatgtcaaaaaaattagttttgtcaggtagttaattatttagcataacctttgtatttttccttaatttcatattgtaatatctgtgatggatatgtttctggttagcgcaaccagcggtaattgataatttgtcatgcatgtgacaaaacgtgaattcggtttttcttgaattgaaaatattgaattttgatgcgttttggagaacaaaatataaggttgaaactagttaaaattgatggactgttttttccgaccatctctagttactctatgagattagtttggactcgttcctatattccggtttgttatgttgatatggctttagcaacaaaaaaacgaactttgttaatttctagtccgaagcattaaggattacaaaaattatctaaagaatatgttgccggttaacactagcctttgttgtagaaggattaaaaaaaaccagaaaatctcgcaatattctgtaaaaaaaaactagaaaaatctcgtaaattgttctatcatatatttaagaaacctagttcatcattgatcttcttcgcgtggcaactcgtaacgacacaatggacaaaagtgattggtctcaaaccactttacggcacactcatcgtcaaagtcatgtccacaaggtaaagccacaagtattcctccagcgttaaactcttccaaacaaattgtgcatctttcgcctgtataattaatcttgtcatatattttcctggttaaggacttgaccacgagtttgcttgcgggtcccaaacagaaattagtggtctcgtcaaacgagacttgaactgcttcttcgatatcagtctcgtcgtgaggaaaaagatacaacgacacttgtaaagcacacccgggagaatgcccattacttgcagaagaagttattttaataacatataaaatatgataaatcacaactggaatattttggtcgctgatccctgcttccttcatgaaattacaccagtctacgagacaaaaatcttggttgaggaattcgttgacaaacgtcaaagtcgtgaaagtcaagatatcattttcattcttgatcactgcattgactctgattgtgccgccggaatcttttggttcaggatcctgtttgatttcgtaatctaacgagactttaaccgctgcctcaatatgactcacatcgagaagaagaagacaccacgacacttctaaagcagaccctggagaatacccttcacttggggaagacattatttcagcaacatggggaataaagtgatacatcatatgtgcagtatcgtagtcgctgagccctgctaccttcaagatattaatcaaatccattttgatttgacactcgttgccatcatcgctgatgagttcgtcggcagacgacgacgtcgtcaaagtcaaggtatcagtttcacggtagatcattgcattgactataattatgcccgcttcttctggtttaggatcgtctttgattttgtgactgaaatccacgcgtagaactgtaaacatgattacaaaccaaaaacaaaaacaatcaaatctggtggcttctgattttttttctttctctttgtagttgtggtcacttgaaaaagaaattgaatcgatgaatgattttagggtttaggctgaataaactcatatatttatagtagagagactctttgtcggtccctaaattttaatgggatttctttgactttttcttttaatctgattaatttccatttattatcttttaaaaattaaaattacataaaagataagggtaaaattatttctaagagatctttttgagatatcagtttccattttttttttcgttttaagaaaatccactataatttgattaaagattttttgtttttgtttttgtctgataatttttttctgtgtttatgacggttaaaatttttgacggttaaaatccattgtttatgacagttaaaatttttgtttccactagaaaaacaagtgatcacatataaccaaagaggatttgatataggtcagtagttagaaaattaggtgaaacctctgttgtagataaatttattggttcgtttcatgagagtaaatcagtaaataaatacaaattttcttctaatctacacaatattactctaattataaactctaattactcttatcacccgccgcaatggtggtcccaaagagtcacgcgcactctagcagctaaatgtctcacgcgcactctagcagctacaaacttccaatgtttgtaacaaacttatctagggtttgtaccagaagagctgggagatttcaattgggaaatgctgaaactagggtttcggttagcgattggcattcaacatcatcgcctcttccgtattccatggttagtttataattttagttcaattcgtaatacaaaatcgccgaaatcaaactaaaatcccataaatctgtttttttttcttcttcgttgaaatcttcattgtattgtcacatttgaattttacatatgcttcaaagttttatctctttgagagaatttaattatttggctgttgaggaagttctaagtggctatcttcttcacttttgttactgattgttttgtatttgttatgtgatcttctactttcatg

SEQ ID NO: 2388 - DNA, 3000 bp, Unknown
  misc_feature (1)..( 3000): cDNA_ID_3067413_gDNA_ID_1620529_Annot_ID_159674 3000 nt of promoter + ATG
gaatgaaaaatttgtaagccaatttccacgagttcactaacatcttccacggacaattcacttttcgctctaacaaagctgcaaaaagaaaaacaaaggtcatcagacacggaatagccaaatgcagcataataagaatcatgtatgcccaacttacataagtgagaaaactacaagacggaaattactacacaatcaatcacaggtacatagtggctactggataaccagtggaaccagtctgtaaaatgatttcagactactagactgcatggtttaagtataaaatctgaacctaactacaattttcacgcaaattccaactgtttattgaactctatcctagtcatgtatcgcgaacacccaaaacccccagcagtttatttcgatatactgactcgattgtaaactgagctaatcgtctctcaaattcatcatcctcgtctacaaatcccaataagaagcagccaattcgaacgagaaaaaataaaaaaatcaacgaggtttatgcaatcaaaatcgaggactcacagttcgataacggagatccatttaagagtggcgtaaacagactctggatcatcgggtcggtgcaactctttgacgcatctcacgacacgcgcgaaggactctttctccttcttcgtctcctccgctacaggcggcggtaaccattcattgtacagatgcatcgcttcttctcagtctccgtctttcgtcgtcttcaattttatgcagattgatgtagtctctcctctctcagacgctgaatttataagctgcgtttgctttttcagtttattttctcttgttttctttccaagcaagaaaaatcatatccgaggaaaaggacaatgaacataccatagaaatgaaaacaacttgaggaaaaaaaaattattgtattgactttaccgttgactggctaccggcaacgggagcggcaggtacaccacttaccgaaaccgactaaataggatttcaaattagccccttaagttttacttataatacaatttacccttaaacatttgacttgtgctatattgtttagatggaacgcatactgtccacaagtaattccggccaataaattgtgaatttaagtctgaccgtacggtggagacacatacgcatagatggatatttttgttgtcaacaggtggaaatttaagcagctattatttgttcatcgaattaacttacgtacgtatatgatgacgacattaacattgcagtttattctgtgttaggtcggggtttgtgataggaccaacgttctaaatgagtgattaaaaattactaaatcatagataaactatcactaaactaattgctaactgaggtttagcagaaattcaatgaattaataataattattttggttttaacaatcaacaaagtcgttgtagtatagtggtaagtattcccgcctgtcacgcgggtgacccgggttcgatccccggcaacggcgtttatttttatttcccttttttgtaatgggccgtttctgtacctgaaaagaagtctttataagcccataaagacgaactaataggcccaaatttgtgatcttaatatattatggactctgttttctttttcgtaagctcttcaattcttaactgtttacacgcaaaagtgccatagtggttaacacttaaaccaaataaagacacctgaaatgttggaaaatatatgactctcagcagtcagcatcacgtaatcgtcgttgagccgcgctatctattttgtgcatttttctttaatatgtactcataagggttttttttttgcatgagcataagcagcgataagttgatacatgagaatgtttacgtgtggacggaagtaaattgttttgcacttgaaaagataaattttatgagtcaatgccattaaacattcttattacaagtttattttctcgaagttgcatctgaataacattgtagtattgattacgagattgaatttatctcgaatagtgagtctaatgagtgtacacatatcggattttggatgggaccataaaacacgacgtggtatttgataattataatttattaagtactgtactgtctgtctgtgttccgaagataatgttaaacaaataacaccacaatctcctatagaaagacaaacctgtcctcataacctaaaccaaaattttcattcaccttagggtgaatatgtcatataaggtaataaagccaatcttgtaataacatatagaattatagatatgattctataattaattaacccaaacaataagtagatatctatattaaaaatcaaatcaaatctagtaatcggaaaaaaaacgaaccgtccctttctccactcaagtagttaaattggttctgtgaaggaagataaatccgctgttcctctcctctctctctctcttcccgttttcacttttgttcgttctctggcggccgatcccgtcgctcgctaccttttaagatattttttttatctaatgaacctgaaattgtaattaggcatataattggggattatttgctgaaattctcatttctagatcgaaaaaagcgaataattcgttttcatttgattcttgcctaatcttagggtatgtcctcccccttgatctgtatagtttttttgatgttgtgatttgttagggtttgtgaattaattgtttcagattgggttttgctcctttttccatttttgtctgctttagtttataggttaggtttccggattttgtgttggagtttctaattttgctttgaattggattattagcccattacgtttcctaggcatagacattgatcaattgcacggtgaatgttttaactttttaagctgttttgatttccttaaactgttcactgattactatttatgtgcagtttatgcccccatttttgagtagggatgtagaatttcttgatttaaaagctttaataatatggtttgtgtgtttgtatatgcaggtgtctttatttatctaccaaaaga

SEQ ID NO: 2389 - DNA, 3000 bp, Unknown
  misc_feature (1)..( 3000): cDNA_ID_2157796_gDNA_ID_1620529_Annot_ID_159673 3000 nt of promoter + ATG
aatcacgccaaacacaataaataaatccaatcagaaagagaaagactatcaactagtccaagttagtgagctctcaatattaaaaaaaaaaaacctggaaatgtagtatagtagacttaatagatcgtgaattccgccagaagtcataaaatagtcctcctttctgtgtgaccttgcaaacctgaatccatacaaaatgatgtattaggtgactgagctaacctgaacactaatacaaatagaggatcagaggatataacccttaccttttctgatgattctccagaattagggacattttcataattcttatactgttctaatctagtttgtctgtatttctctctagaaatattaagtctgtcccacggaatcccctggatatctttccctttccgagcttgctcagccgtggtatcagctactttattgttctgaaaccatataacacgaaattaaaacatagtttaaaaaaaaaaaaagctgtaaaatgagattagaaagtagcatagccaacaaaacatgttccatctcatcatactaaccgaatagtcaaattcttcaacgtcagaatctgaagcaccaagatcatcaccacgaaactcctcatccatatcatcttcaacatcttccatctcatcatctacgtcttccatgtactcagcatcatctcctcgataattagacattcttttggtagataaataaagacacctgcatatacaaacacacaaaccatattattaaagcttttaaatcaagaaattctacatccctactcaaaaatgggggcataaactgcacataaatagtaatcagtgaacagtttaaggaaatcaaaacagcttaaaaagttaaaacattcaccgtgcaattgatcaatgtctatgcctaggaaacgtaatgggctaataatccaattcaaagcaaaattagaaactccaacacaaaatccggaaacctaacctataaactaaagcagacaaaaatggaaaaaggagcaaaacccaatctgaaacaattaattcacaaaccctaacaaatcacaacatcaaaaaaactatacagatcaagggggaggacataccctaagattaggcaagaatcaaatgaaaacgaattattcgcttttttcgatctagaaatgagaatttcagcaaataatccccaattatatgcctaattacaatttcaggttcattagataaaaaaaatatcttaaaaggtagcgagcgacgggatcggccgccagagaacgaacaaaagtgaaaacgggaagagagagagagaggagaggaacagcggatttatcttccttcacagaaccaatttaactacttgagtggagaaagggacggttcgttttttttccgattactagatttgatttgatttttaatatagatatctacttattgtttgggttaattaattatagaatcatatctataattctatatgttattacaagattggctttattaccttatatgacatattcaccctaaggtgaatgaaaattttggtttaggttatgaggacaggtttgtctttctataggagattgtggtgttatttgtttaacattatcttcggaacacagacagacagtacagtacttaataaattataattatcaaataccacgtcgtgttttatggtcccatccaaaatccgatatgtgtacactcattagactcactattcgagataaattcaatctcgtaatcaatactacaatgttattcagatgcaacttcgagaaaataaacttgtaataagaatgtttaatggcattgactcataaaatttatcttttcaagtgcaaaacaatttacttccgtccacacgtaaacattctcatgtatcaacttatcgctgcttatgctcatgcaaaaaaaaaacccttatgagtacatattaaagaaaaatgcacaaaatagatagcgcggctcaacgacgattacgtgatgctgactgctgagagtcatatattttccaacatttcaggtgtctttatttggtttaagtgttaaccactatggcacttttgcgtgtaaacagttaagaattgaagagcttacgaaaaagaaaacagagtccataatatattaagatcacaaatttgggcctattagttcgtctttatgggcttataaagacttcttttcaggtacagaaacggcccattacaaaaaagggaaataaaaataaacgccgttgccggggatcgaacccgggtcacccgcgtgacaggcgggaatacttaccactatactacaacgactttgttgattgttaaaaccaaaataattattattaattcattgaatttctgctaaacctcagttagcaattagtttagtgatagtttatctatgatttagtaatttttaatcactcatttagaacgttggtcctatcacaaaccccgacctaacacagaataaactgcaatgttaatgtcgtcatcatatacgtacgtaagttaattcgatgaacaaataatagctgcttaaatttccacctgttgacaacaaaaatatccatctatgcgtatgtgtctccaccgtacggtcagacttaaattcacaatttattggccggaattacttgtggacagtatgcgttccatctaaacaatatagcacaagtcaaatgtttaagggtaaattgtattataagtaaaacttaaggggctaatttgaaatcctatttagtcggtttcggtaagtggtgtacctgccgctcccgttgccggtagccagtcaacggtaaagtcaatacaataatttttttttcctcaagttgttttcatttctatggtatgttcattgtccttttcctcggatatgatttttcttgcttggaaagaaaacaagagaaaataaactgaaaaagcaaacgcagcttataaattcagcgtctgagagaggagagactacatcaatctgcataaaattgaagacgacgaaagacggagactgagaagaagcgatg

SEQ ID NO: 2390 - DNA, 3000 bp, Unknown
  misc_feature (1)..( 3000): cDNA_ID_2106031_gDNA_ID_1620529_Annot_ID_159666 3000 nt of promoter + ATG
caactgaaggtaattcggtaggcttcattccagatgtttctaacgtgctttcaacaaggtttgcctcccgtgacacagtagaatctgacttctcaaaacccacattctctcttggaggtggcatgcacaagaataagtctaatgtatactgctggattgctagagtctgaacacaatacactttaacaaatggttcttctgggtgatcatttgtcccaataaaactcaatataggcatagtgactgtaaactcggacaagtaatccatcagcgtttccactggagatgagccatagtccaaatgcacggaatatatggcgttccttctcgcatttgcaagcaaaagcaggcctgcttcagacaatgctatgacttggttgaaaaatgccttttcagcttgtggctcagttgaacttttcaaatcaagtgtctgggtacatctccacgattcagtatcagcgggtagaagccacccttcttccccagcggagacccaaatcttgatttctcgatttagaggaccctacgagaagaacattgccaacagtgtatgcgttagcaacttagcagaaacaaaagcaacaattctaaaatgtgaattcaacaaagcagggccaaataacattatatagcaatgagaaaagtaagtaataatttgagcaaactaacccccgtgataagtatgatgtgatcaggtctttccggggatgtcacaaatatggcagaattgactggaagtccatcatgaggtctcaatactacaagtggttgtgtcttacgatcttgccatatcttaacctgttggtattaagaaaaagtaagcctcacacacaaaaatactagctgttgcaaattattcctggttgtgaagagaatctacagtgagacggaatttagaaaatctcttcaattttggatgagctagcataaccaaactaaagctaacgagtctcaatcaattaaacttcaacgttacacccagttagcagcgaaaacagttaaaattttagttcgtcaggtaaattcaacttcagaaatgttatgaaaaggagtagacgtatattccaagagtatagtgaaggaaattataagaacaaacacaaaccgtgccatcaactgaagaagaaaccaggcgcgtggtcatccattggcacattgacaaatctgtcacttctccatcatgcttacccacaatctgaacaccatcaattagtttatcaagatgacactggagaggtgcctcggcagagaacacttcacctctgccaacttttgtagtatcgattcgcagcacatgtttaccaattgaaactaccaaaatttcctgaaagaatggactttacacaatcagaagtatagacacaacagagcgagctcatgttcacaacagaaaaatatgcaacttcccgtagcaaaagaaatatgttgaaatacctgtttgtggcagtgccaacagacacgtggatgtttggtgtcttcctctccaagtatctgaagagcaacaactatctttccagttatctgggattgttcatctccctcagatccttcggaaattttccacacaaaaacttttccatctagactaacactgttttgaagaaatagacaagtagacggtatgaaataaaatgtaaaacgacaaagtagaagaagcttatagttccagaaccattacctagctaagagatgaacatcttcggcaaagaaagccatgtccgttactctctggagacaaacatgtagttagaatgacgatgatacctgatggatactcgaataagtaactgagaaacaacgaacctgagaatggccacggaacagagacctcaatgctgtgttgatattgagaacacgaatgcttcctcctttcaatccatagcaaatgtagaccttattcacagcaatttgcctaccgagtacaagctgaggatccgagccgtacttggtaatcggagtcacctccagctgcggttgaatctctccctgtaatctcacatcaacatcatacaccgcatgttcaccaaccaatcgccttcccttgggcattttaccgcttggaacatgaataggacccgaaccgccgggaaaagctcgagcgatctcgttgtgatgcgacggctcttggttcgccacggcacctccgttgttgaggagagcgaggatgtgcgttcccggattgtgattgacacggggagattggggattgagaggtggcgtgggataagatagcgttctctgtggttgcaagttagtagcggaggaagaggaagacacatcctgttgcgtttgattcaccggagatggttgggcggcgataccaggcggcgcgtatagttgctgattgtactggttgttaagaaacggacctgtagggggaggataagggttggatgagggtttgaagatagtaccgagatcgaacggcggaggattgtgagggttagtgttaccaggtgaagacgccattgatttacgatcgccgaatctagggtttgcgatatcgatcaatagacaagtgtaatttgaatgtgaaggttcgtgaatatatttcagaaaaagaagactcggcggatctgaagaagaaatcaaaagtcacgtagagaggggaagcgcgaaaagcgagtagagatagacgatgatgacttgaaaggagtgagagaacagctaaagaagttttgtagacttgcgttttcgatagtggggcgtaaatctgatgactaaaagtgatggggtgataatcgcgcaacaaattaaacttgggtttaaaggaattcacaagtaattattattatatgggccacgcgcatcggcccatagaaaccaaccgcaagtatctctctccctccacaacatttatatgaaccctaaaaaaactgatcgaaagttaccatcgttctttccttttggtcttctctgtgcgtataggattcaaggtgtcttttaggtcgaagaataatgaacaaacatttcgagaaaacgttggtgttgtggaacatg

SEQ ID NO: 2391 - DNA, 3000 bp, Unknown
  misc_feature (1)..( 3000): cDNA_ID_3067430_gDNA_ID_1620529_Annot_ID_159667 3000 nt of promoter + ATG
ctcgacactaaaacagagatagtgaacaattacagagcaaaatcttgatatttattgtttggttaagttcctcaagaacctagtgtggttcttatttgctttttcaggtttccaaaagaggccatttccatctttgcgataaccagagataccattttcttcagattatctctgcattgatggtgatcactagatataattcaagatatccatgctgcattctctcttcgatggtgaatgtaaagaaataagtcagatgtagaacaagtaaatatgcaccaatcatatttaaagcagaaagaattattcgtgcttccgtggactgtttattaagttatagggcttaaaaagaccattaaggcccaaactaatgttttcgtgtctgaatttgtgcggaagcgtcctcacattttattgcgattatcaccccataacttttttagtcatagaatttacgcccgcactatcaaaaaagcaagtctactacaaaacttctatagctgttctcactttcaaggcatcatcgtctctctattcttgcttttcgcgcttctctctctacgtgactttcgatttcttcttacttttttctgaaatctattcaagaacctccacattcaattacacttgtctattgatcgatatcgcaaaacctaaatttggcgatcctgaatgcgtctttgaaagtagagagatttaaagatagtgtataaaggagactgaaatgttttccatcttatttctctctttaattaatcctattacattgagttcttatatatagtgtgaggattaggtttacattttatcctcatcctctaaacatttgagcctattagttaagatcgtatcttgacttgaacagctggagatgcttttccttgacgctctcttagccacagaactaactggtttgtcttcttgttctgttgcagatgaccgttgcacttggatggactgaatgggcttctcggggttctcctcttctacagcagcttcctcagtctttaactttctcatcatcatcatgcattcttcctagaatgttttaggattacccaaagtcagtaaatccaaattcaattgttattatatatatatatatatatatatatatatatatatttagaaatgagagatgttaaggttgactattcaccatggtaacagacgtaaaacaggggtttccctcctctggtcgaatcttcaccatggtagaaccgtttcccttgttgcatgttttaccatcaaattccaacatcttgcagagttccttgaatgttttagcatcaaccaaagtcagtaaatccaaagtcaatgctatatatgtacttcacacaatagcacgtaaatacacaaatattagaaatgagagatgttaaaacttgcctttagtgttagaggagaagaagtatgatacgctatatcttgagtaaccagcaagtcccactcctgcttcatgagaatggcaaattaggtaaagtcgtgaaagggtaactgtaagtcccagaaatcagaaatctctcaacttgagatgagatattaaaacttgcctttgatcgacccagcaccatgttagcagggtctagtcgatccacattgttatgactagcctccctgtcccattcctgcgtggagatgagaggcattatgtacttttgaaagggaaacttgtggtaagagaatgatggtttagaatcagagagctagtgagctgcttacagaatacgcatgtttttcactcttgagatgcgtggtgaaatcttcaaagctttgggcaccaaaatcgcattctgagcaaaacaagggagtttcaccggtttcactgcgcttgtagtcctgaagaacaagtcttgttgctcctgtttgttatcctccatagcagcatctgtggattcaaaacagcttaatttgcttgttatcagatgcatgttatgagagagaggccataaaaaatacctgccattaagctatcccagaacaactcttcaggaacatctttaagaatgcttagccggagagctagagctcgtggaggatatgcgagaagaattctgtatcccttcttctctatgtcgtaaagtgtactagctaaagttttcaggtccttagaactggttatgagcattatagtagccggagcaagattctcatcagtccactcaaacaaatccctttgaatatctgtctcagtaagtaaaggaaactaacgtttaatctaaaccctaattaacaaaaaaagagatgaaagaagatttttaactaaccgtgggcatgtttaagagcgattccagtggaagaaagcgttcgcagggattcgtcaccaccagggatctgcgttaggttgccaacggcagtgataaagagaggaccccggcggcagcgccactggcctgacttttccaacgccgattctatcctcggacccaccagacgaggatcatgaccatcgggaagcggacaggtggtcatgttccacaacaccaacgttttctcgaaatgtttgttcattattcttcgacctaaaagacaccttgaatcctatacgcacagagaagaccaaaaggaaagaacgatggtaactttcgatcagtttttttagggttcatataaatgttgtggagggagagagatacttgcggttggtttctatgggccgatgcgcgtggcccatataataataattacttgtgaattcctttaaacccaagtttaatttgttgcgcgattatcaccccatcacttttagtcatcagatttacgccccactatcgaaaacgcaagtctacaaaacttctttagctgttctctcactcctttcaagtcatcatcgtctatctctactcgcttttcgcgcttcccctctctacgtgacttttgatttcttcttcagatccgccgagtcttctttttctgaaatatattcacgaaccttcacattcaaattacacttgtctattgatcgatatcgcaaaccctagattcggcgatcgtaaatca

SEQ ID NO: 2392 - DNA, 3000 bp, Unknown
  misc_feature (1)..( 3000): cDNA_ID_3067417_gDNA_ID_1620529_Annot_ID_159672 3000 nt of promoter + ATG
cagaaaaaaaaaacgattttgtgcgtaacacactccattttttagtgtttaacaaacggtggtagtccattgttttcatcatttacaatatcaacgcaaaagagattgtattttgacagtaaacattggaagaaaaatatatggcttgtaaattgtggcttatagtagtaagcacatattaatatttgattggtaactggatggatgaaaactaactttgttaattatcgctcgcaataagcttctagacttgtcgtttcatattaacaatcggccggtaagcttgggtcatatgttttattactaatgtatcggatgaatgaaattgaactttgttaggtacttactttaaaatgagtgtctcgcaataagcttctagactgtggttgatactagtagtaataactgataactatataagcatgtaatcaatattttattaggatgaatgagatttacctttgttggttattttataatgagtgtgtctagcaataattaaagtttattatactgtgatttaatgaattgtgtagttaaaggtggggactactactttggttgagggaacttggtgggggagtcatgtttttgtgtgtactccaagttccacaaatactaactcttctttgcttccctttttaatatgcaaatcaaccaattatatttctgttattacgaccatctactaatatttaagtctttcttgctatctattttctaaagcatccacttagtaattaaaaaaggagacacttgtaaacttcattatcatcataaaaagcaccaccacaaaaaaaaaattataaccacagcccacaggtccacaagtaaccagcgtcaaacaaaaatcttggttgtttttttttgttgtctaattgaaatagttacttgtcttttgttcatatatgtggatattttgtttggctctatagcaactctcattatttcgcaacctaatcattatggtctcgcgaagtcactcgatctgagccaaaatcagatacttagtggtttgcttgttacatcttatatcatttcgatatttgtcaagaaagaaagaaagaaaaactaatatcatttcgataaaaagaattaaacaacaaggtagtagatgaacaaactaatgacagacaatacacgtatataatagaagcgacaagtcggtggtatgaagatacctggccatgtgcttaactgcaaagaaaagtacttctcaacttcttcttatcaaaattattttttaatgatcgaattatacgaatctgtatagatttataattagaggggtattgggctaattgctagtgagtctagttatactgggtccatactttgagaacatgaaccttacggcccattaaactactcataggcctagatcgctctctactctttttataaaatttcaaacgaatagtataagactataagttttgtgataattgcaaaaatatactcaatctacaattaatttttaaaaaaattttaggggtaaaattattaaaaaatgagtaaacaagttcaacactgaataagtgttaaaaacattatttgcttcgataccataaagtttaaacccaaattcagaatataatcctaataaataaggtgtatgcataaaaagctagtggtggaaactcgagcaccagtctcgattgaaagttgagaagaattatcaactcatggagcatcacaaatagccaattggtcgtaacatagatagtggctacaagtaatatttaactactgaatcgaatttgtagtgatttgttcaaataattcgaaacctattgtaccatttttatacttttttgtaacatcagctaaagtaccaaattaaatgataaaaatgttgttggttaaataatttattgcaatatatactgaaattaggacaaagaggctagatttcttgagggaaataaatgcgggaactgtcgtaaatggggtgtgaaacggcgccgttatttgggtgtctccatgtcttcttccacattctaagaaagaaagaaagaaaattaaataatttattttcatcaactgatgaaacatcaattcaaccaagaacgaaacttcctctcgctcgcgctctactgacaatctgagatccagggattctattccagatcactctcaattctctcctccatatactatcgagcaaacggattcatcatcatactctgcgttgtctccagcagatcagaagaagaataagtagagaagaaacctcaatcaaagtcgttgttctttcttatttcggttatgcttgatttggtttctcctacttgttcaccaattcttcttctctgacccttcgttgactgcaaggtaaagttgccttctttcttttgcccttttgttcttaacctcaaagtctcgattttgttgtgaaatcattccatctctttccgattcatggctcttctgcgttaagttctctggattaggtttagcaattttatacgaatgagtaaagtttgactcaacaaattcttaatttggcgttattcagatacttttgattttgattcgcgactcttttctccttttccctaaggaatgaggtttataactctgtgcagtgctacttgtagttgttgctcctgtaatatgaagctgttcaattaatataaaagtgtctgtttccctataatgttaagcgttttagattaatttgtggtgtaaaaatcatccatacgactcctcaaagtgttttcatctagtgtcactgtggttataacttggatctcatacaagaagctttcctctgtatccaggttgctgcagaagcggacgctgtagttttatccttggtccatgtgttggtagcacaagggtatgagttgttgtaaagtgccagttcttattgaagcacaagttgaagtaagttagttcacggcatactctttggtttctggatagccagagattttgtacgtatctgagttcatcggcttgttgtgggattaatgaaaaagatgtttgctgtaacag

SEQ ID NO: 2393 - DNA, 3000 bp, Unknown
  misc_feature (1)..( 3000): cDNA_ID_3067426_gDNA_ID_1620529_Annot_ID_159669 3000 nt of promoter + ATG
ttctcttaacaatatttgtttttatactcttgcatcgttcactgagatacactattaagcttggtgttaccttgatttggcacatgagatcctttgttacattcgttttgaaacgaaaatcagatttggtatataactggcatttatcgatgatcagtttttgcttttcataccttggtaattttgtttgatttttatttgttgacctgaaacgttattacccttccaggtaatggcttcgcagaaggagatgcagagacaactatcaaatgctgtcactggccctatcgtaaaagaaggtaaaaaactagaagttgccttagggagaatgattgagaaatccagcaagtcaaatgctgatgctctatgggcccacttccaagaggaggctgttaagaatgaaaaggcattacgtgaccatggccagcaaattatgaatgaaacgacaaacttcacgagtaaagagttaaatgccatgtttgagaaaacgatgaagaaggaatttgcttcagttggtccaaccctagcacgtgtagtaactccagttattgaaaaaactgtatcttctgcaatcacagagtccttccaggttagtaatttaagagaaatttagagctgatttatgagaaggtccattgatgaaaaagaaaactgatttctctttatacagagaggaattggtgacaaagcagtcaatcagcttgaaaaatctgttaattcaaagcttgaaacaaccgtagccaggcagattcaagcccaatttcagacatctggcagacaagtcctgcaggtaaaaattcgagtttaaactagtttttttatgccttactgtctcttgtatatatattttttatgcttttcagacagttatgactgattgactggttatatatacaagtcttgtgcatacattctcaactgcatcgttgtttatcgtaaaagcagttgtctcttatatatatttgctgccatttgtcaacttcaggaaggtcttaggtcaagtatggagtcctcagtcataccttcctttgagaggtcatgcaaaaccatgtttgagcaagtagactcaaccttacagaaaggaattggtaagcacacgagcgcaacacagcaacggattgactctggacaatctcagcttgctcatactctgagggtatgatagaaaatcgtccttcttccagattttttggctctttcttctagttatggtagcaaaatccttttttaatcctcatgttaaacatgcttttatacaggaaaccattagttctgcatcatcagttactcaagccctaaatcgtgaattagccgagagtcaaaggaatcgcttagctctcacagctgctggatcaaatcccttggttactcaactaagtaacgggcctttaggtgctcttcttgaaaaggtttgcacatctctggatcaaatttcttaccatgaatattttgtcattttctgcgtgtttgacatgtatatacgttaactgcaatgcatcattgttgtttcaggttgaagcacctatggacccaacaacagagctatcaaggttgatatctgaacgcaagtacgaagaatctttcacatcagctctacaaagaagcgatgtctctatagtatcatggctttgctcacaggtgaattcttttttggatttcctgcatcataagatctcataaccatcagttttgcgtaacatcccatgacactggtgttgtgccaattcaggtggatcttcgtggactactggcgatgaatccgcttccgctgagccaaggtgtgcttctttcactgctgcagcagttagcttgtgacataagcacggacacatcccgtaagctaggttggatgactgatgtggttacagccataaacccatcagatcagatgatagcggtccatgctcgcccaatctttgaacaagtttatcagattttgcaccatcaccgtaacgcaccaggcagcgacgtctctgccgtcagactaataatgcacgtcatcaactctttacttatgagctgcaaatgacatctcgctctctctgtttcttcttgttagttacatgcataaaacataggaaacctctcttctctgtatttctctctctactctagttagattttttttggttacccattagttcaatttcctttaactgtaaacatctggttggttctacgtctataatgttccctttttcttctccgagagaatgagtttgctaggatctggaaaaccctgagaaaacatgaagatcatgtatgggcagggtatactgattttctaatgaaattggttttgaagtaactacaagttacctgcagaatagacagatgagtttgaagacattatgggaatctggtgtggcagtaagcagagaatttgtcaaaattgagcaattgcaataaaaaatctttttctttacttttgagttcagttgatcagtttttggattgaagggtatttgctgttgggttcggttgcctttacttgcatgtgagctcagctgaccatgaattcagaatccttgtcatcttcttctcttttgttggaggttccgatgaagagcaagaagttggaaacaaatgatgggtgaatctctggaaatgtaaatagggcccaataattgaaattaaaggcccaaacgagtaaaatctgaaaattgttttacagaagcggtctcatattttagatataaacacgatcatcaccccaaaacttttcgtgatctgggacatgcccaatttaatattttcattaaagaagaagaaaaaatagctaagtctccaaaagttctctacctgttctcactttcaagtcatcatcgtctctctctctctattgttgctctctctctcgctttttatgtgactttcagatccgccgagtcttctttttgtggaatcttttcaaggagctcagtattctatatacacctctctttgtttgatcgatttcacaaaccctagcttcggcgatcttaaatctgcaaaaaatct

SEQ ID NO: 2394 - DNA, 3000 bp, Unknown
  misc_feature (1)..( 3000): cDNA_ID_2157760_gDNA_ID_1620529_Annot_ID_159663 3000 nt of promoter + ATG
ctccctgatgcactaaagaatctgtatggtaagactttccttttcttggtgtctattgagaaagaaaacatttgggacgggaaggaaatctacaaggttacaaaagtccttctcaagaatgggttacttgaggaagaattgttggaggattcaactgatgtggtcaatccagcctctattgtctctggtgaccaggtaatatcatcagaaataaatagtttagttgttttcatactttaactctctctctcgctaaaccatatttgtgttttactgtagattccactgatgcttgagtatagtcaagagacaaccgacactgttactcctgtttctaaacgtgtgtatgctgataatccaaacgggtctgatcaagcatctgcttcaaagaaggtgtgcattgagcccgtcgacttatatcagtctaatgatggattcggtgaacagattccttcaactaagattgaagattatgagcctaaagaagcagtgacttcaaatgatttgaagtcaagcattgctgagtctgattccacagctgttggtcacccggctcatgtccgtaacggtagtgttgcaccaatcatagtgaaaaaggaatgggtgggcaagaagggacctgtgaggatcaaggttgagaagaagtagaggtggtgaatcgtggattgatgtgttggtttcctgctttctgttttcatgtttcttttttttctctagcactttggttaggttttcttctattttattagaattcagcacttttgttttgctttcaataagttttatctaaacacttaataataaaattttgcttatttaaactttgattctatatctttcctctgagcttatgtttatctatagtttatgtctaacttatttacattttatgagctataacttaagtgaacaaaggttgataatgagtcctaagagcataccattaatttttagtaacctataacccgtatgactaaactctaatctattttaaatttataataattttcaagattcagtaattaaaccataaaaaaattgacgattcacttttactttttttgtacctattatacaaaccctgcgccgtttcactctttttataaaaacttaaacccaaaacacacgttactttgtctctcttcctctctaacttcttttctgagaaactaaaaatctagaagttctggcttattcaatggagacaatgcaccatctttcagacttacatgttcactctactaactggagggtttatgttaagattttggcgctatacaaccataatccaacccttaatggtgatgagacgactatgctattggttgatgaaaaggttcccttagatcctacttctattattagttttctgttattataaagtctatatctttgttgttaaacagagtgacaatctattgattgttctgttttgtagagtagccgtatagatgccaaaattccagagggctcatatctttacaagtttcgagatgttctgagaattggtgtgtggtactacatgtctgattttcaagttgttttgtctcaaagtgaagtcaaatacgccctcagaccaattcacatcaaatgtctgttccatacccaaatgtggcctgttccatctagatcatcaagaaggttttttgactttgcggctcccgatgaagttaagtatgctacagatgatcaatttaattgcgtgacaggtaactgtttttatcttaggtataggtcagactgattttattttggagtttttgatatcaatatttgcttgactttaaatttcagacgctattggtgtgatagtaaaagtttatcctattagaagttttccctttgtttgtcgtcaaggcgagacagactacgagtcaagatatgtcgccttcaagataaaggataatatgtaaggcctatacactctatcttttattctataaacctaaatatattggtttttatatgttcttctttaggggcaatgcaataaaatgtgtagcaattggcaagtattgtgaagagtttgttaacaagtggtttacgagaaccagtttgatcacttttaattatgagcccattgttgctgtgttgaacttttggagaatcactaattatcatggtaacacaactaacacccttaaatttaatttaaatttatggaatcaataaggacttatgtatgtgagagtttactttttttggtgtagggtctaatgtcttaatgactgttgatggaatttctcggctttttattgatcccaagttcaatgatatcaatataccatcctatatgtaagtgtaaatcaactcctattatgttttgtatacgtttgtgcacttatcttgagttaagatgtaactatacattgtttgcagtcgtggctttagtgatctcaatgaagcagataatgatttgatgatggaggttgttgacgagaactgaaattctctatgtacttgatgttatatttgtgtcaaatcctaaatgaacttatgctttatttcttttgttaatctatatattaaagatcctaaaatttgtgtactctattttaatacataaatttcctattttttgaaaaagtcgttccttatgtatctatagcttcctttaagttattgatttgtttgctccacataaaatgcattcattacttcactatattgtcaacacaacatgagtacacattttatactaaatgagatagttgtacatacctcttaatatgtgctagcatcgatgatgaagatattcttcttgacaaacttatttgaacaatgtccttagctacacaaaaaaatatacaagataaacatcaatccattttgaagattatagaattggttattatatagaatcttataatatagaaactacatagattctatcttccatttatcacttatcaacagattataaaaaaaaggtcagccgctatgtactttacaagtctcttcacaccatcatcatagatgctaatttgagactcaatcatg

SEQ ID NO: 2395 - DNA, 3000 bp, Unknown
  misc_feature (1)..( 3000): cDNA_ID_3067513_gDNA_ID_1620530_Annot_ID_159687 3000 nt of promoter + ATG
gtggtttatctaattcataaagcatgggagacggtggctgcacttcaacagcttcaatctcttcatctgtgggcttgagcctgaatataaaagtgtgaaagttttgtccgcgacgccacacatgtgcttgatagattttagactgtggaggggaagaggccatatctgtagcccaaaatgttaaccagcaggtaagacctctggtcaattggtaatttgcctcaacatgctccacaaacacaagtttggttccatgagcttcgttgtgtttgtcgatagcagtgagtgtcatctcacggatcaatacggcattgctttttctctcgctgatttcatttggagacttatccattgatctactacgaaaattgtaatcaaattgctcccatttaatcgagaaaccctaattttcaacaaaacagattccataatcagatttcaaatctcaaccctaactacagagaaatctaggggttttttcttacctgagttttctggaattgatagtgaaacaacaaatactgtcgcaagtattcatcatcttccgctgttccccacttgaccacgcgctgtttcgacgaagattccgatccttcacaatcttcgtccaacttcggaatcttttcaggccggcgatagttaacctccatcaaaagagagtccgccatgattagatcggaaccctaacgcaccttcgagaagagaagacaattgtcgtgttttcttttctctttttttctttctgaagaagaagattcgagagaaagtatctacgtattctcaatgcatgctgcagctaagggcatttccatctattccatccatgagaaacccacaaagtttctcaaacaaaaaaatattaatattatattataatttgattatttgattaaaaaagtattttagttaaaaaattaaaccaatagtaaaatgagaattgtcatgatgggttgtacagagtatctcaaagtttctcaagtggaaactttctacactctctctccttcatttttattatttttatatttttaattgtgagaaactcctatgagatacccccaatgaagatggtctaacatataaataaagaaaaaatacaccgtcaaagtaaaaacgcaaaaagtctgctacgagtctagtgggccgctacaagctcattttcctctttgtatcaggctgaatgtgacatcaagaaaggaaaacggaaataagctaaatttttgggtgagatttcttccctcgtgagatttttttctctttagatatatttttgataacctcttcaaaatgcagaaagcttatatgtctatattaaaattggtgaattttatttttgtttcactaagttggttttcatgaactcattgtttttttccttttaagatatggatagaagaaaaagaaaacaaatttatgaagatccaccaccaccaaaaaaggtaaattaaagttacattcttttctcaaacaaatggatttttgaatatcaattctatttgtgttcatagatctctagaagagaagctagtacatttagagagatagaagaagttgaaaattcagagggtataatattaatacaagcctaatttgatttttcagtcagtgactaacatcatatctctttgtcaccaaaggaatggtatatatactttttccttacaaaccagaccgatagagatcataaagagctccagttcgatcaaagacgaaagggacaccatcttcaggagcagctcgaacaaagacaaccggtggtttatctacatgacaacaaaacacaattaatgaatactagcattgattagaaaagcaaaggtaaaggtggtttagtttgatcagaaaagtaaaacacctagtaaactaatctaaggtcacaaaaggtaaaccaagagaaagtagcagtaccatagtcatcataaggcatgggagagggtggtttcacttcaacatcatccatctctgcatcgcataaacacacacgagttaaacatcagaataggtagcagccaaagaataaaaagaagaaaccaatagagttaaaacgaaatttgtcaccttcgtccttaggcttgaccctgaagatgggaatttcaaactgttttccgcgacgccaaagttcgacttgatagatctgcgatgtaggagcggatgaggccatatcggtagcccagaatgttaaccagcagaggagaccattggcaaatttgaaattagctgagacatgctcgacaaacacaagtttagatccatgagcttcattgtgtttctcaatggcaaagagtgtcacatcacggatcacatcagcattggttcgtatatcgctgataggtggtgaattttccaacggccttatatggaacatgtagtcatatttctcccaatcaaccgtgaaaccctaattaagccaaaaaagacttcttatcagattccgattttcgaattaaccctaattttgaaggaaaggaagcttaaaaattaaagttgaatagtacctcggatttatggaattcgtagtgaaacaaacaatactgtcgaagatactcatcatcttccacgtttcctagcttgagatgtttccaggacgatttcgatccttcgcaagctttgtccaacttcgggatcttttcaggccggccacagttaacctccttcaaaacagagtccgccatgattagatcggaaccctaacggctaacgcacacttagcgagaggtgaatgagagagaggtaatagaagacaattatcgtgtttgttttcttttttgaaatatagatggatgaatgatgatgatgatttgagaaaaaaaaagctcatgagaagcccatttagtagtgaaagagaaggctcaaatattagatgaatggctcatgagaagcccacttaactgggctcattagaagcccattaagagtgaaagaaaagtctcaaatagtcgtctccgtcattgtcgttgctttcctcctccttctcctccgtccagtgtcatcactgtcatg

SEQ ID NO: 2396 - DNA, 3000 bp, Unknown
  misc_feature (1)..( 3000): cDNA_ID_2990809_gDNA_ID_1620530_Annot_ID_159707 3000 nt of promoter + ATG
tgccgaaccggcgccggtttaagaaactctccggtagttacaacgccggaagggaagagatcttcttccaccagaaaacattacgattctgctatcaaaggcattgagactctccaagtctccgacgaaaggtttcaccaccactgatacatcatccatccatcgcttagcaaagttgtcgtatttgttcagagctttttatttgctttcgactctatattggagaaacgagaaaatttgctgatttttttttgtttgctttggttttttctaatttttattcatctggttcttttactgcggagggaaattaaattcagtgtttggaattggaacatcgtatatatagttttttagtaatactgaaaatgtcttcttcagtagaaattgttcatgttattttcgttcactgcatagtgatggaatgaaaaaacggggtcaaattaatagaagaagtaatataaagggggcaaaatgcaatacacatgaagtattaagattttatccattacttcacacatgacgcccttcgtctttttccttattctttctcctctcagaagagtttacttgttctggaaccctaaatctcgaatctggtaactcggatccgataaatcgttccagagatctgttacttctctattcaaggatctgttatcggtgcgaggatctacggattcttctgttcgcgcataatcggtgagtcttaagaatcttcagcttttcgtttgattttgatttatcgtaagatctgatcggtccttagtgtaatcactttatttttcccctgttaagttcacgcgtaacctaagaacttgaatttgatctgtaagctagatttaaccttggttttgtgtattgagttcgttctcggtggaaattggcttatggtgatttatggatgtgacattttggaagtgtttacaaagacgtatttagaaatgcatttggcgatttgctcgatgttgatctgttgttttctcgaacttagctctataagttttgtaattgtaggaaatggcagataacaattcaccacctggctctgtagaacagaaagcagatcaaattgttgaagctaatccattggtgaaggatgatacttcgctggaaaccatagttcgaaggttccaggattcaatgtcagaggcaaagactcataagttctgggagactcaacctgttgggcagtttaaggatattggggatacgagtttgcctgaaggtccgattgagcctgcaactccattatctgaggttaagcaagagccgtacaaccttccttctgtttacgagtggacgacatgtgatatgaactctgatgatatgtgttcagaggtatacaaccttctcaagaacaactatgttgaggatgatgagaatatgttcaggttcaattactccaaggagtttctaaggtgggcactacgtccaccgggttattaccagagctggcatattggagttcgagccaagacttcgaagaaactcgttgctttcatcagcggcgtgccagcaagaatcagggtgcgtgatgaggttgttaaaatggcagagatcaatttcttgtgtgttcacaagaagctcaggtctaagaggctcgctcctgtcatgatcaaggaggtgactagaagggttcacttggagaacatatggcaagcagcttatactgcaggagttatccttcctacaccaatcaccacctgtcaatactggcacaggtcattgaacccgaagaagctaattgatgttgggttttcaaggcttggtgcgagaatgacaatgagcagaaccatcaaactctacaagttaccagatgcaccgatcactcctggattcaggaaaatggaaccacgcgatgtccctgctgttacacggttgcttaggaactacctcagccagtttggagtcgcgactgactttgatgagaatgatgtcgagcattggctactcccaagagaagatgtcgtggacagttacctagtagaaagccctgaaactcacgatgtcactgacttctgcagcttctacactctcccttcaaccatcctcggtaacccgaactacactacattgaaagctgcgtattcttactacaatgtggccacacagacctcgtttcttcagctgatgaatgatgcgctaattgtctcaaagcaaaagggtttcgatgtgttcaacgcgttggatgtgatgcacaatgagagtttcttgaaagaactgaagtttgggccaggagatggacaacttcattactatctctacaattaccgtttgaaaagtgccttgaagccagcggaactcgggcttgttctcttataagctcaacaacttgatttgatggtatcaacaaacttgaaatttgtctctctttttttttcttcagtctgaactacttctcccatggtttactgaaactgagtttaattattttggcaatgcaattttggattttgcttttagtttcacttgtgttctctgagagagttgaccctgagaagtaaagtcaacactagacgtgtgcgagtttcaatggactgcatttttaggtccaagaagtagctacggcccatctatcgtagaagttgttttttgtactaaagcctgttatagccgaactaggtcgctacgtttcctaacttgtcgtttattaggctacttttaaatcgcacgcaccaatccagttcttacacgcgttttcacaaaaaggaccttacatgggttgttcccccaataagaaaattacacgttgcagaatcgaagcagtggtctatccttgttatcgtcctctcgtctttatggctcttccaagtcattttgagaaattttcgattttgagatttttttccaaatattacaaaaggaaataattagattcctctttctgcttgctataccttgatagaacaatataacaatggtgtaagtcttctcgctgtattcgaaattatttggaggaggaaaatggagtgtgttggggctaggaatttcgcagca

SEQ ID NO: 2397 - DNA, 3000 bp, Unknown
  misc_feature (1)..( 3000): cDNA_ID_1009364_gDNA_ID_1620530_Annot_ID_159709 3000 nt of promoter + ATG
tcgttgagacagaatcttccatctctggtcgtctaccacaaatcgaagtcactccatataaaggaacacacttgaactcaaacagacttctactctctgttctactaagtactttcttctcactctgattcatcgatctcggatcaaactcatctgaaccgttgatttcatctccggcggagatatccacacctgccatagcagatgatgatgatgtcaatgaatcttgtcttgtattgatctcaaaggaagaatctttcatagctccgtcgccagaacaagaactttccggtaaagtaaccctagattcaccgttgcaatagcctctaagtccggcgtgagggtcagtgaatggtctgaatggaacagcgactgcaggagaaacttcgtccattaaaggaggaaaaaaaaagaaaaaagaactttcttgaactttaacaaaaacccaaatcaggaatcaaagttgggaagagaaaggagagaaattgaagttggatatctaagtattcaaagagacagatgttagattgttaaaacgcttgggtgtaagagaaaagaacgaaaagtcagacagatttgaacataataaaaattgatgagagtgttgttaactttattagatgaagatgaagacaagaaactcatgactcattagaggaaagtgaagacaaccttagctagcacatgaaacagatagagagagatttgtcaattaaagaaccaaacacacacaaaaaagaaaaagcaaacgttttcccgaggaaaaaaggactaaaatcagagtttcctggattctgggcaattcgtttcagccatttagagattctgaactctctctctccctcaattaatttccaaccaaaaaaacttttttttctctttctttctcacaaacaaatagtttaggggataatcagttttaaagagagaggtctttatttattaaaaaaaatagcacaatgtgagatgttttagtgaacaacaaagtaattagaaagacttaaggaattgtggaaacaaaaacaaagggtatttattttattttgacttgattaaattttatttcttattctatttactatcgtgtcacccctccattattattgggtatctttatagaagttttgaatacagatgttttatacgtttcctattttaccaaaatatcttgcattaaacgttatgaaattagatttaagataaatccaaactttttacataatgagtaatttacttatttcacataaaaataatatctcttaggaattgctcttttcttttgagctttaatcaaaattggtcgacaaaaaacgtaatttacttattttatacaaaaacaaatttcttttattttattttttgtttagtgtaacatgccatatgtcacaaaaatatattttatagtaaaagatgaaaacaccaaaaaatatacaaattatgatacaatttttattagtttagtagaaaatatattcatctacactgaccacactagtacattaatgctactaataaaaatgaggtactataataattacaaaatttactgactagagagcttgctctgatatttttggttctagagttcaaaataaaataatgacaatcgggtggataccaaaaacagaaaggaggagaatcaaactcgagaaggcaagaagtgttgtgttgtcaacagatgattctttttacttccaaaacaatattgaagaaaaaaacaatattgaagaaaaataaaatcattttcgaaataacaatcaaatgggtcccattattgtcggaaaacagaccggatgatcgccacgtagacagagagaaagtcattagatttggtgaagaggatggcgtgtacggtgagagatctgttagttgggatggcgggaaaagatgagccgaagaggttcattgcactgacatagacaacacctctcttttaacttccgtaaatatctttgtgtttccttttttatttggtgtctgttttatttatttacttgtttttaaacaaaaataataatacgtgttccataatcattggaccatgtaatgatatgtgaagtgaaagtagctttggttgggcaacaaatacactgaaccaatcgtatagttatataactaaaaacgtatatatgaatttctgtttttatttatttatttacgatttcatgaatattttttattcactggatatgagtcatgtgaccttgattttatttttatttttgagatatacgtagatagatagacgcatgcaatttctttaaagttaattcattttttttaggatctctcgcagctgtcagataaagtaaaatatctttcgatataaaataaaaaacaaaaccagctcatattgtatagtatactatgtgtcacatattttgagatgatcagttgctacacggatctgttaaaacttaaaaggtagtattgaataaagtggcggtcacatagaagtacaactaatatctatttgttaaattttgtcaatatgatatcaaatacaaaatgataataagaaaattatataaaattagaccatattcttaaatttttatacataaagctaaaacatctaaacttcattacaaggtaagagaaatttgacgaatctggaagttattactgagttattttcgctcgaaatagtaagttaccaacttaccatttttgtgaagctgcaaaaatagtgagacgtgaatcacctattggactgggctaggcccatcgattctctgataaactttcattaaataaacgtttgacttttgccaccacaccgcatgtttgattttttgttgtcgttgaaacaattatatttttcgagacaatacgaaattgattttcccagtgattatgtggctgagtggctcaggttttgtttttctccttaattttcttggccaataaagaaaataaaaaacatgaaatcattactttaaagacaaaaaaaaactcttgctcctgtgttgagagcctaatccaagattctcttccatg

SEQ ID NO: 2398 - DNA, 3000 bp, Unknown
  misc_feature (1)..( 3000): cDNA_ID_2048212_gDNA_ID_1620530_Annot_ID_159708 3000 nt of promoter + ATG
ttatggatttgattgtggatttttgtagttgcctcctatatcaattggtgatggtgctttggatctagtggttattggttgtggtcctgctggtttagccttggctgcagaatcagctaagcttggattaaaagttggactcattggtccagatcttccttttactaacaattacggtgtttgggaagatgaattcaatggtaaaaatctcaatgatccattgttttagtcactatcttcatggtctgtgtttaacatgttgtttattgttactgttgaagatcttgggctgcaaaaatgtattgagcatgtttggagagagactattgtgtatctggatgatgacaagcctattaccattggccgtgcttatggaagagttagtcgacgtttgctccatgaggagcttttgaggaggtaaagtatggttccactatgcatatcttgagaggctttttctctagttatttttgcatgactttgaactgttttaaatacataatttgttattaatgtcttctaggtgtgtcgagtcaggtgtctcgtaccttagctcgaaagttgacagcataacagaagcttctgatggccttagacttgttgcttgtgacgacaataacgtcattccctgcaggtaacaagtcagctagtactattctggttttaccactacgaaaaggttctgacttctagcaaatgcaggcttgccactgttgcttctggagcagcttcgggaaagctcttgcaatacgaagttggtggacctagagtctgtgtgcaaactgcatacggcgtggaggttgaggtataatttgaatatgatattccacagcaataactatatggaggaatcattgttcattgagactgtttttctatttgaaatcttcaggtggaaaatagtccatatgatccagatcaaatggttttcatggattacagagattatactaacgagaaagttcggagcttagaagctgagtatccaacgtttctgtacgccatgcctatgacaaagtcaagactcttcttcgaggttctctttggtgtttctctctccttctagttaaatcgttattgtgataagtctgttgctcatcagctggaaatcctttcaggagacatgtttggcctcaaaagatgtcatgccctttgatttgctaaaaacgaagctcatgttaagattagatacactcggaattcgaattctaaagacttacgaagaggtaagaattggtggtcctatatcaacatagaaacttcttatttgcttttttaattcgtttaatataaaactgtaggagtggtcctatatcccagttggtggttccttgccaaacaccgaacaaaagaatctcgcctttggtgctgccgctagcatggtacatcccgcaacaggtagtaagagcaagaagccttgacccgatgtacttttattcacatcttgaatctgtaccatctctgacttagctttcccccaattaaacaggctattcagttgtgagatctttgtctgaagctccaaaatatgcatcagtcatcgcagagatactaagagaagagactaccaaacagatcaacagtaatatttcaagacaaggtgagctctatataaaccacaaagttaactatgctgttctttcacacaatgagaaacttttaaaacttgtgattttctattttttggcagcttgggatactttatggccaccagaaaggaaaagacagagagcattctttctctttggtcttgcactcatagttcaattcgataccgaaggcattagaagcttcttccgtactttcttccgccttccaaaatggtaagcaagacactgattcgtgattcataacaatgttactgtaaacaagaaaattgattcttcttttcacttactcaggatgtggcaagggtttctaggatcaacattaacatcaggagatctcgttctctttgctttatacatgttcgtcatttcaccaaacaatttgagaaaaggtctcatcaatcatctcatctctgatccaaccggagcaaccatgataaaaacctatctcaaagtatgatttacttatcaactcttaggtttgtgtatatatatgttgatttatctgaataatcgatcaaagaatggtatgtgggttactaggaagttggaaacaaacatgtatagaatctaaggagtgatcgaaatggagatggaaacgaaaagaaaaaaatcagtctttgttttgtggttagtgaccgagaaatgtttaaatcaacaagagtaaaaatgttcaacacatgcttttaatttttatcaatttatttcgcttatattgtttacgattgccatttattttaaatatgatcactttcgtgttcctaagtgcaaattactcaataatctatacacattatttataaacaagaaactgctaattttggattagtgaaactacaagtggttagtgtgccgtctttaatcattaatctaatattaacaagaacagagaacaagtatatgttcgttgcatcacatacagaatctaagaacaagcaccacataattatcaattaaattaatcaatccaatgaaacttcttcttaaccctttaaaaaaacaattactagtcaataaaatcacttctaaattcgctatttgcacattttattcaaaatgaattatatatctttattaatgtcaaccccttgaaataatatagaacattctttctaatatttttctcacaattatatcaattaaaaccttcaaaattatcaataaaacgaccatatcttaaatttcacaaaaatataagtcccaacataacaattttttcgaaaaagacttttctaataaagtaggcgctttcaattttcacaacagtcaataaatacatcacccactttttctatccaagtcaactaaaaacgcgggtcttcttctccaaaacccatttcctcacaaaatccatctgagaaaaagagcaacaagtttcattttcatggtggtg

SEQ ID NO: 2399 - DNA, 3000 bp, Unknown
  misc_feature (1)..( 3000): cDNA_ID_3067475_gDNA_ID_1620530_Annot_ID_159711 3000 nt of promoter + ATG
tgggtttttgttaaagttcaagaaagttcttttttctttttttttcctcctttaatggacgaagtttctcctgcagtcgctgttccattcagaccattcactgaccctcacgccggacttagaggctattgcaacggtgaatctagggttactttaccggaaagttcttgttctggcgacggagctatgaaagattcttcctttgagatcaatacaagacaagattcattgacatcatcatcatctgctatggcaggtgtggatatctccgccggagatgaaatcaacggttcagatgagtttgatccgagatcgatgaatcagagtgagaagaaagtacttagtagaacagagagtagaagtctgtttgagttcaagtgtgttcctttatatggagtgacttcgatttgtggtagacgaccagagatggaagattctgtctcaacgattcctagattccttcaagtttcttctagttcgttgcttgatggtcgagtcactaatggatttaatcctcacttgagtgctcatttctttggtgtttacgatggccatggcggttctcaggtaatgaatcgatttggtttcgatatgatatgatcggaaactgcaaaaacttggtttttgacatttgtttttgtgtgtttaggtagcgaattattgtcgtgagaggatgcatctggctttgacggaggagatagtgaaggagaaaccggagttttgtgacggtgacacgtggcaagagaagtggaagaaggctttgttcaactcttttatgagagttgactcggagattgaaactgtggctcatgctccggaaactgttgggtctacctcggtggttgcggttgtctttccgactcacatctttgtcgcgaattgcggcgactctagggcggttttgtgtcgcggcaaaacgccactcgcgttgtcggttgatcacaaagtaagtatagatgtttctatgaatgaattagtacaatcatatattcattaggacttgcggttttttgttatggtgttaccaatcatagcatgtttctatagattagttaatgtacttatagcgtttgggtctacatttatgtgtagccggatagggatgatgaagcggcgaggatagaagctgccggtgggaaagtaatccggtggaacggggctcgtgtatttggtgttctcgcaatgtcaagatccattggtaattatttaactttctcttgataatgatccatgaatttggttcttttagttgtttccttacattacaacccgtcgcgaacaggcgatagataccttaaaccgtcagtaattccggatccagaagtgacttcagtgcggcgagtaaaagaagatgattgtctcatcttagcaagtgatggtctttgggatgtaatgacaaacgaagaagtgtgcgatttggctcggaaacggattttactatggcataagaagaacgcgatggccggagaggctttgcttccggcggagaaaagaggagaaggaaaagatcctgcagcaatgtccgcggcagagtatttgtcgaagatggctttgcaaaaaggaagcaaagacaatataagtgtggtagtggttgatttgaagggaataaggaaattcaagagcaaatccttgaattgaaaaagaaggtttggaagaaaagtgaaaaaaaaagttttgatggtgggtaaaaattctctttagtgaaaaaagaaagataaaacaacaggtaataattacattgtaatattaatttcctgcttaaatttgttatttactttcttagtcttcccaccattatttaatctttttatatttattttactaacatgatatatataatgtacatgggaatagtgtaacttccaaacaaaaagcccccttgtatttttttttatcttggggttagttgtaataacactacattcgtctacgtaaatatttagtgttattatttgatgtttcataacttctctttgtgtgtgtgttttcgttagagtgatatagtttcaatagtattgacatcattttttcattaccaaaaattacattagtcttcatcaccataattttttcattttgtttaaatctactaaaccaaccagaatatgggatggttgaataaacgtcacaataatttgtaaatccatgtgaatgtttagattgtaggtgattgaagacaaaataatacatacttatatcacaagttaattgtaaagtggtgtgtaaggcagcttttatccccaagaaaaatcatctttttatcacatcaacattattcaacaattacacaaaaaggtaaatatcatatttaaatgtgaaagaatataaataaaattagtcttgtgaaaaatttaatctcttcgaataacattgttttattattcttatttcataaaaaaggaaagaagtaagcgttggttagtaaaagagtgttttttactttctcaagagtttcaatttcttcttcttcagctttatacgcatttaaagcgccgacgaagttgaacactgaagaagaaaaagaggagacgacacgatttttgtctgaattatcagattcagatttcgtttaatcgccagattcatttcgaaaaatcttgcactagattctcttatcttcggtgagctctctctgcgatctttgtttttttttccgagcaatttccggtatttaatgaaacgatggatcgacgaattgatttatttgtaaagctaatcctgtagacaactgagctcaaaacattcaatttttgttaaagagacgagtcgtatctcgagtttgaagttttcgcggttgctgattgatttgatggggatttgaaatttatagtgtgagttttggttagttgctgctagggttttcgaatcacactttgtattgttggtcttgtgttgattgaaatgtatctctagtctttgattactgcttgtgaaattctgatgtttttattatgattgcagggaaattgaagatctgggtcataagcaatagcttaaagc

SEQ ID NO: 2400 - DNA, 3000 bp, Unknown
  misc_feature (1)..( 3000): cDNA_ID_2048208_gDNA_ID_1620530_Annot_ID_159710 3000 nt of promoter + ATG
acctaacattgatcctttctttcctcacactcttcttctgaaactcaaaccgctctttcgtagagagattcgtgcaaataaccttccaaataccaaaaaagattcatcatcaatgatcaatccaaggtaaagtaatcgattttgaatgatactcacaatcctaatttctccttttaactcaattacttgaaaactaaagaaaagaagcccttaattgccaaatttacaagattagcgtctaggactatctcaagatcatccaaaaggtaagaaccctaaacaacaatttctggaaatcgagtaacctaacgctaggagtgaataaagaagcttatttgtttgatacctttggtcgtaaatcaagtgaagctgaagaaggtctgaaaatagaagccatggaagagaatcttggattaggctctcaacacaggagcaagagtttttttttgtctttaaagtaatgatttcatgttttttattttctttattggccaagaaaattaaggagaaaaacaaaacctgagccactcagccacataatcactgggaaaatcaatttcgtattgtctcgaaaaatataattgtttcaacgacaacaaaaaatcaaacatgcggtgtggtggcaaaagtcaaacgtttatttaatgaaagtttatcagagaatcgatgggcctagcccagtccaataggtgattcacgtctcactatttttgcagcttcacaaaaatggtaagttggtaacttactatttcgagcgaaaataactcagtaataacttccagattcgtcaaatttctcttaccttgtaatgaagtttagatgttttagctttatgtataaaaatttaagaatatggtctaattttatataattttcttattatcattttgtatttgatatcatattgacaaaatttaacaaatagatattagttgtacttctatgtgaccgccactttattcaatactaccttttaagttttaacagatccgtgtagcaactgatcatctcaaaatatgtgacacatagtatactatacaatatgagctggttttgttttttattttatatcgaaagatattttactttatctgacagctgcgagagatcctaaaaaaaatgaattaactttaaagaaattgcatgcgtctatctatctacgtatatctcaaaaataaaaataaaatcaaggtcacatgactcatatccagtgaataaaaaatattcatgaaatcgtaaataaataaataaaaacagaaattcatatatacgtttttagttatataactatacgattggttcagtgtatttgttgcccaaccaaagctactttcacttcacatatcattacatggtccaatgattatggaacacgtattattatttttgtttaaaaacaagtaaataaataaaacagacaccaaataaaaaaggaaacacaaagatatttacggaagttaaaagagaggtgttgtctatgtcagtgcaatgaacctcttcggctcatcttttcccgccatcccaactaacagatctctcaccgtacacgccatcctcttcaccaaatctaatgactttctctctgtctacgtggcgatcatccggtctgttttccgacaataatgggacccatttgattgttatttcgaaaatgattttatttttcttcaatattgtttttttcttcaatattgttttggaagtaaaaagaatcatctgttgacaacacaacacttcttgccttctcgagtttgattctcctcctttctgtttttggtatccacccgattgtcattattttattttgaactctagaaccaaaaatatcagagcaagctctctagtcagtaaattttgtaattattatagtacctcatttttattagtagcattaatgtactagtgtggtcagtgtagatgaatatattttctactaaactaataaaaattgtatcataatttgtatattttttggtgttttcatcttttactataaaatatatttttgtgacatatggcatgttacactaaacaaaaaataaaataaaagaaatttgtttttgtataaaataagtaaattacgttttttgtcgaccaattttgattaaagctcaaaagaaaagagcaattcctaagagatattatttttatgtgaaataagtaaattactcattatgtaaaaagtttggatttatcttaaatctaatttcataacgtttaatgcaagatattttggtaaaataggaaacgtataaaacatctgtattcaaaacttctataaagatacccaataataatggaggggtgacacgatagtaaatagaataagaaataaaatttaatcaagtcaaaataaaataaataccctttgtttttgtttccacaattccttaagtctttctaattactttgttgttcactaaaacatctcacattgtgctattttttttaataaataaagacctctctctttaaaactgattatcccctaaactatttgtttgtgagaaagaaagagaaaaaaaagtttttttggttggaaattaattgagggagagagagagttcagaatctctaaatggctgaaacgaattgcccagaatccaggaaactctgattttagtccttttttcctcgggaaaacgtttgctttttcttttttgtgtgtgtttggttctttaattgacaaatctctctctatctgtttcatgtgctagctaaggttgtcttcactttcctctaatgagtcatgagtttcttgtcttcatcttcatctaataaagttaacaacactctcatcaatttttattatgttcaaatctgtctgacttttcgttcttttctcttacacccaagcgttttaacaatctaacatctgtctctttgaatacttagatatccaacttcaatttctctcctttctcttcccaactttgattcctgatttgggtttttgttaaagttcaagaaagttcttttttctttttttttcctccttta

SEQ ID NO: 2401 - DNA, 3000 bp, Unknown
  misc_feature (1)..( 3000): cDNA_ID_2048225_gDNA_ID_1620530_Annot_ID_159705 3000 nt of promoter + ATG
cgtctccgaaacgaaggaacaggggtaacttaacggcgttaagtttaccagcaccgacgccattttggtctccgagaccgtccacggagctagacgctgccgccgttacgttacaaaaggtttacaagagttatcgaacgcgtagaaatcttgctgactgtgcagttgttgttgaagaattatggtacgtttgaatttcagttttatacattttaacccaatgttgatatgaaaattatacttaagtggtgtgtttggtttaggtggaaagaattggaattggcaaagttagaaccgaacaaaaccaatgataaaccagagtctgctgtatcaaggtgggcaagagctggaacaaaagcagcaaaggtaataattaattattcactagtcatacattatcatcattaattcttactttggttaataaaatagtttgatatgcttgataggtggggaaaggattgttgaaagatgataaagcacaaaaattagcattgcgacattggttagaagccgtaagtttaggcttttatttattttactttaatgtatacatattcctttgatttatagtaatgattttaaaaaattattattacagattgatccacgacataggtacgggcataacttacacttatactatgatgtctggtcagaaagtgagagtactcagccatttttcttctggtaaattttacacaaacttagtcaaattttgatttcgaatgttccttagtaaatggagctgattttgatagcaaaccttctgaatgatactaaaggttagacattggagatggcaaggaagtaaatctcaacaaatgttcaagaactcttcttcagcgtcaatgcatcacttaccttggtccggtatgtacacatggtcttcggttatttccggttggtaaaagaaaaccgattttagttctggtttttgactaacagaaagagagacaagcttacgaagtggtcgtggaagatgggaagttagtcagcagacaaaccaagagccttgtggagactactgaaggaaccaaatggatctttgtgttgagcacgacaagaaaactgtacattggtcagaaacagaaaggtcggtttcaacactcgagctttctctccggcgccgcgattaccgccgccggtagaattgtttcacacgatggagttgtaaaagctgtgtggccgtacagtggtcattatcttccgacggaagagaatttcagagaatttatctgtttcttaagagaaaaccacgtgaatctcactaatgtcaaggtgattaagctaattaaatctctaatcccgcattttattatttatttctttgctatattttaataaactttcgtaattaattgtgttgtagatgaatgcgattgacgacgatgatcatctggtcaataatgatggaagcactaagccgtcgatgatggtggcgaaatcggacggttcagatgaacagaaacgattttcatgcaagtggagtacaggaaacggtccaaggatcgggtgtgtgcgggactacccaatggatctgcagacgcgggcgcttgaacaagtcaacctttctcctcgtgtagtcaacggaacaatgggattatttggcccaataccatcgccaagacccagcccaaagattcgtgtctctcctagactatcttgcatgggtcttccaagcccaaggcactaattttaccaattttcctaatctgatcaattaaattatttcaaaatttttgaatattccttttttttttcactcccctaatagtattgggcgattctttatttagagtataacttgtactcatttttatttaaaataatttaattttacatgtatttttatgtttttgaggtttgtaaccttttatttactttgtaccttcgatatcattattttcttcaatcaattataataaaatccacttaaaataatgaatgactatttcataatagaaaacagttatttatttcgactgtccaaagttacaaatatttaattttcctcctcgtacaatttatgattaagaatttagactagtaaagtcaaaataccgagacaaaactaaaagaatgaagtcacgtggggattacgtttgagtatatttgactcataatgatggatggaagtcacgtgccaaacgatctttaccgctcaccaacggcacgcgtagctctcacgcttggtgacgcatttcttactcgtagccaatcccaattttctcacatttttttaacttttaaaaataatttaaaactctacgcgtgttataagtccaaattccaaaataccgaactaaaccggaaaattaaaaaatcgttatgatacgtaattaatatgagttgatgaaatttaagtatggtgataataagtgattgatattgggtttaagtttaacataacgtattagtttgaaaatttgaaacgatttatagttatttatttaaccggatttcggtttaataaaaccgggatatgtggaaccgtgtaagctgaggaataatagttacctgtaaggaaagagaaaaaaggaaagaggagagaagaaagaaaaggaaaagacccaaactttgagaaacaccttcattctcttccttccttcatcaaagcttaaccttttttaatttttatcctcgttttttcaattcgcgtgaagagacagagagagagaaagataaagctagaagagaatcgacattacgaatcttttgttccagatcgtgagagaggaggagttggaagaatgaagatgactattgggtctttgttccaaccctaattttgcagattaatttcgtttttgttgatttctgttttgggtttgcgttgctgattccggtggattaaagggttctttttggagagcacaaatttgttgggtttttttttggggaaagagaattaaaattttctcctttagagtcggcgtttgggttgagagagattattatagtttttagggttttggatttctgaattggtgattatcg

SEQ ID NO: 2402 - DNA, 3000 bp, Unknown
  misc_feature (1)..( 3000): cDNA_ID_2994131_gDNA_ID_1620530_Annot_ID_159693 3000 nt of promoter + ATG
agtgagatggctattaccagttccatcttgtgagacctgatactcctcatgtctttcgactgtttcatcatcttctacaagcatatcatcattatcatcccctgatatctctccttcttctacatcatcacctccaactatccgagacacagaatctaccaaaaccggactattatcaacaggtttctctaattccatctctctttgaactgttccattacaagcttccaaaactccagaacttataacctcattagattcaacagatttaggaacctcctctgcctttttctcactttcaactggatctacttgaacttgagttgcaatattaggcttctccaggacattttggacaatgtcatagtcattcacatccaatgcctcaaagagattcacacaactttctggaacagaatcttgagtttcattaatcataagctcaaagctatcgaaaaaatctgtgtgtctactaacaacagatgcatcttgcaagtcaattccatcacaaatatctccaagcatcaaactcttttcctgtgaaattgtttccaccttctcaccacttgaatcaccagacactccattgagttttgattccgtaattgataaattctccggcggttcgcaagtttctcccggagactcttgagcaatttctatgtaagaaaacacaaatagcatcagaaatagtttcaggcaatttcaagcaacagatgaactttgaattttgattactagaagatgaattaatcattcctaagaactttgacttcgaatcgaacactgacctgttcgtaagaccagctcctggagaactgccggtgtggcaagagaaatttgaggctcccgatcgaaactcgagcaaaagtgataaagcaaagagcgataatttcgattcggcagatgcgtgcgtcggtgaggaaacggagcgacggaagattccattgtctccgccggagaataatctcaaccagtaccgataggctcaacttcggcttgtctttcgccggagaaaggccgtcttgtggcggtggacgatttaaaaatctttattgggcttgtatcatctttgatgttaatgggcttcctgattttgtaggcccaatgaatccttcaacaaacggcgtcgtaataaggatccaaaccctaaaagatttatggattcagagttttcgaaattggaatttctcactctctctatctctcttagccagctctgatcatttcgatttttttccggtgaaaagggaggagaaacatggttgtacgtatcagactgtcgagatttggatgcaaaaatcggccattttttagggttatggctgctgatagcagatctccaagagacgggaagcatcttgaggtcttaggttacttcaatcctttgccaggtgattgacaaaacaaaatgtattccaattggtgttgttcgtagagttttcgattaaaatacacgatctcttggtctatgtgttcaggccaggacggtggtaagaggatgggtctcaagttcgatcgaattaagtatgtttcttctcatctaattctctagtttcttatgtttttttcggtaaaatcaggtaggttttgggttgaatttactcagaaagaggtctctgaatgcttcactagatgattaaggcttttctgcatttgaagtgttttggttaattgctaaagttagcttctagccgcctctagatatcttaatgcattgttgtatagtcaacattgtgttatagttaactatctttcgatctgatacaaaggagctgagttcagtctttgaatggtttttgttatcgaaaggcgaatgaatctacatgtttcccatggttggttttgatcactttctttctcttcatggtattgaaccattagttgaagcaattttctacctcatttaatcactaacttatgaaaggaaaaactgaaatatttgtggaaattcatcaacaagttttgttatataacaaatgaaacttctccgccagtcttgagtctttctatggaacttctgctctgagttctggaattgtttcttattagtgtaagatgaagaacctgttgattatctattcgtatacacacttacttacattcttaattgttcaccatatacaacctcttttgcataattgtatggtcatgtagctttagaatcttgtcatgctctttatcatcatctaaaattaagattataatgtccggatattagaagaacacatgtcaagactacttaaaagttagatcctggtctgtctttcttttgttctgaatgactagtttcaacagaggatgcatatagtttgattaatggacattttgtttgattctcttgttctgtacaggtactggttatctgttggtgctcagccatcagacccggttcaacgtctcctattcagatccggtttacttcctcctcctccaatggtggctatgggacgtaaaggtggagcacgagacacacgcccagttgatccgatgactggtcgctatgtggatgcagagaataaaacagttaatgccaatgataaccagcctaaggaagaggatacagaagccaagagtgcatgattcattagccttctgtcatcgtagcttttcaagttcactttgttgtcgattatattgtgtaatgcagcattagacaactgacttgtttcctttgtttggcgataaacggcaaggtgtttggcactttttgcagaaacggcacatattttgcattgggatattttagattttaaaaaatgaaaaagtaaataaaaatgccagcgagggaattaaaaaaaaaagaatggcagttgttaggtttaaattttataaaggaggaagccacgttttgcgtttagtcgccacccagaaaaaaccctcaagtcttcttcttcttcctcaatctctccacctcttttcaaaccttcttcacactctctctcaatcaatcctttttcttctcaaatctttcagttttgatctctaaatttccagaaa

SEQ ID NO: 2403 - DNA, 3000 bp, Unknown
  misc_feature (1)..( 3000): cDNA_ID_3067492_gDNA_ID_1620530_Annot_ID_159697 3000 nt of promoter + ATG
aagaaaaacaatcgagtgaagatcttctaaattgtcaagttccaattacggggccaccttattggggggtcataatgaatgtcatttttatttataaatactttgtttagcaccgttaatcaatggtcgttttgttcatagtctatactctattttctcaagttatcgttcttaaattattatttttcgcgacatgaagttataaagatgggaaaatgacaactacacgtgcgtttagcacggttttgctgtccgggtacaacgtcttattgtttatcttatacatacaacatttaatccataaaattattcattcaatcagaaagaaggatttggcaaaagaataaattattttctataatagtagtttatgaatatcaatttttttttttttttttttttgttaaattataaatatccaattttgttagataatagattaattttagaattgctaaatccccctaattttatacctatgatcaggcctggctatgatgtatttttttggacgtgaatttttatagttagataatagatttatttgtaggatctacatatacatttttatatccattttatgaaataaatcttaaagttagaacttatttacaatggctgccaatggatttaaattatttgattttttttaattaatggtttgaatttttatacgacaattaattgtgtaacaaaccaaaaagattctaaatatatggcaatcccatatgtcacgcaaaacacaataatttaacttttccttattttacctacaatatttactaaatcttaaaacaaccaaaatttgaactatttgaattatttgtattaaatttcggcaataaattaaaacaaatgtgaaacaaaccaaaaaatacatttacgatcccggaaaatgagcaaacccaattatatgtgcacctaaaaacattctttattttggtttgaatattccatagaattaatagtccataactttttcggtataaaatcataatcaaaattaattccacaactaatatttaaacttataaaaaaaaaaatatcatgagacgaaaaatatagcatgacggatttggattgatatgaaatatagcaggactgttttagaaacacagattcaatatttattttattattttatcatcaccaaattttttaattataatattaatataaattatataattttaatattaaactaaaatcttaaaatttaataatattatttataaaaataaaatatttgccctgtggtataccacgagttaaattccagttgcttaataatattctgtctaaattctaatttttgttatagcaaatggaattggagtgttttttttttataattgcttaagttcaattcattagtaaaagataaaaaaaaattgcagcgacaacaagttaacatgtggcaaaagaagcaaacagaacaaaatcttgaggatattccatgtcttgctttttatcgtttatttacggcacaatgattaattacgaatctacaaagtttggcctacgattgttaatttattagaattatcggcacttttcgatagtcgcgaggaaggaaattaaataaattattcagacctcagaagaagcagatcttgtagattcttttgatgatgacctaattgtgacaaggaaacatcatctagtagggatattaatgagaaatattcttcaaaaagaacattaatatatgtaaagtattataggtccgattgtttacaacaagatcgtaaaatatattcaacaggtaggaagaagaaaataaaactagctgatgttgttgaagtttacatactatatgtgtattaagtttttgattagataaacccagaaattatttaaaaaattgtaaactcaaatttcttcttgttattattttaaaaacatcatttactcttatttacatgcagatggaagaattcgagtcaagtttaactctcacaaaaaacctagccaagttctaatataagtgtgatcaatccaagggtcaagatttattgtccgtggggaaatatcgtatatggtgatctaaggccaatctccaatccccatgatgattatggtacatgctcattttttttttttgctatttcacaactaatcacggttacagtgatgattatggtggtggtgggaatgatgatacattacaacattatgttagttttagctattatatcagttaatcaattaattagtttcatctataatattgatagacttatatacatttgattactctatatagtttgtgaaacattaacatggatatctattcataggatccaaactgcataatctgaatatcaaaagaagctacatttttttttgcttaacctcaactgcaaaacctctttgagtcacaatatgagaaattactacaatactacagaaactattaatgtagtaatgtacaaaatggaccgtggaatatttatgcagaaccatttaactagtgagcgacaccgtgcgtgttcagacagttacaactattgcttttgtggtctattgaaagtttgaaaccagtggtttgctaattagattctcacgtgactttgatcattcattgtaaatttttgtaataaattaacaaaaacatgaacgcgtatcgtgtcatacagaacttatatcatacatactcttttaaatacggaattgtataattattatatcagctatctactttactcgggtcaactgaatttttttattataggaatatacagaaaataaaatttagttaaaacaaaataatttgtttcaaataatctaaactcttcaataattagtagttactagttatatacagagaagatactagcttgctcactgatttttcatttttttttacacaaacaaaaaacaaaaaatccgtacaatacatgtgtctgcatgcgtgtctatatatatacagctactactcttcattgataagaatcaagctattcataaaataaaaagacttatttctcaaaaaaaatg

SEQ ID NO: 2404 - DNA, 3000 bp, Unknown
  misc_feature (1)..( 3000): cDNA_ID_2048229_gDNA_ID_1620530_Annot_ID_159704 3000 nt of promoter + ATG
cgtcttgctttagacgagaatgagcaaattcgatggaatttagggattttgtaggggttttattgtgagagtctgaatttgggaaaaatccgttgagaggtaaaaattataattgcatgattcccacaaggcaacactggaattggtcctaatttgaaacatcgccagactgttttagcttaatattgggtcccacttttatatgttttatgctaattaagtcattaaatccttctcttttctttgtttagaccgccacgttaactattttataatgggcccttacaaatattatggcccatgggtcttacgttataatggtcatctttgttttttttttggttcagtctaactttaacatgcggagaacactattggatagatttttactcaagagtcgacttttatgaaatcgatccattcatattttgagttgccatttctttcttatatgaataaaatatatttttaataactatggaaaaataacgaaaataaaaatcattatagaatagtattttttttatacaaaactacataaatgatatggatacacgtctagcaaaatagcccgttatttatttacactcttcctttaaagttgcaagtcatatcgtgtctctgacttatcggtgcaattttagacaatacagtttcaaactttgacctcttggtcttaggtcaagccaatacaaaagagaagaatgatcattttataaaatttaattactcataatatgaaatcgacattgagaaatgtggccagctcgtcgacataaatagaagaatataaatgaacatatatatcagagtaactcataatatgaaatcgatatccaaaatgtggctgtaatattttagacttaacgacaacgcattatgtagttattttcacctatgcgagaactttaacatcacaacgacacgaaaaaagtaaacaaaaatattcaagtcgaaatactcgtggtacggtcttatttgttgaccaaagttattagttttaaaattttaatccattatctgggaggggatggatgttttacttggtaaaagggtatgcataaatttatatccaaaacccttttcttacggctcaagtagagtcttctaaaaaaaagaagaagaactagagtcttctcaatgcccacgaagaaatcaaattgtatatgtgtagttctctaactataacgtacatacagtattgttattttagctattcaaaatatattggtaattaaaaaattatttgattgtttttcttgaatataacaatcactaattaattattctcgaatcaaaaacgttcaaactaacatattctttttagttttaatagtattgattagtattaatatgtacaaatttgtgaaacgtttttagtccatttgtgacgactgcggtattagcattccgattatatattttgggttaaagataaactttaacgatcatatgacaactagttaacaaaaaatgttgattttgtataagtgtaatcttggtagtaatatattaacacaaacgtgtcattttgtgtcgtgtaaaaggagaacaagtgagacaaatagaccaacagctttgaactaacacgtacgctgcacaatttagtagaaaacaagaagaagaaactcttttgagaaaacccaaaagtaaaaagacttgaccacaattggttgactccgcatttacacaattacacctcaacaccccgaaccggttttggtgctctttaatatgatgtcttaatcacatacatatatggttgctttctttgaccatcataaatcatgctagtaatatttatgtttttaattgaatttaaaaatatgtatggaccactgaatatcaatttaatcaaaccttttcagcttttcttaatcatattggctttgcactatcataatcgtgaggatattatttaaattttagtgacccgcactcaccaaactcgaatgttatatatctgatttgatgtgaaaccctctaaccaagccgagatttattttacaagtttttgtttactagtaacaatgttatatactttggacataaaatgatatatatatatatatatatatatatatactcattaacttattgtataggacatgaaatcaatatactttggtattaccgtcacatatttagctgtattcttaacatatgattgtgttgttcttgtaaatttgataggtttcttgattcaataagaaaagcgcacaacccaagagaatttgattatactagtactcgttatcgaagatagatatagaatgaatccgttgaccgaataataaaaacctaaataatcatcgggattaaaaatatgaaatgcatataagctagtaataaaaaacgacgacgtatgcaatgatgtccccacacgctccggacgtaacgccgtgcgtagatcaacaacacggtcacacacatatgtacagtgagattgtatatatgtgtatgcaactcctaatagtgttatcaaaacttaaataagtaatgagtaccgataatataattcctacgacgacgtattcaaagttgccccacacgctagtatgtattggaaaaattaacaaataaatctaaacattgaaatatgaaaatcaagagctcgtgtggtttgattttttatggttttaaatccgaggaaaacgtaaaacctttgaatcaacaagactcgaagaaaaatcttcactgcgtatcttaaggtccaatcccaattttgttctcacggaaaaaaaaatctaaaaaacattcataaatatattctcattaatatatatatagagacgacagatgagcaaagaagagacataaccataaccataattcttcttattgtctttaataagtgtttctgttttcctaaaacattcgacgaaacttcttcagatcgtaatcagtgtaagtaccttcctcaatctttggatttaaaaccatttttctttcttcatcccatgtctgaatcttttctttttaattttaaaggtagcttta

SEQ ID NO: 2405 - DNA, 3000 bp, Unknown
  misc_feature (1)..( 3000): cDNA_ID_2048243_gDNA_ID_1620530_Annot_ID_159700 3000 nt of promoter + ATG
tacctctcaacggatttttcccaaattcagactctcacaataaaacccctacaaaatccctaaattccatcgaatttgctcattctcgtctaaagcaagacgaagatgacgactgctgtcaacacagtttctggtaattccatcgaattctctcatcctcgatttgatttttttctcgttcttaaattgattttgtgtttattctgattttgagatgatatttttcttcttctggggtttaatgatgatttattagttttactgaagttatttaaggatcaatcaaattattgttttctcttctgcgattgattggtttatggtgaatgtatgaatctaatcattgagattcttagaaggcaatttgtatattatcattgagttcattgcagatatttttttttgggggttttactggtgatttattgagcttaatcaacgatgatttatggttatgttctaggaaattagtgttttttgggatgtgttatattgtaatgttgaacaacactgtggatttgttgtgtgtctcatgttataagatttttggcttttgtttgtttgtttaggtgatgaagatcgttcggacaaaaagattcagggtgatattgatgagagtaaggtcaaagcaccaaacatgttcgaacgagctaaagaagagcttgatgctgttatcggagctattcatcaacgcaagagttcaaagtttgtttgtttctttcttctgatacacttttgtaactagtcttgaatcttctctgtctctaatgttatgaataaggagagttcaaacattggagtttgctaatgtgttataaattcgctttcagggataaaatggaattcaaatcagataaaccaggtaccagtttttctcccatcattgcatcaaatcgtttaattttttttctcggatcgattgttagtctcgagacttacagggtttggtagtaacataactacagagtttgtctattttatgatttgaacatggatacaaatgtgatgttttgtgttcattcttgtttcttgttcaagactcacttcgtttcacatggtttacattgacagaagatggaaagaaaaaaccgaatatgttgaaaaaggcgagggaagacctcaaatctttattcctgaaggaaaaacctcctcgccatcttcatcatcatcacaaagaaactcatggaaggagtgatgatatcagtgagaacacaccggtggatgaagtgaaggctcctaatgttttggagagagccaaggaagaaatcgaagccgtcatcgacaccatccattccaagaagaaggagaaagacggttctggttcaccttcgcgttctcggtctctctcaccggaaaaggagagagctggattcgcatgctctattggaaaggggttggaaaagatatgttctccttggagtgatgataaaaaggattaatttattcttatgattgatgatcataaaacttgtttgttaattgtcatgatagacttgcttttaagcttcaatcagtttgttgattattattaggtacaaagttgttaaattcgtaagcttattttatggattctatgggtattgggtactattactaaatctcacacattttcatatttcagaatcgggtgggccttattggatatgaatcttttagatggcctataatcaggtaggccttgtagattatgaacccatttttctttagaatgggccaatggacctggtcgtgagaaaataagtacaaattacggtttatgctttttatagtgttattggattagtggagtttaatataatctaactctaacctaataataatcaacaaaatgaaagtttaagcttaattttgtatgaattttatatgaattttttaatcttttaaaaaatagtaaaataactcctaatattaataaaataaacaaattagcgaccaaagagagtttatgaactgattctcttgaagcaagtgtatcttcaaaagagctgatactctcctcaccaaagcgatagcccaacatatacctctagatgtatgttgacgttacagatgaatttgtttgtgaacatgtgcatcttacacaagcaagcaagacaaagtgtaatttaattacatcattgttcataaaacaattcttactatatttcatactacataagcaaaaataaaataaaatatgtggatttgtagcaagtgtgaatttattttcattaatgttcataaactttgtattttattaattatgttttttttgtcataacaaagcataaaaagaggaaaacaaaagcaaaaaaatcttggattaatgatcaagaataatttgaatggcaaactatcagaaaaataaaatatgaaaaagtaaatgaacaatgaaaaaaaaagagaggtacaaatgagctgaaaaaggtttttcattagactttctaagttgatggggttttctattaaaaattaagttgaaggttttaaaatggatcagctaaaacttgaggtttttttcaaaaagttttcttctctacaacgaaaaggtgaaaaacaatagttgggaatttgttgctttatacaaaaacaaacaacttagcaatgaaaattgtttgtacgatgccttaatataatgatgatatcaattatcgaagaaaaattgttacgaacaacccacaatatattgatgatttagttaaagaagttcatcgtgagatgctttagctcagaacttagggtattatttgaaaagtcataaagaattaattggaatagtagggaaattaggaaagacacaaagaactagaactcaattgggataagataagacgaacgcacatcaacaagagtacacaatgggtttacaaatataagcaggcccatgaaaggcccagtatatgatacgccactctgacacgtgttaaggcagcattccttttcctgaaagaaaaaaaaaacttcttggctcactttgtctcttgttctcgctgagaagcagaatttagggttccgaccatg

SEQ ID NO: 2406 - DNA, 3000 bp, Unknown
  misc_feature (1)..( 3000): cDNA_ID_2048275_gDNA_ID_1620530_Annot_ID_159691 3000 nt of promoter + ATG
acaaaggcaaagagagagagagagtaccttctgcagttttctcgtctccttggtccatcttagcatcctctggagccccttcaacttcagtagctccattcacaatctcataacgctgcacattccaaatgtcaagccagtgtcaagagaaattcgaagctaactaaagccaacacagctggaaataaagaaaatacaggataactaaatttttcaaaatagtttaatcttgctacaaccaaattaccttgttatacaaaggctgatataacttttgatacttggcttcaagagcagctctctcctcgcggaattttgtctctatttcatcatgtttgccctaaaaaacgaaaaggattctcagataatcatcaaaagaatgcacagcattctcatataatcaaaagcatacaaatatacatttcaacatcatactcacaagataccatatcaatctacaccaatctattgaacaaaagcttatataggaaacgttaatcacaacataagcatagagctcataaaaagtgaatggaagttttcccaaacctgaatctcccgcaaaacctcaacacgccttctaattttaggagtcagattctcgagcacatcagaatgttgtccagctagattctggagcttgttctgtgaatcaaacacataacagttacaaaaaaatctccacagaaactataaaatgacgaaacgcccaaattacatgttcctcttcaagtataatgcaaatcgatataagaagagatagagaaactcaccttaagagcgttgacaagaccagctcgatcctcatctttaagagctgcaaacaaacaaaaaagcttctaaaactttgactaagaagaagcaaagccgcagaaacaaaatcggagatatagatttaccagaagtgagatcgctgacattgaaactgtccttatcgttgctcattttctggaaatttagagatcaaaactgaaagatttgagaagaaaaaggattgattgagagagagtgtgaagaaggtttgaaaagaggtggagagattgaggaagaagaagaagacttgagggttttttctgggtggcgactaaacgcaaaacgtggcttcctcctttataaaatttaaacctaacaactgccattcttttttttttaattccctcgctggcatttttatttactttttcattttttaaaatctaaaatatcccaatgcaaaatatgtgccgtttctgcaaaaagtgccaaacaccttgccgtttatcgccaaacaaaggaaacaagtcagttgtctaatgctgcattacacaatataatcgacaacaaagtgaacttgaaaagctacgatgacagaaggctaatgaatcatgcactcttggcttctgtatcctcttccttaggctggttatcattggcattaactgttttattctctgcatccacatagcgaccagtcatcggatcaactgggcgtgtgtctcgtgctccacctttacgtcccatagccaccattggaggaggaggaagtaaaccggatctgaataggagacgttgaaccgggtctgatggctgagcaccaacagataaccagtacctgtacagaacaagagaatcaaacaaaatgtccattaatcaaactatatgcatcctctgttgaaactagtcattcagaacaaaagaaagacagaccaggatctaacttttaagtagtcttgacatgtgttcttctaatatccggacattataatcttaattttagatgatgataaagagcatgacaagattctaaagctacatgaccatacaattatgcaaaagaggttgtatatggtgaacaattaagaatgtaagtaagtgtgtatacgaatagataatcaacaggttcttcatcttacactaataagaaacaattccagaactcagagcagaagttccatagaaagactcaagactggcggagaagtttcatttgttatataacaaaacttgttgatgaatttccacaaatatttcagtttttcctttcataagttagtgattaaatgaggtagaaaattgcttcaactaatggttcaataccatgaagagaaagaaagtgatcaaaaccaaccatgggaaacatgtagattcattcgcctttcgataacaaaaaccattcaaagactgaactcagctcctttgtatcagatcgaaagatagttaactataacacaatgttgactatacaacaatgcattaagatatctagaggcggctagaagctaactttagcaattaaccaaaacacttcaaatgcagaaaagccttaatcatctagtgaagcattcagagacctctttctgagtaaattcaacccaaaacctacctgattttaccgaaaaaaacataagaaactagagaattagatgagaagaaacatacttaattcgatcgaacttgagacccatcctcttaccaccgtcctggcctgaacacatagaccaagagatcgtgtattttaatcgaaaactctacgaacaacaccaattggaatacattttgttttgtcaatcacctggcaaaggattgaagtaacctaagacctcaagatgcttcccgtctcttggagatctgctatcagcagccataaccctaaaaaatggccgatttttgcatccaaatctcgacagtctgatacgtacaaccatgtttctcctcccttttcaccggaaaaaaatcgaaatgatcagagctggctaagagagatagagagagtgagaaattccaatttcgaaaactctgaatccataaatcttttagggtttggatccttattacgacgccgtttgttgaaggattcattgggcctacaaaatcaggaagcccattaacatcaaagatgatacaagcccaataaagatttttaaatcgtccaccgccacaagacggcctttctccggcgaaagacaagccgaagttgagcctatcggtactggttgagattattctccggcggagacaatg

SEQ ID NO: 2407 - DNA, 3000 bp, Unknown
  misc_feature (1)..( 3000): cDNA_ID_2048382_gDNA_ID_1620531_Annot_ID_159724 3000 nt of promoter + ATG
ctaagtttagtagcctaaccaaacataaggtatggtttgaaacttatttttggcaattcctattaagtcgcagtactctgaatgatcaagcaagtcacggaaatctacaaacagtttctcgaacaccttccactgcactttgattggtcttgaatatggatatggaagaaagccctgcatctcttagatagttagtttctactagaaaagaatttgaaaactttatggacactgttatcctttcttacatcatattcttgtgcgattgatttcagcacggtaaatgtatgttttgtgtcctctaaattgtcaagaagagccagccaaatctttgttgcaagctcaccagcttcttctttcgattggccacaaacaatcaattggtctgccaccagaatataagatgaatgccgtcattagcaatgattcattaagcagagtcaaatgcatataccaaactagcttaccgataagggttccatgcaaaatgcctgaagcaggcatagtggaaagttgaagctgatcattcaagaacacgtaaatatgtccaagcatctcatctatgtctgtatcatccacacctaatatgtttctgctgatgtataaagccacatatctcctgcagctaaaaggctgttaagttccttgaatctaactaagacattattaagctagcttttttcatagaaatcaagtgtgtttccagtcaccgtttgcttaatccttgacgaattggtccaatccagctcttagttttgctagcaagtggatacgcccgattaagagcagccagccataagcattctccgcggaataaattagcccactgctttctaacacacgatacttgttcccaatttgttattggaattctgataaatatctctatcaagagatcctctgtaagctttccaaatggactatcatctttcattgtcggagcaacgttctcttctttacttcggttcattactatcctgcaacacatgttttacacatagatcaccaataatacataagcgacataaaagcaacatcagtcacactaaattattccatcgaaatcaaacagaacattattgaatagcactcatttagtagctttttaagtatgtttaagagtaacaaacacaacactaacttagaactttaaaaaaacatatctataagcctaaagcttattaaacaaaaacatattacttacagattcttaatcccagtgaagcttcattcccataatccggaaacaagcaaactaaaaaaaatcaattgcttaatggcaaagcaaaaagcatagaatcaaatgttcatacgatttgtaaccaataaaaggataagcttttgtctacagttataagattaaaaaagtaacaaaatttgagtaaaattcatatgagaatcccatttgatcactataggctcaaactcaacaacacaagtccctatatcaacaagaaaattctattcagaggatcatagcaatctgattgattggaacccaaaaaaaattctcttgaagaagtcaaaattttataactagaaagagtagaaaacgaaacggctaagatgataacaagcgtttcatcagctgaaacagaattcaagcaaaaatagaatcgaatgagaacttacaagaggtagtaagtaatccctgagaagaagaactggtgtgagagacatgccaaatgaagccatggatcataacctcaagctctccaattcggtttcatccaatccactagaccggaatcgtaaccaaagtaaattcaaaaaccataccaatataaccaaagtaaaagacgacgtcgtttcatagcagtatacataaatttggtaaagaaaaagcccattttaagagaagcccaaattgtcatcagaaacaaagataagacccgtagatgtatgagacggaggagggtaaagatgtaattttaaaagagagaagtgagcaaatggaaggagaacagatagcgcggcttttctgacaatattctctgtacgatgcttttctttctatctctccccccactgacctacctaccagttgttacttgttactgcttcttctccttttcattcattcatacatctctctccttctctaatcaaacaccaaaacaaaaccaaaaattaaccaatagaaaatgaagtatcagaaaaagtaaagtaagaaaccaaacagtaaaagacaatttcgacccattaggaaataaacaaaaagtcaaattgactcagaaacctctttgtgagggttttgactgcaaatggaaatttttgaggaaagggttttaagaaaggaagaaaatttctagtttttttttggaatttgaaatcacaaagtttaattattgaatttaatgacatctgtttaagaatcaataatacttgctctcctttcctctctcacatttatattgtgctctctctgtccatttactgaaaaaacttgaattgagacattattatactttgctttctctctctctctcttgcaagtggttagaaacatttctccttctttaatctcctcctcctcctgtctttgtctttcgattttgttttgcttttatttgggtttctctttctttcttaaattttgaatctttttctttctttttgttttttttctcacactctttgctcagtgtagtagtagtttcagtggagtgttgatttatcagggaatgctagtgttcttatcagctagagattagtgaatcgaatctaaagtttcagacaaatgctgttgttgctactgatctacttatgcattcttaatcttctgtcggtgttcctaattctctagggtttgctcatgattctctgagatcttactagattcatgcattttcctcattctctggtttggttgattctttgattaagttcgttgtggcagaagagaaacgcttttactcatgcaaagagactagtctcagtttagatcttatgatttaacaaaaaacactcactctcctaagtgtgtttgaggaggcaatg

SEQ ID NO: 2408 - DNA, 3000 bp, Unknown
  misc_feature (1)..( 3000): cDNA_ID_3067553_gDNA_ID_1620531_Annot_ID_159727 3000 nt of promoter + ATG
taatccacaatgttactttttacttttacaacctttcgagaattcggttgttcggctttgaaatgatagtttctctccaaatgattctacattgctattaaatgagaacaacttggtctaatctttagttattgaagataattctagaattaaggagaaaattaatataaaaaactgttgagacaaatggattcattaacaagacaatggataatgaatggcttggacattacacttgaactaaggagaaaaagaagtgtatgagcaattaacaaggcaaatggctaaaggttaactagacaaatggagaaaggttagagagtattatacaaaataacctggccatcagccaatcactggtctaaataggagtgcattgttacaattgtaaaatcatcagtctaagaagaaaataataagttcacaaatagctagtcttgttttattcgcttccaaaagagtttggctagcttgtcgtcgtagttgtcttattttcatcttaatcacacaatatattaattgtcggaaaacgagactttgaagttataatagacgcctggaaaactcatttaaattaattgattagaagtagattaccggtttgcgtattactaactcaacgtgtttatctttatcagcccacaaaagcttgtactggttactaattttctacgaatttaatacaacaattcaatattcacaagacaaccacttcaaccaaacccctcactttgcattttgtttttctttatagagtataagttatgaatcttgtgtgtctataaacgttttgagatttggagacacgtacgccgagtgaatttattctaaaatttactatattgtttatttttagagattatttgaaatgtaatcgttaaagtttttgatttgttatctcattatacattctctattattttatcacagcttttcaaaatttctgatccatcaagttaattatagcaatctaatttacattttacatatgggatttaaataaaaagttaagaaaaagaaagataacgaaagaatatatttccaggtttgaccaaatcaggaaagctgtggttctatagttcttgaaactctttatatatgtgggggctaataaagaatgatcaaaatcttgaatttcaaactgggtgaatacacgttgctgatacttaaacgtgtaaagacgtgaatcactttttatgtactactactaaattcaaaggctacatacattagaaataagcaaaatcaatcaaatgttgcaaaccaattactactatcaactatgatgaatcctgaataccattttactatgaaacttttaacacgattaaacataatgttgctctttaaatgatatttttttttctttatcttatgtggtctatactctttagcaaagaaaatcaagcattgtgagatgttcgtttctacttctaactttctaagggtaaaatgcatatttttcacgtatttgtataacatagagattgaaaatcttcaaaaaactaaaagaaggagtattaaatcacaagaaagaaggtttaaatcaaaagtatagttgcgtgtaaatttaaatacagcaaacaacagaaaatatttttggtctgcggtttcgattcttcaacaaacaaacaaacaaaaaataaaataaaataaaaaaataatcaaacgactcaacatttgattaagagatgtaacaacatttatcgtatagtaattggaataatgaaatattctcaaagtcatgagggcatataaaaacgaatgcatagacagccactcataagatcacaagtaataaaaccaaacccatgattcattcgaataattgacaattaatatactttatactataaagtatatgatattcctcattttgataattcgattaatcttcaaaacctttaaactttatatactcatccttccaataaactcaagacatgccgccgggtatttaaaattctaagtaatcctttactagtttagctgatctaaataatatcttatgtttttgtttttttataagaagacatcaaaatcaaaataatggtacttataattatattagcaacatacgtggcgccgtaagtacggagatatgcgtaatctacggcctaaattttacacatcacatgtcaacgtgggacccattctacagcctgtgttcacttcaccagcatcttttcatttgtttttatttttgcctctttcagtgtttacagtataatattttgtcactgccacgtaaacctatttccgccgaaatatggaaatatatcaatatgcaaattttgtttttttaaagaaaagaataattagtatttagtgtatttaatctgtaatatacttagtaaaacctttttaatagataaattccatgaatttcaaactaaaaaaaaaaattcatccgagatacactaatttacatgttacagtactaaggtatataaacagaaataaaaatctatgatctaatgatgataatactttattagcaagtagatagaccccgtgattgtgaaatcatggttgtcgcatgaacacaaaatctactttcctttttcgtttttatcgtgaatcagaaaaaatctttcttacaatggaagtgcacaatttcgtctctacttaatccccaaattctaaactgtttgttcaaatatcccctcatgaatcatagagcagaaaaaccccaagtcactagtattattgaaaatgtaaatattcgaataaaacagagccaataagatacaaaacatgtacatcttaatacgaaatattgtagtaatttgttttacgatactaaattacaatttaaatacggttgtcaaatccacctaaacatcgatcctttataaataaccataagacaattttagccattcctgattctgtcttctccttcttccaaccgcgtcatcaatttatatttagacaacaaaaaaaaaaaaagccagagcctctccggtaatttctcattttcccgagcgatcgtccatg

SEQ ID NO: 2409 - DNA, 3000 bp, Unknown
  misc_feature (1)..( 3000): cDNA_ID_1028371_gDNA_ID_1620531_Annot_ID_159729 3000 nt of promoter + ATG
aacgtcttgaattcatcattactagtttcctttccttagtaaaaccctacatttctccgcccgcctttgatttctccccggccgttcccgccgccggtctccgatttaaccaggattgagtctaattccttctttttgtgctcattgctgtcggattctctaccggcgttacatcgaccagccagactcttccccatttgactgctttactgattcaatcgctcttttaggtctgtgtaggttttgaaattctgcggatcagattctgaatttttttctttttcgatttttgatttacgattgattgaaattgaaatttgttatagtttcggattatggtaactactttctcataattttattataattgagattaaggatcatttccatagagtacccaaggttttgattctccctctatccatctaagacaattgaattcaggattcaagtaatgtttagattcttatatgaaagcaagtggatatgtaagagaggttaccaatataatccgcaacaagtatcgttggcactagcttgatggagtgtggatacttgtaatcatctttagagtttataaaatttgcagtttttttctcatagtctcgaaaacttagttgctttcgattattcttaaactaacggcatcatatattgttgtctgttattttagcagattctggaagttgtgactcagtatctccccttcaacgaattagcatcctgcgcaagaatgtctattgcatcatcacttacttcagccacactttgcggcgcctcagtttttcctaaagcattagcctgcagctctgagttccctatcaatcttcccagcccttttgaaagttcaaagatttgtttgacttcgtttcctgcctctagggatctcaagaaaaatgctactttgaatctgactcgaaatgttggtccagtcaggtgtcatgctatgcaagctgggacgagggagttgaagaaatttgaacttagtgatgtgattgaagggaaacagtttgatagagagatgctaagcgctatattcgatgttgcacgcgaaatggaaaagatagaaaagagctcttcacaaagtgaaatcctcaagggttatttaatggctaccctcttttatgagccttctacccgtaccaggctttcatttgaatctgctatgaaacgccttggaggtgaagtcttaactactgagaacgctagagagttttcgtctgccgcgaaaggggaaacacttgaaggtaccatcttagctagtatctcattattgctgtgaaacatgttgagtgttagattatttacggaaatttttggggcatttttcagacacaataagaacagtggagggttattcagatataattgtgatgcgacattttgaaagcggtgctgcaagaaaagctgcagctactgccaatatacctgtcattaatgcaggtgatggtcctggagagcatcctactcaggtatgttgtgttcttaacctttagtttttttcaattgtcttaaacaaacattactttacatccttgtttcttatttctggttctgttactgttgtgaaggctctattggacgtctataccatccaaagtgaaattggaaaattagatggcatcagtgtagccttagttggagaccttgccaacggaaggactgtgcggtctcttgcatacttgcttgccaagttcaaagacgtgaagatctactttgtttcccctgaaattgtgaaaatgaaggttagtagcactaaacttgccaccctccatgagagaacctgaagaagatggtttggtttactcgagaacatcattgtgtatgttccttaccattttcagtgtgttcttttaatggtaggatgatataaaagactatttgacatcaagcggggttgaatgggaagaaagttcagatttaatggaagtagcatccaagtgtgatgtagtttatcaaacacgaatccaaagagagaggtttggagaaaggctggacctttacgaagcagctcgtgggaagtatatcgtagacaaggatctgttaggagtgatgcagaaaaaagctattatcatgcatcctttaccgagattggatgaagtaagttaagaaaacctctatttttcatatatgtaccgtgacacaatcctcactctttgtatttcttattgtgtagatcaccgcagatgttgatgctgatccaagagctgcctacttcagacaagcaaagaacggtttgttcattagaatggctcttctaaagctactgcttgtcggttggtgattggatagttcatggtcgttaagttaaatcctttaatggactgattctcaagcctaccatgagctcaaggaatctgcaataataaaatccgaagctttagtgatttttgagtgttaagcacaaaagctgtgatcttgatgttaattaaaagaaggatctgttggtttgttggttaaaagactgatatgaggaagagttgttgaacttaatgaataaattgatttgagctatttttcacagtttggcctaccacttctccaaaggacgaaacattacagtgaacagagaaaagttcactttcgctgtatatttttctgattatcacggaaatgcccttgcttccttccaaattggcttaagattaactgattaagcctttacattttcgaaattaggtgattaataaattacttaattaattatgattaatgataatcacatgggattttccgtcttttctctttaccgtctaaatcccaacaacaaagcctttggagaagctattctcagattcacgacaccagttcgtcacaagcttcgagcccaggtattctctctttcgctcaaaaaccctaatctcgacttataattcgatcgataaagtagaagcttcacgcaattcacatgttctctatcttctttctaactacagctcggaaaacaaaattggaacttgctgcataaagtttagtttttttattgaatttggaaggatg

SEQ ID NO: 2410 - DNA, 3000 bp, Unknown
  misc_feature (1)..( 3000): cDNA_ID_2048337_gDNA_ID_1620531_Annot_ID_159735 3000 nt of promoter + ATG
ctatgacggagccacgaatttcatttataagagtcacaaaacatttatttttctaaacctaaaataaaactaaatattttattttcttatatatatacattttaacctaaaatgtttcatatttcatctttcaaaataaacatactctcaacttatctttttttagttgtatcatcaaattccctttctcatcaacactctttttgttaatatattgtggagattgagtagttgttgtgtttatcttgattcatgatttttagaatatatattttagattttttttttgaaaagaatgtagaaactaaaactggatatctaaaaagaagaaaaaagtattgatttgttaatgaatattacagggtttttaataagatattatagtttttataattagccaaacaaaaatgcaaaaaggcattaagattaaatgacaaaatgaatatgcatggggtcaaagacaagcataaatcacataacatgaggtcattgtgagtactttaacccaaaacatataattatcttagaagatataccctatattttttttttaaactataaattttatgggggtcgactgagcccccttcttgtatgttgcctccggcacacgtatgattggattttatcatctccatgatacttcagagttctgacaatctcgaatataatgccactttgtttttttgctttgtaatggacatcatcgatgcttcaatcttcgaaaactgaaaataacgtccgtctgttttcttccaaggtcgtgtggtagacatgacatcttttcggattatgaacatgagaacagcccttatcaattgtttgaaaacaaatcgaagatactcatatttcggatgatgtctattgatcgtccagaatagattctaaacctctgcttccaatacgacgagaaggatctccgatcgaatatggaaacgtactaccaacgatgatcccgaataattcatgttgcaccacaaagcatgaaacatcttctttatttaattcgtacgacaacattctattagtgacagaaaacaacaattaactttgtagctgttaaaaatactggtaaaagataaaaaaaagattgagccgagtttatctgttgtatatactattctttttgatagatacatacacccaagatattttatcttgacatgtgatgaagagatacggattatcctctgaacaataattttctaaaaaaaaagaagcaaatttttgataacttaacttataaatccacctttttccctaattagaagatggattctggctgattttcttggattagtgttagacagggatactactatttcttaacaatgagatgaggcaatctatcaaggaaagtaaaaaaaaaacgaaacttaaccctctttttttctttttttttttatgttagaccaatcacttcttgaaaagattccgtaactagacgatttttatatatatttttttattttttaatttttaatatttccacttcaaatataaaaagaaagtatatttatttgttatagaattatgattagaatatgaatacaaatgtaaaaaaaaaatgatatagaattctatagaaaaaagaaaaaaccttataagctagtcataccatttcatttcattatattgacaattaaaaaaaactgatcatactatgatcatagtatgatggcggttgagcaagtatgcccccatcgtctagtggttcaggacatctctctttcaaggaggcagcagggattcgacttcccctgggggtagggtactacgaaaggaagttgatcatggattatccataaagttagaatagattcttcctgggtcgatgcccgagcggttaatggggacggactgtaaattcgttggcaatatgtctacgctggttcaaatccagctcggcccaataattagctgtctacataaccattttttttttttgcataaatgacagagaaggggtaagaaaaaaaggtcaaatttcagggtatagggtatagttcgactttacttttttttttatttcttatgtttagttacttttttttccataaaaaattccgatcttgatcttgctaaggattccgatatggatcctttaaagagaaactttaatgaacagagtcgataaaataatctatttgcttctgttcaatatataatgactgaagctaactttggttggttaatccgatcagttcatcgatggtcgtatagtttagttatttaggcaataaaaggtaggggttagaaattcagatgatggtacaaaaattaaaaatagatgccaatacgtatatttttcttattaaaaatattatatcaaataataattaaaaaaaaatatatatatatatatataaatatacatagcacgcaaataagaaaatgcattattgaatattgaagaaactatgattactctttgacaacaaagagaaactataatcaattaaaaactttaattagaataaacttgaaagaaaatatgagtaatacgttttcttagcagaaaaattcgttttggaagagttgagtgtgaatatgaggttttttttgggtgtatttactatttacagtaattgttagaagtcatgcttatcttttgagaatttgtatatacataattcattcataaacgttaaaaaaaatgtgtttatatgatagcttttaatcaattgatgtacaatgaggtaatgaaactcagatgagtcaccaactaagttgagaacttgagatggattcaatagtcaatgatgctaggtgaaataacgtaatcaaccaaaaatattattcaatttttaattcgcattcgcaaacacgaggcacataaaataatattatcagtctcaataaaatcttgattcttgatcttgagcatcccaaagcattattaactaagcatgtatctcccactaaggcacaaattactaaccatataagtctcagtactctctgttctgcaaacttcatacacaaaaccaacattaagag

SEQ ID NO: 2411 - DNA, 3000 bp, Unknown
  misc_feature (1)..( 3000): cDNA_ID_3409188_gDNA_ID_1620531_Annot_ID_159737 3000 nt of promoter + ATG
ggaacataagaggacacaagtggtttgagatctctgtttcgaacttctccaagatccacttctttcaaggatccatcctgtccaatgatgaaagctgtgttgtgcttcctgtctttgctttgattaaaaaccacagcgattttcttctcttcatcaatgaagaaacttgtagccataaacgaaaacataaaatcgttgccagtgagtggtgtcatatccactgataagaagaccttgctgccccacgacaacatgttgggctcaatcttagttgtaacccagatctccatttctaatgtatgctagtcttcttactatacaagtctgtgtcatagcctatatgaaacataaatctagttgagctaacaaacaaatgcggtaaaaattagtctatccaaactcattgataaacattggttaatgaagagcttctttttgctagattaagaatccaagattggaagtttactgctaccactataatgactagaatgtaaatggcaataaacaactcattcagatcgtagtggaatgtaaattggatatatttcaatctcaagcttatcccatcccttcccattttcatatttcaaaactgcattaatttctccattcaattttcttgcttttattttattttataaaacatttagattcttctgtgggcgcaagttcatgcatgcgccaatagagtcgccaatgcaatgtagattagaggtatgggtagttcagcttcttaaatgcaactcctcctcctttctctcttttttcctttataaattgctcttttctcacactccacaccactctccaattcaagctctcaccccataaatagacaaattcaaaatatcttataagagaaagaaaaaaaatcaattagtcttccatcttttcttcatgggcatttctaagatgattcttctgaaattcacatatgttgtttctttctggattacttgcgtgatcttcaaaatgtcaagaacgataaaacgagctttgttgggctcattcatcttcattcttgcttccggtaaatttacaagttatcttcattttcttatcatttaatgctgtttgttcccctttttttttttgaattctatagatgcttgctaaactaacgtacttttaaagatgaaacttgagacgccatctcattggttttggatatatgtacttcattgacatgtacttacctctcatatatgaatccacacatatgtatactatatatagttgacaacttgacatgagtgtttgataaaagaactaaaacatattaacaaaaagataaagagaaaattcttgaatggatgcgatgtgtcaagcaacttctacttaccataagagtctgatgtgggatcttcttttccattttcttagttttttcctttaacctgaattacttgttgtctatgcattccttaattgaatttaataacttatcttatgtatggattctctacccttaaattctcattctttaagaaaagtatatctttttgtcaacaatatcttcatccaaattcttagaaaaatatactttctttttggtatgtatcattttaacatatcacattgcattgttttcattccacattccatgttaaacaattttataagatcacgaaatgtcattaattttgaatgtagctagtgttgtggtagccgccattgtaggagccatcgaaggtcacaccactgacatcggatttcttcaaggtagtgtgcttggagtggtggctggagttatcactgcggtccaactctttggaccggtgctacatagtgatcaacctttgtctaaggtgattgtgactctacatataaccctagaatctaaaaaataaatcactaaacaaccatatgtttctagttaaatagtgggagtggtcctgtaattaagaaagctagctaaaaatgaatggtattctagtaactagttatctgaataaaagatgatgttatggtaacaatagtttggtgacaaaaatatgaaaagagtggcaggtggctttactcaggagagtagtgaatgggaaagccattatgggattggttagaccttttgttctcaaagcatatcaatggcaagtaagtactctccattctttttgttcttctgactttttttcaactacgtctttttatttgacaagaacacgatattttctaacgtaaaatcagaaccataacaaaaagcgttaaactaagtatattttacaaaattttaactccggtaatattataatacaaaatgcagataatagcattggatacaagttacatggagagttcaaacttatacgatttcaatcatgaaaaaaagggactatcgaagagctctattcagaacatcccgatgttctacaaccgttcagaacatcaaacaaaatcgagttgctcgatttgcttacaggtgataaaaatgtaattaattagaatcatctaggaatcagattttaatatatgataataatgacttaaatcatatatatttctaatgttcatttttggggtgtgtaggattgggaagaaggggaagtaggaagaaagctagcaagatgtggccacacatttcatatgaattgcatagatgagtggttgcttagacaagaaacttgccccatttgtagagaccatctttcacataacacaacttctacataacaatatgttgtggataaacttcacaaagctatggaccgacatgacccaacgggtccaaatttttaaaatttgcaatccaactaaactacacaaaaataaaaattaaattctcagtaatatatgtacctaactaagggtaaagtgggaaatacaaaaaaacatttcgaagagaaggaagaagacaaaagaagaagcacgagaatcatctgcttaaaatccaatcgcatcgactcagtcttcttcttcttcttcacctacctttctctctctctctcgtggtccattcgctattctatacttcttgtcggcgccggagagagtgagatg

SEQ ID NO: 2412 - DNA, 3000 bp, Unknown
  misc_feature (1)..( 3000): cDNA_ID_2048320_gDNA_ID_1620531_Annot_ID_159741 3000 nt of promoter + ATG
tgttatagtatcctacttagcaaagatataaggatgttatctgttcatcattttgaaccgaatccacatttgtgcagaattgatggtcaaagaaattgcttagaggtgtttttgcctagccggactgcccaagtcagctctctctctctctctccttcttttgctctctctctatgctatctactgccatgagaattgattcatagatgcattcaacctgtcatatgttgattcaaactccatttttatattctcaggtttacaagttgacccggatcctccgaatatgatcctctctctttgtatgccacatacaaacaccaagcatgtttgtctgagaggctaggtatgaacccaaggtcactacaagaggtgatgtaatattaacatggctcgtccaagcgatgatggcagttaagaagattatcaatcacgccttcacagaggtgcaataaaagaacaagcagttcataaagagaatcccaggaagaccaattcatctcgtggtgtagttcaagcaaacaaatgttttgtatcaaatcagctgcatcatgtaacgagaagttaacacatgaacctcttaatggtgtaggccgactgatgttatgtagtaaatttctaggaggtgctcaagtttgtgtatttaagaaatctttggtagttggtatatatagttttgttaatgcatttctcgacaaaatcaatgctttccatttctcgacaaaacaattgctttccacaagagaagtcatccagtagcttagatatattgtttacctagttaaaaaaagtccaaggtaaacggtgtataaatgagcttaagcagaaggatgatgtgctagtgaatcatccaaaggtgcatctctgaaaaggtcatcatatgaaacaggtaccctgatcctctcatgaacagatttcctttccttttccggtttggattcagtttgctcagctaccggcataacacacatctcgctcaccagagcttcatcagcagatacatttccagaggcaagtccttcggaggagctaccctgatctcttttaggccctgattttggtctcgtgtttggttgcctaaattgtttctgcaaagtttgaaagcgtaagacaaagagcaagagagaaagaggtgtaagatagaaaacagtgatataacatcttcatgactgctatttcacatttaagctaagaaagcaggatatatttacgaatgttgtgatatgataggcaagtacaaacctcaaactccttggtctttttcattatctctctataagcttcaggctgtctcgctttgatgatgttccacaatacaccaccacttgtccgtttcctagtgccatcagcagtcacctgacctccacaggtctcaattgctaccacctaagaaaaaatatttcttgccatcatcaatcatatctttggcaagaatcttgcgaagtggaatagaaatattcttaaccaacttaaaagcatacagtgggagtaacagaaggatcaatccacaaagcagtagtgaatatgtggacagtcatttctcgatcatgaaaataaggttgacactgttggtctcactcaaaccacttatggtctcgatcatgaaaatatggttgacactgttgatcataaaaacttcatctatccacttatggtttcatacaaattgtctagatcaataaaaacagagaaaagacagatgtgcacaagagaagggaaaaaaaaatcaacctaaaatatgaagttttaccatctacatctcagcaaaaggcacaagcagcaaaaaaggctccactaggaatatcttgaactgcaggtgaaacaatacagctaaacaagattgccactgctggtcacacacagatcaaacaaggttttaactggaataacacagaaaacatcttgaagtagtgtatacctcattgacaagatcacttaaggcagcaattccgagacacccaacagctgtgtatatcatgtaagacttcttctccttaaggcgtctacaagtatccctaacaaacctgccataacaaaacatcaaacaatgagcaacgtttcaaccatagccaagatcaggcagctataccaagaatttacacaacaatattagcatatagaaaaagaacacttaccagtctacactcatgggtttgtccatcacagggccttttctctttttcttcttcttcttcctcttgttcttgtttgtctgttgcagtccattcttctcacccaaaatcgcctctttatctttgactccatcaccatcatcattttgcctctctccagaatctaaatcatgatccacaacaatctccccttcttcaacatcaaccatttcaacatcctccaagttttcaaatccgtcttcttcatttatagcatccaacaaactctcttctccctccatgagatcaaaaacctaaaatcccaaccaaaaaccaaacacaacttcaaaatgtaacacataacaaaacaacactcgcacaaaaatcccaatccattcaaacaaaaacttcgaaaccatttacatttacaacgataatctcacaagaacatccaataacacgatttcaaaaacatgaatctctcaaaaaattgctcaatacaaagtagatcaattagaatcgcgaaataaacaaaataagaagctaaccttgggacttcctttgctcttcgatcacccacactcgagattatcaacaaaacacacacttcatcgtcatcgacccaatactgagcaagaaaaatctcagctttagggtttaggcaatttttgccctttaagaaaaaagcttaatccatttcctttatataaaagtttttaattatattttgccccaatataataaattatatatatatactttccttatttgtcctgaggactatagtcaatgaaaaagtcaaaactaatagaattaggaaaacaaaaagaattaaaaggaaaattgaaacagagaagacttggcgtctctttagattctctctaccatg

SEQ ID NO: 2413 - DNA, 3000 bp, Unknown
  misc_feature (1)..( 3000): cDNA_ID_2048295_gDNA_ID_1620531_Annot_ID_159748 3000 nt of promoter + ATG
ttcataagactttggtacgtaaaacccattgccatgcattccattccatggtttaacgtcaagatcttatagcttctcatcaatgatgtccaccaccgaaaccacctccggcaccggctcccccaccgaaaccaccaccaataccgcttccgcctcctcctccaaacccaccaccgccaccagctccacctcctcctccgagtccacccccagcaccagctcctcctccaaaccctccacctgaaccaccaccagccccaccgccaaatcctccaccagcaccaccacccccaccaagaccaccaccgctcccagctcctccaccaaatcctcctccagctccaccaccagctcctcctcctaaaccgccaccgcctccagctcctccgccaagaccgcctcctccaccaaagccgcctcctccaccaagaccactgcctccaccaataccgcctcctccaccgagacctccgcctggatggtggaagaatgtcttttggtcctcgagaccactcttcagcttcctgttagcgacactggcaaatgaagtgaaagcaaaagagccgacaagtaaggcaacaagaaagagtgacttggaagccatgtcgatttttgtgttttgcgtatgtgatgatgaggaactctatcagccaataaggtgtttatatagaccatttggcatgagctgaagaatcaaacaattgaataaaaagagggagagagtaaagttttagagtgagtaattatcattaattcatctgcccatctaattcatgttggcaaatttaatgcaatccctaactaccagtgttgacaaacatgttactcatccacatgtagtagaccccttctttattctttgtgttagtactacttaatagtactcattttcttgcctttcacatttaaatttggctgcagtatttgatgaatctgagattttagattattcttatgtccggagaccggagttatttaatgtttttgttaatgtgttttttagtacattttggtgtccaccattattaaagaaaacaacaacaaggtatctatattttcatgtttacgataaataaactttacacattacattggaagagaataataagtatgaaataatttgttttcactacatttcttgacttggacaaggttaatttaaattcgggatctgcctcgcactggcccatggtataaacaatctcgttgtttaatgcatttacgcgagtaaaatattcatcatggtgactgtttgtgatttttataggaaagagaataattatgcaacaagccgatatgttttcaaaacttggttctcttcttggattgaatgctctcttcttaattacgttctcatccataatttgaacatctaattaataataaaattgtcaaagttccgtggtcccagtagactattggcaataagttaatatatgaaaataacttaaaaccaactttaagtcaaaatttgatcttaatacgatttaattagatgtctgaaaaaagtttgcgtaatcaatagattgtaaatctagctatgattagaattgttaacacattgttctataactcaaattactaatataaagtaatcgaatgttacctattacttaagataaaattttacggggttaaaagtctgaaaagttatcatttaaatgtggctaatagttatacatgaagacatgatacatggtacaatactacaattacaatgaccttggatctatataccatagtttgtctcttgaaaccaaaattatggagatttttattggtgatctcatgtgttttactaatcatccttttttcttacacaaatcaattatccgaatatttacttacgatataaaaaaagtcacgatttcaaataagttttagttaggatatttaatatctatggatgttttaaattatcgaataacaaagaaattatttaataatgattgattttccatattgtatatatatatatatatatatatatatatatatatcaatattggttatgtatgatatatacataattttattaacgacttcattttatacagatatttatgcattttttcctttaggacatactccacatgtaaattttatatttcacaattatttgaaatttagtgaatttaccaatcgaatgaatatattctgtaaaattggttgctgatggaaattcgaagaaaacaaggccgttcaaaattgattgaaagtgttaattaaaggatgtttcatattggtcacaaatgattgtacaatcaaattattagtcttcatgatataatagaaattctataaattaatatttttaaaattaataatttttgtcggtcccaaatcagaacaatgtaaaaattaaccaaaatcgataagataataaaataataattttttttcaaatctctatataaaattatggtctaaataatatcataaatattaaacatacattctaagacaatttaatataatataaatctagtgttgtttgtctccgcttaagtgtttacggtaatgtcgtagatataaagacataatatcttgcaaaaagaaagttaataaagtaaaaaataaaaatttagtattgtgtcttccataaatatttttaaaattaatattttataggataatataactataaattaataaattttatgatcgaacattattaatttatagagcttccactatataaatatattcgatgaaaagaaaataaataaatagaaattctaatttctgcaatcggacggtgagaaaacgtggaaatttaattcgacggtgacaacgtttgttcgataattagtttttttttttttgtcgattgtttttctttttcttaaacgcgatatttaacttatctatataaaaaacaaattcccatcaaattcggagactttggattctctgtttcgcgcgcttcgcagttcatcttccccaacgactctgctccttccccttctctccatctctctctcgttctaatcttcgaca

SEQ ID NO: 2414 - DNA, 3000 bp, Unknown
  misc_feature (1)..( 3000): cDNA_ID_2048304_gDNA_ID_1620531_Annot_ID_159745 3000 nt of promoter + ATG
taaaaagcttaatctcaaatatttagaccatcatcttcattagttccatcaaaaatcatatgaagcatatgaaatttgattcgtcgggagaaaaatcttaaaactcgcgtctcccaaaattaattaaatcttgatattttcaaactttttaattattaagttttcaaagtaaaaagacaagatttttcgacgtgagtttccattgagtttccgagagttttcgtttccgaaacatttcagaaacgagaaacgcattgtggagagagtttccatgcaacatagtgtccaagtatattcaaattaaaaatacaaagataaactttattattctaaatacatttttaataaaaatcgaaatcgacaagatcgattttgaaatcagtgaattctacgacactaagatttgaaatctatgtagattttttaaattaaaatagaaaaactattaaaccttctttacttttgttttttctccatatatactacaaactaataatataaacaaaaatactagctgtgaaattgaatgtttctggtgtgtcatgagtttctcattcaacgatcacttgatcaaagaatacaaaattttgttaatgccaatgatttgcgtaatctatatattaaattctatttgaacattcaaacaatcgctgtatatagattccattgataagatgcaaacatatatgacattgacattttatctgtctgtgatgttgatccggtcatcttcatgctgttcagggatcttatgacacatatgtatgtacatgaacatcgatctgatttagcatattaatatatataattacaaaatactaaaattatgaaatcatcaaatactcaattaacaaaaaatatatttttcaacaaaatcaactagttgtgattataactttattttatgtttataaaaagactataagcagatatatatataaaaaaaaaaatgataaatcacactatatatgaatttactgcggatatatcaatccacctaagaattaatgaattatgatctccaaaactttgttagaaaaaaatatattatggaaaaggaacgtgcaccatctttatcagttacaaatcaaattccaaattttagctaaaaataattgattttcttttaatattccattcgtattatgtggaaacgtaatgtgtctatatggactccatgtctagcatgattaaatgaaatgaacttttgccattttaagtcgtgtctcccaaattgtctttctttgtttgcttttttatatgcatcgttcttccacaaatcctacgcaaaagtttgattgaatgcaattctaacaaattcagttgtttgttacaaataaatgaaataagaacaatcaatatttgttgacaaatattgattgtttactgaaagtattcaagtaaatcaaataaacagtaaattataaaaacacgttattcatgtgggttcactttttttttttaatcttttttaagtttggtcaactaggggtgttaccgtgttatttatatgtttttcagtgggatatcccacactaaaatttattgtcatttttataagttttcaacagctatagaaatttggcaatagcaaaaaatgaaagggattattgtttgaaatgcattttttgggaaacaagcttaccaaaataccattttgaatagtttatggattttttcatttttatacatttaacaatatacttatttacaatttttccctgcaaaaacatgtactttatatcaaatactaatttttaaaaattaaaaaaaaaaacgaataaactcaaaaataacgagtaaaaatgtatgttaaattataattttttttgcctgataaatgataaaattcacaaaatagtttaagaaggggcaaatttaacgaatgtcactctacaaagaggcatacccgcaaaagtcgatcattggtcaatactcaaacataaaaaattacaactagatgttgacagcaagaaaattactcactagcttaacgtcatcgaagtagtttttccataccactgactcaaatgtgaaccggtttcttaactggtgtatatatatctagaatttttctttcttatttttcgaccgaaaattgtaagtgctatgtttttatgtaacatatattggctttcacttgccgatttttttatttatcttttacttctgtaaaacctagtttacgtttcttgcttaaatcttttatttattttaaacatatttctcatttaaatcactggaattgatgcgtcaaaaatcactataattaattgaaatcacataatcgcttagtcaaacttgagtatcattcaaaagccttatattatatttagctttatatacaatttgttccaggctcttgtcacccatgtaaaaagcttcatatacaactgtatgtatatatatatatatacacatataacaaaatgtatatattatatagtatatgtctcttcgttcacatgtacgatattgttttttagaaataatgtaaggttaacgtatatataaaaaatggaatcaagtgatgaggcaccagttaagaaaatacggtaaaaaaccaattgacgatttttatcatgaactgtttgaaaaaaacaatacaaaaacctagcctaaaataattccaaattgtttgctccaacagtccaactgtttgaaattaattaattacacacagttagactactgtctaaaataatttattactaatcaatcttgtaaaataaatttaaatatttccctaggcattctaaacctgacaaattggctgtagaaaataccataaataagaatggttcaaatgaaaaagtattaaatgtttaaacaaacaaaaaaatcttttttgttgagacttgcacgtcatactctgttgtttcttaatctttatcccacatataatggaattagccccacgaaacttagtctatctcattaatctttctttccttcaatctgtctgttgctctctctctctctcacacacactgatcagcc

SEQ ID NO: 2415 - DNA, 3000 bp, Unknown
  misc_feature (1)..( 3000): cDNA_ID_1692421_gDNA_ID_1620531_Annot_ID_159740 3000 nt of promoter + ATG
ttttctctttatctttttgttaatatgttttagttcttttatcaaacactcatgtcaagttgtcaactatatatagtatacatatgtgtggattcatatatgagaggtaagtacatgtcaatgaagtacatatatccaaaaccaatgagatggcgtctcaagtttcatctttaaaagtacgttagtttagcaagcatctatagaattcaaaaaaaaaaaggggaacaaacagcattaaatgataagaaaatgaagataacttgtaaatttaccggaagcaagaatgaagatgaatgagcccaacaaagctcgttttatcgttcttgacattttgaagatcacgcaagtaatccagaaagaaacaacatatgtgaatttcagaagaatcatcttagaaatgcccatgaagaaaagatggaagactaattgattttttttctttctcttataagatattttgaatttgtctatttatggggtgagagcttgaattggagagtggtgtggagtgtgagaaaagagcaatttataaaggaaaaaagagagaaaggaggaggagttgcatttaagaagctgaactacccatacctctaatctacattgcattggcgactctattggcgcatgcatgaacttgcgcccacagaagaatctaaatgttttataaaataaaataaaagcaagaaaattgaatggagaaattaatgcagttttgaaatatgaaaatgggaagggatgggataagcttgagattgaaatatatccaatttacattccactacgatctgaatgagttgtttattgccatttacattctagtcattatagtggtagcagtaaacttccaatcttggattcttaatctagcaaaaagaagctcttcattaaccaatgtttatcaatgagtttggatagactaatttttaccgcatttgtttgttagctcaactagatttatgtttcatataggctatgacacagacttgtatagtaagaagactagcatacattagaaatggagatctgggttacaactaagattgagcccaacatgttgtcgtggggcagcaaggtcttcttatcagtggatatgacaccactcactggcaacgattttatgttttcgtttatggctacaagtttcttcattgatgaagagaagaaaatcgctgtggtttttaatcaaagcaaagacaggaagcacaacacagctttcatcattggacaggatggatccttgaaagaagtggatcttggagaagttcgaaacagagatctcaaaccacttgtgtcctcttatgttccaagttcaatgcaacttgaatagtgcattttacaaaacccataatctatttcttgcacttttacttgtttctttttctcttttgtcatcttcttctttgaacaatatatagaaatttaattcgtctctcatacttctttttgtttgccatatttgacttcgttttgttgcctttagttgtttaatttacttcttctgttgtagtagactcattgctaaatctctgtttctcttctaacatttgttatgtttgtgttcttgcaaataggcagctctgctgttgtaatttatgtagaacagacaacagagtaagctgcgtttaactttgaaatttgcaagtacgcatgcttagatttgagtttcccattttaacttttgtccttgtcagttttacaaagtgcaagtggctgctaggctgacacgtagaagattgaatgatttctcggagttaagttttgtcctttgatactccctggtcttaaagcatacttacagagtaaccgtagctgaatatcaacctcaagcaagtcatggaaccatacaccttccttcaatccaccagttttgggctggttagcgctctcctagatttatgtttcatataagctaaccattaaaagtttaagagaagcttgtgtagtaagaagacaagctaaatgagttctcagtagccttaattcttcttctttttttgactaaatatgagcacttatagatgaagactagtaatgcattgattatgagaatactaaaaagttaagatgaataatcaaaaaaattatttggttagtattaaaatcttcaaatgaaacttagtcttaagatttgttgagatctttcatactatcgaagtcatgtagagtggaggtacgtagccaggcctaggagaagagaagagaagagaaggagaagcaagctaagaaactgaaagcctaaaaacttttgaatgttgatgattaaaaaagaatagatacatgctaacagcttatgcatttttgaaatagtttttgttaactgtcgtgtagcttgtgtgtaaatatgtcgacgacaagtcaatgatgtcacacacactacacaaaacaaaacactgcttcaaactaccttcaacttcgagtccattactataagcaaaagtcccaaatcaaaacatcaattttcttgttcttgtcagctactcaaacctcaacatgttacatatattttttcagataaaacaaatcattctcatcgttcttatctgaccaggaataattcaatggaagtatgagtttgactcggtttccttttgatattagtcgtacttttcaacattttacctagatagagccgtcctcttataattattcatcatttcatgcttctcatgttacatttctgcaatttttcaactctttgattttatataatcatttgtttcctttcttaatcaaatccatctggctaacattatttagcttgatgcaattaaggtatattatctaatgaggtgatgcttccacgtctttatattattataatccctcaacaattttaaaaaaagatcctgactttcaattttctctcttgtttcttcttttgatcatcttcaacaaaaaaaagttacgatctttctctccgggtcatcggaatttgagctagcttagctaaagttccgatctttcctctctgggtcgtcggaatttgagctttttaaaatc

SEQ ID NO: 2416 - DNA, 3000 bp, Unknown
  misc_feature (1)..( 3000): cDNA_ID_3067544_gDNA_ID_1620531_Annot_ID_159736 3000 nt of promoter + ATG
atgaaactcagatgagtcaccaactaagttgagaacttgagatggattcaatagtcaatgatgctaggtgaaataacgtaatcaaccaaaaatattattcaatttttaattcgcattcgcaaacacgaggcacataaaataatattatcagtctcaataaaatcttgattcttgatcttgagcatcccaaagcattattaactaagcatgtatctcccactaaggcacaaattactaaccatataagtctcagtactctctgttctgcaaacttcatacacaaaaccaacattaagagatggcgagccactacagaaacacaagcgctattgcttatctattgctttgtctcttcattacatctgccactgcacattccttcatacgacaaatcactgatgacctcaaaacaaatctgcagcgtatgccaattttctatgttcttttagttgttataaatggaaaacagatcctttgtttttatttctcaaatgctctgtttttgtctggaaacagaggaggtaggagcagaaccaatccaaaacctggacgtaggacattacttacaagaaaataaggagatctcatcacgtgattataaagtatcagcttcaaacgcagtgaaaggtttgagagatcgtcctccatcgtcttactctctcaagatggagtctttcaacacgctccttaagtcaacttacacggagaaatatgtatctcgtcccttttcagttggtggatacaactggtatgttggtcatctgatctttatttgcttgaatctataatcttacataccaaatatattttgatgaatctcaatatatacaggacacttgttgtgttcccaaatggtaacaagaaggatagtggttcagggtacctttctctttacgtagccatagacaactcaactctcggacagcaagagatttacgcagatctaaggttttacatctttaacaagaatgagaggaagtacttcactatccaaggttcttataattttcaatcaagaaatgtagtgttttagcaagaaagatactttgtgcatgatagtaatatgtatctatatatcgactggtctttgttatataatctgtagataccgatgtgtggaagtttagtgtcttcaaaacgatgtggggattctctcaggtcctccccattgatacattcaaagatccgacaaaaggatatctctacgatggagatcactgcgagtttggtgttgatgtaaccatgccttctctctacgaaaaatcggaacttttctctgtcacagagaattttctaaatccgagattcacctggaccattcggggattctctacgctgctaaaaaacagttacctatcagaagtgttctccatcggaggaagaagttggtgagtcaacattatttcaaaataaaaactctggtggagtagtaaaatggtggtaagtagtaacaagtattttatatgttgattaggaatatacaaatcaatccaagtggtcttggtacgggagagggaaaagctttgtcgatgtatcttggccttaatgtgaatgagatattcagaccatatgagaagatttatgttcgagccaagcttcgagctcttaaccaactcaatctcagtaacatcgaaagggaacgtaagtaaatgatatgtgttcattgatgggtatacataacatctcatcgcaatgactaatgagatttacttcttttttttgggcagtcgatatttggtacaatggtccgggatatggagaatatagctggggtttccctgagtttatctatttcccttatctcacagattcatcaaagggtttcgttaagaacgatgtgttgatggttcaagttgaaatggaggccatttcttcaaccaagtacttcccgagttagattttctctaagcaaagaacttgtacctacctccatgtgtttgatttgttatcaaatactaataagaatttgattatgcatttcaaatacaattgtttctttttcttcagcatatcattatcaaattatcatatatcttcttgaaagatcaaatagtcttcacccaaaaaaaaatccgccaatccaacattcggctcagttttgtttgttttgatacctaagaattaaagaattaatggataatttatgatggaggttagagtctactgctaaattactatcactaatgtattgccataaacaataaaataatataattgctaatcttaaatctcaacttgactataaagataaagactaaatcgatcaaaaaccaatacactagatgaagcctggcttttggtgggggattttaatgaaattcaatgtgaaaatttaataagaacttttgtgaaaagaaaattggaaaatataagtaaaagaaaaaggttaaataaaactatctaacatcataaaaagttaaagaatagagcaattggatctagtgtattggtttttgatcgatttagtctttatctttataatcaagtggagatttaagattagcaattataatattgtttattgtttatggcaatacattaatgatagtactttagcagtagactccaacctccatagaaaaaaatccattgattcttttattcataggtatcaaaacttacaatgcatttgaacctattttataatttaattcaaactactgtattcagttccaatcatatgtttttgaatgtttttttaagaaaattgaagttcatataggatttataaaaatttattcatctgatgtagaattattttatggtcaagttaatgaaaacttcaagtgagggcactcccaaacttgagatggattcaaaagtcaacgatgctaaatgaaaccatcgaatcatgttttgtttttgaaacaacattattacgtaagaatctaactaatattcgaagactccatcctaaagcatttctctatctctttaatatataagttccactaacctctcttctcttcacttcattcacataagtcataaccttgaaag

SEQ ID NO: 2417 - DNA, 3000 bp, Unknown
  misc_feature (1)..( 3000): cDNA_ID_3067546_gDNA_ID_1620531_Annot_ID_159730 3000 nt of promoter + ATG
agagagagtgatgatgaaggaggtactggggtgtctctgactaatttgattagtttcaccaaatctctttttttctttttgggtgcttcagattctttaagtatcatcgaagcccaacaacaaatatacaaataaagcccatatacatacaaggataaattatttaagggctagattagaggtggtcaaaaccttaattatgagattgtagtcgatcattagtacttttagtaagttttaatatagatgggcttcttccactcccattcccttcacatggattctgcattctttgtcttttttctcattttatattttattacatagaaactgttacatcatattttatttgattcgttagtttgtttcttgttattgtgataatgatctcacttctcagtgaataaaaaaaaagatgtatacaatacgatcttactatctaaatgtgtactatatgctatgcatgtttatttttttttatttaatgtctttctggtttgtttaattacagaagaaaattggatggaaagctcaaagatcatggtttccaatatacgagtatataattttgtatcatttgtgttttaaacacctgatcttgattgcgttaactctttgtctttgaaataatcactatatataggtgtctcaatggcatcttctttagatcttttttttttgcatcttcttagctctgctttttttttcctttaatgtttcttatagttatgcgtctgtgtttatgcgtggaacttcaaaaacttgttgattaaatgtcaaaaaacaaaaacaaatgttgttgattactttaaattattatatttacgctacgcatatcgagtagcaggaaccaggaagtggtcttttttattctttgactgtcatttttattaggcaaaacttcttgacggtctaaagtcttaacctacgcaatttaacaaaaagtcttcgggtggtacttaaacacaaactcaatagagctcattaataacaaaagaatctcagtttaatttcgtttcaatataatgattgaacaattgtacaaaatgaaaaaaaaaagagaaaaaaaaacaaaaaaaaaattgtacaaaatggtgagtgttgtatcacatagcagccgaaaataattaataattaatatatgtttgtgtaacatgtaacacaaaaagttgataatagacacattttattgatcgacccattgtattgattcgttaatgtataatattcaactataaaaaatgaataaagagataggtatataaagcatatttaacttaattatgatgagatgattagatttttcgtctctacagtggtatgaacaccaagattctataacttttacttatttactaatcggttcgaattaacaaataatgagagcaataggtgagagagatcgatagatcaaccaatgttatacagatcagtttcatttataaaaataaagttcggggtatgtgggtcaagtgatcgatactacttaaataaaaatgctatatactagtagtggaataattcgatgtaacaccaacctcaggcttttgacttatatgaataataatggtatattggttgttgaattgcatttgaatatatcatataaagcatttgtagagtaaattgggtaattgatgttaataagatcagatgatgatagtagaacaaactatgcaaacaacggcaaatggacagataaaaaaaaagtgattaatgtagaacatgagtttgaatagtgatttttaatggtataataactaacaaattcaaaatatttacttaaattccaaatacccaaaaccttgtaactatttttaacaggaaaacaaaaaccttagaaatatttaaaactttaaaaaaaaaaaaaaaaaaaaggtgatggcaatggaaaattatggaaaggtgggagacgtgagtgtgtgtaacatgagatggcctaaacgagtaattgaaaattgggtagggcatctttggttcagagattctgttccctttggttgcgttcacactttgaagatcccttccccaatgccgtgttcacactacttcacttcactcggcttcttctgcctagctcggctccatccacactttttttttttggttatatacatttctaattgttctactttacgttttatttacttacataagctgagaaaatatatttttttactgttaaggttatgatcgatatatcttgaaattgatcataatttgttgtcaatgaccatttcgtagatttacacgttaaacatttgttgtataacactttaaaaattggtaaatatatattaattttcagtggtagatagtctagctaataaatgtgtatttcttaaaagaaaaagaagaagaaaaaatgggacatctcattatcaaaggtattattacacgcacaagataaatgacttcttttttggtatacgtttacgtacctcaacgttatacgttttatttgtctacaacaaaacatagcatcagagtattggacctttgagacttccttctcattattcatatttcacatgttttcctttagccacatatgaactagaatctttcgtgctgagttctgttttcgttagacgtcacgttaggcaattattatacttcttcttctttttttttctcttatttcatgggcattttatttccaccggaaaacaaagataaaaaatattataatcagcaaaaatatccaagccgagctgacgagccaataaggacacgtggaacgttggaaattgaaaaggacaaaagctggtgacggtgagttcaacaaacacatgtccacgtaggactaaagtactctgaaatctgacgtggcatattgtatatgttcttatcattgatcctaatttttttttaatatattcactgctcctgatctttatctccttttatgattataatatctcaccagcttctacctacgttatatatatataagctcttttacgggttacctccaaagaaaaatagaaacaaaaaatg

SEQ ID NO: 2418 - DNA, 3000 bp, Unknown
  misc_feature (1)..( 3000): cDNA_ID_3067557_gDNA_ID_1620531_Annot_ID_159725 3000 nt of promoter + ATG
ggaacaacacacacaatttcttctttgatttgtctgcaaaagaaaaatccccaaaccggatcttaaagatcgtataaaaagggaacagttgatgctacagtatttgaaatcattgtgtgttcatcactttattatatcaacaagggaaaagaattggagatgggtgtctttgaagcttcccagctgaaaagttgagctttttcatcttttcttcacaccatagaagttgctctttactgattttcgacatcctcaaaacccgtgttgcgagtttgatgtcaatggctgcaaacaagagttgaacaccttcccatgtttgaggccatgatttctttctcagcccttttgtcttctttgaaagctcctttgctttcacccttttctgcaaaagttcctctcttatgagacaccaaagaagcatacgatagtaataacatttgagtacagagaaatcgtaccttatcaatggatgactgaaccagtagtaaaggagttgtagaattcacatggttgttgttgtggttcccaaacaagtgaatacccccatttggtttcttcttatccattttcaagaagacgttgaaagtaaggatcgagctctctatgactttgatgagatcatcagcgaggaccatgaagcctgtatctttctccatctcctttttatctgaccctgatatgttttgaacataaccaacttcaagtgttactactacacataaggttttaagtcgcgcaatgtatgagagctgagaaatcaccttgaatcttaggagcttgaagtagcttaggcattgcatttctagcacgagcataaagttccgatcttgagccttgctcaaacggttcattctctatatacctctgcaacaagactaggaattgctgaaacagttgggcagtatggttgtagcaagtcggggtttcgggttggcatgagattaagtggctcagctgcgtgtattgacagtgaagtgcctcccaagtgaggcagagttgagcaacataggccgtctctagatcttgataagggtcgtcaacttctgtcggctgcaaatgctcgatatcttcctccggaacatcaaactttttgagagaaagacatcggaaaggcgatgacagcttcttagatgcagatcttggcgatggagttgaaggacttggagcaattccaatgcctaagagattgaaaagtaaccaacaaatccatgatcagtccaatctatcacaatgaaaaacagttcaaagcaagaagcttttaccagtttccttgagctgctgagagcttaaacgatcaaagaagagcatacgctcgcaatacttttcatagacagcatcaaaacctccccaccattgaagtccttcagcaaccacatctctccactcacttgaacacttgtcttctccgtcatcatcatcttcatctagatacgattcctcttcttcttcttcttcttcctcaggtatcaacaccatgaaactgtttctcctcaactccttgagccttctcttaacctcattggtaatgaaatcatcatcgtcatcttcgatctcatctcctttccccgaatctatcacaccagcttcagtgttctcactccttgcctgttcttgctgagccaatatcttgtcttctttctccttttcaaggtttggcttccgagactttcgaaattttctaactttcaagaaatccattgcctcctcaaacacacttaggagagtgagtgttttttgttaaatcataagatctaaactgagactagtctctttgcatgagtaaaagcgtttctcttctgccacaacgaacttaatcaaagaatcaaccaaaccagagaatgaggaaaatgcatgaatctagtaagatctcagagaatcatgagcaaaccctagagaattaggaacaccgacagaagattaagaatgcataagtagatcagtagcaacaacagcatttgtctgaaactttagattcgattcactaatctctagctgataagaacactagcattccctgataaatcaacactccactgaaactactactacactgagcaaagagtgtgagaaaaaaaacaaaaagaaagaaaaagattcaaaatttaagaaagaaagagaaacccaaataaaagcaaaacaaaatcgaaagacaaagacaggaggaggaggagattaaagaaggagaaatgtttctaaccacttgcaagagagagagagagaaagcaaagtataataatgtctcaattcaagttttttcagtaaatggacagagagagcacaatataaatgtgagagaggaaaggagagcaagtattattgattcttaaacagatgtcattaaattcaataattaaactttgtgatttcaaattccaaaaaaaaactagaaattttcttcctttcttaaaaccctttcctcaaaaatttccatttgcagtcaaaaccctcacaaagaggtttctgagtcaatttgactttttgtttatttcctaatgggtcgaaattgtcttttactgtttggtttcttactttactttttctgatacttcattttctattggttaatttttggttttgttttggtgtttgattagagaaggagagagatgtatgaatgaatgaaaaggagaagaagcagtaacaagtaacaactggtaggtaggtcagtggggggagagatagaaagaaaagcatcgtacagagaatattgtcagaaaagccgcgctatctgttctccttccatttgctcacttctctcttttaaaattacatctttaccctcctccgtctcatacatctacgggtcttatctttgtttctgatgacaatttgggcttctcttaaaatgggctttttctttaccaaatttatgtatactgctatgaaacgacgtcgtcttttactttggttatattggtatggtttttgaatttactttggttacgattccggtctagtggattggatgaaaccgaattggagagcttgaggttatgatcc

SEQ ID NO: 2419 - DNA, 3000 bp, Unknown
  misc_feature (1)..( 3000): cDNA_ID_2048370_gDNA_ID_1620531_Annot_ID_159726 3000 nt of promoter + ATG
tgaaatcaatcgcacaagaatatgatgtaagaaaggataacagtgtccataaagttttcaaattcttttctagtagaaactaactatctaagagatgcagggctttcttccatatccatattcaagaccaatcaaagtgcagtggaaggtgttcgagaaactgtttgtagatttccgtgacttgcttgatcattcagagtactgcgacttaataggaattgccaaaaataagtttcaaaccataccttatgtttggttaggctactaaacttagcctgcttcttccagtttccacagccctgtaaagtaatttgaggtccaattctacaacatacttgtacataagacattcaaagtctgcatcttgtaagaaagaaagacgtgtaaaatgcagattcttggccatgtataattcgtggttcgttttaaagcaaaagtcaaacattttgttgactattttaacttcttcgttacttgctaagttcagttatccatccactttattcttcttcttggaaatggctctcatgaaagtaatgacgattctggttctcttcgtctcggtgtcatcgaccttggcgcaatccaacaatggcggtcacatttcgataatcgtctcggaaacaggtcttgaatttgctaaagattacctcatcaagaaagtgatcactacgacgcttccacttcagctaccagacattgagaataaggttaagatccctctaatcgggaaagttcgaatgggtctatcgaatattcagattgatgcagttcatgtccagtcttcgaagatggagactcgaaaagatggaatcattttgagtgttttaggtgctacagcaaatttgagtatggactggtcttatacttacagagcttccttctttgagatttctgatcatggagatgcttctgttgaggtaaaactctgaaattatcgaaaaccaaattgggtctttttagttttgttgtttgtgttcagaacattgtttcatcatcagaagaaaaagcttaacaggtgaatgattatgacgatgaaggttaaaggaatgaatgtgagaatcactgccactttggttaatgataatggaagtctaaagattgcctcacgggaaaatgattgtacagtaaagaacattgatattcatatcaatggtggtgcttcttggctatatcaagggtattattaaatgttccataagttttcgtatctctaaaatctcttattccaagattataatatttgttttcctttttgcagggtggttgatgcatttcaaaaaatgattatatctactgttgaaaaaactgtctctactaaaattgtagaaaaaatgaagaagcttgattctttcttgcaatcacttccaaaacagagaaagattgatgactctgctgcagtgaatctcacttttacaggcaaccctgtcttagggaattcgtcggttgaagttgacatcaatggtttattcatgccaaagggtgatgatattaaagttgcagggtctcgttcttcttccttctttggtggggttaataagagaatggtgacaatttcagtagaagaaggagttttcaactctgcaacacttgtctacttcaacgtaagttctcaaatcttgattagagtatggtggaacaaaacaatttgtaagcttattggattggttttgattcaggctaaggtgatgcatttagttatggaggaaacaaagaacgggtccattctaagcacatctgactggaaactcatccttccagagctgtacaaacattatccagataataaaatggtgcttaacatgtcagtaacatctcctcctgctgttaaaatcacagagaatggaattgatgcgacgattcagctagatatagcgttcgatgttcaagactctggagaaaatctatctgtagcacgcctatcaacagtaagactaatagtaatccaccaaacaatctaacttaagaagcatcttttgatcactaaagttagaatcttgttcttgtttgcagattctgagtgttgcgtgttctacagaaatcgtaaagaataatctaatcggtagcctcagattaaatgatttcaatgcaacaatgaagtggagtaaaattggagagtttcaaacaaactatgttcaggtaagtcaagttaattatcttgagtttaagatttatcttgattagcatcaaactggtggatatgtgttcttgttgttaggctgctacgtctaggattcttgaagccttgtttttgccgtacgtaaacacacgtctcaagagaggattccctttgccgattcccggcgatttcacgatcaaaaacataaagattgtttatgttaatagtggcattttggtatgtaccgatatcggcactagcacaaaccagtaagcaagtattatatagcttcttagattgcatgtacgtaagcctgaagaaatataatgacaaccataattgtgatttgaaccgtttggaacttcccctctaagaagcgttttgacgagatctctttatttctttggctacttgcattatatctggaacttccccccctaagaccaatgcatctttctgagaggttaaggaaaacttccattaggcaattgcaagacacggcccaatgatttatattacaggcctgttaaatatgggcccaacttcgtaaacaatcaaaatattattcatatgtacgcaaaacaacaatagaaaaggataaaattgttattctattatatctctctaggacaaaaaaaagtaaagtcaaaagatcctctctcatcgatctctctctaacatctccgtcttctgcttcgtgtaatttgggtattgttggctccctactctgattcctcaaattccttatttttattaacccgcgaaaataaattataaagagggctttcaaaattttgaacctttctctaacaatggagatctccctccttccctttttcttctttcgcgtttaaggtttctcctcgtctcttctcttttca

SEQ ID NO: 2420 - DNA, 3000 bp, Unknown
  misc_feature (1)..( 3000): cDNA_ID_3067650_gDNA_ID_1620533_Annot_ID_159787 3000 nt of promoter + ATG
aacatggtgatcaaggaaacattcagattacacccagtagctcctcttctgctcccaagggaaacaatgactcacatcaaggttcaaggctatgatattcctccaaagagacggatcttagtcaacacttgggcgataggaagagatcctacactctggataaatccggaagagtttaaccccgagaggtttatcaacaaccctgtagattatagaggacaacatttcgagctcttaccgttcgggtctggtcgaaggatatgtcccgggatggggttggggatcactatagtggaattgggactcttgaacttactatacttcttcgattggagagcacctgatgggatgacacataaagacatcgatacagaagaagctggtatacttacagtagtcaagaaagtacctctcaaacttgtcccagttcgagttcagtgattgcaccaaactccagttccagactttttacaagttttgaataaactttctctgtacatatggaaacgtataatgcgagtatatatgtatgtaagatgatgttagaaagaacatgatcctgctttgctatgaatagaaaagtttccatggcaaaggaaatagttgataaagctgtatatagagagtctcatgatggctctttgatatgcctctataaattcaagtttgtgcatgggtaagagaagcaacaatggtttcatcatcttttcaaaaacggtttagacaattctgtgatatgcaatgattaggagattgtgtaagaattaagatgaaacaacaaaaagagagatatgtaacctaacggtggagacatcttatgaaaacattggtcttgaagactaagctaaaaataaaacctgtttatttcaccgccgccgtcgaaacattcaagcggcttacggcggagagagaagagttccgatgggacgagaggaaaagagatcgacgcggcgtcaccaaaagtccaaaacaacaaattagctagagagaaattgcaagatcaaccttgatctaaaagaaattgcaaaataaacatgttgtttttaaaaactaccaatttaatcctccattcccaaattaaaatgtaatttttttcttattaacttacacaactaattaattacgctgctgaaatttcttaatattagattgttagaacataattatatatttctagccaataaatttttgaggcagaaaaatgatttatcatgtagaacatgtattaatttatcatgtccagatgacgtgaaccaatcaaatatggtattctatatttttttaaaaaaaattcttgaataaaaactatattcaattacttgaatcgaataacttatgtgcatctttaaaattttcaatcatgacatatacaaaaatatgttttttttttctacatatgatgagatattcaatcattctaggatgaaaaaactaaaaatgattatctcaaagtcacgtaaaattttgaagaaaaaaaggaatgcaaaagggagagaaagccacgtaaggagacatgtctcaaagtctcacaagtggtgtttttgtcctaacacatcacaatgtatcattttgtcccaatatgtgttagttgactaattaatgcactattctaagattttttcacccaatttctcaaaattcaatagacaggtgaagtttccaaagtcaaatttccgttgatatccacatcttccagacgtaccaataaaagagattttaactcatactatccctgtcttatagaaatggaaaagaaaaaaaaagttactagtaatcatcctcttgcttttgcacgatagtcgatagaatatcaatctggttttcagtttggttgtgaatagtctattaatctccacatgtgagtcaatgacttggatccaatataactactgagctaacttttattacaagagttattatagcgttgacgtcattgttaggtcattaacataaagcgaatccgtaaagttaataactttatctcatgattccaatcatgttttcctcccaaatcacgaaacagcttattagtctagcggggtgtattcaatcttacattttgaatgatttgagttattttgagtttttatatgattttaaagaatttaggtgaatttaagaaagttgttatgatttattgttaaatcatctcaaattccacctaaaaccatgagatttaaaattctgtatttttaactaaagaaatccactaaaagggtgtattaaatattatattttaagtgatttgatttattttaagtttttatatgattttgaagaatttgggtaaatttaagaaagttgttatgatttattgtaaaatcctctcaaattctaccaaaaaccatgaaatttacaattctgtatttttaactaaaggaatccactaaaattcacttaagtctcttaaagtcactaaaaatccaatctttaaaatattttcaataaaaggggatttttaagtagattttagaatcactacttcaataacattagatttcatgagacttttaaaaatccattattgaataacataggatttgttattttaacacaaatcacttgacgtgtttgattgaatacaccaccctaaaattcacttaagtcactaaaaattcagtcattaaaatgttttcaataactgggaatttttaagtagattttagaatcactagttcaataacataagatttcatgaaacttttaaaaagctatgattgagtaacataggatttgttattttaacacaaatcacttaaaatatttgattgaatacacccctaagtaccagaaatgatttcaacttcacttctaaatcatttctctatatatataagtctcttcgaaatgattcaccaacaccaaacaaaaataaccaaaaagaaaacaaaaccccaaaaaattctaaatacatttaacatgaagacaacaaaagagctaagacgcatgttttgctttatcatcttcttctcattcttctccttcatcacaaagaacatg

SEQ ID NO: 2421 - DNA, 3000 bp, Unknown
  misc_feature (1)..( 3000): cDNA_ID_2158136_gDNA_ID_1620533_Annot_ID_159798 3000 nt of promoter + ATG
aaagaaaagagaaatgctcaacattagacgaagtcctatataagaataaaaaacttatgaagaaaaattacattttctacagtcaagagaaaataatggtttgtatcatagtgtatatcttctatctgtttttcctctatatatttttgtatacttctgtttaatctttctcttatctaagttgttattgtgagcaatgtttgacctctcgaagcttatcctcacacggacaataaatgacatgtgaatttatatctattgaccctgacttattttgccgtggtaaagacgtctttaactctgtttttttatagtctgaatgttactcttatcaccaaaaacagaacacaaaacagaggaaaacaaaaactatgtcgattcttctgtatttcttctttctccccgttattttatcgttaatattcatgaagaaattcaaagactcgaaacgaaatcttcctccgagcccaccgaagctaccaattatcggaaacttacaccagcttcgaggattgtttcatagatgtcttcatgatctctccaagaaacacggtccggtgttacttctccgtctaggttttatcgatatggttgtgatctcatcaaaagaagcagcggaagaagttctcaaagtacatgaccttgagtgttgtactagacctaagaccaacgcctcatcaaaattctcgcgtgatggtaaagacatcgcctttgcgccatacggggaggtttcgagagagttgcggaagctttccttaatcaactttttcagcacgcaaaaggttcgatcttttaggtacatcagagaggaagaaaatgatttgatggtcaagaaactaaaggaatcagctaagaagaagaatacagtggatttgagccaaacacttttctatctagttgggagtatcatattcagggctacctttgggcagcgtttagaccagaacaagcatgtcaataaggaaaagatcgaagaactcatgtttgaggtccagaaagttgggtctctaagcagctctgatattttccctgctggtgtgggatggtttatggactttgtgtcaggacgacataagacacttcacaaagttttcgtcgaggttgatactttgctaaatcatgtaattgatggtcacttgaagaatcctgaagacaaaacaaatcaagatcgccctgatatcatcgactcgatcttagagactatttataaacaagaacaagatgaatctttcaaactcaccattgatcatctcaaaggaattatccaagtaagcataaaatctagttcacagttctgtcaaaactcagggacttttatctctaaagtatcttatctcttaagttaaatatgttcttaaccatcttgtgtcattgttgacctagaatatatatcttgctggagtagacacaagtgccatcaccatgatttgggcaatggcagagcttgttaagaacccacgggtaatgaagaaagctcaagaagagatccgaacatgcattggaatcaaacagaaggagagaatcgaagaagaagatgtcgataagcttcagtacttgaagcttgtgatcaaagaaaccttaagactacacccaccagcacctcttttacttccaagagagacaatggctgatatcaagattcaaggctacgacattcctcggaaaaccattcttttggttaatgcatggtcgataggacgaaaccctgaactctgggaaaaccctgaggaatttaacccggagagatttatcgattgtcctatggattacaaaggaaatagttttgagatgttaccatttggttctggtcggaagatatgtccagggatagcttttggaatagcgaccgttgaactgggactattgaacttgctttactactttgattggagattggctgaggaggataaagatattgacatggaagaggctggtgatgccacaattgttaagaaagttcctcttgaacttgtcccaattattcatcattgaatgatgttccaactctataaataaaaatgaagttatatatttgcttgtcgaaacagaaaaatgttatgtaacatatatttttattacaagaccagcaggacaattgtaatgcctggaatgcttgtgaacgttagtctataagactataacctaaattgttattgtcgtcttttggtatttatatcaagggccaaaaatccttgacgactcaagtcacgtttgaagtctctacgagacaattgggcttaacttgaacaatggcccacaacccacgtggctttttagcttctacgttacgtcaagaaagacttattctcgatctcatctgttgttccaacagcttcagtactgttcaaacaacatctacactttcattaagatgaacatctctactattttagattttttgggatgaatggcttgactattaccctgttcttttgttgatcgctgcgacaagcaccggcggcacaaaatataaaagaaaaaagaatgagagatgaaggtgagatgaatgaaagagtcgcagcgatagatctgaagagataggagaaagggaatttgagacgttgaaaatttcagcgtctatagaatggccgaattacagtcgctgcggcagagatgaaagagagaagaaatgaaagtgaaagagagatgaaagctttttttagatcgcaggtagctgacgtagcgatcaatcaaagaacagggcccacatatcccccagataaattttatatatataaacctcgaataatttatcgaaaattcatcattgactttgcactattgaaactgacccatgaaatagagagttgccgtgcaaaaatcatcctctgaagtctactaaagactccaaagtcttcgagactgaaaagtctagttgatccaaaaaaataaaaatattaaaaagtctaatttcatttctctttaaatttatattcttcttcacttagtaaatagagaaggaaaaaaaaaaaaaaaaaacagagcaagaaaaaaaaaatg

SEQ ID NO: 2422 - DNA, 3000 bp, Unknown
  misc_feature (1)..( 3000): cDNA_ID_2158140_gDNA_ID_1620533_Annot_ID_159799 3000 nt of promoter + ATG
gagcggcaatttttgtatctcttatgacctgatacataactggtaacaacaacaaaatgatgcattgaatacgtaaatgtatatacataagacttatgcaaatagaccgtttgaccgtttgaagagtgtttcttcaattaaaccaaaccaattttactaaaccaatttctaaactcattctattggttctcattaaaccgagtccatcaaaaaaaaatccgttttttaaatttggcttggtttaattgaaggacacatgtcattactaattagtaattgtttcatttgacgaattcttattcagtagtatatctcaggtgatgattgtggactacaaacttacgtatcctagtggaaccactacatcgatgttgattaacagtttccacaacaacactagagctgagcttgcaaggtaattgtcagagattcatcttcaaatctctcacttccctgtaaaccatagcttgagtttcattacatgagccttggcttagtttggagtatactaacaattcatccttgactattactagcaatccatctatagcatttgctagtaatagtcaagttattaataaaggtgtctctcttgaccatactaacaatgcgggagaagaaaaaaaagagatgacatcattcagataaattgttttcgttcttttttgtttgctaccggtttgaatagtttcgaacgtagatttaggattagtgtcctagtagtttttgaaaggtagattggtgttcacatattttgaagtcaattttcgaagcttatcctcagaaatactagatgacatatgactttttctattgactctgacttatgttgccatggtaaagacgttgttaactctatttgttttatagtctgaatactatgtttctctatcaccaaaaaacagaacacataaacataagaaaacgaaaacaatgtcgattcttctgtacttcatcgctcttttatcgttaataatcataaagaaaatcaaagactcgaaccgaaatcttcctccgagcccactgaagctaccggttatcggaaacctataccagcttcgaggattgtttcacaaatgtcttcacgatctctccaagaaacacggacccgtgttgcttctccgtctaggttttctcgatatggttgtgatctcatcgaccgaagcagctgaagaagctcttaaagtacatgaccttgagtgttgtaccagacctataactaacgtcacatcaaaactctggcgtgacggtcaagatatcggcttagccccatatggtgagtctttgagagagttgcggaagctttcctttctcaagtttttcagcacgacaaaggttcgatcttttaggtacatcagagaggaagagaatgatttgatggtcaagaaactgaaggaagcggctctgaagaaatcttccgtagatttgagccaaacacttttcggtctagttgggagtatcatattcagatccgcctttggacagcgtttcgacgagggcaatcatgtgaatgctgaaaagatcgaagacctcatgtttgaggtccagaaactcggagcactcagtaattctgatcttttccctggtggtttgggatggtttgttgactttgtgtcgggacataataagaaacttcacaaagtcttcgtcgaggttgatactctgctgaatcatattattgatgatcacttgaaaaactctatagaagaaataactcatgatcgtcctgatatcatcgactcgctcctagatatgatacgaaaacaagaacaaggggattctttcaagctcaccattgataatctcaaaggaattatccaagtaagcatagttcaaaacttttatcgatatgttccctaacattttcttgaacgcaaactttgatagtacattagtatgttaaaattcataggatctatagataaacgtgagatcttctatactcgttgttatggaattcttaacaaatcttgagtcaaaatatgtcattgactattttgtgacgttcttgacctaggatatatatcttgctggagtagatacaagtgccatcaccatgatttgggcaatggcagagcttgttaaaaacccgcgggtgatgaagaaagttcaagatgagatccgaacatgcattggaatcaaacaaaatgaaaaaatcgaggaagatgatgtcgataagcttcagtacttgaagcttgtggtgaaagaaaccttaagactacatccagcagctcctcttttacttccaagagaaacaatgtctcaaatcaagattcaaggctacaacattccctcaaaaaccattcttttggttaacgtgtggtcaataggacgagatcctaaacactggaaaaaccctgaggagtttaacccggagaggtttattgactgtcctattgactacaaaggaaatagctttgagatgttaccatttggttctggtcggaggatatgtccagggatagcttttgcgattgctaccgttgaattgggactattgaacttgctttaccactttgattggagattacctgaggaggataaagatcttgacatggaagaggctggtgatgtcactattattaagaaagttcctcttaaacttgtcccagttcttcatcactaaaaagaaaagagaaatgctcaacattagacgaagtcctatataagaataaaaaacttatgaagaaaaattacattttctacagtcaagagaaaataatggtttgtatcatagtgtatatcttctatctgtttttcctctatatatttttgtatacttctgtttaatctttctcttatctaagttgttattgtgagcaatgtttgacctctcgaagcttatcctcacacggacaataaatgacatgtgaatttatatctattgaccctgacttattttgccgtggtaaagacgtctttaactctgtttttttatagtctgaatgttactcttatcaccaaaaacagaacacaaaacagaggaaaacaaaaactatg

SEQ ID NO: 2423 - DNA, 3000 bp, Unknown
  misc_feature (1)..( 3000): cDNA_ID_3067624_gDNA_ID_1620533_Annot_ID_159810 3000 nt of promoter + ATG
gggctttctcttaaagtatcaatatgtcaatggccttttgagtttggagatttgttttaactcctaacatatcctagatttgtcatagatttgccttatcacattagcatcttagaatattatatatataatctatatagtttttttttttttttttggtataagtatgaacttttgagttttgatatttgaaattatcgaatttgaatatttccaattcaaagtttttatcttgtacggatgtttttggtagcggataaactaatagtggatcggcaaaccccgaccacaacaaacaaatcaagacagagacgacaaaataatcttttacaagagacatgtaagaagctgctatccataagactattgtgagaagaaatatagattcatctcattttaacgttaattctaattgataactatgtacgttcaaagttgaattcaagaaagcagaatgaaaataacgtcaaggtggtatcattaaagaacaaatgatcacgttaatgacttgttttaatagtaaatatatgttttaaaataaaacttcacgttaatgacttgttttaatagtaaatatatgttttaaaataaaacttcaaaaatcagaactgacttcttaagaagtttgaaaaataatcactattagttaactctttcaaaaatttgataaatgaatgatggcaaaccatgtttcatatatggtttctaatattaattttggttcaaatcatcaatttctaatcctaacaattcgtgttgtgtttttttcaacatgcacaaacaattttattcaaacgttttaaaacttccaaataatctatcaattctctattggtgcgtaaaaccacagttaatcaaccgttactatagtttaaaaacaacattattgtcatttagctatttttttttgtcatatcacctaaatacaataatcatttttaatactttatgataagaaacaagtggggataaacaaaaattaagccgttgatattttttagcggtctatgttaactgtcatattagttgtcatgactttttctttcgattgaaagaacagtttatattaatgacctgttttgatagtaaatatatgttttaaaataaaacttaaaaaatcagaactgacttcttatgaagtttgaaaaatattagttaactatttcaaagaattgataaatgaataatggaaaaccgtgtttcatatatggttttataacattaattttggttcgaactatcaattcttatcctaacaattcgtgttgtgttttttcaacatgtacaaacaattttattcaaacatattaaaacttcgaataatctctcagttctctatttgtgcgtaaaaccactattaatcaaccgttactatagtttaaaaacaacttttttatcatttactttttttatttttttgtcatatcacctaaatactataaaaatactattatgataaaaaaacaaatggggataaacaaaaattaaccgcttgatattttttagggtaatattagcgaataacgtaattcgacagcaatattaagaaaatgactttcatgcagaaaagttgggtaactaacgtttttgggccatgcgaaataacgaatataacctcggtcattgggcgccaaatctctatttccgacagtagggttctcggtataggaacaactagggtagtagagatatgattacaccgatacgtaatgaaaatgcatgcattatagaaagcgatatttttaaatgtaacatgttacctcaatatgcaattgaacctagttcgagctattggttactacaggctgaatcaccggattttgaatacgacacatgtcgtatataattaccttcggatgatgcatgtaagaaaataaaagagatggatgactttcctcaaacctgcaagaaatgattatgggaaaggagatgtggcgtttacatgaataccaaaatactataaatatcccacaaatagcaaacttcataacgtaacccgcgttatgtataaaaaaaacgatgtacaaattttccttagcagcatgtattaatgtaaagcaaatgaagtagaagttttatttggaaggcctaaatggaaatgtactggactggattacctaaagtataatgggcttttgagaagaagctccagaaattatatttccgaaacagcataagtacaacgaaaacaacatgttttgttacaaaaaacgcaacaatcattgttctcccacttgcaaagataacatagtggaagaagtataaaaagtaacagatgtgacagtgaaaagcgcgtgcaaagaggagagtagatacgtatccatagcattaaatgcggcgtcagagagtttcagctttcaaggtattaaactgttaaaaaatgaaaactttttcttatgtgtaccaatcttaacacacgctatatatgtgcttctcacgtacgctacatcttatcgactcaagtaggtgacacgtctcaaatgacgtcagcgttacgacagagcaagttgagcacgaagatatagtgtatcttacctcgggacaagttgatgtgtaaaaacatgagtatatggtaaatcacttggttctacttccgataacatgcaatacaaataaagaacaagtacatgtttgatgcgacattcgtgaagagatcttctcgccgccctcgggtgttgggagggaaatcataaccttttaaaattcacgtcgttgtaaatgggtcagcaactgttgcccaaaatatctagactactgtagccctaaaaagttcaactattctatataagataatagatggcaagatatcatctctcacacctcttcttctatctaaaaaacacaaacgaagtatccaacaacatctcagaggtcgatcgttgctgttttggtatgcaattaatgattgttctttttgtctactttgatgttatattaataaatcgcatggtgattttatatggtatttaatgcaaccctattgatgtgtaggtaccaatg

SEQ ID NO: 2424 - DNA, 3000 bp, Unknown
  misc_feature (1)..( 3000): cDNA_ID_2158115_gDNA_ID_1620533_Annot_ID_159791 3000 nt of promoter + ATG
gtactttggtttgaaacaagaagaaatcaagggtagaaccatttattctcttgtaaattttatgaaaagtttttacatttatttataacatccagtgattattttcttttgagtataatttaacatcgtattaaaaaaaatgaatttatttgattaaaataatgaatatatataatagtaagtaggaagcaaatataagggttattattgcctcatgtttttgttaaaagaattgtattacaagagtaaacagaaaatcgaaaatcattgtgagcctttcatttcatttataaagaagatagcaaaaacgtgaggggcgagatcattgtggctccaccattctccaaacttcgtcgagttatccaaatatgcgacaaaatatgcacatgatattgttgagtaaatcttgaatgtggtcaatcgtattcgtatccatacgccagccaatctgcaaatatcttcgcagagacagaatggcctaaacgtttgtttgtttttttattggaaaagttgaaaatagtttcttttttcagaaggaaaagtggtaacttatactattcataattgataaaataatcattttcattatttgtttcatacacttagatttgtataatatttataatgtctaaatatacataaatatacatactgtaaatttagatttgtatattaattgtattgtacgaatttttttatacaaatcaaatagtgaaaaatggctacttttaaaattataaataataaaataactactttttaaattatattttgaaaaataactattttactaacatactcttttattttttatttaaattatttatttaatataactgaaacaaaatcgcatgccaaatggcctacatgttatacggctagccattatccaaccacttaaacgtttagcgacaaacataaaaaagaataatagtgtgatacatcataatatgttatcgattatataatcttacatatgaaatcagaagatatttatttgatgacatcactttttatatcaacttgatgacatcaccttttctagaataatatagttttgacgtcactttttctatgaatattaatatgaaaagtcaattcgagttttatcttaaatccaaatatagcattccaaggcaatggtattaataatttataccgtttaatactaccaaaagaaagtcagacattttttcccagagtttgaaatattttttttttttgtcaacaatttgaatatatgtgttcgttaaatcagtttttatatatttcgataaatggttttatcgattaaatcactgatttcaaagatactattcacactattagcaagcgaatataaaatatcatgcaaatagaagtttagtcattaacaaaaataaaagaggtcttgttttaatcttcatatttgtacctcaaaatgcatcatttagatgaaactactaaacttatatgaaactattagaaatcaacctgcgatataccacatgataatattttatacaaaaaattgagttatatttattttgtcactattgtttatttgaagtgtttaagtataatatttgaacttaatacaaaaaatgacactaatgtttaatttcagggaatatggttatatggtgagataagtttaagtcgttattaatacgagatgatatacaataggtgaaatcatagatttaacaagcaaaatacaattatcgaccgaaacttcgtaattctatttttattgttatatctaggatctcactcgtaatataccgtctcgtattaattttattttataaatatttgtaatacttaaacttcgtataaattttaaatatttctaatatttgaaacttcataaaaattgaatatcataaatgtttaaaatgttttataaagtttagttataaagtttgattgtttttagcttttcatctttagtatatcctgcattacgtctccagctgtggttggtcctgggtttccatgtgaagccccgtccgtggacaccttaacctagccttcacccggccttttccaaccgatcaacctctcaacccgacatcccctgtttgtgctgcttcttgtaacattaaaagcttttttgacctccgctgctatatctttgacgaactgaattctatcacggtatttccctattttcccaaaaacgtttctatatctccattttcaaccccacctagttgtcatactcaatagtgttggccaactttctcttcccgaatcttggttattcccaaatcgactttgctaaaaaaaagtggctttatatactaataaaaaactctcaattctaagtatatctttattaacactaaaatattacgcattttaatgatattgaatatacaatataatatgtaagaaaaatgataataatattatataatttaaaatggtgataacccaatgtaaagtttcttatttgatagatccacgactcatgtatttttaatgtggtttctatttaatttttacaaattctaaattttattacctttattccaatacaccaatttgatagtttatatattcctcttttgtatttttttataaatcataaaataaaattatctttatatttaactccattatgtataagtttaaattatatattaacattattttagtatatattaattaaagtaaatgcaaaatattaaataaatattgttttaattgttatttgatatgtttaaaactaaataacataataaaatgataattatatttaagatgttaatgaaaaagttaataaatatattaataaaagttaatgaaaataatattaaaatataaatactatactgatgagatgttttgctcttaaccactagaccattggctttttctaataattgaagtgttggttttttaaccgagacttgtatgggatacttctagatctcgagttgccgtgttgaactattaatggaaaataaacagagcaatatcattttcagtttatcgataaccaaataaaaaatg

SEQ ID NO: 2425 - DNA, 3000 bp, Unknown
  misc_feature (1)..( 3000): cDNA_ID_3067676_gDNA_ID_1620534_Annot_ID_159819 3000 nt of promoter + ATG
aaccgtataacgcatccgttactaagaaaagactcaaccgtataaaataattttatagagaaaaagtaaaattaaaatagtatacaaaagttaaaagaaagtatttgacgattggtgattccgagcaggttttaggaaattaaaattacagttttacctgtaacattcttatcgatgagatagctggaagcttgcaattagttgacgattggtgattccgagtaggtttggggaaaatcgatgaagtttcatgttgatgttgatgaactggatgcaaaagattggcttttgtaacgtgaatggtgaatttatctattatgacacgtatcaagtctatgaattctaagattttgacaaatgtgaaaagaaaaattatgtaaataaaaaggaaattgtataagatattacaaataattaaagttaaagcattgtaattacttctgaaaaagcatataaaaatatatcaatcttgaaaattatacaataaattacaaattttaaaagaaaatggactataattattttctaagaagatatataaacaaggaaaataatatagtaaaatactaattttgaaaagaaatgaatcacatgtaatatttattaaagtatataatctaattgtataagctagatttttcaaagttagtaattaaattgtttctgacacctatgtcaatcaattcactagattccgacacgtataaacaagttattctaattaaacttggatttatggaacattattgattgtggtaaagtagatacatttctaaatagatgtggattttgtggtagtctcctaagtaaattttattctattttaaaaatataaaacccgcataaatctgacgggtccaaatctaataacaaataaagttaaagtcaattgagtagcaacttctcaaaagcatgtaatattcctgtcccagcccatcaaacccaatcaatttgttttgggaaaaaaaaccttaaacttatgaaaaatcctaaatttttgaaagtcccacaaagcccactaaacccagtaaaccgaaatgctaagcaaaaattatgaagatgtataaataaggatcctagggtttctttcgttaattttgtgcgcctcccttaagagagagagatcgtgagagaaagcggaagagtcgttgacgatagagttgtcaagcgagccgctagcccgcgggctttgtccaagtagcccatggcggagcgggcttagacgttgatttttttgtccacaaattagcgggcctcgcgggcaggcccattacggactgcggattctagcagacaagcccgttgcggattgcgggtatgcgggtagcccacgaaagaaaaaccaactcttttaaaacccttcacttctcatagaggctttcaaaccttttctctctattaaagtttcttgtgcagttcaaaacctagaagtagcagttcacgctcaattgcttaacaaggaaactgaaaagtcattctctatctcttcaagtttttttttttacgatcattgaagctttttagattcagatttcagatcaaacagagcatctaacacttgtaatggtatgttatttgtgactacacataaacaatttgctagtcttgactagtttttgtattttgttaatgataggatccgttggattctgttgatgctgagtatttgagatcattagatgtgaaatcttggagagtcattgagttggaacaagctagatatgaacaacaacaagctaatgatgaagcaggaggatctaaaaagctgaaaagaaaactgagagatgaaacaggaacacctatgacatagaagaaaaaagtgtgtgaactagaagcatcaaaaacccaaaaaagaggcaagggtgatgaagcttctgcctctaaaacagagagaagaaaaaagtctgaagctgaagcatctaaaaaaccaaaaaaagtgtttgagattagtgatgaagacgaagatgatgatgatgaagaagatgacgatggggacaatggagctgatgatgttgatgatgatgaggacaatggaaagtcatcgaaaccaaagaagagaaggcaatactcaaaagtctggaacgatttcatagtgattaaaaaggttaatcatttgggaaaaagtgaagaaagagctatgtgcaagcattgcaaatcagattatgcgtacaatgcacacaaaaatggtacgaatacatatcgacgtcatttgcaaatatgtaagctcgtgcctagaaatggtgatattagtcagatgatggtgaatgcagaagcaaaattgcaagctagaaagatagatcaatctgttttccgggaattggtagctaagacaattatccaacatgatcttccattttcttatgtggagtatgagagagttagagaaacgtggaagtatttaaatgcggatgtcaagttttttagtcgaaacacagctgctgcagatgtttataagttttatgagattgagacggataagctgaagagagagttagctcaacttcctggaaggattagtttaactacagatttgtggtctgcgctcactcatgaaggttatatgtgtcttacagcacattacattgacagaaattggaagctcaataacaagatcctagttttttgtgcattccctccaccgcaaacaggaatgaacttagcgatggagatacttgggaaattgaaggactggggaattgagaagaaagttttttccattacggtagacattcaagatgcttgatagggctctgaagtatcgagctgcatttggtaatctcaaagtcattgatgccaaaaaactacaaatttcatcctacagatgctgaatggcatcgactacagcaaatgagtgattttttagagccgtttgatcaaataaccaatcttatatcaggtttgacatatccaacttcgaatttgtattttatgcaagtttggaatatccaaaactggttaacagtgaatgagtccagccaagatgaagttatcagaaacatg

SEQ ID NO: 2426 - DNA, 415 bp, Unknown
  misc_feature (1)..( 415): cDNA_ID_2161867_gDNA_ID_1620534_Annot_ID_159833 3000 nt of promoter + ATG
agattaaaagaatacttcaaacgagaccaaaaaagtttagaatcttacatttataatataactgcacgtaaagtaaaaaaaaacattgatatagaattgggtttatatcgggttataaggtttagtatgttcatgaaaaattaaatcaatggtagactatattattttaactctcagattttagaaaatatggtgtttattaagtaggcgagctttttactaaaaacgctcctcgtcacggaaatcgagacactctcaccattcatgccttctgacgccggtggagcttccgttcgccagcgtctggatctatcaactctattcagcctctctttgttctgtataagcttggtctcgtttgattcttcttccatgatttcaattctctccaaacatccaaattccctttcccatg

SEQ ID NO: 2427 - DNA, 2081 bp, Unknown
  misc_feature (1)..( 2081): cDNA_ID_3067662_gDNA_ID_1620534_Annot_ID_159832 3000 nt of promoter + ATG
agattaaaagaatacttcaaacgagaccaaaaaagtttagaatcttacatttataatataactgcacgtaaagtaaaaaaaaacattgatatagaattgggtttatatcgggttataaggtttagtatgttcatgaaaaattaaatcaatggtagactatattattttaactctcagattttagaaaatatggtgtttattaagtaggcgagctttttactaaaaacgctcctcgtcacggaaatcgagacactctcaccattcatgccttctgacgccggtggagcttccgttcgccagcgtctggatctatcaactctattcagcctctctttgttctgtataagcttggtctcgtttgattcttcttccatgatttcaattctctccaaacatccaaattccctttcccatgtgttcttcttccctgagggttttctttggctccgatctgtctcagaccttggatccatctctgtccctgaaaccaaaatcagaagatccacaacagttcagcggctctttacctcaaacatcagagcaagtcttcatcgatttatctttaggctctagatctggactagcaacgccaccattagttccttctcaccggatttcgttgatggcaggagtatctcttggaccatcagatgtgcattttccggtgagaacgtcgacggcacacgacgagctcaaaagctggctggtggtctccctctacgcctcaccgccgaccatcactccaatctttcagaacttcaaccctagggtttggctggatgggcctcatcttttgttgcggcccaataagtcatctatggcccatttccaggtctgatttttctgtctttaagcttagtcgctctctgcaattttgcttctcaatagtggatggtcgtggactccatccaactgtaggaacaaattcgttagaggagacttgcttattcatttatcgaaacctgatggatagtgttgattgtttttcaccggatgcaactctaattgtgaagcttagtggattagtatttttctcaaaccttatttgttgtgatgcgatctttgcacctgttcctatttgtgtttgtatcttgaggatctatattcccactagcaagcctaaccatgtcaccccaagcctaatgggcgaagcatcccaaccttctcaaactttttggataaaaccgcctcaaagaaaactccatccgagctccgctgcattctttgtgtattggacttgtgaattcccttggcgaatccagcaaacttactcctctatggagataccatctttggaaccttactttggcagcgaggaaaagcctccgcccgcaacctcctccatggaacaccttttcgaaagctctttggcgttaatcgtacgagcttattatgatcacaagctgatccgagatttcgtgaagctagtcttcaaatttgaatccttgaaggctccaacagatcttccaacctttgctatcttcttgaagctttgcatcttggaaaactcatggaacctctacccttatctttcatgtagtgttttaaatttcagttgtatgaactcacctcttacgaggttttagttgaatgaaagttttcctttgacaaaaaaaaaatggtgtttattaagctataaagtagaataagtctcctttagcttatctattatatatatgaatgtaatgtcacatttgaggtttaatgagaaattcacaatctgttaatatggtatcagagcaaaacaaactttttctcattcactttctctctcactttctcggggaagtttaacaaccaaattttccaggaaaattcatcttcttccatcaatcttcttcgtttatcttcgatttattcaattcatcaccatctaaatcgattgcacacatcatcttctccattcatcatcgtttctcagctcaaattgctgatttcttgaagtcgaaaagcaacatcaagctttcgatctttctttttcatcatcgcttcattgattcacattgaatcttccattatcatcacttcatttcattcgtttctggatttggttgtttctttactcatcttcttcaacaatg

SEQ ID NO: 2428 - DNA, 3000 bp, Unknown
  misc_feature (1)..( 3000): cDNA_ID_3067668_gDNA_ID_1620534_Annot_ID_159825 3000 nt of promoter + ATG
acttcaacttcactaaccaataataccaccttagtttagtggaggatctttgagacacatgcggttgctaaaaataactacaaaaactttgaatcttttgaatacgaattttatttaaaatttaaatgaaaattaattatagatttttgggttgttcaaaatgtgtttgtagtttctaagagaacgttgaatcatattattcatcactttatttcatgacaatatgggtatgcaatgtatgaattgtttatttttaccagcgtctatcttctataagacaagagtttcaacgtgagatatgctaacaacgttaaaactaaagataatacaaaattaaataattttaaaaagattattatttattggtacgacaagagcacaaactcactaagatatgaacacttataattgtgacatattatgaacacctatattttatctttatcatcactctattattctacatatctttgggtatgcaatgaacaaatttcacacatttactttaatggtgtattggatcatgcatgtggaaactaaaaatagtctgacaactcttgaatcacccgaatatatattaattttgtttgatttcaaataaaaagtgaatgataaatttttgggttgttcatattttccagctaattagtgaaggaaagtggtaaatatatatatatgattgtataagacaatgtatatatggttgtataagacaatgttaaatatattgttttcaacacatccatttcctggcacatgcctttctacttccacaagttttcaaaaaaatcaagtatgttcctatacgatgagatggaaccagtatcggcgcaccttccattgaggcggttgttcgaacattttttgttttttttttgtctatttgtggttaatcagtattcggagactctcaaatttcacagttaaactctttacaaatttctctaggtgtgccattttctttagtgtacaaaaaaaacttttttgttcgaatcttcatcacagatatgtctttttggagctctttcatcctatccaaagattctcggaaccgaaaaaatgcacaaagagaccatgcaaatgaaagatactctactttcctattatgtatgagtttgggacaactaactaaatcaaacgacacgtaagcccaacaaaacaattggtagaagttgtagatttaattaatgaccacgggcaattaagatttattgaaaccatgtagattataaattataataatagtcgaatcaaggccgtgaaaaaaaaaagtcgaatcaaggcctttgtaaaaaagcccatgggcttttttaaagaaaactaaatgtagaaacgtcctgaagcgaccttagaaaccctaaacactcttacgatcgtttctggttattacgttttcgagccgctgtttcttcttctctggttcgcgtaaatcagtatggatcagaatctggatccagcttttgggataattttcctctgggatatcgagaactgtcgtctcgagtttaaaatggtaccaaaaatgatgaacaacattcgtaggtctctgagaagggctgacaacaggtatcatatagtcaaaaaggttttggtcggaaaccagaaccttaggttcatcaaagataatctggtctatctacatgtagaaggattcgagttctatgacataccgcttagggaacacacctgccctgaaccctgcggttttgtggttcaacattcaccgttcaaaaggttatcttaccaaaactactttaacaaaaagaaattttacaaatccctctacattaaaagttcttaaatcaaaaactgtccagtaagtagtattgttcaaaacggtgtgttttaaagttatttgttaacaaaaaaaaattccgatatcaatccataaatttgtgtaaatgattataaacgactaaatttgggctcaaaacattattttgatgaagagcactaatggataaaaataacatttcttaaatatttgtttaaaggactagtacaataacatttttaactattttaaaaatatatttatagttggtctgagtaggaaataaccgaaatcttagttttatggaaaaatattataacgttctatgtaattaaaatagtgtttaagcatcagtgtttaaactctgtaaaactgtgtaaatgattatatgttttcttcttattttgacatttaacattaaaatatttcatgttgagtcgaactggatcttcttaaaatcacaatatacagaaaattagtttaactatctttatttaactttttttttggtcaactatttaattagtattactactgtagtatcatagttgctccaaaaaaaagaaaaagtacaatagttttctattttattcaatatttgtctaagccacaaagaaagtaactctagactgacaagcgtgaaaggaggttaattagcttagtctcgtactcacacatcatttcaaaagtagagagcaacatcacatgacaacaacaagtgatcccttgtttctgaatacaaagaacagagaccacaagtcgtttggagcggctctccccagccaacaaatcttgatttggtaggcaatcggtccaggtttgctatccacatgttaaaagtatgtttaggcgtggccgctttacattaaaccaaaccgaatctgacgagtctaccaaatcagctcttggtcttagaacagaccacgttcttgatgatgagaagcctttgcaacttatatgttctccaccacccaaccataagaggccatacctcgagaatccttttgcaacttatttttctttccaacatttaaagcacatttattttcaacagattacagttagacacaagcattgttccattgccgtttcatggctataaatagcttattcctcattgtttcaacagaattcaaataatttctacaaattgagattaaaaaatgttcgacgactctacctcaatgcttgcgtttatcctaggtttgcttctcctatcattaaca

SEQ ID NO: 2429 - DNA, 3000 bp, Unknown
  misc_feature (1)..( 3000): cDNA_ID_2161851_gDNA_ID_1620534_Annot_ID_159829 3000 nt of promoter + ATG
tatacaaaaaaaaaattctttaattttttcaaccacaaaaattatgttctacaagaaaaatcattagaatcaaacccaatacaataaaaattttctgcttttagtttaaattttaatatcttaaaatgtttagaattatttttattatttagttttgaaattgaaaacctaactattagaagaattaatgcattaagtgtttttgattatacaacaccatagaaaattattttatattttatttttatattaaaataaatattagtgtttttttaaatattttttttgatcaataccagtcaatgcttgtcttcaccggactaaatttatcggtgtaccataattttatgtatatgatgttaaccacatgaaatcgtatagctcaaatatgtgaccatgcaaaacatctacttcgtgtagctaaggataaaataatatacttgggatgtatgatcatacattctctgatacttagtgtagttagaaatattttttccttagatttatttgttcaattgtgactataacaattagaagatattttctattatatatattgaaaaacgaccacgtttaatcgtatcgtcgatatgttttcaattaattatctaatttttaattaaaaatgtactaaacacagtgacaagcaaaataataataaaacagttaaaaatatgaaaatatgaatgagtctatggtgcagttttgagaaaaaagttttgataatacttttcttttagaaattatataaaaaacattaatgtaagaaattattatgattcctatagacaatttttttgcctccaccactagcacctctatgagtctcttactaatataactattagtgtttttaatgtaattaaatgttttaattaaattcgaaactataaaaaaatttaaccaatcataagaggaaaaatgtaatttagaatttttagagtttgttatttaagagagtcttcctactctccctccttactttttataattttccatactcttattgatgagtctctaattaagaagaccatcaataaaatacactttaactgtcatagtataatttataaactaaaattagtgaaactcttctataaaaatactatttggtttctttatattttgaaaaagtgggtgattggttcgtctatatcggtagatttattgcaatagaaacgttgttctaggtgtgatgattggttgtagaaataaaatttgggtttataatgtattttaaaacaaaacatataattggtaaataatagttatgtgttatataatattattctcaaatatcaattttataaattatgatatacataacatatatatatgatgtatttaagaaacaatgtaaattatatatatatatatatatatataacccaataaaaagagttatatatatatatatatatatatttcataaagtagttattttaaagattacttatatccacaaaaataattttttcataatatatatggatgaaaactataatattttttttttttaaataaaaaaaaaaaaaagtggaaagaggaaaaaaaattgtacatcccacctaaataccataaaatcgtactctaaaaaattgtacttaaaattattattttggctgtgagaaaaaataagaaagctacaataggggttgtagcttttttgttggctttatacatcttctaatgccctaccaattatacccaaaacattttttttttaaatgttaaatacattgctcaacaaaaaatattatatacaatagaaaaatgaaatttgcaagattatccataacatgggacatgaaaaatatcatggatctgagtttcgatacaattccggaaataggtgttcaaagcttatggatccaaattcagatatttaaatattttatatgatattttctgttagtctttttatttattgaaataatagttaatattattttaaaattttcatctattttttgcagatatgggtagttgcatatattggtggatccagatcttgatatttgttttatggatctaacggatccagatccagataggtggtttacggatccagcagatccggatagctgtttcacggatcatgcggttctagatctgggtatcccaaaatttcacagaaactaatttcatgttcatctttctatctacaaccggagaaacaaaaacaacatgagaaattgaaggagttcgatgatatgagattattacctttttgagtaaagcacggaatatctcgtctcgagattactaaggactttctttgaaccttgtcgtcatgtgctttggttgttttgaaaagtaagggaaaaaataggaggcggagcaaatagattatgttatagaattcagagagatgcatatttatataagaggagcaatattttgtgaattctagggttttcagaagatttatttcctaaatgtaatacgtttttagtaaagatatttgtttgataaaacttggaaaaataataataatgacgaccaactatattgttaacaatatcttactgaaaaaattgagataatcgcctataagatgtttaaagtaaaatatttcaaataaagttccatagaaatattgtaaaaatatgttactatataaatttctaaaataaatatcagttcaattaaactaaaataaactttctctaactttgacacatcaacctttttatgtgatgagaagctgacacatccttaaaacaagaaaccaatcaaaacattacaaatactacacatcaaattaatatctgccacatcagattaaatggatgatttcagcttgttggaaatgaaaacaaaataaaaagcttgaaaaacttgtcaattcctctttgatctttccgtctttactttctaattctcgtgtatctattttgaatagttgtaatacttgtatcagtttttaaatttaattttaggttaggttttgtaattaagttcgttaaagaaaaattaggaattagcagaggggaagat

SEQ ID NO: 2430 - DNA, 3000 bp, Unknown
  misc_feature (1)..( 3000): cDNA_ID_2161950_gDNA_ID_1620535_Annot_ID_159844 3000 nt of promoter + ATG
tatacaagcttgacacccgtgaaagttataagcacgattgcgaaacattgatttcctttgaagtggccaagagagatcgtcgtttaacgattattggtttataattaagtaccttttaatcaaaatataaaaggactagtcatatcttgatttttgcatctcccaacaatttatttataataaacatatttagctttttcttgagagcttgtatcaatttaaaagtttcttatagaacacatgttgaatttgtgtaaagaataaattgtgatgatactatatatggatatcacatcatatcaaaatcttaaatgtattataaatataataattaaaatccagagaaaatcaattttcttaattgaatgtttgtatatagtaatataataatttcatatgtaaatattccatttaatttggattatagttttatagaaagaaagtattttgatacctttttaaattttatctcaaataaatttgttttttaataaatatattgtgatttcagtggataagttttatctttcatcacttttagtttgttaataataaatatgaatccagttagatctcctctgatcactggctttcatctagaaaccaactaagagttttgcttctcattgcattggaatggtggtaatctacaattatgggctgactcaatttaatttgcaatgtcaccaccactgctcctcttctatctagcaaacaaatacttaattgcatttcgaaaaatcaactagtctgtctccattatcatatacataaatacaaattaacatcagaaaaaatatacatacaatctttgcacagagtcacattttcttaaaatgtataagttatttcatccggttcttatagtgaataccatatgtatatccatgtatataaattgatatttcaattaacattaaggaatcacaagcatgcatattctctcgctcccacgcaaacaaaaagtgcatgcagcctaacgtgatctctatcgttaggtagctcacaaatgacgaacctaaaccctcttcaccataaatcaaatcctcctccgctctatataaacaacaaaaaaaacactaaacacttaaataaatcaaacaaacactccacattctcaaaatcatattttcatataacttataaaagataaaagaaagaagaagatggcagcttcgtccaagtactcttccatgtcattcatgaaggtggcaatgatggtggcgctggtcttggtggtggcagccactgtggtggatggacaaagctgcaatgcgcagctgagtacactgaacgtgtgtggtgagtttgtggttcccggagctgacaggaccaacccaagtgccgaatgttgcaatgctcttgaggcagtgccaaacgaatgcctttgcaacacgtttcgcattgcctctaggcttccctctcgctgcaacattcctacactttcatgcagttgatatggatcctcatattaattctagacgctatatctttgtaagaacatacaatataacgtttcaaatacatccatatatagtttcatatgtttaataaatgtatctaaaagcttttttttttggtatttaacaggagaagcatgtatgggaagtaaaggagatggatatctaagaataaaaactcaaagtttgagttttttttttttttttttttttggtttttgttcttcactgcaaaaccaatgggtttcgaataataatgaataacaccgaattgaaattataaatggtttgagttatattatcaatttataatttgtatacatgcaaatatatcttatatcacgcctttcaaagtagtatgcatgtttaattaattggttattggtgtgaccaaacgaaccttttggttcttatacattcgtttgataattcaaaaattagggcctaggggtaacgtactgtaaaattcgcattataaattccccacacatcagatttgaaagaatttcgtccaaacacacaactgaagaaacatgtagtatctaaatttttaacatgtcgaattagagaaatcaaggtgatgttttgccatctcaaatattctccaagaattttgcttaaatgccaagaaaatttgtaaaaaaaaaatatatatatgaagaccagagccagcggtaaattgaccaaaacatccctagtagtctacctcaaagcgtgtggaggttgaaacgctcggcggatatcacgagctcgggccacacgctcatctctagtctcttttacattggctttacaaattttaaaatgaaacacgaattttatcgatctacaaaagttttgttttatattctatggtacagttacctataatgaaaaaattaaaataatataaattggtgaagagtcaaaatgtagatcttttaggctttttagctcaaggcttgtttttctctgttagaaaaagttgctgttattgttttattgtttctccctaattagtcaaaatcttgagggaaaatgacaaaagaagaaacccatgtggtcaaaatcgaagcttttttgtgttttggtccgagtaaactagggtttcgtttgtcttttttaacctttctaaaataattattcgaaaaatttggcttaaaaggtcaaaggtacaacttgagattttggggccatttgagttattaaaaaaaaaaaaaaggggagaggacaaaaacagagtattgaacaaaaaggggacaagtcatatgatataacaaaggaaagatctttctctttcatttgctgatctcactcgtactatagactaaggaaagatctcatttggtcgtcagtaaattttctgatttgattgaaaggtatgaaacttgatgaacaagcaacgtaaacactgagaaaatagtaaaagcagtgacaatacaaatatatgttgtcttgcattatgttcttctctccattgttggttttgtctttcttgttttttttttgtttctctataacttagattattgactatttaatttggttgcagagagggaaa

SEQ ID NO: 2431 - DNA, 3000 bp, Unknown
  misc_feature (1)..( 3000): cDNA_ID_3067684_gDNA_ID_1620535_Annot_ID_159851 3000 nt of promoter + ATG
gtttctccgtttacttcttctgacatcatctatcgttttctctttttccaatacatcatctgcagatctcttgtccacatactccagacgaagctaaaatcagacagagaaaagttaagagttaaaagattaacagaaaattcaatcattcagctatagtgctttccattaaactaactataacaaaaaaggagaaaggaactcacaacagtctttccatttccggaatcatcatcttcgatatcactttctttcaatttacgtgcataatgtccaatattgccagtctcaacataccgtgatgcgtctttgaaggattgaaagatatactcacttttagggtcaatgaagaactgcaaaatcaaaaacaagacatgtccaagaagaatcacataagagattttctaaagtgagcttatgtggaaaagacacaaaatgtacttttgatcaaagatgatgttatcacaaagagagtagagggtacaaactggatctcttctggttttacggcctgatctatttgttatttcaagtttcttgatccatccttcaggtaaaccttgagcagcagatttctcaactataacctgtatcacttaaacataaagagtttttcattttaagagacgtataaatgtcaaatctttttagggatcacaaagaacaaagtaacattgtcttcaaacatataaacaacacaaaactctcagatattctgtgcttatgaactttccatgaacaacctaataccagacccttgccaatataaatgtgattcatctcaaaactttccctttgcatacgcgagaggtacaaagttttagtgcttacgaatattacagtattctctcgaagatggttacttaacaatccaaattcattttcacaagatctattactcttaatgtctaaccatctcagtaaagtaaccatataattccttttcacacgaagtaaactaagagacaaacttttaaaaattcaagaaaaacttaaaaaaaataaacatctccaatcatgcacacaagtaataagagctttctaagccacagtggaaccaagtaaaatcaattgagttcaaaatgtagctacataacaaagctttgatcaaactacatcatctataacaaaacaaaaagtcaggtcaagaccattttcagacacttaatcaactagacctcttctcttttgatcacatgtcatctttccctaaaagctaagcattgcatgcaagagaaaatcactcaaacgtcacaaaagacttcacctttttccatcattacaaaatcatacaatcagaaactaagagtgaatcaaagtatttggcacttcaataaagataactacaatttccacaaaaggagctaacaagaaccaaacatgcaaaagacaatcaaaattaagaaaagggtttaaaactcataaatcaccttatcctttctcccattcttcctcactctaatttccactttcctctcagccgacaaaccatcagagatcccttctccgttcatctctccggtcaccgtaaaaccactttcctctctctcttgtatccctgattcacaactcagaatggtttatcaactcaaaacgccaaaacccatcaagaattgtcggattcagataatggacaccgtcggaagttataaagaaggaacctttttattttgtctgattgtgtgatttggttctgtctccactaaggtaaataagaaaaatagtaggatttaatggggaagaagaagaaagggtttacacgtgtagtgtggaggagtttcaatggagattccccgatttgagaggttcaagaaaactcagtccaccagcacgcgagtcttctggcccaacgcttctcttctctgattgcaatttagctcattttctccattttattctcttgtactgtttgttgtttacttccattgttattgtcccaattttaaaaaaacttacactgtatattaaaaaacatttgcttgatttggttataaaatctaattgcaaatctatttatgatgatattttttgggaaacatttaagactttgttatcattttttgacccaaaagaaaaaaaaaatgttattattgtaaatgttaggattggaagatttatcatgagaagaaaagtgaaaaatactaatatagtcaattatgaattttcataaatctgaattaaatataatttatttttacttaatatatagttttaattactttttgtttaaatttatgttattaaatttggtatttgtatatcatgtttaaaagatttagaagtatgattttattctatttctagtgatttaattattgaaactttgatttttaaaaaagtttatgtattaataaattatttggattgaaggttatatcaatgttataaaatgtgttttaaaatctgaaaagtggttgattttttctttttaaattctgcatccacgaaacttatttttcttaaaacttatttttcttttcgaggttatgattctttttagttttttttatcaaatttcatgatgaaaataactgaattgaacatcaaagattttcagaaaatactctactgcttttttcttaactatattctagccatttacatatctaagcttgatgtcttttctatttcgtcgaaaatctatctattttacggcagagacttgaaacccgaattttgacatatcaaaaacactaacacaatcccatgtactacattatcatttgtattttacttatagaagaaaataactttttatttaaaaattgtatggtaaaaataaagattagttccctaataactatataaaaaatcttattcggtcgttttagctgtatttaacttttaaacccaagaaagaaaaaaatcaatcaaccaaggaagtagtacaacaacaagagtcaaaacccaacaactctctatctagcacaaaagcctgacttttacaaagacaagccttttcaacacactactgatcttgagaatcctctcttcaaagcc

SEQ ID NO: 2432 - DNA, 3000 bp, Unknown
  misc_feature (1)..( 3000): cDNA_ID_2161987_gDNA_ID_1620535_Annot_ID_159856 3000 nt of promoter + ATG
ccgtagagttgacgaatcatgccacttaatgtgttacaggctcaaatatccaacctatatgagcccagcccacttatttataacaaagaccttaggccaagagtccgtccaaataacaaaaacgacaaacaaaaataggcgtcaagtaaattaagaatctttcaacattattgagagcctcattttttatttatattttttatattattaagaagcactacataattgaaaaaacgaaaatcttttaactaatttttgcttttctaaaataggacaaatggatttttaagttacatattttctaaatctactatttagcttcgagtatggtgtaatcgacaaacgtttatttatccaacaattaccatttgttgaaataattattttattttgaacacaaaaacaaaaacaaagtcaaaattagagatgatatattctttttttaattaaatttctctgatatgatattttaaagttttcaattactaatacaaccatcttttacgatataatactcgaaattaaacacaaaaatcaaatattctatattagacaaactatttagattgcacttagaaacacaattatgtaaatagcacttggcagatttactcacatttggcaagcagaataccagtcaggttagaaccgcatgcttcaaaaaatttgacatcaaaataatcatcaatgttttcaacttctgcaactaaaatgtatttgaagttttaaacaccttcttctgtagtctcagttaaagatccaactccattgttaaacactaagttttaaacggttaaaagaatattagaagtgaaatttttttagaaactatgttatgatatattcatgtggaagagagagagcacatatttatattggtcaagaatttgtatttggttatttaatgagagatttcataagttgattttggaagccttcaatgtcaaggcctcttagagtggatccataggtattttgataagaatcatcggcacatgttatgtcagtatagatgtgagtacagagcactatgagagaactaatattttcaaatacttgttcatccgaatactttatacctaaattattccaaattattcgaaaatactttaaaaaatctaaatttatttgaataaaaaagataagtaaaaatttatcatataatatttgggttggttactttgtaccgaaatcactacattaatcatctaactataagttagaggggtataaaatttattagatgggcttcaaatatattttaacattcgttccgttctcgtgtaatatccgatctaaaccgatatccgaaatacttaaaaaagattcagacaaatgggtaaaatattattttaacctactataataatcttgtctaatcggtaaatgttatttattcaacaatcgccattactataatcaattacttatgatagtaatgacgattaaaaactactatatacttattatagtaaagtcattattcatttggatcaatcaacaaaataatatggatgattagaaaataattaggattatttgggattttttcttttgaggagtaaatttgactatttgagtaactttctcttaaaacattaaacaaatcttacattaatataccagcttaacaaaattatcagaacgcctagcaacttagtggcccaagaaaaatatgtcttttagtgaaccagatttcttcatagataaaaagtttagtcataatccccaaaaatttatgaccaaattatggagagagtagctgagtaggggatatagaaaacttgttagacaaaaaattaagagatgagatgtctaaataacatttaaaataaaaataaaaatttaggagacaaagaagatgagtgcatttaagagagggacagcacatgttttcatgtgcttccaatacttacgccatttttttatccgtatgattcagcttctaatcattttataatcagctataaacaattttaatactttgtcattattagaaaatcaaaatcattaattctgatgagttggtttggtttaaagtatttcaggaaaatagtttaagattgcgaaaaaaatgaagagaaatgttgaaattatcaaaccaataatatctactgatactagaaaatagtgtatataaaattctgaaataaatgtgttatcattaatataacacacgcaacatacatatattctatggtgtgtacagctgtatgtacataaacataatgcatgatggatcatgacgactatgtggcatgcagataaaggcatttctggtttttcttgggtccaccaatactatcaataatggtgttatgtgcgatgtgtttcattcaagtacaataaaaacaaaatataacttattcccttcaaatttaatttcacaactagaaggtagaagccactaaacctcttcacactcactcatgtaactattaatttaaattaatttgaataaaccctacaaaaaagaaaaagcgtaacctactactctttaacctgacaaaaaatggaagctaattttccatacaaagttcactttatattatacaagtttaattacatacaatcttagacttttttgtaagtcacaccaagcaataaaaagggaggttggggtgtctattaaatttaaggacccataaaatcaaccacatttatatgccttactgcaataaaaagaaaagcacttttcaattcaattaataaactattaaaagttaatttcctactcaatcaaacccattaaagcagtaagaaaaaaaagggtttagatggaatctactaataactcactgattaagttttaatattaaaaaagttgtacgaatcaacctttatattgtacaaggaaagtgatcatcgcagactgtaaatcaggttttgttgttttgttttagtttcctcctacattctttggaagaaactaatacaaatcagagaatttgagaatccaaattttgggttgaagaagtttttgtttctgtagagaaaaca

SEQ ID NO: 2433 - DNA, 3000 bp, Unknown
  misc_feature (1)..( 3000): cDNA_ID_3067701_gDNA_ID_1620535_Annot_ID_159849 3000 nt of promoter + ATG
acctgaaggatggatcaagaaacttgaaataacaaatagatcaggccgtaaaaccagaagagatccagtttgtaccctctactctctttgtgataacatcatctttgatcaaaagtacattttgtgtcttttccacataagctcactttagaaaatctcttatgtgattcttcttggacatgtcttgtttttgattttgcagttcttcattgaccctaaaagtgagtatatctttcaatccttcaaagacgcatcacggtatgttgagactggcaatattggacattatgcacgtaaattgaaagaaagtgatatcgaagatgatgattccggaaatggaaagactgttgtgagttcctttctccttttttgttatagttagtttaatggaaagcactatagctgaatgattgaattttctgttaatcttttaactcttaacttttctctgtctgattttagcttcgtctggagtatgtggacaagagatctgcagatgatgtattggaaaaagagaaaacgatagatgatgtcagaagaagtaaacggagaaacttatcttcttctgatgaacattccaagaattgtaagtacaaagtcttttgggttctgattttgccacttgccagggtataatcatacttatgccgtgagttacgttaagtaagtgtcaacattcgattatatatgcaggtaaaatgacttctgacttgagcattgtaacctcacaagttcttgaggatttggggaagaaggaagaggtgaaagatcctatcgaaaagcagctcatagcgaaacgggttactagaagccaaactaaagccagtacgactgaggaagtcgtcgtagatttaaaaagaaatctgtcttcatcaaatgcaaaatcagaaaaaggtgtgcagatacctgacttaatatttccacctgagtagtggctgagataacaaaaagatttgaggacaccaattttttctatgttctctatatttgtagattctgtaaactccagtgtaaggtcacaaaaaccaaagaaggaagctgttatgaaggaagaagaggaacaagattcttctgagaaacggatcacaaggagtaaagttgaagagaagaagaatgagctaagtaatagtgtagcccgacgaacatcaaaacggttagctggtattgagcttgaaccaacgcctgaactgaagacaagagccaaagttcaacgaatagtaccgcttgatgatgaaccgacgcctgaactgaagacaagaaccaaagttcaacgagtagtaccgcctgatgatgaaccgacgcctgaactgaagacaagaaccaaaattcaacgaatagtacctcctgatgatgaaccgacgcttgaactgaagacaagaaccaaagttcaacgaatattacctcctgatgatgaactgacgcccgaactgaagtcaagaaccaaagttcaacgaatagtacctcctgatgatgaactgacgcctgaatttaagacgagaaccaaagtacaacaaagaatacctcctgatgatggcagagccggaaagtgcaagcaacctgtgaatcatgttactaccagcggatcaaaaaagacggaaataccgctcaacaaggaagtagcccaaagctgtaatgaacaatcctctcagaaaccacatgctgctgctgcaacaagcaacaatcgtgtgagtgcagattcggcagtgggaatacaaaatatcggtaaagcagtaggcaggaagccttctaaagacaagaagacgctgaaatcaccactgatagtatatgaactgaatccagtttttcatcttgacggttacaagcagaaggaagaaatgtcacctgtgtcaccgttgtcttgccaaacttctgcaacaaagtgtgagaagacagcagcaggcaaaagagtgggaaggtctagcccaaaggctaaccttactaccagtgtgaaaccaactcagatctcgcctctgagatcaccaaataaaggaaagcaaccacatccttctgacagtggttctgccattcaaaggagaaataaactagctaatgagtattctaactcatccgttgtaagaggcacatgctcagaagtgatggagaagagtaccaacagcttctcctctgcatttgactcgactcttgcagatctttgtaaagatccttgcattgcctttgctatcaaaactctaaccggagaatctctgtgtcttctcaacactccagcgatctcttctaatcccattaacaaccacaccaagcagaaaggagtctcctttaccccagagactccaggaaatgttaacacatgctctgaaaaactggtatttccgagtccacccccgggtgcaaatatctggcaagacccgtgtatcgactttgctataaaaactctaacaggcgcaatcccgatcgggttagatgaaccagatacgaagtcaaagtcacaggggatgacgtctactacagcagcaacacaagaagctaaaggtaggcaaaacaactgtgattatatgacgaacaagactgtaggtaaacctgatgatctaaggtttacacaatctttctctaaggactaacaagaacaaaataaagcctactgtacttttaggtgttttcgtatattagggtttttgataatgccattggtatcgtgtaagatccatgtgcaatgccttagctttattttctttcgggccatgttctgttgtaaatacatatgtattagtgttgtgtatcgacagaaccttgaaaaactcataaaaactcttcctttaaccacccccaatgatcttgtttcttcttcttaaagatggatcttttctagttttctttctcaaattttgaatgcatctttgagaagatgatggtgacgtcatcttaaacgaaaaaagcccgcgaaagatctctaattttccgccaaaatttatatacatacatatatataaagtgaatatatagaattcgaagaaaacggagaagaagaagaagaagaagatg

SEQ ID NO: 2434 - DNA, 3000 bp, Unknown
  misc_feature (1)..( 3000): cDNA_ID_3067703_gDNA_ID_1620535_Annot_ID_159848 3000 nt of promoter + ATG
atgtcatatcaaacaaaaatacaatgacaaatttggaatatgatgtaagaacatagaacatggaagaacagaggtgacagtaagaaattgcattcaaaatgctataaaagacaatcacataattgatgggagtttttgtttccttcttaaatttctggaagattcaaattgataaaaaccaagattagttgagattgagagctctctgtgaaacatggagcagagtacacatttgattgaacagaaaggttttatattaactcaggggatgaagatgacgacgtccctgataccgttttggttgcatctaactctttgtttccgcctttagtgtgtcgtgagtttgttgttgtctctgatttactaccttttgcaccatcatcctcttcctcttcttcttcatagaatgaccctgaggatctcagttccttcaccttccgaaactcgtcgtaatgtgcttttctgtgtgcgttgaaacgttcatttttaccacttccagaacctgtggttttgcacacaaaaaaaatagatatatcgggatgacctaacaaaagaacctatatatgacagtagatttgtttggttttagaggaggaccttcttcatcttgatccattggatctgcttcttcttcttcttcatcagacgagctccagccaccaccaccagaaccctggctactatttctactggaagaagctgctgcatcattcagaacattcctcagttcttcagctcgttgcatatcatcaacacattcatcaaacgctcttcctctaggagacaaagaacctggcacaatcaatcacggattagaacagatcagaactgattcaagttaaccttacatctagagtgacaaatttccaaatcaaccaaccaattgcaggtacaagatttcccccaaaaagataagtaatcgtccaactttgtagatgaattaaaaagcagataattttcacatacaatttgctcttgctttctgtctgacatacattccatttttacatatatgtttagatgatgacaagtatgtatcaacaataaaatgcaaaaacgtcataagcatataaacgtgtatcgaaagttctgtgcatatactaagagaaaccaaataaagaaaaatagacaaaccatcatcatccatcatcgggtggtatggtgtctttggttcagtaatcttctgcctaacaggtttgttcgattcaatctccactatattagcttcatcccattgaacacgccccctgccataataacaaacatacttagtgacaattccatgagaaactatactagattatacaaaagatcacctctctttacaaaagaatgacgatgtctaagccttaaactaaagacaataaagttcacagaatcttacagttaaacaattctgctggaatatgaaaatccatgaacattaacacaataagacctccctcttccatttcctttttcaatgggtgtagtagaaaatatatctgttttacgattccttcataaaaagaccgccatataaggcttagaacttcatatctatgaatatacatccctccacaaaaatgacataacacagcccattgacttcacaattgatcttatttgaacacattgaaaaggtaccgttctgatgcagcaagcattctcaaatctaatagaaactaaagacacaagcgaaagtaaaaatttgaaaaggagaaacatacttcaaagaaatccatcaaaatcaatccaatctgctaactttccaaacaaaagaacacaatggtataactgaccactcaaaatcacaaacctttaaatacgaagaagcaggaatcagtatctacctctctcatgatcattgagctaaagtatcctaaaatctataaagcaaaaacctcctaaatttctcaaatttgctgagtaatggtttcaatcagaaagggtttaacctaaataaccaattgatatcaaaagcttatcactttcctcaatcattcacccataacatatcccgaaagacactgtaagaaaccctagcctatgtttggttctacaaagaccaaaactaaaatcaaagatagatctttcgtgacaatcatcaaagattcaaactaagagaaaacaatcaaaacaataaaatttatttacctctttggttcggtcatcttcaaaatctccagcaacttttttctttgtctcgatcgcaagtttttaagacctgttgtgttcttgattaaagaagatacgagggtcaactaaagatgcaacagaaaccgtccgtttgtttgacttttatcactgttgcatccagattccgccacgtggattacttcaaacccgttcgattgatcaagcgcgtgaagacttgagtaagggtagtttcggaaatacactttagaagtttttttttttttcctttttcctgagaacgatcgaatcgaagacggagtgtgcaaaagccaaagctttgatctttcattaattcttctcaagatcttcagagtctgtaagtatttttggaatcttatttttcttgtttctcaatcgatgtaaaataaaattcagttgttgatgattttaccatgtttcgggagcttgtgttgatctagttcttcgctctcactaggctaattttgatcttcctgatgtgcacaatgtgaatgggtcttaggtattagtgatttatcggctttttatttgatccattatctatccaaagatctaattttttctgttttgctgaagttgtaaattggaacccttttgtgaattgtgtggtttttttagtttggtattgcatagtggtttctctgaaactgtgaattagatctgagaatggagtcttgtgatctccaattacttgtgtgatgcttttgttatgcttactcaaattatgataaggaagcaaagttatgttgatgctgatgataataagctcttctcttatttttggttcatgtgaaagacaagggaagatcaaagtaattaaataagctgaagtaagaggaagtg

SEQ ID NO: 2435 - DNA, 3000 bp, Unknown
  misc_feature (1)..( 3000): cDNA_ID_3067787_gDNA_ID_1620536_Annot_ID_159872 3000 nt of promoter + ATG
ggtagttcggcatgtgttttacccacgatatatggcgtcggcctggtttatggaggagatccgtttgactcagggcttgtctatagcagtcagttgtcatcttctgtgcctattttgtcaaagtttaatggcatcctcctctccgtgctagggcctgcttttggatatccgattgcatcttctgcaggtaccttaatgcaaacacgattttacctataatctggtaatagctagcatttgcttctactgagataataatgctgtttgcagtaagagtacttaaagggttatggagaaatgacttaacggctctaaaaggagactgcccgaattgcggggaagaggtgatttctttacttgtagttcttttgcagcaacaaacaaaattgttgttgttttcagttctcgtcacatttgagtttgatgaacttgtgtaggttttcgcatttgtgagatccgatcaatcgaaccgatcagctcacaaagccgactgtcatgtctgtgagtgcaccttggagttccgtaccaaagtagaggtagatgttagtgtttttttcccgtgtgttgcttcatcgtgaccttgtttatttgaacaatctctgtggtttaaatgtgaaccagtcactgccttagattaatccttctgtagctttctaacaacaaagattatttgtttggttgtctatctgcttcagaaatctgcctcacgattggggagaaaatgggtttacggtaggatataccttgtttcacggccaaggagagatcggcgttcaaagtttacataattctaacaaaagaagaaagatttttttgggatggtttctactcaattgtgtattgtaaaaatgatactatagaaagcttttgtaacattcaaaagattcataaaaattgttactataacgttttgtctcttgtagccttatcttcagacagtttacaaaaacaaacaaaagaacaaaaagattcgttccaaagttccaatgcctttgctgctgagtgaaaagaatgttgctcagcttttttttcagaagtgtgccaagctatagacaagaatccatgcgagctgaagacagaacattaaacagattctgttagaccttataattactgttaaagaaagagtctgtactgttgagatgaaaacaaacttaccaaaaagagagtaagtgacgcaaagagaccctcttggagtaaagctgcgtggcctccgaaatcttcttcatcaaccttgagaatcattgcgtagtaaccataaactatcccagaggatatcgccaaaaacctgcaaaatcccatcattagttcattacatcacaaagttttgccaaacttaagaggtttcaaagaactgtgatccatgaatctacggctttgggtcgatgcaaaatgaaactaaaacacgaagaaactgatagaaacgaagctggaacatgatccaaaactaaagactgttcctttgcgttttcatcaaccattataacatgaaaacacaaatgtggaaagaaacattagtggccaaagttaatgaaaacttacagaatgatccaaatgcctccaacaagtggaatagagccccataacaatccagagatcaatcccaccacttgtcgaatccaatgtaacacatctcctaattgatcctgcatcatcattaacaaaacaaaatccaattcataccaataactcaaatttacttgagcttaaaattcacaaattgaacagtagagaacagcttgatcggatcaattattcatttccttactgattcagtaagatcgactacgacgattcattaatcaaatctccatgtaaaaaaagtcaaagactcaaagagattgccgaaaactagggaggaagaagagagtgttgagtaccttgtcccaagaagcatcgggatcgaacaatttcgctaatttcgatggagacaagtgagcattctggtgattctcttgttgttgtagctgattcagcttggctgatttcgattctttcatcctcgctttcaaacaaaaaacaaaacaaaactttggatacggagagaatctgaaaccttgggaagaagaaaccccctttgtggagtattgaattagggttcttagatttaaagcactgttaattggtgaactagtggctgagtcgtgagattattattaaactgtgagtgtagttcatgttctgtatcgaagtgattcggactgtgatcgagtttcttttttttcttcttggtaaattaaaagataaatccattagttctagtaattaattatcccttaattataatatattgggattagcttttggatattttggatctgatgcctcaaaatactgcaattatgtaccttgtttatatagtgaaacaaaattatctatactgatgttttgtttttgtctgcaatatattaaaaaaaaaaactattttcgagttctgactttggtcaaagtttgacttttatttgtaaagtactcttcctcaaattcggtcagtttaaaactttagttaatgttgctattaatattaattaatgtagtcatatagtttttaaactaacaatatgagtaatatttatatattattaaaaaaacaatattagtaatagcctaatatttgtcatactgtaatttaaaaaatttatatagttttgaattctcataaaaatttgtgcaaagatattataatttttttttgtgtaaaactgattttatcctttggtaagcttaacaaataaaataaagttatcgttgatggcaaaaaataaaaaaataataattatcctatgcaatttgcatctctagtcctcgttatttaaataaactacagatcgaacccatttctcgttccttttttttagtctccctccgcgtagaagcttctccgagacttgtctctgctttgattgaagaagacgcttgatcgaaaattcccttagatttcgtaaatagggttttacagaaggtgagattacacagagatcggatttgcgaaaaaaaaaa

SEQ ID NO: 2436 - DNA, 3000 bp, Unknown
  misc_feature (1)..( 3000): cDNA_ID_3067768_gDNA_ID_1620536_Annot_ID_159885 3000 nt of promoter + ATG
tgggttaggtcacacggtacactcgaatcggatagtaacggtactggctcaggttccggctccggtggaagattgaggaggatggttcgtggaatggtgtcgttaatgaggagagtgagaccaaaccgtagctcttcttcttcatcagctgcgatatcaacttcttctgataatctggatttgaacattgaagtagaatctagggttttggataggtcaaattcagtgatgagaagatacttcagaagaaacagaagtaacagggattcttcgtcttcagttcttcattgattcagaaatatatatatattattttttggtttgttcattcaacaatgtaaatataagattcagaagaaaaagattggtgcttcgttttctattatcaattcgattaattcttccttatgttgttacatcaaaatgtataatgttcatatagaagtgttcatcttttgtcttggacccagatgctttgaaacttttcccaagaatttggctttctttggtttccgagaaaatccgagaaagtaaaagaatgtgtgcccgaaccctttaaccttttttgagtttttccttggattcttagagaaaacaaaaagaaaagaagaaaagttgcgagaattgatggtgaagttgccaaatttgaatttgaattcaattccaagtttttcttattcgtacgtaccgttacatacttacatttatggttggaaatggttgaccaggtcaaaactgtctagtccaaatattgaactatgagttaataacaacacatcacatatactcaacactcaaaatcctctcctcagtttcagaactcaaatttcggtgattcaagtggtatcaaagatggctaaatgcataataatttagtacaattagtcctcactaaaagaaaacaaggaaaaatcaagcacgacaagtctgagtgtgtatggtgtgagagagagaccacattcatgtaatcattacctacattcagatattccacaaaaatggacaaacataaatcggacccacacaccatcaacccaacccctaccattcattctcaatctttccttttttatcttcatttcctgtttcttcatatatagcagaaacctttgggaattagacaggaagagcacataatgatgaccaaaaactctatcgaattcgatccttacatcgagcgtaaagctttcgacgaaacaaaacaaggtgtgaaaggcctcgtcgacgctaaaatcactgaagttcctcgtatcttccaccaccgtcaagatatcttaaccaacaagaaaccttctgcttcggtatcagacctagagatccctatcatcgactttgcaagcgtccacgcggacacagcctcacgtgaagccatcgtagagaaagtcaaatatgcggtggagaattggggattcttccaggttatcaatcatagtattcctttaaacgttcttgaagagattaaagatggggttcgtaggtttcacgaggaagatcctgaggtcaagaaatcattcttctcgcgtgatgccggcaacaaaaaatttgtatacaacagtaacttcgatctatacagttcttcgccgtctgttaattggagagattctttctcttgttacatagctccagatcctccagctcctgaggagatccctgagacttgcaggtaacgggaatattctttaactttttcttaaaaacttagaagtgagattagttaacaacttaattaggtcgtttaatagatttctaaattgtttattgactcagggatgctatgtttgaatactcaaagcatgtgttgagtttcggtggtttactatttgagcttctctcagaagcacttggtttgaaatctcagacccttgagagcatggattgcgtgaagactttgcttatgatctgccattattacccaccttgtccacaacctgacctaacgttagggataacgaaacactcagataactccttcctcacgcttcttctccaagacaacattggtggtcttcaaattcttcatcaagactcttgggttgatgtctctcctatccatggagctcttgtcgtcaacattggagattttttgcaggtaaagtaacaatctgtagaaccaaataccttaaacttaaatgtcttgtttaaataattttaggtttgatttgatgcagctgataacgaacgataagtttgtaagtgtggagcatagagtgcttgcaaatagacaaggaccaaggatttcagtagctagctttttcagctcaagtatgcgtccaaattccagagtttacggaccgatgaaagagcttgtgtctgaagaaaaccctccaaaatacagagacataaccataaaagagtattcaaaaatattttttgagaaaggtctcgatggaacgtcgcatctctcgaatatcaggatatgaaaaacgaaaacgacagaaatttcttaatgagtttctttgcatcaattatactgtttgtttatgtctcttcaataatcaaaccaatgcatgtaccaaatataagaaataattgtgtgtgtcgttgtgtgtaaactatgtatatctgtatattcgttgagctactgtgtatttaaatcttatcacttgtaaaatgttatcaagtgatattgaccgcaaagccaccgcaccaatcacccatactgttcctcaacacccctccagctgaagctgaccctgggttcccacgcgaggcgccgtctgtgttcagtttaaaccagccccccaaaggagccgtccagcaaatttgtttctccactgttatcactatttacagggttatatgcgtaattaaaaactaatcagtccttaataaaacaaaagtggcgaagaaaaattcaattacgacaactcattaaagtcagtgtgaaagagagaaagagacaacattagttccggtcagaatcaacaaccgtctattctcagtcgtcctttttatcttcattttgctgttccttagaaggaggtaagaaacagtaaaatg

SEQ ID NO: 2437 - DNA, 3000 bp, Unknown
  misc_feature (1)..( 3000): cDNA_ID_3067760_gDNA_ID_1620536_Annot_ID_159890 3000 nt of promoter + ATG
aagagtaggctttaaagcttccctacgagcttgctcattcacagatagaacactgcatcccaaagattctaggtaactagattcagttgcagagagaactgggtcaaacacttcaatgttatcaccaacccaatcaaactctctcttcatcaagattgcaatgctcagctgaaacctcggagattcataagactcaatgctacctataccgtacatcaccatctgcaactgtgtttcagaccctaacacgaggcgaatctgattcgaaacctcaggagacttaagctgctccaagaatgctgtgtaaaaactcgagctttcgattttcttcagagagatttccatcttctgctttagtcttgcttgtctctgtggatcaatttcaagatcatctgatttccatggttgctcttcttcttctgcttgacctttaggtttcggttttcttcttcttccttgtcttcctttactaggtaagactactttccactcaccatcactgcttgagtttttaacagtcgtttccattgaagcttccacaagaaactggttttcctgatctacttactccacagtcccccaaaattagggtttctactcaatgcaatgattccattggttccgattacctaacatcacaataaatttcgattcctaaacctaattatcaatctctttgcttaactctgatctatctactttgagattgacaaaaatcttcgataccgagcaaaattaaacttacgattagagacgaaaacacaggaggaagatcgaagaagcttgcttgaaatacagaggaagcaaagaacgcttcgaatatgtggtgaccgagtggactcagtgagacatttgtgagtttggtgcgccgagtcgcgcggcgataaagtgaatcagatgatttgtacgcgaagatttggtaaacaggtattgggctagaggaaatggaatgggtctagatacggcccaataaaggcgcgagatagagacaactgaagtcttgtttcctgttatttcttttgattttgttttactaatctaaatatactaaatcagcagtcaattttccaataactgatgcattcagtgattgacacatcagcttagtactacttttttattttttcatttttacgcatagtatgtgtcgtttttatttaactttgtttcattctcaaacgattttctctttcatccccacgatctccacatctccactttctctcttccaaaaactccatgactactgtgtaaaatctcaaagatgggtttctcaacatcattaatcgattactcagaaatcaggtactttgttcatctcaatgaaccaatttaccatcttctatttttgtttgtaattttgttttatatatatagaattctccatagatccgaaaatcatatatccttcttctagatttctatggcttttttttttttttgctttgtttctgctttatttgactgaattcgatttctctcatacatctccatttttccataggattattctttaatacaatcaatgcctatgattctcccgtctcacaaacactcaaagaacaacgacaaattttggcttctcatctgaacagttgccttaaaacaagggtgagtttaatatcttaatcgaagctcaagtgtttttttaatggtaaattaattctcatactttttactattcttctttcatctcttattttacttctttatatttgcaatttcttttttgtattaaaccgcaattgtattttcacgcaagatttttgtattaatacaaatacttcaattttaaagtcatctcttattttacttctttatatctgcaatatctttgatattgtttcaaaggcagcgtctgcgttatgtagttacttacttgtgcacattttacatttttttttagacttccaagctttgggtgtcaacgaatgtttgtaaactgaattactgatgatgagaagaagaacacattacaattggttggagctaatgatgaaataagcggacatgtatatacccagcataattttcgtacttatactctcttatatttctaaactcttgatttgttagttactgtctatcgcaattgattcattgggtagaaaagttgtaccttctttatatctttttcttaatctttgtatattcttcagtcaatgataataaatttgttgtatatttatgctgtctgctttattttaaaaatcttagttaagagttgtagcagatataatttaaaacaatgttgtccctgcatagtaggggccaaatgctagtagtagtttaaaagtaaagtacgtaaaataaaataacgtgtatttttcattataggaaatgtagtttaggccgttattgttctttttcattataaaataacgtgtattttatgtgttgctgtttaaccctaaactcagacagcgaatgttgagttccgatgcagtggtgtatggtttgcggatacagtaaaacttttataaattaataatattagaattgcgaaattttgttaatttaaacaaatattaatttatagagaaattttttaaatttaataattgttttaaaaattgaactcttttcgtagcccaaacccaccggtattgaactctttttggcccacttagccacgttaaagggtcacttgttactagttgtaattgcaactatctgcctaaaccgtcgtgccttttgtctacattctagaaccatgcactaatgacgtggctggagataagttggttgattacacacgtgtcacttagacagagcgagtagactttgatgcgggtaaaagatattttagattatctagctcgctaggccacgttggcggatatttgcactttttctttttttaaaaagaaaaaaaactaggctctacgaattttccggtcaccttctccgatctctgatccgatatttttccacatgttgttgagctttaaaggatttgaaaccgttatgaaagttatgaaaacgaagagtgtgtgaaac

SEQ ID NO: 2438 - DNA, 1071 bp, Unknown
  misc_feature (1)..( 1071): cDNA_ID_2162090_gDNA_ID_1620536_Annot_ID_159892 3000 nt of promoter + ATG
ccgagattggagcattatgcttgtatggtggatcttctcggccgagcagggaagcttgttgaggcctatgagatgatcaaggctatgcgaatggagccggatttgtttgtgtggggtgctttgttagctgcgtgtaggaatcacgggaacatggagcttgcaaggattgcagcaaagcacttagcagagctcgaacctgagaactcagggaatggtttgcttctgaccagtttatatgccaatgctggtagttgggaaagtgttgtaagaatgaagaagatgataaagaagaagaggtttagaaggtttctaggcagcagctgggtagaaactgtttgatcctaagactcattctggttttgatcatcaaaaccgacttagattttgaaaaaaaagatgaatcggtcacatgcgcctcgaggtcaagtgtcaccaagcagctaaactgattccaataaggccagtttggtttctgtttggattgttacaagcctgacgctgggtcctggacttatattaaattaagtacataatttgaagcttgttgaggcctgtgaggctatgcaaatgaaatcggacttgtttgatcaagtagtggtttctattttatttggatatggaaatctatgttaaaaaaagaaaacaatattagtattaactaaaaatagaaagaaagctaaaagaaaaaaggaaaggatgagaatgagatagacatgattagaaaatgacaaaaggaagcctttatatgggcaagtcacggcatttgtcatttcccgaagctaatcttcttcggtttctttgtctaattttgtaacccacgtgtttggtcttttgctgctcctttcacacaatgttgagagctttccccaacctcataattctttccattaagagataaaatatatatatatatatatatatatatatataatgtcgatgagaccaatgaaatagttaacctatctctcacgtgtctatatatcagataagcagccttatgtctctttgagctttttccatttcatatattgagaatgagagagaattaagaaaaagagagagaaaacaatg

SEQ ID NO: 2439 - DNA, 3000 bp, Unknown
  misc_feature (1)..( 3000): cDNA_ID_2162086_gDNA_ID_1620536_Annot_ID_159891 3000 nt of promoter + ATG
cacgtgtctatatatcagataagcagccttatgtctctttgagctttttccatttcatatattgagaatgagagagaattaagaaaaagagagagaaaacaatggaggaaaagcaagtgaaggagacaaggatagtgttggttccagttccagctcaaggtcatgtaactccgatgatgcaactaggaaaagctcttcactcaaagggtttctccatcactgttgttctgacacagtctaatcgagttagctcttccaaagacttctctgatttccatttcctcaccatcccaggcagcttaactgagtctgatctccaaaacctaggaccacaaaagtttgtgctcaagctcaatcaaatttgtgaggcaagcttcaagcagtgtataggtcaactattgcatgaacaatgtaataatgatattgcttgtgtcgtctacgatgagtacatgtacttctctcatgctgcagtaaaagagtttcaacttcctagtgtcgtctttagcacgacaagtgctactgcttttgtctgtcgctctgttttgtctagagtcaacgcagagtcgttcttgatcgacatgaaaggtattcaagattctagcttgttttatcttaattcaaaatcctatttatagaaactaatccaaatgatcgatgttatcttttcagatcctgaaacacaagacaaagtatttccagggttgcatcctctgaggtacaaggatctaccaacttcagtatttgggccaatagagagtacgctcaaggtttacagtgagactgtgaacactcgaacagcttccgctgttatcatcaactcagcaagctgtttagagagctcatctttggcaaggttgcaacaacaactgcaagttccggtgtatcctataggcccacttcatattacagcttcagcgccttctagtttactagaagaagacaggagttgcgttgagtggttgaacaagcaaaaatcaaattcagttatttacataagcttgggaagcttggctctaatggacaccaaagacatgttggagatggcttggggattaagtaatagcaaccaacctttcttatgggtggtcagaccgggctctattccggggtcagaatggacagagtccttaccagaggaattcaataggttggtttcagaaagaggttacattgtgaaatgggctccgcagatggaagttctcagacatcctgcagtaggagggttttggagtcactgtggatggaactcaacagtagagagcatcggggaaggagttccgatgatatgtaggcctttcaccggggatcagaaagtcaatgcgaggtacttagagagagtttggagaattggggttcaattggagggagatctggataaagaaactgtggagagagctgtagagtggttgcttgtggatgaagaaggagcagaaatgaggaagagagccattgacttgaaagaaaagattgaaacctctgttagaagtggaggttcctcatgcagctcactagacgactttgttaattccatgtgaagatgatgaagggagataagatagtccctagtctcttagcaaaaaaagaaaaaaataaggtccctagtcaaagtcgaaagtgcatcaagatgatatacaggacatgaattctattttaagtgtaatatttggaagttgtctctataataagaatttttacgttgttgtcaaaaaaaaaaaaaaggagtttctgcatttggatacagaagcattattttaagttactctcaaacaggataagagataaaagatgttgtgcttctccattacagtttcttagaccaaattcaatcacttaaaccctcgaagttacatcaattattttcactttgtcactataccaaacagctcaactattttttacttgaactcttaaagttactgcaaattattttcactttgacaccataccaaatcaactatttttacttgaacccttttaagttactccaattaatttcactttgtcgccaactcaactacttttgagttactttaatcgaactcgttttgatggtcacaagccagaggttgtgtcttagaattatactatttaagtccttgtacataattttcagaatgagaaagctcttgatgcttttaaacagatgttggctcatgaatattatatccaaattcaacaacgattactagcattttgcctgcttgtacctcacttgtgaatatgaagcagggcaggagatccacggctactcggtggactagaagatcacggttttgttactatcaaaagtaatgatcttgtttgataagaaaacaacggtttgaaggaagttagataaataacatgttggtcaagtaaactacaaaaatacaaaatcctttgtcttttgccgcgtctatacatccacactacaaagttatgaatccgaattacggcaacgcggcagctacagtggttagatgtcatgttcagaaatgaaattctaaggtgtacgtacgtcgacataatttaaacgagtgtgctagttgttatgttcagacatgaaattatatgttaaccttaagcaagagggaaaataagtaaataaatgatagaggtagacttaattagaaaaatggtccaaaacaagacaacaaacttaataaagaaaatgacaaaaggaagccttaaatggtgctagtcaccaaatttgtcacttccttgtaactttgggaattctttgtctagtttatatactccacgtgctttttcttgtggtatgtccttccttccacaatgttgagatctttccctaacctcataattttccacttagggataaaaataaataacatgtcgatgagaccaatgaaacagttaatatatatcccacgtgctatatttcatattaattagatctggttcaagcatttaagcatccttatgtgtctttgagatttttccattcacacattgaccaaaaaaagagagagaccaagactccaagagagaaaaacaatg

SEQ ID NO: 2440 - DNA, 3000 bp, Unknown
  misc_feature (1)..( 3000): cDNA_ID_2991041_gDNA_ID_1620536_Annot_ID_159886 3000 nt of promoter + ATG
accgtggtttatttctatgtcaatcaattgtatttgtgtttctagtctttaagatggtaatcagttgccatcattacgatttgtctatctattttcattggttgcaacttgcaaacaaaaagagaagaaaaatagttgaggaacttttcttttcgtttgtttttaacttttgataatatggtcaatttattaagaaagcattacatcccttatattgagttataaatttagttgttaatacacaaaggtactattcaccaaaaaaacaaatacacaaagatactagttggtttatgtaatgtatttttatcaaattcacctataatttatgtagccatcggttgacaaataaacatattgagccatcaacgtgtaacaattctaattttctaaatactccatcctccacctcattggtcgacattataaaatacagtagtatatcacaaattgtttaatgaaattcattttaaaaaaagaagaaaaaatagttaaaaagtgatataattattttgcagttagcacacttttgtttctggcatgattcacaggtcgaaacgatgtcgtttagtgtctttcccagaaaaaacggagatcaaataggtcccaaatggatcccacaaacagcagacacggcgcttcttttgaattttctactcggcgttttacactttccacgtttggtcaaaacgctccttctctatacgtaacgaccgtttataactccgctatcatctacccagtcaaacactcaccacgtgtctatttaccgtctaatccgacaccgttaattccgctcctaagaatcgccttaaaaaccacgttttcattttctcatcttcaaacctctctgtcattactctggtcagcgattcttctttcttcttcttctcagatcctttcaccgagtaagaagattttaaagatgccgtcaacgccgacgacgccgactacaacaacgccgatcacggcttcgtattggtgttacagctgtacgcgtttcgtcagcgtttgggctgatcaaggcacaacaaccgtcggtagcgtcgcttgccctcactgcgacggcggttttatcgaacagattaacgattcttcctccgccgctaccgaattaacgattccggcttctactgaagtaagatcgatcaataacaaccgtagatccgtgattagacgccggagatccggtcgtcgtccgtcctttaatccggtcatcgtacttcaaggaggcgccggcgagagagaagagggagaagaaggagatgcggctagagatcgacgcgcttttgagttttattacgatgacggatccggatcgggtcttagaccgcttccggattctgtatctgagatcttgatgggatctggattcgagcggttacttgaacagctaagccaaatcgaagcgtcggctactggaattggtagatctggaaaccctccggcgtctaaatcggcgattgagtctttacctagagtcgaaatctcggattgccacataggctcggaggctaattgcgctgtttgcacggagattttcgagacggagacggaggcgcgtgagatgccgtgtaaacaccttttccacgacgattgcatcgtaccgtggctatcgattcgaaactcttgtcccgtgtgcagattcgagctaccttcagagcctaatcgacggagcaacaacaacgaggaggataacgccgtggggatgacgatttggagacttcccggtggtggattcgccgtagggaggtttaacgcagcaatgagagacggagagagagttttgccagtggtgttaacagaaatggatggtggtgggattggtaatagccaggatggtcctagacggatctcatgggttaggtcacacggtacactcgaatcggatagtaacggtactggctcaggttccggctccggtggaagattgaggaggatggttcgtggaatggtgtcgttaatgaggagagtgagaccaaaccgtagctcttcttcttcatcagctgcgatatcaacttcttctgataatctggatttgaacattgaagtagaatctagggttttggataggtcaaattcagtgatgagaagatacttcagaagaaacagaagtaacagggattcttcgtcttcagttcttcattgattcagaaatatatatatattattttttggtttgttcattcaacaatgtaaatataagattcagaagaaaaagattggtgcttcgttttctattatcaattcgattaattcttccttatgttgttacatcaaaatgtataatgttcatatagaagtgttcatcttttgtcttggacccagatgctttgaaacttttcccaagaatttggctttctttggtttccgagaaaatccgagaaagtaaaagaatgtgtgcccgaaccctttaaccttttttgagtttttccttggattcttagagaaaacaaaaagaaaagaagaaaagttgcgagaattgatggtgaagttgccaaatttgaatttgaattcaattccaagtttttcttattcgtacgtaccgttacatacttacatttatggttggaaatggttgaccaggtcaaaactgtctagtccaaatattgaactatgagttaataacaacacatcacatatactcaacactcaaaatcctctcctcagtttcagaactcaaatttcggtgattcaagtggtatcaaagatggctaaatgcataataatttagtacaattagtcctcactaaaagaaaacaaggaaaaatcaagcacgacaagtctgagtgtgtatggtgtgagagagagaccacattcatgtaatcattacctacattcagatattccacaaaaatggacaaacataaatcggacccacacaccatcaacccaacccctaccattcattctcaatctttccttttttatcttcatttcctgtttcttcatatatagcagaaacctttgggaattagacaggaagagcacataatgatg

SEQ ID NO: 2441 - DNA, 3000 bp, Unknown
  misc_feature (1)..( 3000): cDNA_ID_2162072_gDNA_ID_1620536_Annot_ID_159884 3000 nt of promoter + ATG
atcttcattttgctgttccttagaaggaggtaagaaacagtaaaatggccaaaaactctgtcgaattcgatcgttacatcgagcgcaaagctttcgacaatacaaaagaaggtgttaaagggctcatcgatgctaaaatcaccgagatccctcgaattttccacgtccctcaagataccttaccagacaagaaacgctctgtttcagacctagagatccctaccatcgactttgcaagcgtcaacgtggacacaccctcacgtgaagccatcgtggagaaagtcaaatatgcggtggagaattggggattcttccaggtgattaatcatggtgttcctttaaacgttcttgaagagattaaagatggggttcgtaggtttcacgaggaagaagatcctgaggtcaagaaatcatactactcgcttgatttcaccaagaacaaatttgcatacagtagtaatttcgatctatatagttcttcgccgtctcttacttggagagattctatctcttgttacatggctcctgatcctccaactcctgaggagctccctgagacttgcaggtaacgaaaatagtcttagcttttctttgttctttttttactcggaaacaatcaagtattagagtgattaatttctaacagtattgatttgactcagggatgctatgattgaatactcaaagcatgtactgagcttaggtgatttgctctttgagcttctctcagaagcactaggtttgaaatctgagatccttaagagcatggattgcttgaagagtttgcttatgatctgccattattatccaccttgtccacaacctgacctaactttaggaataagtaaacactcagacaactctttcctcacagttcttcttcaagacaacattggtggtcttcaaattcttcatcaagactcttgggtcgatgtctctcctcttcctggagctctggtagtcaacgtcggagatttcttgcaggtacagtaacaatctgaaaagaaaaagaaaaaaacagataccttgaaaattaaatgtcttttgcttatatatgttgctttgattttgcagctgataaccaacgataagtttataagtgtagagcatagggtactagcgaatacacgaggcccacggatttctgtagcgagctttttcagctcaagtatacgtgagaattcaacagtttatggaccgatgaaagagcttgtgtctgaagaaaaccctccaaaatacagagacacaaccttgagagaatactcagaaggatactttaagaaaggtcttgatggaacatcgcatctgtcaaatttcagaatatgaaaaagacaagtttattggctcttgtgtgtttgtaagatatttctaccatctctatattggtgtgtttctcgcttcagctagctactctgttcttggctctgcaacagttaaaccaatgtaccaaaaataagaagaaataatgtgtttgttatgtttatgtgttaagctactctgtatttgaatctttcttagccacatgtatcagaatatcagtgaacgtttaacattcatttgatataatgattcaaagtttatttaactagctattacctcttcttcaatttaaaaggttaattttcatcagcatcaagagtacacgataccaattttaaaattgctgattcatatatatggaatggagaaggagaagtaacaaaattgttgacttctacttgaatactatccaacatccatattaaattatatatatacatggataattctttcaataacatataaatttaaaagaagtctacttagtcaatgtgtatatatataaaagtatattgagatagctgtcattatgcgcagattcgtcatgccctccatcaccactggattatttgaatgtttacaacattttaaatgtcatagataatcaaagctcacaggacaggcacggtctcgatatgcaagatgtgaattagaccgaaaattctataccttcgacctaacatcatatgttttataacgcatatgatcggtctacttaatgactaaatggatcttgtataaacaaaaaatttcatttttttataatttgttgaattacatcgtagagcgtaaataattaacttatatgacaatcatgcactcatttaaaatgaaatgatttttctatacgtggtagtgtggtactaattaagtaattatattggctatatcatcaattgctcaactctacaaaatttcgttaaagatataaaaatatacattgatgacaaaaaaagaggtatacagtacagtatattcactctgcctatttcgtagccataggaatcgaaatgaaaatatccaatatttttggtattaaaggcaaagttaatacggaaacaatttgatttgacaatattctaccgaaaatttgaaaagtaaattctttcaaaggaatttctatttgtcttagtattctttttgtcacgtttcagaaagtttctatttctcaaaacgttttccaaaaatagaaatttcctgccatttaaatcaaaataaactaacgttgaaaaaggtttagatcttgaaacttctattcctcttcggtttaatgttttgcaccatcaacaaatagtccggtctgaaaagtttatggatgtaatctctataattcactagacaaaaagaaaaaattcttaagaaggaaacaaagtatcattttaatattacaaattttgtcaacgttctgactctaatcataggggataattgtatccggtacagggcgtttcacaaagaatcagctcctttggtcgccggcgatttagttattaacttatttacattgtatgtactttttgtagtacaacttcccaattactttaccgttgtacttgtcacagcaaatctccaacaagaaagtcaacactgtactacaaacaccaaaatatataaacattacactaataatgttcatgaagtgaagaaaaagcacaacacaaacaaacaataactaaaatg

SEQ ID NO: 2442 - DNA, 3000 bp, Unknown
  misc_feature (1)..( 3000): cDNA_ID_3067783_gDNA_ID_1620536_Annot_ID_159874 3000 nt of promoter + ATG
gagttctctcatgtctattgacaaactgattgaagatcatcgtgtaaaggaggaattcccggaggaagaaaaacctctaatgccagtagctttatccccttatcggggatctttgagtccctgcggattcagttctgtgataaatggcaaagtagagaatgaggtagatggttttagttactctggtggtagtgatgcttgtcaagtcgggaacttcagtcaagatgtaaaaccggatatcgatggtgatgcagtagttctggatgcgagacctaatgttgtagttagtttaggtagtagtagtagaaccgaagtgccatcaattgggaactgtgtttcccatggcgttcgggatgatgtaaatttgtttagtagagatgatgatgaaaacttttccaagtacattcacccgcgtgttacaaaacattcacctaggactgtacctcgtattggggacagaagaatcaggaagatattggcttctagacattggaaaggaggttcaaggcattcaggtagtagcctgcctaaggggttcttatctgtttcatatcttaaatacatttgatgggttttgttttaatgacatgtatttggtgttgcagatacgaaaccgtggagaaattattacttgcaccagcagaggagctatcctatcaagaaaaggaaaaactttgaccacatatctgattccgttactgatgattaccgtatgcgtactaagatgcatagaggtaaagagactttttacgcctaaacctctgttagatcttgtagctagctttctctttgttgttttaactagatcttgtaaatttaatttgcaggtagtagaaaaggtcaaggggcatcctttgtggcaagcgactcccatggtaacaatggagtctcatctgaattctttgtcggtgttatttacttacaaaagcggagaagctaacatgagaatgtttatttcagtgaaactacggatcaagtcgttcagggtgcctgagcttttcatagagattccagaaactgctactgttggctcattgaaggtaacattacacagctcttcctttcgcctcctattaagaaagtaagttcttatggtcctttggcttctgcagagaatggtgatggaagcagtgagcactttactgagtgatggacaccgagttggtctgatggttcaggggaagaaagtccgtgacgataacaaaacccttcatcagactggtatctctcaggataactcccacctggactctcttgattttagccttgaacccagctcagaaatgcctcaactgttaactaggttcagacttctattcaccacttaaaacccgccactgtgtttaattattcaaatcttttgtggcttaatttcttatttgttttccagtcacccgttgggacatgcttgtgaggagctgctacctgtgtgccaagctactaaaatagacaatgtgttggaatctgaccatcatgactcagcattattcccatctgactcattaggcaacaataatgtgacagaagattctaaagctatgatttctgtggcgctcaacgaattgtcttctcaatcacaaccaccttcccggaaatctagaagaagtgaacagcagcagcagcaggctgcacaacgcagaattcgtcgacctttctcagttgctgaagtagaagcacttgttcaagcagttgagaaactcggtactggaaggtaaaaaaacactaatacaagtcatatagtgttggcttatttgtgattgtgaatagaagaagatgatgattaaagtttggtgaaaactgtaggtggagagatgttaagctttgtgctttcgaggatgctgaccaccgcacttacgtagatctcaaggtttgcattttaatcagtagtttaaattctaaattcggtgaaaccaaatcgcatgattaggtctgagaaataactgtttggtatttgtgcaggataaatggaaaacgctggtccacacggctaagatatctccacaacagaggagaggagagccagtgccgcaggaacttctaaaccgagtcttgaacgcccatggctactggacgcagcaacagatgcagcagctgcagcagaatgtgaacaagctggagcaggagacacagtctcaaacgacagagggtctgttacttctctaaatgaatctgctgcagccttggaggtcgtctctcctttgtgtattactactactattgatgattatgtaagattctgacatagatgcaaagatttggtcttttactttggtttgatttttttaacttttctcaatgtaaagtttttaactggaataaggtttctctgaccagtttagggcttttagaggatctgttgtacatcttttgtgacattctcattctctttacatatttcttatctagactttttaaaaattcctcgtgtgtataattatttgatgtgctacttgtctgattccacgagttcgagttttgtcgtgtgattgaattcgaattgtcacttaccaacgtcgttaatacactaacactatgattggtctgatcgctggatcggtgaaccaattggaaaatccagttcaagttgttttagcaaaaaccaatctcttctctgaaccggaaaactgtaaaccggtcagtacttgatccataagaaaccctccgagtgatttgaagggtttgagctgtgttgaaaatggttcgtcggctctctctaaacccctctttttgtcgactgcttcttcacgccgtcgaggaattcttctccaccaacgaatccggcgacgtcttatcaccaccttgtcgaatctttagttgatgttgtttaaaggtgagtccaaattccacgcgccgccttgactttcatgaatgtgtgttttgatacatttcctacatattccgatgttttctagctagatctccaacgattttctgattgaatttagggttggttacatgatgatctttgactctaactcgcaggttttagctaataagggc

SEQ ID NO: 2443 - DNA, 3000 bp, Unknown
  misc_feature (1)..( 3000): cDNA_ID_2162054_gDNA_ID_1620536_Annot_ID_159878 3000 nt of promoter + ATG
tgcagaggcgcttgaggcacgtatcactggaaacatctcaccgcctgtttctaatccgtttccttcaagcacgacatcgatggtggacattttgaaagcgtacaagctgtttgttcatacttgtcccatctatgtaactgattacttcgctgcgaacaaatcgatttacgaacttgctatgaaagcaactaagcttcacatagttgattttggagttctctacggctttcaatggccttgtttgttacgagctctgtctaaacgaccgggcggaccaccaatgcttcgggtgactggaatcgagctgccacaagcgggttttcgtccttcagaccgcgttgaagagactggtcgaagactgaaaaggttctgcgatcagtttaatgttccttttgagttcaacttcatagccaaaaaatgggaaaccatcactcttgatgaacttatgatcaatccaggagagacaacggtcgtcaactgcattcatcggttacaatacactcctgatgaaactgtgtcattagactctccaagagacacggttctgaagctattcagagatatcaatcctgacctctttgtgtttgcagagattaacggaatgtacaactctcctttcttcatgacgaggttccgagaagcgctttttcattactcttcactctttgacatgtttgacaccacaatacacgcagaggatgagtacaaaaacaggtcactgttggagagagagttacttgtgagagacgcgatgagcgtgatttcctgcgagggtgcagagcggtttgcgaggcctgaaacctacaagcaatggcgagttaggattttgagagccgggtttaagccagcaactattagcaaacagatcatgaaggaggctaaggaaattgtgaggaaacgttaccatagagattttgtgatcgatagcgataacaattggatgcttcaaggatggaaaggaagagtcatctatgctttttcttgctggaaacctgctgagaagttcacaaacaataatttaaacatctgaaaaatgttacttctcaattacatcatttttgtttcccaatggttttgtagaatatgtttgatcccgtgagtggatgcaactcttttttcctgcaagtacatattgtattcaaatccttgtggaaatgataaattgtttaatcaaagatccgaagacaacacgagcacttttaacccaaacaaattcaaaacttttggctataatttatccaacgggttgcaacaccacgggaatgacgatacagacagagcaacaaacgatctactagaacatatgaaccgatgtaactaatagcatatagattgctgtagttagctaatttaaaccctatttggtttgaggttttggtggcctcaaaacgctccagtccaccttcttgctcttgggtttcttaaaaccattgccctttttattgctcggtgatggtttgtcaaagctccttggggacttgttaggacggttttgttcctcggagactacctcagactgttttcttttcaagtcaccatctgtttccccacttggctcaacctttgaactctccggttcactgaaagaggatgcattttgactagttaccgtttacaactttaacgagaagcaaaatcagaaatgaactaaacgataagtaggtgataaatctatttgcaaattgctatcagtaacgacttcatttgtctcaaaattagatgatcagtaagacaatagatctccagcgttgttctgttgtatgcacactctctggaaataacaaagaaaggaatataaaagcaagagtacagacctaaaagacttttttcctccattactgctagagcttgagggatttccaccgtttattgcctcttcatgtaatttctaaggagaggacagttttatttagaaagctgaaagatcacaaagtatttcaggccacagcgtcacagatactaacctcgatagagggattgaaagactgaaaagacatgcgtcctaacaatgctcctggctgaggatcccaatctgttatgaccacactgcatcgaaaatcacacattagtaaacactacaaaacacataacaaaagggtagacaatagatacacaatgtccttgtttacagtaatctgatgaaagcaaaacataaacatcaagtaagaagaaataacggtaccacttctttgcaacagtcctaagggaaggaaaactcccattaggctcttcttcatcagccttcttcttctctactttcagagaagacctttgcataaactatagacagagagtattatcaatcattattaacacgtatctttttgtctctcacccaaaaccagattatcaactaagagctacatgattgatataacacaattcttcagtgaaaaattgcaactttagtcccaaaccaatgtttataattggtgctaagctcagtgctacccccaaggtgaaatcaacctcgaaggggattatcaatttgtccaagaatcaaaacccagcttaatagagaaaagactaaattttcaagctcgaattcaattcaatttcagtaatttccttgagtttcaaatctaaggtcatgtaacatgaataaagctacttctacagagaaagaaaaaagacagtacctttagatttctcagagtgctactaatctctctcttcgccattatagctttccaaaattacaataactacgatattcccgttaccgtagaggaggaacaacaactccgcgtgtgttttcgtttttctaggtttagaagattttccgatttgaagctccgtccaaaaaaacacacttaggtttaactggtctacacctaaccgattcaaaccgtgccaaattgatttttttattaccaaaccaaagattctattggtttaattttttggtatttatttgatcatgtctgaagaatccaaccaaatccaatctgaaaaacagctgaacataaaaagtcaaggaagcaacttgaggagaaaaca

SEQ ID NO: 2444 - DNA, 3000 bp, Unknown
  misc_feature (1)..( 3000): cDNA_ID_2162062_gDNA_ID_1620536_Annot_ID_159880 3000 nt of promoter + ATG
gaactttaaactaatattactagttaatacttgatggaaaaataacttgaaatagaatttaagagaaccatgaatagcataaaagcatatccttttcacaagcctaacattccaataaaaatgagaactcatcttcattcatacatctttggctgatagataccagaaaattagacacaacacaggttcctctataccactactagtaaacaaaaggaatgaacttgtgcctaaccttatcagcataatccgaatagctttgtccgaaactctccaccatcaattcttcttccatctttgccttcttgttgtagtaaaccaaacaaaccgctaaaagaaacaacagactcaaaggcgcacgcagagcagtgcagtatgcagcgaaaagaagcatcgtagaagcatatatcggatgcctgacccatctataaggaccaaattgcacaacagccgttggaacaacaaccttttcagaatatctagcaagatatagcgttgaatcataatgcataagcattgtaatcacaatcaaaatccatatccctacattggcccaaccccctggtaatcggtgaagctcaggcccttcaaaagctgcaagccaatgtccaaccatgatgccaacaccaaacaaaatccgagaccacagaggcgtgttcacatcccatttgggatcatgagtgcgagcatagaaatctccatagaggcgttttctcacgctaacattgaagaaaaagaagtaatgatacgccaagaagaacacataaggccagccttcaagataaccattgaaataagcaggaggcacaagtgttagccatgtgaagactgaagttacaataccaagctgctcaaaggcattggcttcgccaagccaatgcttacggaaacagtaaattccataacccgcaagacccacagcgataaaccaaggccagaacaaccatgtccagctaaaatacatccagaagaatgggtccaagaccaaagtcaaagtcttttttgcagccacagtcaaaatcgatagcaaaagagttaacttcacaacatccatgggcttcactttcaactcacgaactttcttcaccattgacccaaaagagaaggttcgaaattggctaaggaaagggttatcggaatcggaaacagtcgagctagaaatcgagcatctgggtggaacccatgaaccttttctcactgggaacggcgcacaactccagatagacggactctttatcgcttcaaaacctcggagcaacggagtgtctctggaatcagcacgaagggaattgcacttaaggtgtttgttcaaatgcctgaacgaaaacttttggttcccttccaacgacgccgctctaggaacaagcttcgagcagagaagcacagcttccatggcgaatagaattcagataacggatacaaagacaaagattcagaaaaactctttcagcttcatatttgattcgaaatcgaaactggaaaacagataaacttcacatagaaagagagagaagtgaacctcttttacttcagtgttcggtaactaacaatgggcctatgggctaagagaaactggcccagtggggtaatatgtagaatagcttaaggtcttttaaaaaagtaatgggctttgacaagttatgcaggggcaaaactgtaaacattgaggaaggttctataaattggctcaactaattgtgttgacttttttacgccggctgatcttagccgttgaaaccgaccggttgcacttggcccaggttcgtataagccgctggaagaggagaagtcgcttcaaaaagtggtaattttcctaggagaaaaattaaaaattaatatgtaacttttttacttgtctattattgaaaagaaacagtctatgtaagcaaattttctcaattagaaattgtggaaactagaaaatgcaaattttgagaatgcaaaactagaagataaatttgaggaatgattttttttttttgtcagcaacatagattaatatgttaaaacacaatttatcacgatattttggaacgataatttccatcgatattttctaacggaatatttggattaggagatcaatggattcttctcaatgaacaaatataacatagtgtaaaattaaatttaagtaaaatgatttgacacttttgtatatacttacattttctaattttgactttttcatgaaatgttgtagcattatttttttgtgatattttatgttttgaacccttccgtgcttatggagtcgtctacaataatatattagcttcattatttaagaccaaaatatttatatgaagaaacaacaaaaataagaccaaaatcgggtatttaattttatcatttaggtcttcttataattgtcgcatcacacggttcgttcatcagtctaattagaaaagaaaggaaaagatataagataaattggtcaagaatatctaacaagtctttattatatattttagtttagatcgaaatggaaacgtgacatgatcaagagaacgatgtataattattgacgcgtagactttataatggggtatctaatattacaattttatttcatttgttttagaattgcatatccacgggagtcatgataactatttctataatcataaaatatgtctctttgacagcgaaaccatttatacactagattaagaaaaagtactcgtcgtctatattgtttaattaatactcatttttagagaattcgttttcatttgtcacacgcattgaagtttcttatcttatataaagagactctgcattctcttcttttcttcatcaaatattttctcttcttcgtctctctcacgtctattattttctgtcatcttttatttgaggtaattccttcttctaaaccataaaaccaaccatattgttctacatatattcttctttttaagttcttataaatataaatgttctttgtttttgtttatgatttttagaaccaccagatttgcagtttctggagaaatg

SEQ ID NO: 2445 - DNA, 3000 bp, Unknown
  misc_feature (1)..( 3000): cDNA_ID_2990516_gDNA_ID_1620536_Annot_ID_159873 3000 nt of promoter + ATG
ttataacgaccaatcaccatcgtccatcgataaaagcttatgcttagaatatgaaaaccagaacaaatttaataaacgtaagaaaagaagataataggagcaatgacgagattcttgttaggttcattgatagtctctcatgcatttttcaataagtcttaagtttcaagacgtcatggaacctttttcgtaacccacacgagtttggtttctattttagacaatttcgtatatatatatatttttttttcataataatatttggccaagatattaaatccattccaatactaaaaatatcaagaaatttcggataacaacaaaaatccaaattataatcctagtattggatttccgattgatgcccagtttagatgagaaccaataagaagaagtaattcaaattattgtatttatcctcacaatcgtgaaatcattatttaaaatggacgggccaatagatttccatcgatcatgataaagcgtttaattatttcaacttttatcctaaaaaaaaacaatagaaatattttatttcatcttatcctttctaaggtgggtggttttgaaatgttatcacacacacatcactgttctacgaaaataatatataatatatttattgagttttacaaatatgtatatctatataatatattgtttgtttattattatttacaattgtaacaaacaaaaaatatcttatcatctataatatataatttattaaattataattctatagtatcagtagctagacaagagaacaacattcgtgctatatgaaatcattagaaaatacacatagcattttgttcctaaaataattaaacatgtaatcaaaatttaaatagttgtttggatttatgttttcaaagtgaaaatagaccaattaacattcaaaagctggttgatgctatttttaacgtatacttaacattaaaatatttgttttagttttgccactctcgataattatccctgtcataggatgaggcccacctgttaggtacatgggcccactgggacccaagatttcttatctccgaacttaacgccgtttacacatttccttccaatatacacacaccgaactagatgccgtcaatccaacgccgtttatggtttatcctcccctagacgttaagattttgacggtttgtttttattatcctacaaaacataactgaaaaagtgtaaaacagagactcatttgacgttagattctgcaagtatctctaccgtccgattggagcaagtgatcagaaatattattactaatcaaaaattgatgaacatgattttgagggcaattttccttaagtaaaaaaatcataaagagacgataatgatgtacaaaattatctaaaactgagtataattatataagctatagattaaggtattaagaaaagaaaaaaaaaggtagatccacctgccacgtgacagaatgtcgtatagttatagtttacagattatctccactaacctaaatattaatttatatatatagaatccatgactatagtctatagttgaacttttagatttaatactatgaaaccaaactcaactcttttaaatacttgaaaatagataattttaaaattaatgagtaaagatatattcttggtaaaaaaattagtgtgtaattataacattccatataaaaaatcttagatttcttcaaagataagaactaggaaaatcaaagtaatttttgtaaattgtttactaaaactgaataagaaaatgaaagttgcatatatttttttcaagaatctgcaagtaaataaagtgtaactttaatgagatgtaattttggtttgacatggaatattctgattgggtagattcaggagtcatgtgatgatacatctatgccacgtggtaagatctgagggattacaagcaatgtaaaagcgtggcgaagaacctggtctaaaaagatgaaggtgtcgaccgataatagccggtgaagagaaagagtataaccggtaggaccggtggggaaaaggtcaatataggcttaaaaagggtttaagcaaaaaatgtggtcgtctttcttaagggtttttgtttttgtggcgtttcacagagagagaaagaaataggagattgtttttgcttgtggtgagagaagatcgcatcgtgtgggtagcgtttcaaacaagtaaaataataaaaagaataaaaagtttccgtcactttctcgaggaagaaggggttttggtgtgagtcctttctttgcgtttgtcttttcattttccgatctcgtaattgtcgtgttattcgccggaaaagttaaagattcagatttaaaggtgagagattttacagtcattttttttttagtcatcctgattctgtctttgaatttcataaaaccaaggagattttcgttaccttggtctgaaaatctctgggtaaatcccaattttacgtttttttaaaaaaaattcgtcgatttttatctttcatcgctttattcttcgatctgtaaaatccgatctgagatttagaacccttttgaacacccgtgatctggtggtcctttgatcttgagatcgaagtttttcgtccatacgattattttcttaaatttttttttatggtttagggttttcctgtggtgaaatatttggaacgacggtttgactctcaatttcagatctcaaagttgtttagggttttagggtggtttaagcttttttcaatgggctttgacccaaaaccttcaaaatcattcctttttttgcttcatgcattatttccagagacaaaacccttttattctgtttttttttttaaatttaaaaccattggctattttatctcgttttcttttgatttcaatgtctctttctaatttgatttctcaattttatctacaggttgggaattacattcacagaatttcgttgattggtgtgataataagccattgatcaacaatcttcttttgtggcaatcacataatcgtgttatgcattctgagaa

SEQ ID NO: 2446 - DNA, 3000 bp, Unknown
  misc_feature (1)..( 3000): cDNA_ID_1009105_gDNA_ID_1620537_Annot_ID_159917 3000 nt of promoter + ATG
ggatttactttgtaatctctgaatcattcatttcttgaaatgatatttacattcttatcaaaacaaatctacatataaagcttacatacctttatcttctttgtagccttgtaggtaatggcgacttaatacgttcactttgtagctagctatggttttttatatgtttgcttgtaacttaatcccttctggggatatggatatatatagtgtccaaccacgaattttaatgtgttaaaaagagttttaatttatactaaataattttaaaacatctcaaaattgatttaaattaatatttggtagttagttcgtgtattacatttgtatatttattaaaataatgaaataagtatgactagtatatatttttataataatattaaggatttattggtagtttatcttgaaaaattaaattttgtgaatttagtcaaaattcatgcatcaaatggttttatttgactaacatgtttttaattactttatcactacaagatataccattttttaaaagtcatagcatagtttttttttttttaatttatatacaaattactgttattaaaaactgtttgttacgtttgattgtatattagatctttaattataagacataaagatatttttaaaaaatcattaggaggatgttacaaaatattcaatttatatccataatcatttacatttttaaagatgtccccgttaccaaatgcgatgtgtgtccgttcccatatgaaacaagacatttttgtcgaaatttgtattggcaataatatctcacatttgtaaaactttgtattgttgaatttcaatttcaaatggcgttttctacaactcttttagaatattaacccgctattcttaacatttaaactaatgtgaccattctaaaattgatattccctttacgtgttggactttattaataaactgattaacaaataaagtgtattatttatcatcataatatatttagcaaactcaatttcttatcaattgtgtctacccaataaactaatttttataaatctcattttatgaaacaaattagtgtcttcagtgggacatccgacattcacatagttgaccttaaaacttacaaaaccatactattaaaaaccaattaaaaaacaagattaaaaagttatcgagccgttacaccttaattgaattattctgtcttcgtccttaagtcataacggtcatattttcaaaaacaaaaacgaccgttaatcccaacaaaatctctactttctcttacctcaactttgtttcttatgtatgcatataaaccccaaatcaaagtgaacttatcaagaaacacaaaaacaaacatcaaaaccccaaaaaaaaaccaaagttctcttcttgaattcgagaaaatgggaatgtcgaaatcgaaaggcaacacacacaacatcttccttctctgcaactacatcctcttaggctcagcctcaagttgcatcttcctcacaatctccctccgtctcttcccatctctctccggtctctcccttatcttcctctacactctcacaatcgcaaccgcggtatccggctgctcgatcttcgcctcctccacatccgccaccgcgagcgatagattatacggttcacacatggtagccacagtcctcacggccattttccaaggcgctgtctctgttctgatattcacgagaacaggggatttccttaggttcttgaaatcttatgttcgggaagaagacggtgaagtgatacttaaactctctggtggtttgtgtgtattgatgttttgcttagagtggattgttcttgtgttagcgtttttgttgaagtatagtgattatttggatgagagtgttgtagatgatgatgattttaaggtgaggaggcaagaagaagatctcaaggattggccttcttacccatttcaactcaagatttaatttccaatttcgtcattttattctattcatttacacgtgtgtgtgttggttcttgcttgtaatgtgattaatgtcacactttaaatggtgtacaaataattcgtcttagtgtgtattttcttatatgaatttttgtttagacacataaaaaggtcaacatcgtttttaggcactttaatgtatattgttgaattttgaccaaaatatatgcaataatgttaatgaatctacagctaagaggtaacaaagtttctctctaccccatctagtagtaagaaattgtgtgacttaaatttaattacatcaaaggtaaaacaatgaacctaaaatcattccatggatacaatcccagtaatttagtacagttttttcctaaaccctactccaatggaagttctcaaaacacctgacctttgagcttatctcttcttctatgtgtttgatttagtgggcaaaataatcgaaccaaaagtaccaaactggaaccaaaaagtaaattataaacttcataaccgaaagaacccactagaaccaatcctaactattttggatactcaaaaatacccgaaatacaattatatataccggaaatacctgaaaaatatccaaatggatcataaactcgtgagccgaagcaccggacccaaacctgaaccaaaccaagtttttttgtgtaccttacatagatcataaattctaaaaaaatgaaagaaccaaaacgaaatataaccgatttcgtaaccaagtaaacgtccagacctaatttggttggtgcttgtaaagtgcaagtcatgtcacatttcaatgttttttttcctgataaagtgtcacatttcaatgtttgtacaataattttttgttttccacaatgtgtgtccaacaattcttcatccaatttgttggctaagaaatattaggatgatatctttaccacatccacccaattcaccacgtcagcaccatccatattcacgttaaagaaacagaatcaaatttttttattttttctttaaaaaaaaaaaataccaaaagaagcggaaacagagaaaaagagagaaaaatg

SEQ ID NO: 2447 - DNA, 3000 bp, Unknown
  misc_feature (1)..( 3000): cDNA_ID_3067823_gDNA_ID_1620537_Annot_ID_159925 3000 nt of promoter + ATG
tggttattttgaattcatttcacccctctagagaatcattttattcacttcctcatgttctaactaatcaggatctactatctaataaaaaacattaaattcatttaattgtaaaatctaataaattgaaaatatatatatatatatatcggtttgagttacaaaaaagggctagagtttatattttataattaaaccaggttaaatattagtttagatttataaacagtttaagttttacaattaaacgaggtgaaatgtcgatttaggtgtataaagaaccttaaggttatagattttacaatcaaacgaggttaaatatcggtttataataaacaaagattagagtttagattttgtaaataaactaaattatatgtcagtttggatttaaaaagagtagttaaaatttagattttacaatcaaataagtttaatttttaaaatattatgtatcagattctgattggttagattaagaggggtgaataaaaggatccacccgtgaaccaaagaattgttccgctattttggttagcaaaattaatttgttccattttaattgttactaatagtaaaataaaaataaaaataaaaatctatatatattaaagcagtattattattaaattaaatcatcacctgaaagcgaaacatagtttttagccagtctagcacgtcttcatcgtcattgatcttgtgacctatctgccatgttaagtcacttgtgtaacgaattgcctttaatacagctacaatctgcagagtacataaattcaaatattgatgctttttttttgtttaatttaatcaaagtggcagttaaacagaaaaaccacgacattaatctatgtaaccttaggatctctcatcatagcgtgatttttactatcaggatcgaggggaagaatattgtaaggcacatagattttgttttttgcttccacctcggcatgggattccaaaatctacgtacagacaaaaaagaatgaacgtaaacatcgaggaaattaaagatatgttaatctagctagtatcagatttaccttagcagccactttgatattagctttccgatgaacagcatccaagacatcatagagaacaacagcagtttgatatatttttgtacgttgagaactagaactacaaaaataagcaagaaaacactgtgaacgaaagacgcaagtgttatataacgaaaacctttagctatagtacaaacctgccagcaccagcatttagcaaatcattgatgccctcgtcaccatattgttgatagaaactttgcatttcatgtgcatcactactcttctgtcttgcctttagagtactttcattattctgcacaagtcaaagacacatgatgatttaatgatgaagatatgaaaatctcaagcgagctagtttaatattggtaccttttctaaccattgaagaattgtattcttgaactggcgaacatcacgtccacttgatgtgggatcaagctcgtttgccttatctagcgcatgtgaatgacctgacagtatatttatagaatcatccacagatttgatgtcaagatcttgaagaaataaactctgaagtcgtaacgaatattgatttattttaaaactcacataggaaagcaacccggggattagtatcctctacgtctttggctacacgaaggatgggagtaatatcctcatgaagagaagatggaaccagctcactgtcaggactagctactgggaaaaagtggctaaacacagtttggagaatctgccctctgttgggctgattcatggatacacttcttttggggggcatctcttacaattttcatacagccaaactgagaaaccaaacattatgaaaatattcgtcaaacataatggaaatctctggcctgaaacttctgggttctggccttgcctcaattgtgaacagttaaaacataacatcaaaaatgataaaaagcaagtgccaaaagttttcaaaacaggggaaaagattataaagatcaatgtttcacctaacggcaaaggaagcggaccaaaaactatgacagcttcgtgaacacgcaagccaggtgcggtccaggaacagaataaaaagaagctatgatcaacgtcacttggcaaaactagcactagaacaagcctttaaattaattgttgcactagttataaaaacgttatttttatttttaatataatttaaaaaggaagagaggattaagagagatagcaataaaagaaatttaaaatgacaataaaataggcgccatatttaatttgtcaacgacatcatcttttctaagaaataaaaaaacttaatcgtatgtctatcggtctatcttaccttccaagaagaggtagcgaaaaggagacaattaaaaggcaataaaatagacgccaacttgtaataacttattattggtcaacgacattaattttctctaatataatatacttaaaagaaattttcacaaaagtggacgaaaaaagatttgctctcaccgtttgtcaaagtgagaactggttttcacgttttgtcttttcattcaatttcggaccaaattaccctgagaaaacttaataatggcacaaaccaaactgtgcagcagttcgtatcggttaagttgacggcgtaaaccaaaccctacagcagttggtttcggtttagttgatgcggttcagttttgaaaaagacaaaaaaaaaaaaactgaaacgaagaaaccgagaaaacgaaaaagagaataacggagagattgagagagaatcagaaagcgaaacaaaattcagtatccattgcttcaaaattcgacataacttcgaattgttgggtagttgaattgtgccactgaactcccacatccggtgaagtgaaagttactgtttttcccggcgaagccaagagaaagttactgtttttcccggcgaagccaagagaaagttactgttttttccggcgaaatttgaacctccggcgagatagcatctttagctatg

SEQ ID NO: 2448 - DNA, 1198 bp, Unknown
  misc_feature (1)..( 1198): cDNA_ID_2162180_gDNA_ID_1620537_Annot_ID_159930 3000 nt of promoter + ATG
ttcttccccgattctcagcgttgtctccagctcaggctcattggtgagttgacttattcttacgaacacgaacatgttctctatttaagaattttcaagttttgttttttttgtctcgttacagtcttcaaatacgacccagtgagtcgttttcgtttttttatttattacaaaaattggacattgaaatcgaatcttatgatcattggaataggaaagatatgatctttgatttgggtttcgtaaagtttcagtctttttatcttttgatgttctgattttgttctttttttgttcaggatccgaaaattagtggatcacttggatctcgaatccttccggctactcaaaggtgaggttttttttttctttctgaaatttgattcgaaatttagaatcatgagtgtaagaaaatgtttgaaattttctgttatagtgatgatgatatgataatgatatgatgatgactgatgagggtaaaaggataatgatgaatatgctgttgatgatgtgatgtgatgttgatatgttgttgatgattcagggtttaaggatgaggttctatgtcttgattgttgtttattgatattacccgttggccgttgctttgaactttagaccgcatttgtgaccccttgaactttgaacatggtgattactggctttaagaaaaagacagtgttggagaattgttttgaatattaaagatttggactttattgatatttatgtttttcagactttttcgatttgttaggttatttatttgactggattcgtgatggagctgtcccaattctttagagtaacctgtttcaggcttgtttgtgtcttccttgattagtgttggtaactttgtttgaagttaaaaggtttagtctttgagacttcacatttcacaataagttttagttcatctttcgcttttcccccataggtgactcataagtatttcttttctatttgagttcttacagattttggattactttttggtttatcattggatttatttggtgtttagtcaacagaggaaattcatttaacagtctaatagtcttaccgaatttaccaaagtatttttaacataagttaaaacatttgtgattttgcttgtttgttatgacttcttataagttctaattgtatgtatattagatcatccccatcggagaatcttctcctccataggaaaatg

SEQ ID NO: 2449 - DNA, 3000 bp, Unknown
  misc_feature (1)..( 3000): cDNA_ID_3067827_gDNA_ID_1620537_Annot_ID_159923 3000 nt of promoter + ATG
atcctagatgtaaaatcaatatacaattatgaagtttggattgatactaaaacttttttgaagttttcaatattataaatattcgaacttcataagaaaatgacaaaatgatgtttaatttcacgggacgaggttatatggtgggatgggtttggattgatattaatacgggatggtatattatgaatgtatctatagatcatcttaaaaacaaaaatttaattttttatttaataaaagtataggcctattatatacctcttgaatatgttatttgtatataaataatattaatttaaataaaaatctttaattttttaacaaaaatatcaacctgcgagcagcggtgtaccgcaggtcaatctctagataatacaagttttaaatcgttattacccctaaccacaaaagcaaaataatgaattttaatattatgtgtcaatatcatattattcatatacaaataataattcttataaaaaaatgaacatattcatccgaggtgtcccgcgggtcaatatctagttttgctagactttttggccaaaaatccctatactatttactattaacattcaggtccttacaaattctatctcaaccaaatattttatgtataaaaacttacaattcgttaatttgcattaaatacttcaattaactctctcttaaacttttttcttaattaaatctttctttacagaactatattcgattaaggctaatttcctaaaatctcaatatcgatattaaatataaacatagaatttttctgtcactatatttgttcttatatctaatttatttttactttatatataaaatacatatagttaataaaatatatgattttctgcatctgatataattcgaaaacaaataaataacttaaaagtatatttttttaaagtaataaaaattgtccggaagtatatcatagtatcatacataaaaaacaatagcatgtatctataaatcatctttaaaaagaaattcaattttttatttaataaaaatatatgcatgtgatgcacttcttgaatatgttatttatatataaataatactccctctgtttcataatataagttgttttagaccaatttttttgttttacaagaaaagttattttctagtttctatgcaaattatatgttactttaatattttatgattacttatattatttagtctcttttatgattggttgaactttttcaaagtaaatattcttaactgaaacaacttatattgtaaaacggagggagtattaattaaaataaaaatcactaattttctaacaaaaatatcaacctgcggtttaccgcaaatcaatctgtagataatacatgttttaaatatttattacctctaaaaaaccttaaccacaaaaatactgaattttaatattaaactaatatacaacaaatatcagaacataaaacatgaattatccaaactttacatagaaaaaaaatatatgtcaaaaatatatgccgtgaattcgaaacttgtgtttgccaaaacaatcgcacatttgcaatttcgttaaatttctgtcttaaagacataatctttttgatcatttagcttccatagctaccgtagtatctaattccttcccttagattttgatttctctcattttatgtttagcgttaacgcaaacgagttcaaaattttgagttttcggtttcttatttttagatacatgcctcatatttagacttttgctggtatcttgcttgattccttttgcaatttctcttgtttaccttgaaatataattttgtattgattgataatacacttggtgtgagcagtttttgatgggaagggatcaaatggataacattgtggaatctttgcaattagataagagtaagttcttagaggaatcgagaaagatgacattactaagctctttcagccatgtctaaacattttcaaatgtacagtattaaattacattgtagataaaagcgcgctaacagctcctcgataattatattacaaaaaaaaaacgtgcggtttggcgtggtttgccctagaatttttaatgtcttagtactccaatgttttttataaaatttaatgttggattttaagagtgatttttctatgattaatatacatataaactaaattccttaattattatttttgatacaacttaaattgattcatgcacttacccttgctatacagaaacctagaaagaaaatttgaattttggcatttaatcttcacacacattattagactttcgatttaattcaattaaaactcttttttcttacacattaaaatttgtggttggacactatatatatccttttgctttgacgggagttgtgaaagcgacaagcaaatatataaacgaccttatcaacaaagcaaacgtatagctacaaacgattgtgagcttttatatcaaacaatgcaaacatatagatcctcataactaacgtggtacacccatatatataacttatatatttgtaaatctgcttaaaactttacaacttacggcctttatacctttagatacggctatgcaactatacttttactggatttgtaggtttgcatgcaagatttaagtgccataaacctaaagcctaagggtcaatgtaaatataaaacaacctaaatctagatctttatatcactttgctcttttcatgatctctctcttaagtttggttttcccttctttcctttcctctagtgattcaccacctctgtcaccgtggcaagaatgcatagtatgtctgcctatttctgaatgccgcatgcgattttaaccacacaaaataagagggaatcaaaagattttttagaatagtataaatttcattattattttaattgatagactctatggaaacagccatttttctgaagaaaaaaactacggttctagcctcaaaactatcacgttatcttccatgtcaactgtcggttacgcacaatgttattttagtcaaattttaatag

SEQ ID NO: 2450 - DNA, 3000 bp, Unknown
  misc_feature (1)..( 3000): cDNA_ID_2990671_gDNA_ID_1620538_Annot_ID_159936 3000 nt of promoter + ATG
tattctgtctttatgttactttgtgtcatcttctaaatacttttacatataccttgcaggatactggtgggtttgtagatgaagaaagcgatggatctcaagcttctgcacagtcatcaagctcccaggcagttagccattcagatgaagcaatgtctcgtccatcaggtgttaaggcggcaaaggccgcgaaagctaaaaggactctgtcagtgattaagagcatgtgggagattaagcagaaggaatttgaattgaacgagaagcttagcaagaagacgttgttggagactctacttcgaaaaacagcgccgcttagtgatcttgaaatggctttaaagaacaaacttatcactgacatattgtcaaatgcttgaatggtgtcttttatgtcttgaaagttagtcttttttgtttcggttaacgcttcttcacttgtttttgttcagttaggttatgaatcttaagttgtttgtgttctgttctaaattggtttggttgtgctctgttctaattggtttgtgttagtgttcaaatggattggtttgtgttctgttctaaatgaatttaaattcgatttcagagtttaaaaggatgaagtccatgtcgagatgcaagagttcaaggaagcataaatagcaagtacatgcaagtgttgttctgttttgtgtagaagtatataggctatggtcgtgtgaagattcacttgagtttgtgtgtcaaattttgtgagtgtatcaagttttgagagtgtagagtctgtgtcaagttttgagagtcaaatgtatcccaaacactttcacatttttttcaaatgtttatattttcatagaggttgttaaaatttaaaaggtaaaaacccttcagatgtatcccaaacttttgattttgtattatttcaattggtaaatatggagatgcttttatttggttaaaatgaagcgacgtcgtttaataaagtcagctggctttataacttgatgaatgacaattgactaattttgtccgaatcaccggttcggttttctcgtttaaccggatagtcctttactggttacagccataaattccgattctgctgctcctgcttttttttttttattgaagtctgcgtctgtgagatcacgctttagctttgtaagttgctttccatggatactctctaaatctttacaacatttttcatctgttattagttcccaagttgcatatgaactctctgcttcttctctccatcgttgttcagttgtaatcgaagtaggtgcctaggttgactagctagtaattaccaccactcaacgaaatccatgaggttttggcgatgaatttagggatttctgtccaattttgaattgtttctggtgtttctcttaattgattattgtaagattaagattcatgtcggggaatagttactctaagttcatcaatcacacttagaacagacaataaatttgaccacagatcttgttcaatagatagagagcttaaggtttatcttcttttgtgcttactaaacaactgcaattctcatggagaagcctctgtttttttttatagtgtttaagcaaatatagagagtagtaactaactggagtattgttagattgatttatgcctttcttttgtggcttttgatcaaagattggtcatgtctcgtgtgccattattttcggtttatggtccttatgtgaaagtgtttattttaaattctttctcatctaaagtgttgaagaatagtttgattgttgtattggccttaaagcatttgtactcttactgaattcttgagagctgttattttcaggtggatgcagaattgcagactatacattcttttttaagttcttgagcttggaacaatacctttttcactctagttgtttcttcaactaaatggtaactacaatctctaaagaatttcttcaagttgaatttttgtctagcttgttcaaacttgtaaacacgcgattcaaaactcattttacaatgacagatcttgtttactactctttctttatactaatttgtgtcatcttctaaatatttttgtatatatacttcaggatactggtgggtttgtagatgaaaaaggtgagaacagattatatgttggaaacctggatcttagaataaacgagtaagtgaatcacagcttgttatattacctccacaccatagatcaaaactttgctcaataccttataagtttctcttcgtcacagggcttcgttgataaaaatgttttctccatatgggaagatcatatcagaagacttcctttggcacacacgcgggccaaagaaaggagaacctcggggttatgctttcattcaatacagccttaaagaggtaactaacaatctggctctcttggttttgcatttgtacttggatgaaattgtttcaagaaatgaaaaatgttttgattttgattgagcaatctcctgatttctacatctaaagtgagcatacaggaagctgaattggcgaaagagaagatgcatgggagattagcttgtggtaggcctttagtggtgcgtctagctagtgagaagcatctagaagattcctctcatgatcactccaaaagatcattaccagaaggaaacagaaccagatttgtaaacgggagcagctcaggacaaatgagccgagacgaaaaagtaactgccattaagaacaaactcaaagctttggaagaagatgagaaacgtgatcccaagaaacagaaaatttaagaaaacggttttcaaacacacaactttgggtctatgtgactctgtgactctgaccatttttcagttttggtttgatttgatttggtttaccggtttaatcgaaaccaattttgatttaatatttcggtttggctcagtgttatatataaaatttgtaatggaaagcaaaagttgacgcactaataggcacactgagtcaattccactaatcacttcccttttccaccttttcctcgtcgtgaagcagacgcgacaaatg

SEQ ID NO: 2451 - DNA, 3000 bp, Unknown
  misc_feature (1)..( 3000): cDNA_ID_3067878_gDNA_ID_1620538_Annot_ID_159952 3000 nt of promoter + ATG
ttaacaaatgaacatattttaacctcgcaaataaaggaagaaatgcaaaaatgtggcatgttaaagaaagagatcaaccttcactatatcttttaggtttctaattggtttcgatgtgagaacatctttgttggattgttggtaatgccacgttcttaatattgtttatactaatgttttggcgttggagtctgttacgtaactgaattaatgacattggctaaagcgcagtaccaaaagttatagtatagatttgtataactatactgaaaatttcctaaattatggcgtttactaatactgtaacgcttcgtatgagcccaagtaaatgacgataatgtcgtgtggtttgggagttgtgtggttcctcatgctttcacacatttttattaaggaatgtataattttattaaaaatctgaagctgaaatttacgtatcaacaacatctctatttattaatacaaagaacatttgtaaacatgatagcagccgtagataatatgatttaaatgattaaattaggggatacaaacttattgtgaaaaagaaaaaaaggcgatacaaacttatcccaattttattcatattttcattaaacgaaacgaaatagaaaacttatattgttattattatatagggttgatttaatcgctcttattatcttatatcgacgagatgataaaagacaaaagatcttacatatgcataattatgagttatgacacggtattagttgaagctactaaagtactaaacaaaagaggcgcaacaacacattctaacaatctattatatagaaagactcaaacctgttttattaatcatcttcatttaagcgtatcaaattgactatttcagtttcttgcttggatggcttgacttaaccatttcatattcgctaattcaagcaaaggatatcgtgtatatatatggggcgaaacaaaggttaatgagcaagctacgaggttgatttcatattcctttacatcatatctcctcaatcatcaaactttctatactttccgaaaatgccggtatgtcttttcttttagttacttaaaatcttagaaaactaaaggtactacttatacacaatgaactgtctaaagcttcaaatctaaatctttgcaggagaaagttgtattcaagttggaagtttttgaggaaagaatcaaacgaagagctatgaaagttgtatgtgactttccaggtatattataatatgtacaaacaatgtctatatataatataagtaattgaatctatttaggcttaatacaaattaagcaataatgtttgttgttgtaggagttactttgatagacgtgaaggaaaaaggtaaactaaaggtgaatggagaatttgataagtttgaaatgacgaagaaacttaagaaggtgtatgaatttgttgacattatcgcggttgggccggatggagaaccggcacaaaatcagaagctggttaaaaagcctgaacctaaagtgaagaaagcaccatcttaccgtggttggaatttgggtttctttaagtgatcaatttgaagacgtgatcggtttattttccatggactactgtattctgatgatatttcatctcattttttctgaaaaaattgtttgcccgttatttgtaataattatgtggctcttatattcatattggcgttatatgtcttttgttaacattattaagttctgatcatccaattgaaaacaacaaaaacaaaattttcatctaaattgtctaagttaagtaatagagtctcattgttgtgtccaaaaaaaaagaagaagtaaaagagtctcattgatcgcttttcataagcaacacttaattcttatcaccagcaactagatgctcaaactaatgctggccgaagtgtcagaaaagatagtcaacgtttgatagattattgttatcattcaacttcgttccacacttattccaagtaattcgtttatattatatcgtcaataatcgtgttattatatcacaagtgtttctttataataggtatttatgttttttggcacatgcaataaaattcattaagccctgtaattctgtcggttttcttaaataataaaaataaagtttagaagattagttaaagctatatactaacctttctgttacatttggatcatcataacttatatactttttcatcatattcatcagcgttaattgttagtaaattcatggaaatccatagagaatgattgtgagtttgtgattcaccaaagatctccatcaattagtacttcaaaaaaactcgtcttaaatagatttaaaaccattgcattgacgaatatctgaataataaaaacgatgaaattgtacatgtattgggaaatagtttgttaatcaatacatggggtatcaagaaattcataaagatttaggaacaatatttatgaaatttctttgatttccttttgcacctcccataaatgttttcctttatacaatatgttttatgcataggatattgtatttcctagcttcgaagaaattgtaaggctctttcgtatattctttacgtcttgagtgtactagttgttctaaattatactacagaattaacgaaaaacaaaatatcgtatatttgactataacacggtattagttgaagccactaaagtaagagaccatgccaacttccattctattatttagaaaaacctttttttgataatattcatttagaaagacttaacttgaaaaaaaaaaaaaaaaaaaaaaaaaaagacttaacttgtttcactttctacctttcttattatacaaagagactcaaaactgtttgtattggtcttgatgtataaaattgactatagttcttatggttggacctaattaatcattactatattgagcactagttacaaacaaaacattgtataaataaacggggaagcaaagggttactagtgtgcaatctgtgtggttacaatcatataacttcactgtccaatcttttaaacattccaaat

SEQ ID NO: 2452 - DNA, 3000 bp, Unknown
  misc_feature (1)..( 3000): cDNA_ID_3067845_gDNA_ID_1620538_Annot_ID_159962 3000 nt of promoter + ATG
ttgggggtaaaatgttaaacatatcttaaaaggttgagtttcacaaaaaggttatcaagagttttgagaagaataagagacaacaggtacatacaatagtagaagatcagtaaaacctagcggttaattgttgtaaagctaatctagatatgtcaacatgtaaagctaagttatacgaggtcatgtagtatggtggttttctagtttaccaggctctcagtggacaaaagtatttgtcgatttgataccatcttcctcgttgtgcgatagtgtaagtacgctccacaatggaaatagagaaaaagaagggtaatcagctagagttaaatccatcggcaaaatctaacacacatagttttcactcaatcactctagattgatttaataagtcatttataaaagttcttaatcctcaaatttctatggaaatttttgttcatatgatttaaaattttgtacggagctccaaagaaattaagtttacttggaagcgaaactcgactggatttgtcagacggaagactcttacattggatttaagctagagaaatttttattggatcgactagataagttgttctctcaaattgatactcgatactcaaacttgtacacaaactaaactacaaatgctacgttgcatctggtatgaattatgtctcaaaagaatccgaccagatccttttcaaggttacaccccgacaacaaaaccagcttggtaatttgcctggaaacgagggagttgaaaacgtaattcttggttcacaattaatcctacatttggagacttagtgcgatttagtcgctgcaaatttgttggtttgtccatcttagtttattcaacttgaatctcgctttcgtggtccaacttttgatttgaatagcatctccacaaacagaaatacacatcttttatttccagttttaaaaagaataaataagcctcaagcagctatcaaaatataatgcaatattgtttaaagagtttcattttattccgtagccatttgaacagcattcgacatataaattttaagtttagccaacaattaccgattcttgccaaaaaaaaaaaaaaaaaaattaccgctttaatgtttaaaggacgaagaaaacgtgttattttaactttaaattatttttaaaagtttaataattattgtgtatgcatggagaagcaataagttacaccaagtaacacttgagacatatacttgatttttttccattttcaacgttataggaaaattggtgtgaattagtatatccttgtctttttcatgccctgcaacttgcagctgcttatataaaggactaaggaaaggagggacactttcaaagctcattagtaatctaagactttttcatattttccaaacactaattgaagaaaaacatgcaggttcgattctttatatatattttcctaatctatgtttcttaattggaagcttgtaataatttttccgaatatttttttattgcttatatatcaaatgtcataattctaccctaattagctctttaccataattaatattttcatgacaggtagttgtactgaaattagatgttcattgtgaaaaaaccaaacaaaaagctatgtcaactgtatgttgtctctcaggtataaacaacactcatcaattgctaatatatattttttttactcataagcctctaaattctcttaatcaattgattaaatcataattaagtacattttgatttttttttgtattgaaggattattttttcttttggtattgaaggagttaactcggtggaggtgaaagatggtaaactaacggtgacgggagagattgatgcctatatgattgtgaagaaattgaagaagatatgtcataccgagtttatatcggttggaccggttaaagaaccagagaagaagaagcctgatgatccgaagaagcctgaaacgaagccaccagatgtcatttatcattatgtccctccatgtccaccttattaccataatttcaacggatgttacaatgaagatcccaacgcttgcgtcacctcttgaaaacaatattttggtcggatcagtttggttcacgatagtcatcactcatcagcttcgtcgtagtctttggttttgttctattgtgattgttttaactctttcagtccagtccattatacacactcaacatgactagaccaaggttgccactcccaggcccatttcttgttttaattccttttttgttttcttgttaataacatgcatttaaatttagatgacgacgcattaattgaccatatttaacacaaatcactaggttatatacgtctaattcaaatgattttgtttcataaaaaataaaattagatatctagtgatcttatagtaatatataacagtaatctaagtagactgctccacaattatattttactttatttaaaaagaagaaactacgtaagaggtaaataaagtacatctttaaaaacaaaatttatgaatgaaacattgtgactttaatctcggtttgatttcgatttcagctttggttttgatatgattcaacttttacctagagaacttgcttgagaagttcttatgaccgaagaagtcaataaggtccaaccacaaatcaacgttgtccgggtcgtacacgcggaattctgaaaactacacttccttttgtgttcgttagactcaaattaattttcaaccaaatcataaaaataaatataaaattggtagagaatgagtcattctgaatgactactttaacctctttgtggtcgttattgcaatactatttttatttaaaaaatacaaaaactttcccttgtggccttgtgggtcatatataataatacttgcaaattccttggcaatttctatttaaaccgatttcagtagacttgctattgtcatcatttcatatcttagatcatctctcttctctctctttctcttaagaatattggaaatttctgaagcttttctatagttgatctcgagcc

SEQ ID NO: 2453 - DNA, 3000 bp, Unknown
  misc_feature (1)..( 3000): cDNA_ID_2048407_gDNA_ID_1620538_Annot_ID_159964 3000 nt of promoter + ATG
aatactatttttatttaaaaaatacaaaaactttcccttgtggccttgtgggtcatatataataatacttgcaaattccttggcaatttctatttaaaccgatttcagtagacttgctattgtcatcatttcatatcttagatcatctctcttctctctctttctcttaagaatattggaaatttctgaagcttttctatagttgatctcgagccatgcctccaatggtacgccttctttttcctatgatatctcttaaaataattatgcgttgaataatcgtttgtatataaatactatttgactatatatagttatgttaatcaggttgaaaatatgtaattaaccatactgatctctgttttgaaataacagaaagctgtgttgcaattgagcattcacgaggaaagaatcaggaagaaagcgtttgtcaccgtttctcgatgtccaggtaactttattagttacatttttcgaaatttataacatgatatattgtttggaaaatgaacttatattcatgtttttttcttttgtctaaataggtgttacttcgataacaatggatgacaaaaccgggaaaatgacagtagttggtgaagttgatgtaccggttatcgtgatgaagctaaggaagctatgtaacacagagcttgtttcggttgaagttgttaaaccacctgagaaaaagcctgaaccagagaaaccggctccacctaaaccagctccagctccagctaaaccggctgaaattgttgcctggccggttcagatgaacaacccttaccaatacaatcctgcctatgcaaattcttactatcaaccatatgggaactctagatttgtaacggacgaatcaaattgtgtgattatgtgataacttatttcaaataatgtgttaagttagttttgatggaagagtgtaattttttagctactgtaatatacatttctcatatgagcttattcagaaaaatttatgttactgtatgataaatttgatctttatacgttttgttaactttaacttttaatcatttagtaatagttgatctttttcctatacagaatattattctctatactttgtcttttgcttatatactaatcaaatggatacaaaaatatcacacacacacacacatagttaagtcgctctcaacttatttatgaatatcaagtaccaagatcgttcacgtaatacattcaattgtccaaaactaaaataattttgaaacaattagagaatgagatattagtaaagatgtgatgtagagagtcaagatctgaaagtctcctttagcaaaacaaatactaatcaataaaattcctacttggagggatccacatgtaaactgaggctttcgaggacatttcctttcttgactatgaaatagcagtattatccgagtcttcttaccatttttcaaatataaatcgcacatttacagattaaaaaaaaaaaaattggattcatgcattgagttgattttgaaatctaacaaaactcttgtgttacttttaagtcatgacttctaaaattttagtttaaatcatgtgttattaaagtaatcgtttaaaatacaaattaaaatttgtgttaatctattagtattttaaaattacaaattaagaattatgttttttttgtctgcgaattttgttttcgttgcgcaaccaaagaattgtgggtaagaaatgtgtaatacaagtatgatgcatatagaatggctcgccatgaaaaaaagctgcataaatgaattgctaggatcatgaatgttaagttgatcaattatactggatataaaagttaaagtatcttcaaatgatactgtatcagacaaaccaaagaaacgtgtgagtatattagaaaatgaaggtatttagtacatttttatatatttaatgagattaacacttctaattatagtataatttatacactaacgcgttaatcaaaaatagacaatttgacgtagtaggagagtcagcttttaatctaaaattcgaaaaaatgaatatactaaatagctcatctctgccaataatgcttctcttgtttattatactctttactcacagataaatatagcgaaatggagagactagctagaaattacaataaaggatcacatacattgttacctaattattattttcttaaaatttgaacaaatacgtgtgtcagcattatgctaatcttctttgtatcgtttcaaaaaatttcaaatattcccggtaacaaaaatttgaccttaagaaacaaacatgtacacaaatattcgttgccatcacaaacacaaaacccatagatcacaaacacgttacaacttgttacctttttgttgttgttgttcttaatgattttgctacttgttactttcctcttgacttctttgatgatctcgggctttcaactgttttttgggcagcttcgaattattttcgtgtggctctgagtaggcattatattgttacgatacctagagacaacaacgataacattgaaacaaacttatctttcctctctcactattcacaacaactttaaaataaaataaaagaacaattgtgacaatctcggttttatttcgagtttatctattagttctgaaatgattcaacttttccaagaacacactgtatagaactttcctgagaatttcttacgtgcccaaagtgccaatagggtcaacatatggacagggtcgtacacgcggcattctgagtgatccgtaatgctttcgtagtttcgttacaaccaaaaatagtaaaatactaaaaaaaaattaattttttttgactactttactctttagtctttacaacaactttttggggtcatcatactcgcaaattcctacgcaatttctatataaacagatatcataagacttgcaatatgtcatcaagaagcttcgatatctcaatctatctctactcattctctcttaaaaaaaaaaaaaaaaatcaaaaatttctggagtagtttctcgagcc

SEQ ID NO: 2454 - DNA, 3000 bp, Unknown
  misc_feature (1)..( 3000): cDNA_ID_3067870_gDNA_ID_1620538_Annot_ID_159959 3000 nt of promoter + ATG
aaattgcaggaaaaaacagctgaattcaagttggatgtttctgatgaaaacattagaaggaacactatgaaaattgtctggatgtttccaggtacaccaaaacaaatctattgattttattaatgaaaccaaataaatactatatttaagcttgaaatattaaaaagcaataatatttgttgttgtagttactttcgtagacatcaaggaaaaaggtatactaaaggtgaggggaaaatttgatcacattgaaatgagagagattttacagcaacatatagatgagtctgttgacttaatcaatccaatgaaaaaatcggagaaaaaacagattccaggtttggctacagtcttcaactactttaagactccagcaacgcaggttagatttttttttgcaattttcaaattattttgaaggaattaaaatttcaatatctaccctaggaattctgtagaaatataaacacatacatatgtaaaaataaaattattacttattccatgaactgctaatttgcaggagatagttgtcttcgagtttagagttcttgatgaacgtatcataccgaaagctatggaagttatctgggagtttccaggtacatcaacaaaaatctatagatatgtttgtttgtttttttgagcaaaaaatctatagctattttatttaaacaaaataaatctatgacggtacgtaggatatattcaatttctatatagaaattaaaaattcaaaaattaaagcactaaataaacccatgtttgttgttgttgttgttgttgttagtagttacttcggtagagatcgagaatgatttttatctaaaggttaagggaggagaaattaataaagaggtcatgaagacgcaactaaaggatgtagataaacatgttaagataaaatggcatggacaagatgtagaagaagagccaaaaaagcaatccgaggccggtggctcgaagttgcaaccggagcaacttagtaaaaagaaaaatatatacgaagacgcctacggtgaacatcttaaaaaacgacaaggtattaaccaagcaaagcagccggcattttacgacgattggctcttagaggaagcgcatggaccttttaaccaacaacaaggttttaagcaagaaaatctgctgccaatctatggaggtgcacatgcgcaaggattgtataaacaaaatgcgaataaggtcttccagccgcaaccaaaaggaggctttgctgcactgaaccttggtgagaagaagaaacaagctgaagtgaagaagcaaaatcaagacgcaggatggtttggaaatatgtttggtaaccaacaacctcaggtcaagcaggagttcagaggcaaacgtgaaaatcagcatgctcagcgcatcgatccgcttataatacaaggtctagatggaaaatttcatgcatataaggagaaaaataataatccgtatgcccgtagctcaaatgggccaacatctaacaatggtacatcacaaaacttgggtatcaacaaacttgtttcagtttatcagatttatttttatgggataacttttaaaataaagtttttattattgtttgttgtggacctcactatattggcatttttttgttaaccttaaatatttgtgttaaccaattattgtcaacagagtttggatcaagcagtacgcggaatcgctctagcttctcacggtcaagcagtgcgatggatctatctcaaaccacatcatcaagcagtgtggcgtattcttcttactccacaacaccaaacagttctaggaattcctctcactcacgatcaagaagttcggagaatctgtctcaattccaatcaaacagtacggggaattcctatacatcctctcaatcaaacacagcgagtggatccaagcaaggccaaagttctaaaaaaccaggaaagtaagcatgctcggttgcaaagaaagggaggaatgtcaaaactaagctctgaaatttttgacaaagaaaaagagacttgtcaagaataaaggtccagcatatttttttctagtctagtctattagatttcttctaaaagagccaatctgaggtggtgatcggtttgacctccatggactagaaaaaaaggtattgtggtgtttattacatattaattggcaaagtattgtttttggttaacaatttgctcctccaattgtgtttagtcgagtgatatcgttgtgtttctttaagatttattaaacatttgagtttttttttttcttaatgcaaatcattataaatttaagctgtcccaagctcatgacatttacaacttgtattgactaaaattctaaaataaaacaggcaagcttattgtacgggtatataactatatacagtatagccatcaacgtgaaactagagcaacacaagtttttcctaaaatactttcataaatacgattggatatatatatatatatatatatatatacatattataatcgatctttccttgtttaagtttcttggcaatccttgaatttccgtttgaatccattctaactatttattatgcgaaacaactcaagcagtttaaatatttcagttacacaaaattagattatcttatttcctaccttcgacgaagatgtgaggttcattattaaatccttataggcttgacttagtcgctcttatattgacgtgataattaaagacaaaagatatcgcatatatatggtttaaaactgtgttagttgaagctactatagtattaaactaaagaagcgcagccacattctaacaatctattatatagaaagactcaaaactgtttctatgccgcataatttaatcatactacattatctatttcattttcttgcttcggcggcttgacttaatgttttctatattcgctagctaaagagtatatatgtagacctggaaacaaagtctatgagcaagcaacgaggttccaaattcattcctttatatcatctctctccaatctcgaaacttttccacaag

SEQ ID NO: 2455 - DNA, 3000 bp, Unknown
  misc_feature (1)..( 3000): cDNA_ID_3067882_gDNA_ID_1620538_Annot_ID_159947 3000 nt of promoter + ATG
gtaagcatcgttacatcgtctcctgttaatctttttgtttgtaccatatttaccatttcttactagacagttccgcctttttttttttcagttttaccggactttgcccaagtatacggcttcattggaagtgtgtttgacccatatgcaagtaatcatctacaaaagctgaagaagatggaccccatagatgttgaaacagtacgtttcttgtcttttcagttttcacttttacatcaatcttaattgaaaccacgtcggtccaatggaacaaatggttaaactaatcatttttttcctttgtttgcccccaccaaacaggtgttactattgatgagaaatctatccatcaacttgtctagtcctgactttgaggatcatgtaagtattttactccacaaactactagtcaattttaactcgaaaccctataccagaactaacctcaagactcttattgatttcaaaaacaatagagacggcttctttcgtcttatgatatcggatctgagacagcaactgatcatggtggagtgaataaaaccttaaacaaagacccacctgaaatctctacttaatgtttaatagaagaggagaactgtgaaaagtgtctcaggtgagccagccaacaaccagatggctacaaaatacagagattctgttgtggttttttgtttgtacataggaagaagatgaagctgatgttactcggtttagttgttgttactgttataaatagtctgttgggttaaggatggtatatgtacagtgtattatcataagttagatctcaagtttaaacatatgtatcagtctctttgatgggagaccaaaatctcttaatagagttgtctttgctttcgttttcattcgtttatagaggaagaaataaggtgactgtgaccatttgtataacaatatggataaactatttttagtggcatactctcgactataagaaaagatgcatccaaggaatatcaaatcttcttgatcaaaaggttataacttataaagaatggactaatatatattttaatttgatcatatcttaagacttacaccaaatccaattattttttttatagaatatgaaaacataaataaacatcattacttgcctcagaaaaataaaagtaaaaaataaaaataaacatcattattagagatcataaaaaaaataatttgcagggtattcagtgtgatcaatgatttcgacagatttcaagatcaataatttgtagttggcttcatttgtttgtaaacacattttggaggtggtgataaaacacattcttagtgatgaaatagataaatacatttctaaatagatgtaaatcaaatgatggtttgactggtttgcatataaaacattttctagaagaagttattaatcatattttaaacaagaattgtaatcatataccattccctctctcaaatttgttttgagcttttgttaaagtatgtatctgtctctttgatgggagaccaaatcaaatctcataatagcgttgtatgctttcgttttaattcgtttatagaggaagaaataaggtgacagtgtagaccaatatggttaagctatttttagtggcatactctcgactatgcatccaaggaaaatcaatcttcttgaacaaaaagtttataacttacaacttataagaatggactaatatatcttaagacttacaccaaatccaattactttgatagaatatgaaaacataaatgaacatcattatttgcccaaagaaaaataaacatcattattagaaatcatagaaaaaataatccggagggtatttggtgtgatcaatgatttcgacagattttaaaaccttttttattttctccagtaacttatcttgatcaatattttctcccttcactgcaaatacgtcgtccatgataccacaacttatgacatcaactcctaatataataataaaaagatgacaatcattcacattgttcaaaattcgtttgttgaatataattgttgggtgtgtgtaggtttgtacctggaaaaccacctgcaattttgaatccttttcgccattttttttcgggatatcctggatgcttgaatacaatcgtcatcgactacaaacaatgaaataaaactaaagctttagtgaatttattatataaccacataaataggtttactaagaaaaataactaaccattttttgaaaaactcaaaagtttggaaggagaagagaagatgatggacaagaatgtgattacaaactcgcttgctcatcaacctctatatatattactgaaaattgattttttttgttaaataatctataaaagtacatttatctctcaatttcacaatctctttcgacatatgtcacaatttctcataacaaatttttgacacaaaaatagatttatcttctttttttttttgttgaaacaacacaaaaatacatttatctctcaaagatttttttgttacaatatggagcaaataaattaattaaactggaaattattttaacaagataatatatgtaattaataaaaatatatgttaatttatagaattaactaatctgataaaaatatataaagtaatcaaagttatagtaaaaaaaaaaaaaaaatcaaagttatagtaaataatatttaaacgtatgtcacaaaatttacaagatataaacttttcaaaaaagagaggataaaccatcgtaaatataaatacaacgagtgtaagtattggttaataaaatattaaatatagttatcatcaaataatttgataaacccccaattcttaattcaattcgacaagatcattttgagtttctcagtctccgatactgcccaaacttaaggcccatatttaatgaactcattataggcccaaaacaaagcatataaagtcatcgtcttctctagtcctgcgaaaaccctagttttttgctctctcgaagttccgtgcgactctctgctcgagcaagatctcctaccgatacaatg

SEQ ID NO: 2456 - DNA, 3000 bp, Unknown
  misc_feature (1)..( 3000): cDNA_ID_2989987_gDNA_ID_1620538_Annot_ID_159940 3000 nt of promoter + ATG
aagggatcagcagggacatcaatataagaaatttcgtcatccttgagaaggtcattttcagaataactatgacggatttcatgatgcttttcctcagcaatgttcgacaacttttcaggataactatgtacgggttggttattccatctcttgtcaatggaaccaaagccattgttttccgaaaacagctgagtagttgtatctcgagcaaatttggtaaccagagaaaacttctctagtagatggattgaaagatcccgagttggatcatgactcttttgctttctgaagccagactgggaaacactagatactctattaccaacatctgaacttgttctcctttgattttcactagaagaacctccgtctaatgggtatacggattgtccacttgctacaggcagtgaacttggcagctccaatgaagacaaagttctctatcggatattatgataaaatgtattagccaataagagaattaaaaaaaaatcatcactgcacccaacatgagatgatctgatatgattacctgcaagggactctgaaaatcattcacaatgaacacattttgatcttctgacgacctataaaaagctagtatcatgtaagactatgaattctgaatattttctttgtgacataactatgtaacgagccacccagttccatacgataataaactcgggtgaaccaaaagttttcatgttagacctctctaatgagtaagtaacaagtgctataaaagcctgtcaatacattgacactgtgcattcctaagctactttcatacagtaaccgaaacagactataaagacaggttataaataagaatatcaatacagaacaaaaaactatctcatatcagacacaaaccttgcaagaaaaacatgctgcttcaccatggccagaaactccctgactcctccattgtagaagtacagaggtggaaatgcaagtcctgcaggtcattttaaaccattaagtctgaatcattcgacttgtcgagaaggaaaagggaaaccccctcccgtatagtaattcattatatatatctcacaaaaagcaacagccaaaagttttgcttaccagaagacaggacaacaattacatactgccatccgagagcaggagtgtgtctcctaatggacctcacttcagtaaacggaaccgcggtgatggtataaagactcctgtctagaaaagatatagaaactaagaacaaaggtaaagcattaatcttcaatactaacatatactaattcagttcaaggaatcctaaatacctttctctgatagctttgcatttgatgtttgtcccttgtacggaatccacgactagccatcatatatcaaaaaatggaaacaagtaagtgaatgaatacaaaactaatacaaacaaacaatcaatttcagtgattgattaccagaaagagaacagagtcttgcttagtcaacttcaatctaccactaatcctctcagatgcgaactgtgtaggatgaattgcaacgttatctttcaaataaatcaatacagcgtcttcgtgttcactttgtaaacttctctttccgctatcgctacgcatcatactagccgatccctaacaaaatcaagagccatagcaacacaatcaaacgatcaagtcaaatagataatggattcaaattcgcattggcgaagatttattatcggaaaattacgatcgaattgttgaatcaaaattgagaaagcacgagaagaaggacaaagtcagaataacaaacttgttgttgagaagcggcgtaatcggcgtcgtcagagagatcttgtagctccgttgcttccatactcatggtgatttcaggagaagagagaggtgatgagagagatcagattaccctggagacgaagtaagtaattagagaggaagcttacgcgtcgttgagaatattcgattacgtgtgtgtatcttcattaattttgcagttaaaaaggttttaattacaggtcggcgttgtaaccgaaccgaaccgaaccaagttgtaatcgaatcgaatttagtcaactttataataatccgaataatacgaaataagtttctttactatagtagtaaaatgcgaatttggtgtaacagaaccacattaaccagaatttatcagaaatgcatatttttagttgagtaacatactaatcaaacagagcaaattaatatttccttttagttaaaaccaaagcaaattgatctgtaactttaaacaattagtttatgctgcggctttttagtaacttttctgggctctgatcactcacatagtcacattcatatatttcagtcataacttttgctattttgttttgttagtaacttgtcaaaactacaaatcaagctgaaatctgttttgaaaatgcatggaaacaacttgtgtaaattaaaccacctgtagttgtatacttgagatcctttttaagtcgcacaagtttagaacgagaactagaagcttcatgtcaagcaatacctcatttacctttgaagagtgtcatctgatgaaacaatatgaacaaataaggattggacatgtggaagttggtgatactcctcttgcctattcggtggaagaagaggccacgtggagccattaaatagaagtggagtgattcgctgtcgatgacttgggaaaatcctagaaaatggcccatcaggccatcacctctccttacctcaaattctaataaactcactttttgtatttgtttatatgcttgcttttgcgaaatgtttttcttattataaacattaacaatattattgtaattgactcaacatataaaaaaaacaaaatggtatagtttttatataatttgtttgtaaaagaaaataaaaatgtggcctctctccatttagctcttctctctgcaaagctttaccacacaatagtctccttgtgtttctctttatatttgtctctataactctctttcgttaaagtttcataaaacctcaacgaactccttccatg

SEQ ID NO: 2457 - DNA, 3000 bp, Unknown
  misc_feature (1)..( 3000): cDNA_ID_3067886_gDNA_ID_1620538_Annot_ID_159946 3000 nt of promoter + ATG
cttagtatagatccacagaacttggatgcgagaccaaacttagcgattgaattagtagacaatctcgagagtatatcgagaatgatatcaatcgggattggatctgattttccttctctttccatcgtacgtttttcaaagatcgtgtattttggattttggttccagttccagttccagttccagttccagacttaacgtagacgacaacctagggttcaaaggcaattcattcatacctaatgggccgaatgaattcatgggccatgttagaggcaactaaaaggctggacgaaactatctattttagccttttaggggaggtaacgtattaatgtccccaactatcttttataggatgcatagttggttttaactaacattaaaggtgttactaacaatgggcaatgatggtaaaattataacgcagtggacacaatataacttagccataccaatgcaaagaatcttgaaactagtattaaactcagtcacgtatatgctctccagtctatgcttcgaagagctttcttctaatcccatacgaagaagctctctatgtttttctaatttaatcaggcttagacaactagtttcaaagtcataattcttggtgtctgagttgtcttccctttccatcgagttttttaaagatcgtgtcttttggtttccagttccagactacgtaggcgacacttcagggtttcaaaggcaatggcactaaaagtcactaatgggcctaacgacttaatgggccttgtgaaacgttacccaataagagacctggtttctcactgagttcaaccatcttcttccccatggctctgaattcttcagctttcttcgttccatgtcacaattacaatcaaatctgtgatcttcttctttcttcagctcgaaccagatcaactattaaaggacttcagcttcatggctatgtcgttaaatcaggcctttctcttatccctctcgtcgctaacaacctcattaatttctactccaaatcacagcttccgtttgattctcgtcgagcttttgaagatagcccacaaaaaagttcgacgacttggagttcaatcatctcttgttttgcccagaacgagcttccatggatgtcactcgagtttcttaaaaaaatgatggcgggaaaccttagacctgatgatcatgttcttccatcagctacaaagtcgtgtgcgattttgagtcgttgtgatattggtagatcagttcattgtctatcgatgaagactgggtatgatgctgatgtgtttgtggggagttctttggttgatatgtatgcgaaatgtggagaaattgtttatgcgaggaagatgttcgacgaaatgcctcagagaaatgttgttacttggagtgggatgatgtatgggtatgcacaaatgggtgaaaatgaggaagctttgtggttgtttaaagaagctttgtttgagaatctcgctgttaatgattactcgttttcgagtgttattagtgtttgtgcaaattcgactctacttgagttaggtagacagattcatggattgagtattaagtctagctttgattcttctagctttgtgggaagttctttagtctcgttgtattcaaagtgtggtgttcctgaaggagcttatcaagtttttaacgaggtgcctgtgaagaatctcgggatttggaacgctatgctcaaggcgtatgcgcaacattcacatactcaaaaggttattgaattgttcaaaaggatgaagctttctggaatgaaaccaaatttcataacttttttgaatgtgctcaatgcttgtagtcacgcgggtctagttgatgaagggagatactactttgatcagatgaaagaatcgaggattgagccgacggataagcattacgcttccttggtggatatgttaggacgagctggtagattacaagaagcacttgaagttatcactaatatgccgattgatcccacggaatctgtatggggagctttattaacgagttgtacagtccacaagaacacagagcttgcagcatttgcagcagacaaggtcttcgaattaggaccagtgagttccggtatgcacatttcgttatccaatgcttatgcagccgatggtagattcgaagacgcagctaaagctagaaaattgcttcgagaccgaggggaaaagaaggaaacagggctaagttgggttgaagaaaggaacaaggttcatacatttgcagctggagaaagacgtcatgagaaaagcaaggagatatatgagaagctggctgagttaggggaagagatggagaaagcgggttacattgcagacacaagctatgttctgagagaagtggatggtgacgagaagaatcaaaccataaggtatcatagtgagagattagctattgcttttggactgatcacgtttccagctgatagaccgatccgagtaatgaagaatctgcgtgtttgcggtgattgccataacgcgatcaagttcatgtccgtatgtacgagacgagtgatcattgtgagagataataatcggtttcatcggtttgaagatggcaagtgttcttgtaatgactattggtgaagaagacaaatgagagttggtttatatttaaccataatttcattcagttcacactgaaccggcgaaatttctttgccagacctattcggaattgaaacaagtggagtctcgaaacgaaaagaactttctggaattcgtttgctcacaaagctaaaaacggttgatttcatcgaaatacggcgtcgttttcaaagaacaatccagaaatcactggttttcctttatttcaaaagaagagactagaactttatttctcctctataaaatcactttgttttttcctctcttcttcataaatcaacaaaacaatcacaaatctctcgaaacgctctcgaagttccaaattttctcttagcattctctttcgtttctcgtttgcgttgaatcaaagttcgttgcgatggcggatgttcag

SEQ ID NO: 2458 - DNA, 3000 bp, Unknown
  misc_feature (1)..( 3000): cDNA_ID_3067946_gDNA_ID_1620539_Annot_ID_159985 3000 nt of promoter + ATG
gaatctcggttgtcatcgcttcctagtgataagcctaaggccggcttaactaatggaacttactagtgataccataatgcgaaaggtgctaattaagcttgacagtgaagaggattcttatcaagttttggaaaattttaatggagattccttggttgggaagaagtatgaacctttgtttgattacttttagcgatttctcaagtgtgacttttcgactagtagcagatgattatgtcatgaatgatagtggtactggtattgtccattgtgctcctgtctttggtgcagatgactatcgtgtttgtcttgagaacgagataattaagaaggttagatttgacaacatcttccttatatcaccacctttaacattaagtttattttctttcttgtttaagtttacagtatcttcaagaacccatgttcatgacacattttgttcatgtgttgtttagattgtcagagatttcaaacgtccagatggtttgaaagatacagagattgatgcagctgtagatagtacatatcttaattaaaaataccacttctctatgctctattgttgaggaaacatataatatttgcattcgttcatggttcagatatgatgttatggtaattcttgatctacgagaagatgaatctttgaaaaacgaaggtgttgcccgtgaggtaaataaatgtaaccgaagcgattaatggtcatatataagttgtatatttgatatatgggtttccttctcattgtgctcatgcattgaaaagcaccctgttatgactgtggttctaggagaacatttgcatttgacagtcggtgactaattgttaagcaagaagaacgcatgagagccttttaaagtgttttcttctagatcgttgcaaaaagttaaatgtctcttgagactttgtactcattctatagataaagatgggatttattacaaaaacaacaagaaactttgttacttgtggaaattcaaaattatccgaactagcttcacaaaatatgctcaagagtttcaatgtatttttttttgttctgtaattgtatgactccgtttgaagcatcaagattatggttataggtagtgatgctaaaactctctgttgttacagtgaccactaaaaacaccaacaaaaaaaacttaggtaacgtgtcgtctaaaaacttctaggttcaatttctttagatagtactatcaataaataaaataaatatgtacaaaggctttaaacaatgatgtttttcaaagatgattggtagatactaattagagcttcaatataaaagaacacatgcgattctgacattctgtggtctaacatggtttcttctagagtcaaaaccatacaattaaaagttaggaaagtaatagcaatgtggtttcaaatatatactcattactctttagattcatgtatggtgaaggaaacattataataaaatcaaagatcacagttttgtaggtccctcatattaatcaacatcttaaggcgttatacatatcttctttttgtaaatatttgactaattaaaatatctaattagagtattagactaatctcatcaaatatccgactacttgtgtcagttcaaaacacagtgattacgttagattttgtgctcttttgtttataaacaaagctaatttaagaaatatatgatctatttgcctccttggtcttaattttatactttcttggaataaaacacatttattaaaataatttttaggttcctagattcatgtcatgtggcttgatagtttccaacaattataccaatattttactcattcatatacaaataaacaagctttattctattcttcagtctcatgatatacgggattttgataaaattcagagtacccattaattattctatgttacagcttgtaataagttaaatttataaaacgtacaagttgaggaaataacaaatgttttcaatattaaatgatttattaatacattagtgaccaaaaaattattaagtgtaagaaaaaaaacacaactcagaaaaaattcaaaagaccgtctaagttcggttcatgtaagaacaagtgggacctctttaagtttctaaatcagagaataaagaagaagaaaaaatctcaaaaccttcctctaaaaccaacggctcctacctttacttacaccctatacatacacttctctttttatcctccatcggcggcttatggcggttttccggcactaatcatctccggcatatataaataaacgtacttcacgtttttttatataacttcaaagtagtttcagatttgtctctatctcttcacttttaagtcttctggttttgtcatcaccagctttttttgttctgtctctgtctttctctttgtgtatttttattctcgtcatcgttgttcttctatgagaggaagatcggaatgtcgaagagaattagaagattctcgtacatcacttcgttggaatttcacaggtcgatgagagatctgagaactgtttcattttgatccaaactcatctctttcaggtattccaaatttttctttctctgttctttctactattacccaaattaaagttttgatttttatttctcactctgtttcttgtttttctaattgcagagtataatggactaagcattttttttctccgaagatggttaaagaaatagcttcttggttattgatactatcaatggtggtgtttgtttctccggttttagctataaacggcggtggttatccacgatgtaactgcgaagacgaaggaaacagtttctggagtacagagaacattctagaaactcaaagagtaagcgatttcttaatcgcagtagcttatttctcaatccctattgagttactttacttcgtgagttgttccaatgttccattcaaatgggttctctttgagtttatcgccttcattgttctttgtggtatgactcatcttcttcatggttggacttactctgctcatccatttagattaatg

SEQ ID NO: 2459 - DNA, 3000 bp, Unknown
  misc_feature (1)..( 3000): cDNA_ID_2162338_gDNA_ID_1620539_Annot_ID_160005 3000 nt of promoter + ATG
gaaatagaaagaatacaaaacgtacggatgttgttaacctaaacacgattactaccgagactaaagatgtctaagtttaatactaagaaaagtaaaacaatttttcgagcagatatatgaatagtgattttttgggtcaacacataatccacccaacgttgatttttgtttgtcgtttacaatctctaaaacgtttattttctaagaaatatacgtgtgggctcattttaatgcccttcgtgcgtctacccgacgactttgtttactcgaaactatatcacacactacaccacatatttcaacatcacactgtatacacacatttatatatacatgcagaccgattattataataatattttctccggtccctaaaacatatatatcattcattcccacatgagatataatattatgtaaaacatacttttgactatgttgccaataatcaaaaagacatctctctctctctctctcacatcctattttccaagaagctcaccaatgcttttgaattctcccacatgtcttttgacaattttagtataaatactcaaaccccttagtcagtcattctcatgttcatcaacagcatttgatctcaagctcataggaatttgatctccacattatatcttgatcatcaccacaagaaaaacatttcaacttcttttatcagcaatcacaaatcaaagagatgggaagagctccatgctgtgagaagatggggttgaagagaggaccatggacacctgaagaagatcaaatcttggtctcttttatcctcaaccatggacatagtaactggcgagccctccctaagcaagctggtatgtaaaaattataatatcaaatttcttaattttgatcaaatttcttacattaattattggtaattattatttacaggtcttttgagatgtggaaaaagctgtagacttaggtggatgaactatttaaagcctgatattaaacgtggcaatttcaccaaagaagaggaagatgctatcatcagcttacaccaaatacttggcaataggtattttacttcacatataagtatataaccgacacacaagttttattttgttttcttactatatataaatcaccaaaagaaagtaactttatacacacgtctaggtcgcactactattcttttaactacacaatgatcggctctttaattacttttgtattgatgttcttcgttttccttttggtatcatctttagatggtcagcgattgcagcaaaactgcctggaagaaccgataacgagatcaagaacgtatggcacactcacttgaagaagagactcgaagattatcaaccagctaaacctaagaccagcaacaaaaagaagggtactaaaccaaaatctgaatccgtaataacgagctcgaacagtactagaagcgaatcggagctagcagattcatcaaacccttctggagaaagcttattttcgacatcgccttcgacaagtgaggtttcttcgatgacactcataagccacgacggctatagcaacgagattaatatggataacaaaccgggagatatcagtactatcgatcaagaatgtgtttctttcgaaacttttggtgcggatatcgatgaaagcttctggaaagagacactgtatagccaagatgaacacaactacgtatcgaatgacctagaagtggctggtttagttgagatacaacaagagtttcaaaacttgggctccgctaataatgagatgatttttgacagtgagatggacttctggttcgatgtattggctagaaccggcggggaacaagatctcttagccgggctctagttaacatgtttgaggagtaaagtgaaatggtgcaaattagttaaggctaagaaattcaaaagcttttgtttaccgagaaaaaaacacactctaactcttgatgtgatgtagttagtgtattaattagaggctgcgttttcaaaaaattgaattcatttgtttctccaaaattgagtagtttagcttgtacgagtaattaataatcaatgacaagtaatcaaagagtctacgtatattaatattgccttgttgatgaaataattatccaacaaacattggatgccactataacaacaacagcaattaaaataatataagtactagattaattcactgttataatcattttctaatgaggttttgaaagttcaactatggcggaaaaggtaaagttacgtagttttataataaataacttgagaaaaaggagcttaatgatcataaacatttttaattaaaatctcaaatctctaaacatttgtagtttatgtgttaacgacgtctatgcgtcatcatccaaatttaagccccatattgatgacaaaaaatatttaaattataattatacaaaacatataaaactattgattacgttttttttggtaaggaaaactattgattactcttaaactagatgttgtcctttaagataatagcccaccaaaaacaaaatcgagataataataatctaattatttttaaaaatttagacactgctttgtattgtaatttttgaatatctaattcataacataattaaggtagcttaaaagaaaagaaaagaaaaaattgtgccctttatttgagaaaggtataattgtgtgaagttaaacgatgacgtttctttggtaccttaaatattaatttgtgtttgataatttattgtctatagattgaatgctttgttacataaatgggtttgaatcaatggataatggattaaagaaatggatgtttacattaaacaaccacacaagtataccgaaccgaaattgtttgatggctttgttatagaccgaaccaggtttccaattcggaaccaataattattaacctgaaccaaatcgaaatttgccgtctccgaattcaaccgaaccgaagttttttttccggtttaggagcttcgttttattgttgatgcttcaatttccctttggcctttgatacaaa

SEQ ID NO: 2460 - DNA, 3000 bp, Unknown
  misc_feature (1)..( 3000): cDNA_ID_2162345_gDNA_ID_1620539_Annot_ID_160007 3000 nt of promoter + ATG
gctctatcgaaaactgggagttttgctaagaagcactctgctaatgcaacaaaggagcctctgattatcatgttgaaggattctagggtttacttagcaagtgtcaatctccatggagttcacaacaacgttgctcaatcttttgagttaggatctcgattgtaccttaaagatccgcacatttctaacgtctttcactgtgatggcttgttattgctctgctccattaaggagaatacactcgaggtttggaatccatgttcaggagaagccaagttaattaaacctagacacagctactacaaggaatcagacttttatgctcttggttatgacaacaaatcctcctgcaagaaatacaaagtcttgagggtgattagtcaagtccatgttcaaggtgacttcaagattgagtacgaaatctatgacttcaccaatgattcttggagggttcatggtgcgactaccgaactgtctataagacaaaagcatcccgtgtctgtgaaaggaagtacttattgggttgttcgtaataggtattttccatataaatacttcctaagttttgatttttcaaccgagagatttcaaagtctgtctcttcctcagccgtttccttatctggttacggatttatcagtggttagagaagagcaactctgtctgtttggttattataattggtcaacaacttcagaagacttaaatgtatgggtgacaactagtctcggatcagtcgtgtcatggagcaagttcttaacaatacaaatcattaagccgagagtggatatgtttgattatgggatgagtttcttggtcgacgagcaaaacaaatctttagtgtgttggatctcccaaaaagtcttacacattgtgggagaaatttatcacatacaagatttggatgatcatggtagagattctgcgttaagatcatcatgctcagttcttatgaattatgttccaagtttagcccaaatccaataaagatttggcctgatctcttggaggaggcaaacacaaaggactttgtatgaattctgttccaattttgacttgtaattctcgcaccaatctagccaagtccctttttctttttttcctttaggaactttaatattgatcaggtttaaggttttctctggttccatgaacttaaaaataatcaactttgcttacatgtgttatcgcttgagttattttatggattatatacattcaaatactcaagcatataaatggtgaatcagcttgtagctagaaactgaaaaccattcgtttgacctaaaaacgaataaactttacagtgagcagaagaatcaactggcaattagtaacctatttatccacttttacatataaaatgttttattcaatctaaaactgggaaatagtaccaatttatacaagagaggattgatatatttttgtcaacacaagagtgacttgaaaagctttcttgaaaagaataaagaaaagacaatcaagcagtgtacaaacgaatcaattgtcaatcctcaatcttttttttggtcagcatcaatcttattttgtagaaatacaaacaaaaagacgcacaagtaggagaaacaaagacaggaagaagaataaatagatcaatagaacttcgaatgaacctttcttggaactcaagaaaagatctctctttgcagatttgccagatagtgctctcatcactatgccttctaaaatacctttccttggaaaaaggacgagacaagtactcgagaaaccgagaacgttgcctcgagcttgtattttgaagataccttgctttgaaatgaacgataagacagtgcgacatgacatgaaggagacgagaaatcaaaaatctctaaccgatgtagcaatctcgaggtctctaactttcgatctgagcttgttaataaagctcctccttgccagtttcaccacatttttcttcttgccaaactgcaaaagagccatcagcaactctttttttttttttttttttttttttgcaaagaatgatgtgttggaagaaatcacaatggttatcaaggaaaaattagtcttagatactttacttgaaggtcataaataattgaacctcattgtcttataaattactagtatcatgtttcaatgattgaaatgcaatttgtgtgtattgcttatccatatatgttatcgtttttgttcacatttgataacggtcggtcttctcaatttcccttattagttaccttcccgtttttgtgatttaataacaacaatggttgtaagtacttccctagcctcatcattgcagtaaaagattaacgaagatttatacaaagatgaacaacatataaaaatgttaaaaatcacactgttactctaaaattctaattggaagtttatgttgtattgtacgaactacaagctactaaattctatgatgctgtttctttttgcgtggaacacaattttcaattctagttctatttcaatatttgtagatcaagggtagattgaaattgatcatggtcgtaaaacatgtttagtgttccattgaattggtctaatcttatttcttcctcacaacgtcacgtaacaaccatcaactaaatgtctattttaagctaaatgttaatcataaagtattaaattaaaaataaaaagacagaaaaacgtggtaagaaagaaggaagagcgccaaagtctgagctaaatctatggtggtttcaagcattcctaaaatggcaatcttctcacaaaaaaatattatctcaccactgaaccattcttacaattcctcatatcattattccaaactgaaaaacttcccaagattttttgtgtgtagatatgttttgatagattgaagataagtttaaatgattttggatgagacttgaagcggatcaagctagagaaaggaatcgacgacaaatgaatctatgaagacaggtgaattacaacacttgatgcttcttgagtttatccgacgttcttctttcgggtttctcagatgga

SEQ ID NO: 2461 - DNA, 3000 bp, Unknown
  misc_feature (1)..( 3000): cDNA_ID_3067926_gDNA_ID_1620539_Annot_ID_159993 3000 nt of promoter + ATG
acaatattggatcaattatttgcctacaactacatattatacgtaaaagttatataagcaatggatgattttgtagtataaattaccgtcaagatttctccttttgattatgactcttcttcgtcaccaatgtaaatgcacatctctcttacttctttcttttatttccttatcctcaacaaaacccttcattgacctctgctctctctgtctctatcttattatctccttaaacaaattttttaaaccttaagagctacgagtgaattggttttattgtaaactgttttgacaagcgtccatacttttgccaagttatatagccaagtgtataatccctaagataaatgtcaagagatccatcttttctgtatgtgatgaattggaattataccgcaccaatacaccaagtacaaacaagatatacttaataacatggtatagtagactaataaattggtaaaatagaacaaggaacctatacagatgtcaatgaaatatgctatgcacatgcacttcatctttaactacaattttatatttttttaatatttttgatgaaattaatctaaattttcttagagatcaagaagcttgaagaaagaaggaaaaaaaaaacaacgtgcatccactattttctccggaaagaagaccaaatctgcaaattcatcaccaaagaatcagagatggatgttgtgcaaagaaaagtgaaaaaaattggaagaaaagttgcttctttccctcatgttgaaactattggaagagctctctttgcctcctccttcttcctctcttcttggcatgagtaagaaacatcattctgattcgtacttggaattcaaatagatctaagtcagagtaatgggatctgataatttttgaaaattcatatatacaaacatttgaagatgacttgtaattgaatgattcttaggcatcagagactctttgttttaacaacaagaaggttattgaaaataaagaaataaaaaaaattaaagaggttcttgatatttttctcagttgatgattaaacttaacaagtgggattcttttctttgttatatctagttacatggagctcaaagccaactggaatggaacagaggattattggagcccaaagtttggctattcaggagaccagattaagcatcttatgacagttagtatcattgtgagaactcttggaggacttatcttcatctatggcagcttcttcggagcctttctcttggtactaatatgaacactttatttataggaaagcttgaaacctaatgaaattaaatacgaatacattgaaataattataagaataatatacagctattgtgatatgcatcacttatagatcatatgctttgtgtcttattccaaatcaatatgtttcttgtgggtgcatatagcttatgtaccaaggcattgctacaatggttcatcatgatttctacaatcatcgtttagatactgaagaatttggactgctctatctcaaactcaaaagggtataacgacctatatttcttctttttaaggcactttcagtttctttagctgctcatttgttctttgttttgtctcctggtttgtttgtcagattctgaacgaaacagtgtcgtacaatactgcatacaatctctacaaatcagactttgacgagcagcagatagagcaagtgaaatcaaaattccgtgaggtgcgttattgaggcctacatgtaaatgtaataattgtagcttgtgaacactgtgtgatgattgatttaatgtgttgtgtagcttgcggatcacgcgatgacaaaccctgcattgttcggacataatgagtttcttcgtcggctcttaagcttcgtcaagggattggccgtagtaggagcattgctgtttttcgtggatatgaagtatcgtctcaacaaagccaagaagcaatccaaagttaaaaatgattgaaaactaaaaagccattacaaatgctttatctttatgtgctattgaactagaatcatatatccatcttttgacaatccaacaaatatgttacctttattaatttggtcttgatttgaataatggagctataattaattcatgtagttgaaaagttcaaaatacgaaaagaaaacaatatgactagctaaatttatttattagaagttgtagcagaatataaaattgaccacattagtacaactgtgcacgttctatgctactagctagcatagtcaattacaagcaagtaaacatatttttaatgaccttttcacaaattttcgaaaccaaaaccagacaacacttgataatattatttgttgtaaagctacaaaacgtgagaatcccgatagctatctttaatacattgacttctaaccggttaaaaaagaaaagacatttggtatgtaccaccaacgagtcaccctaactaaaactataattgggaactccgatcaatttttcaaatccctctagtcatcttaaaatataaatttatttcactctataattgagcataatgcaagttcgttctgatccaaaaaaaaaaaaaagttccggtcgttttataaggcaagtcaactttgatagaaactaatttagcattcgcataactgtacattttctttaaaatacacattaaaaaggtttaaacgttcaagtctttattttttatgatgaggatatagacggtctttgatttcaaatattcgaaagtcatttttttttaatatcacaagttgtagtattttaaacaatatgttatttcttgacatagagattatttagtcttttatttatatgtgtttactattcttcttccttttatataatcatataacctatagtttgtatatttcaattattccatcatttaccatttagtcgtctccttggtgatccaaatacttcatcaccttccttcatagcaaattctcttcgtctatctcatacatttaaacaaacatagacatacactaatcaatcttccttaatttaaaaaaaaaac

SEQ ID NO: 2462 - DNA, 3000 bp, Unknown
  misc_feature (1)..( 3000): cDNA_ID_3067942_gDNA_ID_1620539_Annot_ID_159986 3000 nt of promoter + ATG
aatcttctatacaaaactaattctgtttaatccgtttaaatcttatgataaaataataaatgaatcctctctctttcttcattattttgccttaatctgcaactgttgtcaacttctcatgatttgatgcaaaattattttgcgaaaggatcataaatttcactttgagtctctgactatatacctaaaccattgtatagatattatatagcatattaacaacggttggttagaaccacatggaataagttctaatcctagcattcttgaactgtagttgaaagaacgacatgttaacttctcaaacgtagctatccagcctatttccatttcgatgtatgaactatattgggccttaataaagaaacgggcctaattgcgaaacagactacggccatgaaatgtcaaactcaataaggttaaagcggaattgattattacggattagtacaagaataataatagtatcagtagtgatgcatgtgacaagggtccaaatggaaaccaccaaaatcttaacctaaatttgacacaaaaagagaatgattttaagaaatgtgggccgaaagttgttggctcaccacgccttgataatcctcttatctatttatattctataacaattcaatgaagtatgattttattgtctttctattgagacaattgttatacaataataatatgtgcttgaattgtactcgtatgaaatttttatatgtaatatcacaatttctattttatactacgttattcatattctacgagactacgacaatgcaaagaaaaagattacttataaattcatcaaaaatgtagactaaatgtctcgaactaatttttttttctttctctttaacaaatattaaaagtttttcttctcttttcaatggatttgtttcaaacgtaagtagttctgaaaatgtaagtaggaataatcttattcataaaccaattatgtggatttttctgcattttcctatcctcagtttactttgatgtttttgtgtagcagctaggggtgaacgttcagataccccttcaagttcggatcagatattttgagtttttggatcttcgggtttggatcagatattccgtattagattcattaagtactatatttcataccaaagtaacaaaataaaattttatgtccttcttttatttatttttgttaatgagtgtatgtttgagattatttgtttagtattttaaatatgtatttaagagaaattcgtgaattttatagcaaaataataaaatatataatgattaggaaatcccactgagatggaaatcaacatgtaatttcattcattgtattattgtctctgtatgctttgtctcctctttacatgaagaatttttagtcaccaactccctctctcacctcaactaatctatcgtctatgataaaatatttctttcttgtttaatcacaaacatttcaaacacgacacaacgaattcgaatatttaaaattctaattccgtgttgaaaaatgtcacttgattttgatcctagatttttctttgaaattaggtcaacgaaaaaaattggttttgaaaagatggagaaagttgcgaatttcttaagttttgtgagtgtaaattaggtaatctttagccgacaaaaaatccaaagagagtggagacaacaagaagaacatcatcggtcaaacaaattctttcttgtagtcaactttttaagtgcttctttgttcccaatgtattggtctctcaagttatcaatgatgtcacgctcacacaatagttactctcatattcgagtttcattacatcttctacagattccattctatttgggacaaatgatgaaaccgagaacctgtatctatttaaggtttttaaaacagtttccaaagattatcaaagaaatttcataaaaacgctccacctattgttgctttatattactgtatgtttaaaggttttttgacatttaaaattttaaaactcttacatcttagtctaatatatctctaaatattagaaataagaatcaataataccaaatgattgctaaggtttatcaatgctaaatctactaatttaggattagttatttattatatataatttgtttccaacaattatttatcataaatccccattacaaaagttgatagcctccatatatacacgaaacaaaacaaatattacaagtcaatagacgtcaaaaacaaaacttttaaaaatattttaaaataaatattaattacgtttaagaaatttaccaaaatatatctttaaaaacttaacaccacaatatccaaaattagtgtatctaaaatattaatgtgtaaaataatttcatgattgatgtatattttgtgagacatcactccacatcaccaaaaatacctaattttttctttataaaatatttttaacaaaattgtggataaaaaagagaatgatttggtactgtattgaataggttgaaattcccaagatttaaaatagaataagttgaaaatttgagtaaaatttaaaatacaaaaaaaaatgaagaacattagtggagcaagtactagctgcaacatcactccctttcaaaaaaattaataacaactctttcttctctctcttttctcaaaatcaaacccaaatttcacaactttcaaaatcctctctctttcttcaacatctctctgtctcttacaagaaccttgcggagttgggtccaaactttaaagcttccctcatcaaaacccatcttcttcttcttcttcttcttcaccacttttactttctccttctccaatccctcaaaaagctcacatcaatggtacatcttctttttcaagtaccgcccataatccccaatgattaaacccttttcatttcttcattcctcgagaaagttaaatgtcataatctaaaaacccttttctttttttccacggatctgttcttaatctccataaagactcaaactttctttgaaattgttttcaaagtttcgatttttacaatg

SEQ ID NO: 2463 - DNA, 3000 bp, Unknown
  misc_feature (1)..( 3000): cDNA_ID_3067932_gDNA_ID_1620539_Annot_ID_159990 3000 nt of promoter + ATG
aggtcgttatacccttttgagtttgagatagagcagtccaaattcttcagtatctaaacgatgattgtagaaatcatgatgaaccattgtagcaatgccttggtacataagctatatgcacccacaagaaacatattgatttggaataagacacaaagcatatgatctataagtgatgcatatcacaatagctgtatattattcttataattatttcaatgtattcgtatttaatttcattaggtttcaagctttcctataaataaagtgttcatattagtaccaagagaaaggctccgaagaagctgccatagatgaagataagtcctccaagagttctcacaatgatactaactgtcataagatgcttaatctggtctcctgaatagccaaactttgggctccaataatcctctgttccattccagttggctttgagctccatgtaactagatataacaaagaaaagaatcccacttgttaagtttaatcatcaactgagaaaaatatcaagaacctctttaattttttttatttctttattttcaataaccttcttgttgttaaaacaaagagtctctgatgcctaagaatcattcaattacaagtcatcttcaaatgtttgtatatatgaattttcaaaaattatcagatcccattactctgacttagatctatttgaattccaagtacgaatcagaatgatgtttcttactcatgccaagaagagaggaagaaggaggaggcaaagagagctcttccaatagtttcaacatgagggaaagaagcaacttttcttccaatttttttcacttttctttgcacaacatccatctctgattctttggtgatgaatttgcagatttggtcttctttccggagaaaatagtggatgcacgttgttttttttttccttctttcttcaagcttcttgatctctaagaaaatttagattaatttcatcaaaaatattaaaaaaatataaaattgtagttaaagatgaagtgcatgtgcatagcatatttcattgacatctgtataggttccttgttctattttaccaatttattagtctactataccatgttattaagtatatcttgtttgtacttggtgtattggtgcggtataattccaattcatcacatacagaaaagatggatctcttgacatttatcttagggattatacacttggctatataacttggcaaaagtatggacgcttgtcaaaacagtttacaataaaaccaattcactcgtagctcttaaggtttaaaaaatttgtttaaggagataataagatagagacagagagagcagaggtcaatgaagggttttgttgaggataaggaaataaaagaaagaagtaagagagatgtgcatttacattggtgacgaagaagagtcataatcaaaaggagaaatcttgacggtaatttatactacaaaatcatccattgcttatataacttttacgtataatatgtagttgtaggcaaataattgatccaatattgtaacctgtggttttattgatttttctttttgttgatttatgataatggttaatttctggtcaatgtaatttggtaagaagttggagacaacgctgatcacatatgattacaatattatcactattatgcatttttttcttaattaatctaaactaatgacagtcaaataaaattaaccacctattctaaatattaagaaaatatattaaatgttgcttttaaatgcattatttttttgtgatttacaattttcaataactttaaactagtaatatttaataatttttattgaattttacaatttatcaattataactaataagtattgcattgaaaacctaaaaaattaatttttttaaaacaatttaaaaaaagaaaaatcaaacaaaaaggaaccaaaagagtatttattatttaataatatattttcatacatattagctttgcttatataaacacactttctattattgataatttattcaataacaaaagacggtctcaataaaagttttccactgaaatttcttaaacaatttaccatatgatagttacttggcagctcaacaggattttaagtttgttaattatgatgactttttttttttttttttggttattccagacgataccatctcacgtagtgattatagatgggcgttggttaatggctatcatgtcaacgccactaaaatcaataatgtcattatttattaaacagtattattattcttaaaaaaattttgtttatgcactgtgcacacctgttatgcaaattgtctttttttgtatactgtattgataccattattttaatttattacttaatccaaattgtcttcttttttttttgtaaacgttgactttaaatacccaattcatgaatctcaccttctctaagataaaaaatacatttaaatcatttcataatgacccaagtttaagtcttttgtttaaatcaattggtgcgaacaagccgggtctgcgtgaatgatgatggtctttgtttattacgaccgaaatgactaaatcaaacttcttcttcttcaatggatgtttcttttttatccatctcaagacatattctttctatttatttacttcttatgcaaccagattcatcaaagctttaatcatatcactttcttgatcgttcgttcatagtttgcttccggaacaagtaagtatcttctgcaccattgatcatcatgtgattcttgattcttgtttccgattattagttcttacataggatgatttgattacaccataggttttaaagaagttactgttataatttctgcgaaaataaaatcattttttgagttcttgttttttgtatgtcttgatatcatgtaaaccctagatttctctgttatgatttgattttcttctacaagacgtattcagactctgatctaaatctgaatcttttttaatattatagaaaacattgacattaagatcacaatatgaagatg

SEQ ID NO: 2464 - DNA, 3 bp, Unknown
  misc_feature (1)..( 3): cDNA_ID_2162191_gDNA_ID_1620540_Annot_ID_160015 3000 nt of promoter + ATG
cct

SEQ ID NO: 2465 - DNA, 3000 bp, Unknown
  misc_feature (1)..( 3000): cDNA_ID_3067976_gDNA_ID_1620540_Annot_ID_160023 3000 nt of promoter + ATG
tgcaagtatataactagtattgtctccatcgtcggtttgtcggatggattcaaacttaagatcgggtcatgagctccgaggtctagactctatgcaaaacataacgtcgtttttaaagtgagaaggaaaatctgatgtatattccttgccatttgccgtaccacaacattctattgggaacaaattttgacaaaaagctccaaccagacgtttgacaaaaggctaaacgccatttatttgcaattttcaaatccacgtttcacgagaatgcaggtttttacacacttatcatggaaattgcaagttatttttcgattacaacttccaagcaatagcaaatgttgcaactgtgagaatctgaaatgcacacattttagaaaatttaaacaggattatcattttcctacattattcttagcttggtaagatgcaatcagtagaaccaaactcttaaagaacaaaagtttatgaaaagaagaacaacactcgagtcatttacaatctgaagatggtacttgtgcagaagtgaaacaagcagatcctttttagtggaaacatgtctggtcaccaatagagagtgctaacaagtaatatcttcaaagtggccacacacgataacaaccataaagttaaatttactttacatcccctcagtttctccttttcttcttcttctcttctttatctgctgagttcttcaactgcataacaaaagagtccgtcaatgacggtttactaacaaataaagtgtaccattttcttataccagcgacaaatgaacttaccattatgatgagaatccgaacaaacacagctacaaagtcagtgaaaagggtcaacgaatgttttacatagtccatgtcaccgaggtgtgccttttctataatctcttgtgtgtccaccaccatgtatcccacaaagatcaaaagtccaaagtacaactgcaaccagagacgtattcataacaatggtgagatgtctgagaaagtaagacaaagaacagatcattctaaaacagaggcattcggtttacctcaaacttaaagatagatgcagagccaccaaagattgaagaggcaaactggagccacattagcatagacaagccagatgaaagcagtcctccaaggtagagatactccctgcgtcttgctaacattgctgctgctgagaaacagacaaacgctatcgcagttccaacaaatgcagtgataaggatgctggagaaccaaaagaaagatataaaggtcagctcctagaatagtctaacagaaaattaacattgaacaacaagaatcaaattgcataaccataacacaccttgggtcaacatcaattgccactttgatcaaggggccaacagaagcaccttcaagaacagcagacacaaacagaagagaaagccttttttgctgcatcaaaacaaacaacaatgtcaggaaaacgaaactttagtacaataagaaagcagccaattcactattgggttgggtaaatcgagcccacgtacgtgttcataaggaggacatgaaaggagccaaatcatagttccaatacatccaatcgttgtaagaataccgccgatattccagagcacatggaggtaagctccaaaggcagacgccacaagagcacaacataaggtcaaataaacctacaaagattccaccacaaataataagaaccaatgagcatttgtaacatgagtgagtatacaaatcacattcccttctgcaaatggaacatgacaaatgaacaagaggatcttaacaataataagcagagtaaagtataacgaaagatctccacagaatcataatcaagtaagtatcaacaaactaaatcatggaaagacccaattagaaaccctagataaagtacgatcgcaacgattcgttcaacggaaaccaaatcatagaaattagatgaaatatagaaacatagagcgatcaatagcacgaaaacgaaacgaatctcaatctatcgactctaatctagacatcgcggtttggtgtgtgatatgaatagacatcggcggcgaagaaacttacccgtttaagatgattctgaacggctggagaaatctgacggaagtttttaagagaatcatagctccagcttctgctaccaggttgagaatcgaagaaggaagagaacgcatccattgtttcgttttttttgcttgactttgagaatcgattaatgaaaatattagttagaaaataaagactttcgttatttataatgggccttatgattggggactaaattgacaataatacccttactgcttatgtgtagttattacgcattcgctacacgtgtaggggcattaaacacggagaagggtagttctggaaacttcttgaacgttgagatcgtcgtcgtcgtaatgagttgaaactttgccgcgaagcaaatgaaatatctaaatcgtcatctaaccaataagaatcatccacgtggatttttcacttagtttacatattattgtttaagcttaggaataaatttgttttagttttgtgataaagtattttggataacagtatttattaatttacaaagacttttctataatctttctctattattttcagttgcatcaaaagtttaacaaactaataaagaaaagaccaaggacattttcatatcgtctagtcaattcgtaaatcatgggtcgagagtatggttaaatgtcaggttttgaattctagttctatatgggctgatcgcaaagcccattaacagtctcgtttatctttctatttttgcttacagaaaacatcacgtagtttcttccttaaactgaattaaaaaaggaaaacgacatacaatccaagtttctaacgataacaacatctctttcacttccttcatagctcatttcaaaccacacattcaaactaactctgcaaaaaaaaaaaaaactcagagcagaggagatcgagagagacaaagagagagagagagagagagagagatcttaacaaaaaaatg

SEQ ID NO: 2466 - DNA, 3000 bp, Unknown
  misc_feature (1)..( 3000): cDNA_ID_3067993_gDNA_ID_1620541_Annot_ID_160049 3000 nt of promoter + ATG
tgtgcatcgagacttggttaagttgatgagtgatgaaagtggtattcaagcgacgagagagttgggaaagtatctaggaatgcccattctccataagcggattaataaagacacctatggagatgtgttagagaagatctcattaaggttagtgggatggaaagggagatttttgagtatggcaggcagagtcactctcaccagatcggtgctagcatctattccagtccattcgatgagtacgattgcattaccgggggctataactaaaagtttggatagagtgtcaagagattttgtgtggagaagtcatacaggacaaaggaagcaacatctactagcttggaaaagagtttgcagaccaaagatggaaggaggattaggtattcggtcagaaaaatctatgaataaagcattattgtcaaaagttggatggcgacttttacaggataaggacagcctttgggcaaaggttttgagaagcaaatataaggttggagatccacatgataagtcgtggacagtggtaaaaagcaattggtcttccacatggcgtagtgtaggggctggtttacgtgaagtaatcctaccaggtttaggatgggtgattggcgatggttctaatattcgtttttggacagataagtggttgggagcttattgagaacagagtcagagatatgtagctacgaaaacatgcagtatgattgttttattgctaatggaaaaatattattacttgtttttgttttgttctttcttttcgtcaaggctaaatgcctaatggtcaatcatgcaattaagtatgtacaattttttttttttttaagtttatcttgtatatataaaatatagtaggtagaaattattttttcattccatcaagttaatttgtaagaatttacccccaccaaaaaaacaaaaggtaagtgtgaataacttgctcacattagtgcggatgatgtgtttaatacatgtaataaccaacaacttttgacgtattatccatctgaaaaagatgaaagagacctcatcatctctatacgagagaacgtgttaccctaatgggtataaataatacgccaacctatgcaagaaaatcatatcatcacacttaaatctttcaaaacacctttaaatctttcaaaacacctttagttcttacaaaacacctttagttcttgcaacacaaatattattgcaagatgatgaacaatttgtagaatgttgctcatcatgctcacgcaaacgaaggtaaatgtcaataagatttagacagatcaagttatataattctctaatcttccctcttcttcctttgtctaacaacaattattattattttcaagatttcgtccaacttcttcaaacttctagaaacaattggcttgatacaatggacctatcaaaagtattgccatatattccagaatctataagattgatgttgtctactgttgtggtagatgttgtgacaggtgctcgagatcgcttatcttggagtgatagtccagatggtcgcttcaccgtgaggtcagcacactcaatccttacgagagatgaagtaccacgtcaacaatcatggaggatgtttgagcgagtctagagagttgtggtacaagaacgtgtgaggatttttctctggttagtggttaaccaagatattatgaccaatgtggaaagaaagagaagaaatatttgtgacacaaatttatgtcaagtatgtaagagtggcgaagagactattttacatgtcttgagagattgtcaggcgatggcaagcatttggagtcgcttgcttccccctaggcggttatatgtgttctttacacaatcattgcttgaatgggtatacagtaatttgggagaacaagaacttgtcggaggttatccgtgggctactttattcgctttggcagcatggtggggttggaaacggcgctgcagaaatgtgtttggggagaataggaaatgtcgagatagagttcgtttcctaaaggattcagcgaaagaggtggtggaggctcactcgctgcttgggagtaatcgaggtaatgtaactagggtggagagacaaatagcatgagttccgccaggagatggttggctgaagttaaacacggatggcgcatcacgtggaaatccgggtttagcaatagctggtggtgttttacgggataatgagggtatttggtgtggtggttttgcgggaatctcggagtttgttcggctcctttagttaagttatgaggtgtgtattacgggcttttcatagcttgggagaaaaaggctacgcgggtgtagctggaagtggattcagatatggtggtgggttttcttaaaacatggattagcgattcgcattctctgtctttcctagtacgtttatgttatggcttcatttcgaaggactagattgtccgaattactcatgtgtatagggaagctaatcgtctcgcagatgaattagcaaaccatgcttttttgttacctttggggtttcatagttttccccttaggcctgattttgctacttcgattatttttgaggatgctagtagtgctacgcgcccacggaatgttcgtgtgtaatttttttattttgttttttaataatatgggagactagtctccctcattctaaaaaaaataaaaaattataattatataaaatagatataaaattattaattacataataatacacacaaaaaatgaatatcaagaaaaatctctctctctctaaatcaaaatcaaatgagagaagagaggcgatacgacgaacgattgcatctcttcgattcctacggctgtctctcgctcgccgagagttttcttcgccagtttccggcggttacttcagggatgaataacggtagaacggttgtggaccccataactgcttctcaaccaaacctatttataccctgcgcatgtctctgttctcgttgggttgatcagagtgaaagtacacaaattcctttgttcatattgacaatg

SEQ ID NO: 2467 - DNA, 3000 bp, Unknown
  misc_feature (1)..( 3000): cDNA_ID_2162422_gDNA_ID_1620542_Annot_ID_160056 3000 nt of promoter + ATG
gttgaaattctttatgaatgttattttcatttttctgaatatctaagagatttcggatcctagggacatacattcctttggaccgaaactagcatttcaaggaaacacgacttttcattcatttggcgggatcatacgttactggaccaagtgctactcggtgaatgataatgtttataagtacttcacgttgatttatgggtcctttaatttggtactcaacacatcttccttatatgtatatagttattatttatttattttaataactttttcactttaagactcctttttcgttggtaaacaacttgaattagacatttagactcctttatatcatcgacctataactatgccagactattgataaaaagttaaatttttagttcagtaaaatttctcatatattgtttgagtgaaaattgttcatgaatagttttgtgtaaattcgattgtatttatatatagtttacgcgtctctcaacattatatacatatcatggttgtttagtttagatttttttttattttttttttgaaaatgatgtgctcatagtttgtttcgtgaaaaaccatgtacttttttgataagctaaaacaatttcgattattaattcataagtttgagattgttactagattaatattaatattttttcgttatactttaccgtcgataaaaacttttatttcctttcataattcaatatgcatttctttattacaatgattcaatatgcatgcatttgccgtaaaacttttgttttataagtaatttttatgatatatttatttgaaaagttatctgtctaattaacaacttctgactatctccaaaatatatgcggtatataaaatcaactactttattttacttatttaacaccacattacccgccaagtttaataatatgtaaacttatttaaaattaatagctaagttacgaacgtataattaataattgtaatatgtaagctatatgaaataacttatataaaaaaataatcatatactattgaactcaagaaaatccaaaagacattatcggaatcagtaatgtttgtttcctcgggtctagatttggactgcctctgctggttttcacgtgcttgctgctgcaaatccgattatagaggatacacaaacacaaccataccgttttttccctcattattttaaaagttatatattgattattaattatatctcataacaggtcggtatattatataaattactcatgaatcatgattccccaccggccaacaccatctagtttattattctttgtattatttagcgagatcgagagaattaacaatgatgatattattggaatatatctcattttaaaataaaaagtcatcgaaagaatacctactttttgtttatgtgcctctcatccccggccaatccaaatcattagccttcgacttaaattataaaatgttctaatttttgttttcttaatctttttgttgttttatagagaaaaaatgcgtcttcttctctacgtttgaagttacaaacttacaatgttccttcttctttttgtcgtcaaagaaggtaaattcattagataagtatttacaaagtttgttccaagatactacggattacattgagtataagctctttttgttaaggtatatggatgctattgactaagtttacacttctagtgagatagaggaagttaaaatcatgcattaactacatctaaaagatgtcacatacatatgttgagaggtaatgatgtcaacattcttctttgtagtcgctgctttttctactttgtatcatttcatatagtataaaattaggttgtagagccccaacataatgttacttgagtatatcctaggctccgaagttggtgcactaccattcttaagcttagagtttagctttcaatggggagtgaatcggttccacttgcatcatatatatactttaaaaagatgtgttcacttcctcctatgaagcgacaaaccgatgccaacattttgatctggagatttccaggatgcgtcaacaaatcagacaataaaactaattactcattagagcttatagctagccctagagacgccattaaaatgttagcgggtgcaaattgctagaacaagaaatcaaacttggtacctcatggattattagggtgtatgtcaaaccattttgccactttgaatactttggctagtgtaaaacagtatttatattactaggtgcaagtgcccccacattactcaaaagtgggtctagtccacccataaataacagattatagtatgttttagatttttttttgttcataatatctgatgtttcgaaaaaacaattcaagtttctatgcaaaaatattaaattaaacagctatatgattgtttatattctgcaataaattatatcattggtcaaaatatttttaatagatattaatttatgttttaatgttaaaaaactcaaaataattattttcttaaactttgtgccttaatctaaaacatctatatttttgaaacagagtagtctttttagaattggagttcttttgagataacttggtttctgatggtatctaatatactaattcactaacaaacaataagtattcccctttctgcctaagttcggctacattatagctttttcttttcatcaaatcctgatccttagcttcttaccaaaacaaatcctgattcttagctacacacaatacaatactctaattccatccactaatttgatacatgaatttttatatattattttgttaccctttatatcaaaagccataaagggacaattcttaatcagttttaagacgttaaaaaaaaaaagtaatataaaatagatttttagtcaaaagtcctatgccacaaatgtcttatataatttgattccttgctggtgagagtcacaaaacccaacagacttcacactttcactttcattcgctttttcttctctattactgcaatcacttgttcacgata

SEQ ID NO: 2468 - DNA, 3000 bp, Unknown
  misc_feature (1)..( 3000): cDNA_ID_2162432_gDNA_ID_1620542_Annot_ID_160058 3000 nt of promoter + ATG
atataatcatgccattcaagccctatcgaacacagagaaaaggataggatggaagatttttgctgaatctacaagacttgagaaacttacctttcagaaacagttttctccagatcgataaatgcaccaccacaaataaaaaggatgtcttttgtatccatctgcaatttttattttccaccaagaggttcagctttttcatgaaccgagtattgtggctaactgtgccacaaaagggcattctgacatgcacaaaagaaagcttgaaacaggcgattttcacgcatttacctgaatgctatctcctcgaggatctctccgtaatcctttctcgggaatcgggacactgaccacctgcaaattagtaattaacagaagctggacattgtaatattttggatcacctagaatggcaaatgctatgatgagattcccagactatattgtttcctcataatgtttgctgattagatatattatcaaggcatagagtattcctaatcgtttctgttaacagtctatatgcagttgagttaaattaaagatttcaagtagaaaaagcttacagttccttccagcaattttagcaatgactgttgaacaccttctccagagacatctctaccaccatttgagctatgagactgacagcgaaaaataacttgctaaatattgagtatcaaccaattcagaatcaaaagtaaagagtgaagaaaactcagaccttcatagtcattttatcaacttcatcaatgtacacaattcccctttgagcttcttctacattgcacccagcttcctgcagtaacaaagtaaagcggttgctaattagcatctaagaaagaaattaacatgaatactgcaaataacaagattttccgaatactaaaatagtggatcaagaagaaagtggtgagaagaaattttttttttgaactgttacaaagacaggaacaaagtacatttgtagtttcagacgtagtcagcgaaaaactatttcgtaagcagttgttaagattatattacaaatgaaggtataaacaaatatgtaaaaccagagacataatatgaggtgatagtaagacataccacatatagtttgtacaatattgattccacatcttcaccaacataacctgcctggacaagaagagtagtttagttatgctaagagcaagacttgtgttaagattcctctaaaaagcaagaaaaacatcatcacttcattcaaaatatttttcgaaatgagggattgtaaggcatccatcctagtgggcctaatgcttccctaatgtacaacatactaatgttctgagtacccaaaccttaagagggataagtgaaacaacttgcctgagttagtgaagtcgcatcagcaatagcgaatggcacattgacaatacgcgccaaagtttttgccagtaaagtctttcctgttcttataaccaagcaagaaacataaaggccaagatcattatcatactaaacagtatctccaaatactctccaaaacaatatggcaagcaacaatatgcacctgaaccagtaggaccaagcaacaacacattactcttatccaactccacgtgatcaatattatcatcctccatatcaatgttatatgattctgaagcagacctgttattaaaaaaagagcaaaagaatcgagctttgttgtatcccatataaagtatcagaatgataagagcatggaagaagacaaacccttttttcctagaagcatgatatattcttttgtaatgattataaacagccacagaaagaacctgcacaaaaggaaagatatgtaaacaagaatctaatttagacacaaagaagaagaagctagggaccgaaaccaaaccttcttagccttctcttgaccaatgacaaactcatcaagcccttgacaaatttccttaggagttggaagcttaatcacagattgcttctctttatcaccaccattactttcatcctcctcctcatcagcatcctcaccatcttcatcgcttctaagaccttgaattttccaattcctagggaaagatttctgatcatcatcatcatcatcatggtcatcatcagttcctttaactttcccgagttcaataaaactcccttgtaaaggagagagcttgaatggtctaaagtaaaaagctgttttgcattgagaacagaaattaacagcttgatagatccctggttctcttgctgttagagacaatggacgatttgagaagatgacgtgcatctgagcagagcaacgaggacaattgacgtcacttctgatgtgatcataatcatctccgccgccacctccgccgccgccgctgcaggagtcccaaatacggcgggagaaggaagaggaagggattagggtgttggaagaagggcgtagaagagggatgtgaggaggagaatcaacggagagaaggaatctgaaactgcgagagagaagagatgatgatgttattgtcttcctcgagacaaatctggaaatggataagctacaaaacatctctctctgttgtctcgatgatatgattcttcaaaggtttttgctcagatttacattaacggcaatcttaaagtaagcattctttaaaacggcgtcggtttagctcaagtgatggcagaggtgaaggataaaggaaagcctccgtgcaaatgagagggtttctgttttgccgtttactagtaaaaaatccagtaaaaaaaacccagagtcgttattttatttattagttttcaacaagaaaattcgtttgtttaagcagacgaaaaagccaagctaccgtcgttggctaaatcgctctggttgccaactcgatcatcatcttcttctacccactttctctatctgctctccgtatctaggagctccctcagatctgtgcttaattctccggtaacattaccggcatcactgggattgctgatctggaaccgctgtgaaattttaggttttctctgagaagacaggcaagtttaacgatg

SEQ ID NO: 2469 - DNA, 3000 bp, Unknown
  misc_feature (1)..( 3000): cDNA_ID_2162440_gDNA_ID_1620542_Annot_ID_160060 3000 nt of promoter + ATG
agcaaaggttgtgctattgtcggattttatggatggtataagactgggtctgggtatactacggctcttggtgcatattattatccgatgcctctacctccttcttcggaaaagctagaagcacaaggtggtgctggaggagctccttgggatgatggcagtaatttcgaaggtgttagaaagatatacattgggacaggtgagattggtatcgtttccatcaagtttttgtacgaaaatgacattcatgagataatagtgggagatcatcatgggaacaagaacctacttcgacatgaagaggtgattactactacttcagcctttatccaattatacaaagcttattgtatattagatctttgatgttattcttttggattatcttgtttttttttaatttagtttgacctggactatccgagcgaatacctcacatcagtagaaggtagctatgatgtagtacctggaagtgaagaagatgaagttatgatcatgctcaagttcacaacaaacatgcgaacatctccgtgttatggactcgatgatgacccaagcttcgtgctccacaaggaaggtcacaagatcgttgggttccatggaaaatcaagtaccatgcttcataaacttgggatccacgtgctccccatcacccactcatgatcatatttttatgacttaaaacgaaacattatcctcctctgttttcaacaactttgatccgtttctcctctgcttttatttcctctgtttttattctctgaatcttttgaacttttgaatgattcctctgtttgagaaagtggatggagttgatgtgaagttagttgtgacttctctctttgattttcttcattctccttctaaatccagtacattcacaaatcaactatctaataaagtactcatcgtgggttagtttctgcattaaatcaacgttaaagatttcatatttaagttcaaatttcctactccacaaggatagttggtttccatggaaaagccagaaacatgccattcacatctgattatcttttactccattccaccacacgtttgtctcttatgttgtttaatcgacaatcttatataagacaaacgttttctacattattagagcatgtgattaaatactgggacgtacttaccttggcagctgcttagaggaggttcgattaaggctttaaacttttcccgcttcgcctgaaataaattataagttctaaatcaacatattatttgtgaactaactgctaggatgtggaggatttatacgcttaataagaataagaaaaggctggaaaaagactgcaacaaaatggagaaagagatgaacggaacaaaagaaagattaagacaatgatttggtataagagtcattatgttgtgccgtgcaacagaactacttaagtcattacttacacttgcttgttacaattcagacacactatatagtagaataagaagagagaagagagatcatttgtggttgaggattgaaatgataccgaaaatgacctaaaatgttagataaattatatataactgataagtggattctctcgttggaaattagaaatgacaagtgacttttcttatataatcagtaaaatataaaaagataaaaatatgatttgtatataataactggaattatataataagaggtatttcaaataaacttgcttcatttgcacaatgtgtagtttttttacttggctctgttatcataatttgttatacaaatatgataaaaataggatttgtatataataactggaattatatatgtagtctatgtttgttcgaccgaactttgtttttttctgcttaggtcatttatgattgtataaattttagacccgtgatatataaaatggacttaacgaagctcatctacgtaaaacaaaacctaaagttttttcattcgttgcgctacacgatacgtatactataaaataatctatgctcacagcctcacatgataaagacatgaaaccaaccgtcagagtcggcggctatgacaaaaacaaagctaaactatgcaagtagagttccgatccattatttgtacaatgtgtagctttaaaaattgactgttggatttttcaggaaagtctagtcctttaaaataataatttgttaacatactttaaaaaaaaagttttgatatggctatatatagtatgttaacgactatagaaacatgagtcttatataattattagattttgatctacgtaagggcatatacaatacaatatgaccggaagatgacttaagaaaacccaaataatatacagttggttccactttattgacaaaaacttgttccatattttattttatttttgggaaaatatcttgatgtcaccttttggagttcttaattatttgaaattaatttatcaagtggctctcaaaaagaccaagagtttcaactactttaattttttactctttttgtttgtttactaatgtcaatattagtttaaagtaaaatctcaacattttcttaaatcagacttttttttttcttttttttttgtataattcttccttctcaaaacgagtaagaaagttttaaagttttttttttcttttttgaaaagcctataaatagatactccttcatcttttggttatagatcaacatagcctctcagttcaatcagctgcctctctctcctcgacgatcataggtcagttctctcttttatatatggtgcttttatttacagcaatgtttcagaatcatatttaaattattgcatacgtaatgagcatgttcataaaaatgtagagcatcgaatattcaagaaatgttactttatagataatagtttcatccgcttctttttcaccaaaacaaaaacttgatcttcttcgttcaacttagaaattttacatgttgatccttggttgaaaatggtatatattactgactaagaaacacatacaattgccatccatatgtgaagattcaaccggtacgagatg

SEQ ID NO: 2470 - DNA, 3000 bp, Unknown
  misc_feature (1)..( 3000): cDNA_ID_2162553_gDNA_ID_1620543_Annot_ID_160070 3000 nt of promoter + ATG
gatcgcaatactagacttccaagatccaatatttaatctatacatagctagatagttaagagttttaaaaaaaaaaatctaagaaaacgataaaatacgagtaacaagtgaaatgaagcaatgaagcgaatagaaaaacaattaaaaaagaaaacaactaaacttatgagattaaaaaacaatgaaggacgcattggatcaaaggttatgcatagataaaaaataactaaatatcaaacaattacggattaggttgaactgaacactggcttagaaattagaagatggttctcttaattatgattaatccacccgcatgaagctaataaactatgctaatcacttctaattgctaaactctcatctaaaaataaataattacaaggcaatgcagagatgtccaatattaccttactaattttcttagcctcttaacattaattttccatggctcaaaccttttaataaacaagtgcaacaaaatgtcaaaatttcaaacttgaaagactaagtctaatatattaataatctcaacctaaatgaagaatctttttaaaagcaacataaaatcattatccatatgattcaactaagtaactattcacttagcatgattaggaaaagaccaatacgtaataaataataaaagacatgcataattaaagatgagactagaatttcttctctagttgtctagtaaaagtagagatcctcatctcaatattagaaacaatagtccaaaagtagtattcatgattatctataacttttttttggtagcgttgacttgatattcttttcaaatacatgtatcgttaagttcttataattcggttcttggaaattgaaatgcttaaagacgccatgaatataaataaggtaggacacaaaggagaatccatattataatgacaaaagaatatctatgtcgatacaaaaacaaattgatcaaagaaataatcaataaaaaagtagcaccattaatactatataattaaaggtaggttgtgaaatgattatgaagatacataaaccatgttggttaagggtcgcataagaggcatgtgattgtattattaagggtcgcatcttaactaccaccccaataaacacggcttccatttcaggacatgtgcgctctttactttcttctttttttggccatgttactgttatattcataagcttcaaaagattacatgttttattttgctcatatataataaaagcaaaatattgcaacacctgaaaacatttattaaattaagtctctataactatataagttattttattttagtttgactttcaaaatgataaaataaaaaatgttagaccgctttaacataggaaataggaaacatttgttttccaacaactttttctctaaaacattaagaaaaagtagtttatttcatatcttatttttttagaccatcgttttggatttactgtacggtggtcatgtggttaaggaggatcaatgatagtagtaattcgtagaatagttaatgagttgttgtcctttgtaatcatgcatattcggtataattataattaattagtatggttgcctctttaattatgtacttggtctaggaaacgaatcttcagcctgggatatactaaaattttgttgtgatcttttctcatatgggctgttgaattctctattgcggcatgtgcgttttgttattcgacctttgtttgaatggttttttttttttttactctttttgaatggtttaaatgtagcatatgtgatatgtgaatgaaattttttggatgtaggcttgcacgatatagctgtttggacggatcacttcgatagacaagatacagtaacgtctttaatttgggtctttttgacattacatagtgtggtcacgatacctatgacgacataaatttttcaaaacaaaaaaatgacacaaccatatgagatttgaggtccgaagacaaagtataaacaagttgtaaaagagacggtcaaaagtcaagtaggttaacaacaagattcgaagaagtatttaggttagtaacagttgctaaaatttataaattgaaaaatagcaaaagaatactagcaaaaaattggtgaaaatgtaactaactaattatgttagttttaaaaccaaaaaaattaatacaataaataattatacaaaactttcaagatatatatatatatatatatatgtatataatctaataaataacatgtttatatagcgaaacatattacatatatctatttgatgaattagatatatgaaaagaaacatgatatagaaaaagataaagctctatgtaaaactgaaatcacataagcaaacatacatacataatttatttcatttttattttttacattggacgtttaaatttatgtatgaaaaacatgtaacggataaaataattatttgtttgtaaaagctaaataaaagaagaaaatcgtcttcaaaaacatgatatatcacatagatcaaaatatcctcttgtcattcatttaattgtactttttcaaatataaaatgaaaatcgtccaaaaaagaaaatcgtccacataatagacttcttcaattaaaaaaaaatactttttgttttcgacattcgcgtcatcaaaaagaaatcccaagaattaaatgcaaaatccagctacagtataaatattttaggcttatatatcggacccttgagaggaatcataggagaagaagcagagagagagagtccaaacttggaatctggacaataaagaaagaaaaaccattttaaaaatctttttatactaaaactccacagatctcccattctgagatgcagagtgataataacaacaattgagaccaaagcaaaatccgaaactgtcaccgttttcctttgtcttcttctctgccaaaatctttcaatctttatcttcttcctttttcttgtttttctaaaactttctccatcttgaaaaccaaaacaacccaagattaataatatacaccaatg

SEQ ID NO: 2471 - DNA, 3000 bp, Unknown
  misc_feature (1)..( 3000): cDNA_ID_2162573_gDNA_ID_1620543_Annot_ID_160078 3000 nt of promoter + ATG
ttcttatcaccggttaccggcggaagaagagcaaaaacactcggcggggacaggggaaagagagggacaatctccgccggtctctggtggcggtgaagagtcaggacagatggcgggaagtggaggagagtcgtgtggggtatcaatgtacagttgccacatgggtggctctgatgttatttgggcccctacagccagagctccaccgccatactaaccaatccttctttcacaaatctctttctttctttttttgtttttttttgttttgtgttaggatgaatcaagaaactagggttttttttttttgcttttgatcatgaagaatcgtttgcttttttatctacttagattttatttttgtatcagaattgacatatctttccacggtgtaatctctctcaaaccttgggtttatggttttctttagcttgttgcggaattaatttgatttgactcatataaatatgcttccaagtgtcttcaatcatattctggagaaatttaaatatttatctctaatgattgttttcattttaatactcttattgtacaattatgcttctttattggatcttcaaagtgtggtataattaatacgtagcaattagctataacgtttaagaaagctggctattcttgtcttccacaccacatatttgactgcttctcaagaaagcgggctactttatcctctactacaccatcaaccttacaattttggcggcattgaccatatactttttgttcccataacagttaaatacaaaaagtaaaaaatgtacgaatcgttcgtcatatcacaggtttgcacaattgcttttctttccaattactcgtatgtatttattaaaaaaatgtcatagacttaaccaaaaggataaacatgttaataagatgcaagtatgactactccgtgagagagcgcgaatttgtttttgtgtttataagttcaaaaaaagacaataactatccagatacgtggtcaaaaaaagacaataactatgcatatacgtggtcgtgaagcattgatgggatactgtttggctttgtctgaatgtgtcttgatgtttggattcatgtccctggtctctctcatatatccagaagtttcaagactatacaactgcaatgtctgcaaaaacacacatatctatatatataaacacattcaatacccacttgtcttttcagtgccctctcgctttttttacatgggggtttgggtttgaaacttcaggaaaggagaaagaaacgtgaactaaattcgacaaccttttctttttggatgtccattttcctttccttttttgacatcagccatataaaataataataagtatatattttaatttgactctatcaagtatctactaaatatgtttcaattagaatagcaccaaaaatgattaattccgattatcccaaccggggggaacatagtccacgaaggtaaatttatgaaaacgaagtctagtactatcatcagatatataattaaaccttagagattaaaactactggaatgtaaaaaaagcgcaaaagagtggaataaaatatcaatgataactcttctaaataagtcgaggatgcaagatagtcgttcggataaatgctcttgttatcgaaaattgttggatgagtgttacaaataagaattcaacccctattcatatcaaaatgaatccgaaacgaatggtaagaagaattcaatcaaatggtaattcagaatgaaaatctaaagtaaactaaatgatcaaaattaaataaggatgacttaatacgtgtaatccataatgatcaaattgattggggaatattaatgaatataatcatagttggtccttcaaaaaaaaaatccaaaaattcacctcaagcctccaaagttccaaacccatgtagatgtctctcaacaaacccaacccacgaaacaaaaagataaaaatctcaaagcccgacccaatttattcgataagacaagaaaacaagtgttattatttcttctgctttctcaattatggtctctgtccaaaaagattatactatagtaatagttttgtgaagctttttttaatagcatagcaattcgtagaagaaagaacaaccaaatgtcaaaaatcttgttttaaaaaccaattagtttcacgtcacagctcacacataataaaacaaaactccattttttttttataacgtgaaaaacaaaacaaaacaaaacaaaggaagagaatttgcgcgacaacaacgatcgatcagtcgtcgtcttctcagatcttgttcttcaaaggattctatgccgcaagagcttcgattgtatcctctctgaggattgggtaatacccaataccatggataacaatagcgagcgcaaaggaaaacgaatcgataaggataatattcgtgtcaagcggaaaactttgcaagctttgctcaatgattgccagagagccctcgagttattaaacttagccgaagtcagttctgaagacgatgaagatgataaaagcaccggcgagggaagtgggtcacaagagagcaggggagaagtttcttcttccgatcgagaagatcctgaagctgatgaagtaagtatatgcatctctctgaagaggaattgtgaggaaaatttgcttcaagctttaaagttcggaactttttgtttatcaaataagtgtgcgttgaattttggtgaatgtgtatacatcaacattttataatgatgcgtcatatgtttgtaatgatacaataatgtcatgactttcttcttccttgtttcagttatatgatctcatcaaatccagggttgaatgtgatgacttccttgaaaagattgagtcagcccaggtttcagcgccgcaacatcttgctggtgaggactataatgttttttttaagcctgtttgctcattggttgtatagatgattgtgatttctggtgttttagaagatagtagctcttgggatgtagttagtgaagatgatctttgggatgatgaaacc

SEQ ID NO: 2472 - DNA, 3000 bp, Unknown
  misc_feature (1)..( 3000): cDNA_ID_3068058_gDNA_ID_1620543_Annot_ID_160080 3000 nt of promoter + ATG
gttttacccggagttatcagtctagtggctggtttactcatgtgggtcacatcgcttcacaccgtgagaaagaattactttgagctcttcttctacacacatcaactatacattgtctttgtcgtcttcttggcacttcatgttggtgactacttattcagtatagttgctggaggaatctttctcttcattctagaccgcttcttgaggttctaccaatcaagaaggactgttgatgttatctctgcaaagagtttaccttgtggaactcttgaacttgtcctttcaaaaccaccaagtaacagctctgttttttctctgtagatgagagtcctctacctccaatctagagcatttactgaccattttcctctcttattctaccagatatgcgatacaacgcgcttagctttatctttcttcaagtgaaggaactgtcttggttacagtggcatcctttcagtgtttcatcaagtcctctagatgggaaccatcatgttgcggttcttataaaagttcttggtggatggactgcaaagcttagggatcaattgtcaactctatatgaggcagaaaatcaagaccagcttatttctcctgagtcatatcccaaaatcacaacttgtgtggagggaccttatggccatgaatctccataccacttagcgtaatgcatttcgtctacatgaattgtttcaatacagtaagctttagctttactcaagaaagctttatttgcgagtgcaggtatgagaacctggtattagtagcaggaggaatcgggattacgcctttttttgccatcttaagcgatatcctacaccgtaaaagagatgggaaagattgtttacctggtaaggttttagttgtatgggccattaaaaactcagacgagctctctctgctctcagcaattgacataccttccatttgccatttcttctctaagaaactaaaccttgagattcacatatatgtcactcgacaatccgagccttgcttggtaagtcttacataactcttttgggagctgcaataggccttacttagtttttgaactcttcaatgttccatggttatacaggaagatgggatggttcacaaggtggtgcatccttctgtcaaaacaccatggaccaacggatgttccatgtcggttttagttggtacaggggataacatatggtctggactctatctaattatctccaccattgggtttattgcaatgatcacattggtggacatcttttacataaacaagtacaacataacaacatggtggtacaagggacttctgtttgttgtttgtatggttgcaagtgtgttgatttttggaggtcttgtggttgttttctggcatcgctgggaacacaaaaccggtgaagtggaagcaaatggcaacgacaaggtagatttgaatggagaagaaacccataatccatctgcagcagagcttaagggcttggcaatagaagaagatgtccagaattacaccactattcgttatggcaccagaccggcctttagaggtatacactacaaaattagcggtgtcaagtccagttatctcgtttttttatttataaaattatagaaactgaaatcattcggaacggtttgacacggtttcgttcggttcttgaatccgacttttggtgtagatatttggctcgattcggttaagttaaatctttgattggttcatgtaatatttttattttgtaattgcagagatatttgagtcattgaatgggaaatgggggagtgtggatgttggagtgatagtatgcggtccagcgactcttcagacgaccgtagccaaagaaatacggtcacatagcatctggcgatcggcgaatcatcctcttttccacttcaacagccacagtttcgatctctaacgatgctctcaaggccaaagaacattatggaaattcgaagatatattatcgatgcatataatttatataatcacagtctgtatgtattatggaaacaactttaactaatttttgagattgatgctacttcatgatagcaatttcttagttcttttgagttaataacttaatatataaatataatggtacaacaaccattacaatcgtcattataatcatcttatccatactcaatagtcaatactctcaccttccctaaagtgtggttgaaatcaaactttactctctctaggcctgattataattcttttttgtctacacatacaacttcatgagacttaattataatttcttagtgttcttttgttgacatgtaaatcgtagctaagtctaagtggtacttttatttgttattggattttgtttcggttacttaaaagtgtaatgaagaatttttttgactatatacatctaagtttttccttggactgattataacttgtgtgttcgagattgatacaacttcatgatagtcgattattcttgtttaacgtaacacattgttagatagtgtcatttaccagaaacaatctaacagtgaaactttgcaaatttatctctctgctggatcttgaacgcggaaaccgaataatgtttctttcgagctaatccgaatgatgttgaaattctatatgttcagattcaggtaatgtaagcttatccaataaccatcatagtcgtcataataaccatcttatctatactaaagtagtaagtactctcagtctctcaccttacccttaattgtggttgaaatcaacctaacgtgacactctctcccaagtacgttactctcacgtgttaatgacactctcatttttttttatagttttttttattgtgtactaggattgttgtccgaaggaatctttcataaatgagaatgatagaaacctcaatggtccagaaaattttacttgactcttctaagaatatcttattagtttatctctagtaacgccaccttaaaagccgatgctgcttctgagccaacttctcatcacaacactgagaagtggaaattcaaataaagatg

SEQ ID NO: 2473 - DNA, 3000 bp, Unknown
  misc_feature (1)..( 3000): cDNA_ID_3068054_gDNA_ID_1620543_Annot_ID_160081 3000 nt of promoter + ATG
ataaagtcatccgtggacgaaaaaatcagcacaagcatttaccagcttgacatagtaattgcaacattgatgatgatttgatttgatttgatatttattttgaccaatactcccatattagttataaaataacctagtgtttattttaaaacacatatatacgttgtcttatattctttctttagaatgattatcaaccgtttttctttactttttttggctaaacttcgttgcgtgcttctaatcacgtctatcctaaaataaaataaaataaaaagagagacactattgatctatctatcctatatagtgtctaggttcattggtcattgtacactggtattactataaacaagtttagtagattgcatttctattttcagttaagggtttcggtttagcccaagtttgagtatgtatataaaccgccccatgtatattttccctaagtaatgagaatgaaagttattttggttgtttagtaaaatggtatcatagctaaaagatttcatcaaacttttctcgatccctaactttctcgaaaaatcacttaattttcttggaaaaatttattcgattctcattcagttctgcttcaatcttcttcgcaaatccatcttgtgtcgtctctaagcttcgttcatctcaatcctatgcgattcatataagtgttgtatgttattattgacaaagagtatacacatatatatacttgtacaagggagagttactagggttaagcatttacaatggtttccatatacagagatacggaacatcatagtagtaatgaagtgatcttggattttcctttacacgcttcctcaagatggagggggagctgccactctaatcttgttctttagttcaacaaatcttgtccttgtgagtggtttgtagggcccgccctgaatttttgggggcgtaaaaattttttaagggaaaaaaaaattgagggccaatttaaaagaaataaataattggggaccctttttgtaaagaaaaaatttccaattttttaggggtcacaatcaattgtttctccttgcactgttcggtcctggtggtttgtgtgagaatgtccccgagttgatatttggtgttaacgtgagcgactcggaagatgtcttattgaatgtagcctctgatgaagtgatagtcgatggcaatgtgtttcattcgcgaatgaaaaaccgggttagcgcaaagaaatgttgctccaacgttgtcgcagtagataactgggtttttttccagattcaagtaatgtagctaatccaacaaccgtcattttttttttggtagaatgagggagactgcgtctcccgttttattaaaagaaaattaaaaaattacacttggacatgtctcgggtacgaaacccccgctacatcatctaacaaaatagaactaacaacatcgggcctagactccaacaaatgcaaacataggagtaaagagaaagcatagttcgttaatccatcggcaagatgattagcttccctatacacatgagagattcggactatccagtctttcgataaaaagccatagcacaaacgtattagaaatgacaagggatgagaatccgcaattactctatagtcgtctaggaatgacaagacgagaatccaacaaccgtcatagtcgtcataaaaacaatctcttatctatattacgtactaattactctcagactctcaccttaccctcaaattgtggtcgaaatcaaacaacgtgacagtctctctcaagtacgttactctcacgtgttaatgaccctctcctttttaaaaaaaaaaataattttttaaaaaaattgtgtactaggattaatgtttaaaagaatattttttattaatgagaccgatagaaaccccactggtccagaaattttcttccttttactctcctcctaagaatatcttcttcttaatttatctctagctagtaacgcctccttaaaagccgatgctgcttctgagccagctctcatcacaacactaagcagtagaagaaattcaaaaaacaacatggatgatcatgaaacccctcttttgtccaaggacttatcatcatcatcatcatcatcatcatcatcatcatctgtggtggtttcatctttgaaatggatattgaaagttgtaatgtctgtgatttttgtgacttgggttgtgttccttatgatgtatcctggatcactcggtgatcaaatcctcacaaactggagagcaatctcctccaacactctctttggcctcacaggtaccatcacttgcttcgttttctccgaaattttccaaaagcattgctaatttcactctctgattatcttaaattgtaggaagcatgttcttaattttcagtggtccgattcttgtcatcgccatcttggcttctctctatctgataatctcaggggaagagacggttttcactaagtacgtacggttgagatttcttttaactattctattgatttgattgtgttgcttacaataattaagcatattaataatatatgtgtgtttccgtgattgtgaaggaagaagataacgaaattcccgaggtttaggctatggacatttcctgttcttgtggatggaccatttggagttgtttctgcagctgagtttcttggaattatggtcttctctgtttttttcctttgggctatctatgcttataccttgaggaatctcaacgttcttgactacttccacgtgcttcccaataacagaaggttcttaaactcattttcttctttatcccatcttagctttttgtttcattccaatcattggttttttgtttgtgtgtgtgtgtgtgaacagtatttttctgttggagttaacgggtctgcgttttgggatgattggattgttgtgtatggtgtttttgtttcttccaatctcgagaggctctattcttctccggcttattgatatccctttcgagcatgctacaagataccatgtttggcttggtcatatcaccatg

SEQ ID NO: 2474 - DNA, 3000 bp, Unknown
  misc_feature (1)..( 3000): cDNA_ID_3068042_gDNA_ID_1620543_Annot_ID_160085 3000 nt of promoter + ATG
ggcggtggaggttacggcaaggtttgtgtcttaacaaatgccttcaaatgaatgtaacaactaatggccttagttgaaattcatgatcccaaattttgatggttaaataggtttatagagggattcttcctaatgggcaactcatagcaatcaaaagggctcaacaaggatctttgcaaggagggttggagttcaaaactgagattgagcttctctcaagggtccatcataagaatgttgtcagactcttgggcttctgctttgaccggaatgaacaaatgctcgtatacgagtacatttcaaatgggtcacttaaagacagtctgtccggtaagatcaaacttctatcttcctcatgaggatttcagatagttcttggatgctgaatatgttagtaatgcagggaagagtgggattcgattggattggacaagaagacttaaaatagcacttggttcaggcaagggcttggcttatcttcatgaacttgctgatcctccaattatacatagagacatcaaatcaaataacatattacttgatgaaaatctaaccgcaaaggttgccgacttcggtctctccaaacttgtgggagaccctgagaaaactcatgtcacaacacaagtcaaaggaaccatggtgagtagaaaatttatcctcctttctctttttttctcaaatacattttaaacttacaatatctttgtaatcagggctacttggatccagagtactacatgacgaatcaattaacggagaagagcgatgtgtatgggtttggtgtggttttactcgagctattaaccggtagaagtccgatagagagaggcaaatatgtggtgagagaggtgaagacaaagatgaataaatctcggagtttgtatgacctgcaggagttgttggacacaacgatcatagcaagcagtgggaatctaaaagggttcgagaagtatgtagacttggctttgagatgtgtggaggaggaaggagttaataggccatcaatgggtgaggttgtgaaagagattgagaacataatgcagcttgcgggattaaatcctaactcagattcagcaacgagttcaagaacgtatgaggacgcaatcaaaggatctggtgatccttatggcagtgaatcgtttcagtacagtgggaattttccagcttcaaagcttgagccccaatgattgattatgtttctttttgttattttgttatttcgtaagtgacttcatacttgaaatgccttgtgaatgtggagtagcatgattctgtttgatatgtggtcgctgattataaagcagatgaatggagagccaaacgcagaatcaaaaaccaccagatctttggcaatgtcgacaccagtttcaaacataagaaaagtaatcaagctcaatgtatgatgaataattgaatatattaattcttgttgagaagtttgtgtggtttcaaagatttaatccacacatcacacacacttttaatttactccaaacctttcacatttatgcatgagattatattacaaatttatattacaaataatttgtagtacgtaagtaaaattagtattaactaataagaaaaaaaagtaataaagttattgggtttgcaacctaacacatcaacgatcccatcgaacaacaacagttacatgacccagggtgaatttatggttgtcgtctcatctgagagcactctctgatctagtgtccttgttgtccacacctcaaacacgcccccaaaatgtatgacatgatttaacaaaaaataaaaagaaacatgatttaagacatgtggtgtgtggcaactctgccatatatttcatggtgaggtagcgaaccggcaccaagtttttctcgatatgtttcctccatttaccattctttacggtagactacggtagactcataactttttttataccggagtcatatcgtattagtttcttaagaggattaaagcacacatatgtttttgtgtcttatttactacaaaaagtctttttactaaaacactaacaaaacaaaaataacatacaaaaaaaataagaaaagtggtgggatgtggccaaatagcattagcatacatacgtaggaaaaaaatagacgatgtggtcatatgtcagagtggtcaaggtcccatcccatctctgagttttccgtcggtttggagtatattgatcggagaatatgatatgggcaaaaaaaaaaaatcgattaatttttaatcaatttggggtacactgaaaacaaaaaatattttttttattaatttacttggaggaagtactggtcaatataacatcaaaccatcagcatcattcattgttgttgcaattagtattattatctcaagttgataaaagcttgtgctgattttttccatgaccatgactttattgcatgttgctgttagaaaaaccatatcagtgcatagtcgcttaccattactctatttcaaaaatctctcttttcttgagaagaaacgttctaggaaaacaaataatatatacatgacttctcccagttttgtgcagaaacaattaaatgttagatcatttagttaagttttgttacatattgcatatttatgctttatcatgtaaacagatttatttatgtagttaataaaggactagtctattataatggtgttttgtgccaagtcattgttcataatttgttcctccacattaccgtattgacatttcaatttctcccttggataatacctttgaacccttccgcaatatatagcggttctttattatctatatcaagttgaactatttgtttatatggtccactgtctatttgtttgctttatttataaattttcgcttaacttgttcaaagtcttctcctttatgtcttacatgctttgttagcaaagaacatggaggctgcatttttatgttagagttcgtcataacttgtgcagaccacatgctttcttcttgaacgaattgtgatacatatcattgtgtgtctgatgaag

SEQ ID NO: 2475 - DNA, 3000 bp, Unknown
  misc_feature (1)..( 3000): cDNA_ID_2106638_gDNA_ID_1620543_Annot_ID_160079 3000 nt of promoter + ATG
ttctacacacatcaactatacatcgtctttattgtgttcttggcacttcatgttggtgattacatgtttagtatagttgctggaggaatatttcttttcattctagaccgcttcttgaggttctgccaatcaagaaggactgttgatgtaatctctgcaaagagtttaccttgtggaactcttgaactagtcctttcaaaaccaccaagtaacaactctgtttattctctgttttctacctctaatctaaaacatttactgacttttttcttcttcaataccgcaaaaatcagatatgcgatacaatgcgcttagctttatctttcttcaagtgagggaactatcttggctacaatggcatccatttagtgtttcttcaagccctctagatgggaaccatcatgttgcggttctcataaaggttcttggtggatggactgcaaagcttagagaccagttgtcaaatctatacgaggcagagaaccaagatcagctcatttctcctcagtcatatcctaaaatcacaacttgtgtggagggaccttatggccatgaatctccataccatttagcgtaatgcatttcgtctacttgaaattttttcaatgccataagctttagcttaactcaagaaagatttattgcgggtgcaggtatgagaacctggtcttagtagcaggaggaatcgggattacgccttttttcgccatcttaagcgatatcctacaccgtaaaagagatgggaaagcttgtttacctagtaaggttttagttgtatgggccattaaaaactcagacgagctctctctgctctcagcaattgacataccttccatttgccctttcttctctaagaaactaaaccttgagattcacatatatatcactcgacaatccgagcctcgcttggtacgtcttaaataagtcttttgggagctgcaataggccttactaagcttgttgaactctttaatgtttcatggttatacaggaagatgggatggttcacaaggtggtgcatccttctgtcaagctaccacggaccaacggatgttctatgtcggtactagttggtacaggggataacatatggtctggactctatctaattatatccaccattggatttatttcaatgatcacattgttggacatcttttacataaaaagatacaacataacaacgtggtggtacaagggacttctatttgttggttgtatggttgcaagtgtcttgatttttggaggtcttgtggttgttttctggcatcgctgggaacacaaaaccggtgaagtggaagcaaatggcaacgacaaggtagatttgaatggagaagaaacccataatccatctgcagcagagcttaagggcttggcaatagaagaagatgtccagaattacaccactattcgttatggcaccagaccggcctttagaggtatacactacaaaattagcggtgtcaagtccagttatctcgtttttttatttataaaattatagaaactgaaatcattcggaacggtttgacacggtttcgttcggttcttgaatccgacttttggtgtagatatttggctcgattcggttaagttaaatctttgattggttcatgtaatatttttattttgtaattgcagagatatttgagtcattgaatgggaaatgggggagtgtggatgttggagtgatagtatgcggtccagcgactcttcagacgaccgtagccaaagaaatacggtcacatagcatctggcgatcggcgaatcatcctcttttccacttcaacagccacagtttcgatctctaacgatgctttcaaggccaaagaacattatggaaggaaattcgaagacaaattgatgcatatattttaggtaatctctgtcagtatgtactatggaaacagctatggttgatatgtgtatgtttatctttcagttttcgatgtataaagtagaaatcaaatgtatgagcatctatggtttctagttctacacttgttggtgtttctacattggacatttaatattaattaaatgcaagctgataagtcctataattacatagctgcccatatattttcggaattttttaaagtagagatatattcatatatatatgagggattagattctataattacgaatgtatttaatttcaaattaaaagttagattctcataattctccttacttactctgtgagggattagagtcgtaaaaatgaccacaagatgtaatttttttttaggtcattgatctaccatcaatttgtcggacacacttatcttataagttttaaattttaacaaatgtaagtgaaattttgtggtagactatcattttcaagtagaagtagaatttaagtaaccttccttgttataatttttttttaaaaattatgtcattacttagagcccaccagaaatgatgacgtgtaaaacaccataatcataaaggataaaataaaattatcatcccaccgacagtttattagcggagatgtctttttccatccacccgacattagcccattgctttactagtaaacaaagtatatgcaattttttgttagaaaaaacggtgcataaaaaataatattttaatgtctccgacaaattttaattgtatgaaaaataaatacacaagattacaagttggccaaaacgctcaatcatagttggccaaaaatatactattccaaaattagagttagctgtaacgtaacatgtacaaataaaccaaacaaaacatataataacaaaataattgaagtgagttttaaaaaggaaaaaaaaaaaagagtaaaaaaccaaaaccagatctctcaaagagtctttgtacattattgactagagagagctttttagcttcacatttcttcacttccacacacttttacttctttctctcttctcttctcttctccagatctgatcccaaacctttgattcattgttgttgttctctgctgctttatcagagagcatcatcatg

SEQ ID NO: 2476 - DNA, 3000 bp, Unknown
  misc_feature (1)..( 3000): cDNA_ID_2162559_gDNA_ID_1620543_Annot_ID_160072 3000 nt of promoter + ATG
gtggacgttttcaaaagctatcaagtatcaagagatggcaatttaataatgatgatggtcgatggggccaaaaccatttttgtttcaacacgtcggtccaagaaatttctaagtatgtcaaagttttcgtgttgtttggcaatcttttttataaaagaaagcagtcgaagttttcaaaaagcagtgctctagataaccttaacatatcttaaatttagaccgaccaagatttggaatctacctttgaacataaaaatgctttacacatcgatgacgtgtatatgttatagatagatttagcatgagtatacatatagactaatcagaatgaaacaagtagaggaatttattagtctaagtaagcagttaatgctctctcacctaacaatcagccacgcacatctaactcctaattatctttttttatgtaaaggaaagtcttcataccttactaataaaataataaatatttggttgaaaaataaaataacatgataattaattgttattatatgtttaatccatcaatcaatactgtcttttggtacaaattgtccacaacttcttgaggattttttaagatttaaaggcgtggtcttcaatatttacataagactagagactttggcattgttttttcctactttgatatgaacttaacttctttataataacaaaaaatgaaaagaggtgtaacataaaaaactattcttgcccaaataggtaaatatcgaattctgattacgcaagatgcttttatgttgggataattacaattcgacattagttggttaatggttattcatctttccactcatcatgaaactaaattcaagaatatatagctttatacttgaaacttatgtgtgtttttgattactagattctaattaacgtagaattttctaacatttttcttgtactctgctgccattcaactttaaaaatattgtacacaaaagatattatttctttggtaaaattcaacctagatatcgactaccacgctagttaaagtttttgcatcagttgaaaatggaactccttttaagtttattgatatattactactcttattagtctaagcgttcagattaatgtatcgaagttaatgattattataagagtcatatatacaagaaagtaacgctagctaatcaagagataatgatggtagttaaatgtcaattttgattagagcacgctcgtagacttggttgcacatgccattgcgaaatgttcttgcattcatctattagtttcatatttattatgatactgatgaatcttgttcagataagaattgtacgttctttcaaatggtggaatttgtttgtcaatataaaattttatatgttggaataatcagagagattagggcgtaagatccgtctactgggagtgagtctttcctccgcccaattggcataaatattgaagacaaaacatgaaattttccatcaaattagataaacatataaatagaaaaagagaatcaatgaattttttgttacagtttttaaattttataaattcactactagattaggtaatggttagtgccaaacaatgatcaaactttcaattaaaggcttttaacttcaaaaagtcacatgatccaatggcagttaatatagataaaaatattaaaagctggtccggatctagagaaatgtatggcttcaatccggaactttttaatttgttctaaattcttattagcattacttcagttttaacttgattcaatcattgttgagttatttttcccgcagaaatccagtgcttaaattacattcattagcactatcattcaattaataaaatatgatattgcgttaagcttttatgatattgatttttaattttaaattgctaattataattaatcactaagcatttactgtataaattttgttgaagaaaaaatcttcgtggcattgaacgaaggctggcccaaaatgtttatgggcttaaagtcgaagaaattttgtttggtgcattaacaaatacatttctaaaacatgacatatgaaatgaattaaagtaaggcatgagtgatatgacgatttcatttttcaagaatcattcattcttatgaacaaaagaatgattccccaaccccttcattgggactatttctcactctcttgtaaagtgtactgcaaagagtaattctttaatagtccatatctaatcccatatatattgcaaattaaatattttacctatgaaaacgaagcaaaaccgttttactatttctccttcggctcgagaatgcttatcccacaagtgactttacaactttttttattatttttttttttttgtcaaagaagtgactttacaacttataatttctttattcctttaatttcggatgaatttgtctttagtactaatatcataaatcacttagaactaaaaactgatatactcaagataccactcaaaggtcaatcgtgctaattgaattgatatgctgtttaaattggtattgtatgatataataattaataacgagttaactacaagtagctttatatcgtaattgaattttaatagattaaaaaataataaaaaccttgcttaattctaaaaaaaaagggagcatttagcaacattgaaaaggaagcgttgactaaatcttccacacgaatgggctcgctctgtctcatgcacgcacgtccctggcataacggtgcactctaccacagaggatcattatttcttcttctaacctcagaaaacggaaaagtcgtcgtcttcttcttcgttcccgctcccacgctctctcctcttcctcggatcttccatcttctctctaacagcaaatgactcagtcgtaaccttctacactttctctctctccaatttttcacattttatttttggcttccgagctatgaccccagtgcgtctgcttcgtctcgaccgctgatcggaataaaaccaccgccgagtttcctaggtctatgtgtattgtaatatcctccggaa

SEQ ID NO: 2477 - DNA, 3000 bp, Unknown
  misc_feature (1)..( 3000): cDNA_ID_3068119_gDNA_ID_1620544_Annot_ID_160100 3000 nt of promoter + ATG
aaggtaattgtcctaaaacagagataagcatgtttcagatgtttttgtgagaaccttactatcctaaaacagataatttattttgccacatgttatatagattggcacgtaagagacgttgagaacaaacttgttggagcatcaaatgattcctccaaagaaatttatcagattgggaagactagtgtctcgcggctgacatagataagcatgctcggagcaaacagctagctgcaatgtccaactggcattaggaacaatctaagagacactagccatttgagccagtgagatcaataagaggactagctcttccaatcatcaagcagagctagtaacaagctgataaaggagataaagtcttcttaacggtcgaagcttcaacacccagcttctagaactttgaaaatctagatcaacctctttgatagcgtgatagtcatgtgtgccatgcatacattcatatgtgcatacattcatgcattcatacattcatacatccatacattcatacatccatgcattcataaatacatacatccatacattcataaatacatgcatgcatacattcatgcatgcttacattcctgcatgaatctatgcatatttgctttcttgattcattgattgcttatttacttacattgtttacttgctttcttctttgcttcttttacttatttgatttcttaactagcttgcttgttttttgttctctctgtttacttacatctttaacttgtttacttcttgtttgtacgtttctttgattatttgatcgttgctaactccatattgcttcatttcatttcttaatttgtgtgtttgcttccttcttattcccttcattgtttgctgagaccgaccatacatgcaattcacttgtttacttattgtcagtttctttatttctttgattatttggcattcgcttattcattcatggcttagctcttttacatgtttccttctttgattctttgtttctttacttctgtgcttattctacttgttttattgcttctttcattttttgtttactcacatcattgtttatttatttgtttgcttatatttaaatctatacttctttcattgtgtataaaagattaattttgaatttatacaaaatttactcagataattttgacaacaatatgaaaaatcaaaacactaataaatgtctgaataaccaaactgaacccgaaatataattactatagactggatgtagccaaaaattattattataaatccaaatatatcaaatattatatataaatcaaaattactaaaatacttaaaataaccaaaaaaaatccaaaaattaaccaaagttttttcaaatctaaccaacttttttgatatttcgggtacccgaaccaaagtaaccaaaaccaaacctgacccgcatatataaaatacatgtatggaccctccaagccaaaactctaaaaccataatctaacctgaacttataggcctaaaaatgtatatgcaaacttataaaactttatataacatttccaaatttttattaactgtataataataacactttagctagagatatcccaaaaaaaaggtcactcggatggtataataagatcgtatctatctataagtggacctttgtggcttcattctcagatatagtagttgacacattatacatcagtttaaattatatattaactagataaggatccgctcgatgggcgggtatgcgattggtgcattatttatgtattattgttcgaatagaactgtgagattataataacatctgtttgacacaattaattaattaattaaataatatttactttaaataatcaataatttaatctattgtaatattatatttaacaaaaaaacatttatacaatcaatacttcggtgtgtttaaaactagaaaaaaatcagaaacaaagtttgaaagaaacagagtagtcggattaaagatgtcatgcgggtggagattcaaaaccgtagaccatcatcataatgatagtcgttagaggcttggattgagctgagacggttctagacggttttgtcgattagtttgatttattgagctaattgagagggtaactcaccgtgtcttcttgcattcctctcacaccagatatggtagagagtagtttggaagacataacgaagcagaaagaggttgagccaaggaatgcttgtgttatgaagtattgcggccagctggtccagtttgacgagtagttggatggaaggaggcgatgtgcaaaatctttccaaaccgttgaggagtaggggcatgagaagaacaaatggtctctaaaaatacacttttcttattctttacaattaaatcagtcctcattcccccacacggccacaccacaattaatctgttaacactttattaacgacgaaaaaactaaataaaaaaaatctctttatacatttgacaaaagttgaaaaaaaaaaaaaaaaaaaaaaagaagaagaaaaaggagggaggaccaaattatctcaagaaaaactatggccttgaatgttttgtagattttgtaagagtttttggtttttgtttttcaaaaacttatttttataccattcaagattttaaaattttggtttccctacaatttagaaaaacaattttgttggagtttgccattcatgattttagttttttagttttcctaaaatttagaaaatttaatttttacttaattaacgttatttttctcaaaaaccaaaaactaacttttttttgggttttgaaacaaaaatataatatcaaaaatctaaaacgaaaatctaaaatctataaactaaaatctaaatccaaaaactgaatcgaaatacagcatccattcagggcctttataacaaaaagccaatgagaaaagtctgaaggaagagaatcgtcaacaaacgatggctatacaacaagaataaatacatcacatttttcagacaaactccaatttcacagtgaaaataaaaacaatg

SEQ ID NO: 2478 - DNA, 3000 bp, Unknown
  misc_feature (1)..( 3000): cDNA_ID_2162697_gDNA_ID_1620544_Annot_ID_160120 3000 nt of promoter + ATG
acgaacttaatggtaacacaagttttttgaaaaaatgaattgtaattgataattttatatcttaagttttcaaaaagaaaaagatataagagtataaacaacccatccaacttaaattaggttttctttaagacaatgctttttgttcttttttggtataacccacattaaaattccactaatgacaaatttaaattcgaaatgacataaatcatgaaacttttatatactaatattaagtggaaatgaaatatgattcgtatatactcatatacatttcattataaaaacaaaaactaattatatacatttgatgcgcaatatttttttggttagctttgatgcgcaaaatcactactatagtaggccacatcaaataaaatcacaataaattgaaaaaaaaaaaatggagacagacgcttaaaattgtaataaattggtgataacattttgtctagacaagtttaagcccacgtattgaagtcatcaacatggcacgccaattttgtttttctaaaattgtcccaaaacccaacatttttgaattatatatctctcagaaaacttgcgtggtcatagaactttatgtgcacatgcagatataaattgtagaaaaaatgttaaatgacatggattgattcatcatttttcatcttgatcgggtattatgcggatttcacatttatttgtatattcaaatcaaaataattattttccataaattaagttagtatgttttatttggggaaaaatgttatttaatcccccaactttaaaagaatggccattttatacatcaacttcgtatgtgaccgtttaaaacatgaactaaacgttgactaatttttaaaacatgatctttcgttgaccaggccaaaataaacatgccgttatcagtcattaacggaatttctaacgtccgttatcatccgttaactttataatcaagtttcaaattgtgcccattttaaacatcaacttcttatgtggccatttaaaacatgaactaaatgttgactatcatttaagacatgaaaaaatcgttgaccaggccaaaatagacatgtctttatcagtagaacctagaaacccgttaatgactgttaatctgtccaaaacaacgtcgtttgagaataatcgaaagaacgtcgttttaaaaggaatcatgtaagcaaattgaagactcattataagattgttcgtcttgtttgagagttgtagaaatagatttggggaactgggatttcatttagaaaataatcctgattttcttttgattattcttaaaacaaagtcgttttagggatactaatagagtcgttaacaagtgataatgaatgttataagttcttttaatgaataatgacaacatgtttattttggcttggtcaacgaatttctcatgttttaaatggtagtcaatgcttagttcatgtttaaaatggtcacatataaagtcgatgtttaaaatggccacaatttaaaacttgactaataaagtcgttaacggatgataacggacgttagaagttccgttaatgactgataatggcatgtctatttttgtctggtcaacgaataatcatgttttaaaagttagtcaacgtttagttcatgttttaaacggtcgcatacaaagttgatgtataaaatagctattttttgaaagttaggatattaattgacatttttcccgttttatttgaagtctttctttcttagttagtctatcatatggtgtacataatttagttcgaattttcaacctagtggttaaaatatactaataagttggctaatattaaatggcactgacttcttttacagaaagaatattaaataacgttaccgtactttggtaacgtaaatagaaataacaagtgaatattagtgatttttcatcttataccaaagattcaccttgggaaaatacgtattatgagggtaaagggtgtattttaacttcaactattttaacggtgctttttcctacttataccataagagaatgtttatttcaaccttaactattaacaaaatttaaattaattatctcaactcataataaagtgctaaaatctatattgactaactttgacgttagttaaccgttaaaaaatgctgacgtgacatgatagatctgatttggcatgacacatcgtcagctatttaaacgttggcgttttgatttgttaagaattaagaaaaaagcaaaaaattcgatttaacggggattcgaacccaggacgattggatgcataaacaatgatttaaccagttggactgcgagatatattcaatacaccttcccaactcatttatttattacaatgtttccgtttttatcattgttttctaaaaatgcttttaccaaaaaaaaactctagaattttgctgaaattttataaaaaaatataattatttcctttaataatgtttgtaagtaataaattaatataaactgtttcaaaaaaactaattccgtattaatttagatatatccttaactaatatatatataatattatttggtaatatatataatattattttgtaacattctctttatattaatatatatataatattattttgtaatattatttctctttatattagttagggatatatcttagttaatatgaattatttttttaacatttttattaatttattatttataaaatttattaaaggaaataatcaaatttctttttataaattttcagcaaaaatcaggaggttttttgtcaaagtgtttttggataacaataataaaaacgaaagcattgtaataagtagatgtgttcgaaggttagccgaatatatctcgcagttcaatcgtcccggttcgaatccctttagaagcaaatttttttgcttttttttaacaaatcaaaacgacgtcattttaaatagcagatgatgtgtcatgccaaatcagaccccatcatgcattgtcagcactttttaacggttgactaacgtcaaggttaatca

SEQ ID NO: 2479 - DNA, 3000 bp, Unknown
  misc_feature (1)..( 3000): cDNA_ID_1532708_gDNA_ID_1620544_Annot_ID_160125 3000 nt of
gttgaagtttagatatgatgtatcatgtttacacttatataatgttagtctaaaaaataaaataaaaaaataataattatcactatataagttattgccattctgtctaaattttaacaggtcagtgaattaaattaatattattaacaataagatatgttatcatgtattatcaataagaaatctactaagacatgttatcatgtgcgtaggagttttggcccaataaatgcttgtgcactccaagaacatcacaaaggatgagaatgagatgcattcttgctcttcgatttcttaataaatgtataatattgacttttcttggttcaaaagtttgtttttatctgttgcatcttgagtaggaagagatatttttgctatcttggatccacctaccaatcttgtttctgaccattctttctattcgtttgcaatttggttgctgctaagttggatcaaaacggctttattccatagtttcaaatgcctagtgctactggcaagataaagcgaaggaaagtacgcagagcttagagcttagatcttttcttagttttgtttacttacctatgatggagttttataggagtacgaataacgcatgcaagaaaactgaaccccttatagatataaagatgtacctttaaaaaataaaaataaaagatgtaccttgacacatagactaattggaaaacttacaaaaggcgtttttttctgtgtttttttgattaaaaccacaataccgtaccaatcacaatacttttaactgatttgtgtttttcgaaaaaaaaaaagtttgcgatttaatttgtcaaatgaacaatacattggaacgctttccaaaagaagaaaaactctttacctagcggttttaagtaaaagtgcattccaacaaagagatcaattaattttttaacagctgtttatattattatttttgtgccaatgttgatttcaataatagaggaaactaaaccggataaaccgggtacaaagaaagagataaagaccagtcttagctagtttgttttatttaattaaaaactatgaaaatgcaattacaggaaatagaaacataacaatgcttttagaaattttgacaattattatctactataagcttatatacgttctataatcaatttacttgtaaaaaaattacttgtaaaaatgattttttttttaattttccataatgaaactattcaacggatttaataatatgtatgttaaactttaaaatgtatattttgatttatttgtgtatatggtttataaatatatgttattgtttatttattaacacaaaaaataaataatgattaatatatatatttatatatatataatctataatccgcaccacaaatagatttttcaccaatcaaacattattccgtactgcttattttgtacaaaccacaattgtcccacaaatatatttttcacgcacttaccgcagttaattcgtactgcacggtcataatactttctccgtacactaaaaaccgcggtgaccattcagatccatagaaatcatccatcgtaactgtaacgagacgacgaccaccacttttcatggaccaaacgttttttctcggtatatgggccaatctcgtctgacagttcatttttctggaagcttaaatatttgtttactgattctataattcaccatataatctttttcttgtgtttgttttcactcatacgaactaacaatcgattcacggttaatcacccatcataagtttgctttactttaaatgcgcttaactttagagttttctttagatttttaatcaaaaaaaaaaaatagtgcattttaataacatatatgaccaaatcaatttatttaaattttccttatacaccactatatttcaatataagtagtaatatagaagagagaacaattaatttatgcatgtaaatccacacaatttttactaaaataaatagattagatgagattcttgtaattataaaaatcgtgtttactactacgttacaacaatctagacgtaaaattctactctttcttctatcgatgtgttatagattgatcgacaattataacaatcttgaacatacatgatatagagtttaaactctagacgtagaattatatctggacaagtcaggagctaagccacaatgtgttgctctagttatagttatagtacttttcttaagttagaaacctcaattgcttgaaagctcaagctcttgcccattgcccaatatagaactaaaaatggtttcaatggataaagtcatataaaaagctttatattttcttcttatgaaattctaaataattagtttaaggaatggacaaaagcgtcatcagtgatgtgataagatcgtcttatcgcatcaacagaatggatgggaaaccacaagtgaaatgtttctggtcaaattgaaacttggagaatattaaagtttttgaaacagaaagatttaataattatatcaaatctttttaaataaaaataaaaaataattatatcataagaaaatatcttcataataacatcttaataagtatcctattgagttacgcatctttgtaatagaaaccaaatacaaaataaaccaaatcaaaatttataatatttttttggaaccttgatacattatggttggttcaggtctacatcagattgtatatatatacttaattataaaactgacatattattatattttccttcggataatctaattaaaatacattttagaaaataatattttgataccaaacagtgaccaattattggtgaataaaaactataataatatttgttcttcatcttatacaaactagtataagagcttggttgctcaaaccattttctcttctctctgaaaagaaactcaactttttttctttatctttaacatcaaaaaactttttcgatatctttacaaccattaaacaaaaaatttggccactacaagttgaaaaagttttgattatatctaatcgctgaa

SEQ ID NO: 2480 - DNA, 3000 bp, Unknown
  misc_feature (1)..( 3000): cDNA_ID_2162693_gDNA_ID_1620544_Annot_ID_160119 3000 nt of promoter + ATG
ttaacatgtagaaccgacgaaaatcaaaaaggaaggtgaatgttaatatgtaagagttggaccaaagaaaaattgtcaaaatgagttggaatctatcgtaaaggtcactcaagaaattgaaataaatgcgtatcagatattagtggatgtgatagtgatactgtaacattatagatttttttccccctttctttttatatagaaagtatttatcatatactcctatggagacatgatttgcaatagcatttacattcataaattatgagggtttgagtgtttgagacagacaatatagagcttaataaataatattatccggataataaagttagaatctaaatgcaatattttttggtccaagttttactgcacacaatttatttaagaagacatatttattgtatgtctggttacttttacttttgttttcttaatttgttagaaattggagcaacattgtattcggagcagaagaagtggtgaagaacggttgggacttttcataaaactgtagatgtgtcattggacaaaaatgggtacagctgtttagagagaaaaccaatatatatatataaccagacatacatttaaaaagtatactccatccatttttaatacatgatgttgaaggtttttgaacacaaatttttattattattattattattatactaaaactttatttattatctatttaaatacgatccaaccagtaataaaataatatgtaaaatataaatcttcaaaaccaataaaaattaattaattttgtattgaaagttgaaaacatcatataatttagaacataatttttcacttaaaacatcaagtataaaaaagtgtctatataaaaacatagaaacccaaaaaagaaagcacacaaaaacttcatctgctaaaaaatataatataattgcatttcattccataagaggattttaattacaatttttatgtaataaatctacattagaaaaaatttcatacacaattcttatgatatatattattttacatcgtagctagagaatatctatcttatccaaaatcaaaattaataaaagtatgagatagaattatgcttaagatttgatacatatagctgaaagaataaacttatgtttaagatttctatttaggtgtgcaacaatttaaatatatatatatatatatatatatatttaatatattgtttattcagttgaaaaatgtaaaaagcattatataacacaatgagtaatagtcacaacttgcacaatatgtatatagtttgctgatgcttttgttggatatatattaattctgaaagtttgtaaaatgattgaattacgtctgcgttatataatcaattctaagtcataaaattaagctgtagcgttatgtattaatttgagattgaaaatacaaatacataaataatacatccatccgtctttgaaataaaaaatttaggtttcttataattgtttccataaaaattgattccttagattttctatataatttaaatgaatttatgttaatattttgtagactttaaaaaatataatgaattactattggttcgtaaaaatggaaaaatgttttagtgtaggaaatgaggcatgttttaagagttacatgcatgtttcttaattgtgtgataactttatacgtaatttataatttaaatttaaattttgtgaaaattataaaaaatacacttatattaaacaaaggaagtatcagtaaaattatttcttcctatcgacgagtgtgtttacaagagtgttttactatccaatttcaattgttcttttttttttttttttgaaaaagggttcctctaatttccattgttgcacttcaattattttctctctttgttttttttgagcaaaagttttgcatgtatattgaaaattttattgttttctaaaataatattaaatattttcaatattttcaaatcttgcaaagaaagtacacttgtactataacatcgttacttagtgatctgtcatgtgtgacatcagtctttcgatctcgaacgcgagagatatgtccatgcatgcatgcatgtgatcagtggatctgtactctttaaaaacataaccagtttcgtaacgacaaattattacagaaacaaaacaaaattgtaataaatactgatttcaaacaaccaaatgacacatgtgcaaatactctcttggaatgatagatgtatatatatatatatattataatatacaaatggtagaagatataattgccaggttttgaaactggcttctaaaatggttacaattaacatgagtacttgttacttgtatacatatcattgtttagaagaacaaaaagttgcttaaagatatctctagaaggggatgtaacaaaaattgttttgtatttggaataaacttctaataaacttttctaattgttgttcgaattgtcatgttattttgttattcgacttcttgagtacttggacccaacattgaataaattgtaatcaaattatgttaagccaactttaatatctacattttatcgcaatatgtaaggacaaaactcttcttactacataaattaaaattagagaatttcaaatgacaaaatctaatggaagttgaattaggttcatgaagatttatgccgctatatcatattagggcttaagaactctttttgtcaaattgctttcattaatttaaaggtttagaatacaaagatggagatggttttctcatgactccaaatttcatataaacgaacttgacaacactaaaggttacaacataatagggcataactatagaggttatgtataaatagggtataattgtaattagtattaccctagtctctcttgtaactagcctatatatattgtaattacaatctctaataatattaaggcattacactatatggtatcagagcctctcgactcttaagacctaaatttctcgtgctttacgcagccttctctttcatctcttctcatctttcacg

SEQ ID NO: 2481 - DNA, 3000 bp, Unknown
  misc_feature (1)..( 3000): cDNA_ID_3436760_gDNA_ID_1620544_Annot_ID_160111 3000 nt of promoter + ATG
acttggggaataagacatgtatcttgtggaccaagtataatacatacattcttatatatcaaggttttgttgaagaacaaaaccatcaacaaaaccatctccacgttctttttcctttcattttcgaaaattcatctctttctagttgttttgacttctcaccaactcaacaccaccacaatgtttctttcccaccaccgtcaacaccttctcttgatcacctgattgcttcttacctgtttaccctcttcttctgttagaatccttgacaacctcttgattcttgttcacatatttttcatgagagtttgaatctttcgtaacctcttgattcatcttccattcgagcaaaaaaaaaaaaaaatacccaccgtgaacaaccatataagttgccataagtcgtccttttaacccatgcatgagatctccgaattgtcctttaaaggttcaataaagttttcaaggtcagcacttaatattttgttacgtttcttccttccagttcctgcttaagtataaggacgggcagtaagaccgccccgtatccacaaatttaaagagcaatttttttttttttttgtatatacgaaagggcacaaaaaaaatttatatatgtacaaagacacaaaaaaaaatatagctataaaaaggcacattaaaaaaatttctatatataaaaggagtaccaaaaaaaatttatatatgtaaaaggagcacaaaaaaaaattgtatatgtaaaaagaggacaaattattaatgttagtgggatattttttaaatttgcccagaagcatttgaaatgtatgagccaacattgcttgcttccactggttttattatgaaataaaatgatgttaagttgagtttcttgatcaaccatggaaggttgtttgtgaaaacagttcagttttgtctatttgatttcagttatgagtgagctaaaacagtttatctaaaggttcggcttgggctatgaatgatctagagctaccactaattagcaaaaagattttctccaaaacataaagttttttaattggttttgagttgcctgaattttcatccctatacaagttgcaatttcaaatttttatcataaactttttgccacttaagaaaccacccaacaaaattttaatctcgataaaactacatgtgttttcggttttattcttaaaactgtgcttccaaatgaaccgatcagttaaccggtaataattcatccgatttgacttacccaatatttaaccaaaattaatccgattttgactctattttaacccaaaaaaaaattaaaagaatatcttctctacaataagatatctttttatttatttttttagttttgataaacaattaaagataagaacctataacttaattttaccaaaaaaaataatatgaaaaatataccacgaatttcttttgttttaagctattggtaatataagaacatatacattttccttttgacaatcatttttttttctttaaatctaaagctatgtttcttttgaaacaaaacatacatttttcggtaatcataaatatgacctttgactacttgttaactgataggttcagttggaggtatagttttaagaacaaatccaaaaatacgtgtagttttatgagtttaaagtttttttggtggttttttaattgacaaaaagtttggagtggaaaactgagattgtaactagtattgagctgaaaattcaggcaaccatagattttcccttaataagttacttaaaacttaaaaatgaactagaatgattttcatgattgttacaagaactagatgatgatcatgattgttgtaaacttcaagatttttgaaaacccatatgaactataatttcaaacctttaagaataacacaaaggtaatttttttttttagcataagattattccactaagattaaccaataaaatgaaacaatcatgtctaaaattggaaatagagtaaaatttattaataagaaacaacaatcatcggaaaaaactcgtaaatatgtcttaggatcggagttctcttgggattctagatcatcaacgtagaccagcatcccgtgttcttcatccaattctcggccattttgagagtgtcactttgcgtcttctcttcatcggctcgtttcaaattctctttcatttccctctcttttcgagctctaaggctctcaccagcggaagtcgcggtcagattttctttgaaaagtttatgaagatcccgctgaaacccttcgtagacatgtatactgcagtacccaaagataactaatatcgttttttttttttctttcatattccacttattgtaagctatagtgataaacttatttaacctttataatatttttactaataattaattacccaatcgatttaactaaatttctttgttttatgaaacgagaatcttagccacaaatatttggtagaataaatattatcacaatctatactattacatgttgtgtcacataaactaagtatcattacacacatacaaaaaaacaatacacattttatgcacatatgaatctgcccgatacttgaagttatttttcttcattaaaattccgactattatatcaatcaaagactattttacaaaaataaaacgaaattctaataactctttccggtggaattaaattcttgttagccgacaaaaaaaaaaaaaaaatcttgttacgattacaattatcttgatcatgttaatcataattttgcatttgtcaaattaaaatagatattttcatggatttcatttgtaatgggccttaggcccgattaaatcaaaaagggtttattcaaaatctcagagagcctctattctaattttgcaagtgaaaaactttaactcttttttttttcgtttttgggatttgccaacttcgatttctttggttgggatttgtttatacgtttccttcgatttcgctcgagcttcgatctgaaaagcttcgagcttttagacaaatccatg

SEQ ID NO: 2482 - DNA, 3000 bp, Unknown
  misc_feature (1)..( 3000): cDNA_ID_2162663_gDNA_ID_1620544_Annot_ID_160113 3000 nt of promoter + ATG
ataacaagaagatatccttgcttatttatatggaatgaaatgtgaaaatctgatactaatttacttaatttcacatttttgaatactttaattaggtatttgatcagccgttttataaatcatatatatgaaagttggccaacactctccatatgagtgacatatcatcacacaagaaaatgacatatgtcattctacattaattaaattaaaaaactagcaaaactaattgagaaaaaaataaaataaaaccaataatcaaaactaattaatagtcatacaagacattagacataccaaaaaaataacaacatgagactctatatgactatatggtagggatgagaattacattgttgacttaaattactagcatatcaagatgtgattgtgtactagatgacgagagaatatatggaataaagaattgtttgttacaattaatttagacaagtttcaaaacacataaataatataactacatacattgtatcagtatatcatatattgttgtagtatgtgatcatgatagtgaaatattagaataataaatatataaatattcatattgtagtagaattgatatttcgagttatagatgaatctaatcataaaaaataataattatattaaatagatgaatttatcaaaatgaacatcaaaatcaacaaaaaatcataatcatatttttcgataattttaaaaacaaaaacccatgctacgcatgggtgttcatctagtttaaataaaagttgaaattccaagtgtgaaacaagcaacattaactaagaaatattgaatacaaagataaaattaatgtataacagcttcacataattaatcaatcaccgatacatatctccaaaaaaaaataaataaattgatttctaatattttattcgagaaaattatttgatttgatttaaaggtatggtttgtaaaagttctatacttgaacctacaacacaaggaatctattatctctttgccaaactgtccactcttaagagttcgaaaagtgacacaagagaaattccaagcatggtgtatacatagaaagaaaggttaaaacctaagctcttatggaatactcttgggtttttatgaaatctgatgataattgataacgatagtttttcaaccactaaaagcaagtgaacacatctattaacttggattgaacattttagaacattctctataaaagagaaagatggtaaggttttttccatataagagaatagtgaattaagcaatatcttttgctttttggcaaaaaaaaaaacaaaaaacaatatcttttgcatagttaaaaaacaggccatacccaaattaaaaacaagaaccaaaaaaatggaaaattgggttagaatccaaaaccatgtagcacactttggcatggttcaccaagaaacaaaatgaggattgttttacatgaaaatgtttgtttttaataatttgattctaatagatttaacatatttttgaaacgacaaaaataggaaattttgtctcggatccaatttcttcattttcaatatttcgctatatggatatagcttttctagatatccaaattttggaacgtttcatatcaaatcaaattataaactagtataatacaatttgtaactaaaactacaacatatatacttaacatcatatcacgccgcacatagtacaagtaaactatctacttgtagaatatttcttggtgactaaattaaagataatgatacatcaaataaattaaaataaattgcggcatggtcatggggatctgcatcactcacaaaattgcggatgcaaccaccatctcgacttcattcagtctttgggtagctatggctcgaagagaggcttgcaacacagtggacggctccaagttttccgtagtaaatttctacccaccagaaaatggatgaacatgccaataagaaaaccataagagattcatggtcgatgcatccaagtggaaagagcttggagctcagaaccaaatctgctagtaaagacgttggcatatatgatatatccatcaaacccgctctaacttaagccccaagagaccttcccttcgccaaaaagccttatcggaaatgttatgttctcttatgtggtcgagatgtagaagttaaaattgaagaggctgttagagacttaccaagaaagggataggacttactaattgttatccaagtctattgtgggttgtcttcggtaatcggttctaaactagcaaattttatgcttgctaactattcgtagttgagctatgagactaccatgttggatggggacctccggtttgggttgtcggcaatgtggctctcacgttagacaaggacagccaaggaattgaaacgttggtcacattgcataaagagaatatgttgtctttcgaccagaacccataactccttgcatttgcttcctagttccttggtctaatttttaaatctaactgcctatattaatataaatctcctcattggtatagatatattaaattataattaagaaatatataaatcttagtataaataaaaatattaaatctgaaagtccactaatcccgtggtctcaagagtttgaaaatttctagatcaactttttacccattcttgcgaatagtaaaatttccataattgtcgccaaaacattctccaattatgctaatataggaaacccattttctactatcttatatatatatatatatatattgaaaatataagaataatttaaaatgcaacaacaactatagatttcattggaacacttcagaaccatgaaactttttgctattattttgaccttatatattccaccaaattctcgatggtgaaagggtcaatatttctaaacatagaaaacttaacatgactataaaagcagccaaagaattccattattattcattcattcttcagtctctcttcctcaaaaaaaaaaaaaaaaaaaaaagtttaaaacaaaaactaaaaaaatagaataatg

SEQ ID NO: 2483 - DNA, 3000 bp, Unknown
  misc_feature (1)..( 3000): cDNA_ID_3068096_gDNA_ID_1620544_Annot_ID_160118 3000 nt of promoter + ATG
tatatgaaatttggagtcatgagaaaaccatctccatctttgtattctaaacctttaaattaatgaaagcaatttgacaaaaagagttcttaagccctaatatgatatagcggcataaatcttcatgaacctaattcaacttccattagattttgtcatttgaaattctctaattttaatttatgtagtaagaagagttttgtccttacatattgcgataaaatgtagatattaaagttggcttaacataatttgattacaatttattcaatgttgggtccaagtactcaagaagtcgaataacaaaataacatgacaattcgaacaacaattagaaaagtttattagaagtttattccaaatacaaaacaatttttgttacatccccttctagagatatctttaagcaactttttgttcttctaaacaatgatatgtatacaagtaacaagtactcatgttaattgtaaccattttagaagccagtttcaaaacctggcaattatatcttctaccatttgtatattataatatatatatatatatacatctatcattccaagagagtatttgcacatgtgtcatttggttgtttgaaatcagtatttattacaattttgttttgtttctgtaataatttgtcgttacgaaactggttatgtttttaaagagtacagatccactgatcacatgcatgcatgcatggacatatctctcgcgttcgagatcgaaagactgatgtcacacatgacagatcactaagtaacgatgttatagtacaagtgtactttctttgcaagatttgaaaatattgaaaatatttaatattattttagaaaacaataaaattttcaatatacatgcaaaacttttgctcaaaaaaaacaaagagagaaaataattgaagtgcaacaatggaaattagaggaaccctttttcaaaaaaaaaaaaaaaagaacaattgaaattggatagtaaaacactcttgtaaacacactcgtcgataggaagaaataattttactgatacttcctttgtttaatataagtgtattttttataattttcacaaaatttaaatttaaattataaattacgtataaagttatcacacaattaagaaacatgcatgtaactcttaaaacatgcctcatttcctacactaaaacatttttccatttttacgaaccaatagtaattcattatattttttaaagtctacaaaatattaacataaattcatttaaattatatagaaaatctaaggaatcaatttttatggaaacaattataagaaacctaaattttttatttcaaagacggatggatgtattatttatgtatttgtattttcaatctcaaattaatacataacgctacagcttaattttatgacttagaattgattatataacgcagacgtaattcaatcattttacaaactttcagaattaatatatatccaacaaaagcatcagcaaactatatacatattgtgcaagttgtgactattactcattgtgttatataatgctttttacatttttcaactgaataaacaatatattaaatatatatatatatatatatatatatttaaattgttgcacacctaaatagaaatcttaaacataagtttattctttcagctatatgtatcaaatcttaagcataattctatctcatacttttattaattttgattttggataagatagatattctctagctacgatgtaaaataatatatatcataagaattgtgtatgaaattttttctaatgtagatttattacataaaaattgtaattaaaatcctcttatggaatgaaatgcaattatattatattttttagcagatgaagtttttgtgtgctttcttttttgggtttctatgtttttatatagacacttttttatacttgatgttttaagtgaaaaattatgttctaaattatatgatgttttcaactttcaatacaaaattaattaatttttattggttttgaagatttatattttacatattattttattactggttggatcgtatttaaatagataataaataaagttttagtataataataataataataataaaaatttgtgttcaaaaaccttcaacatcatgtattaaaaatggatggagtatactttttaaatgtatgtctggttatatatatatattggttttctctctaaacagctgtacccatttttgtccaatgacacatctacagttttatgaaaagtcccaaccgttcttcaccacttcttctgctccgaatacaatgttgctccaatttctaacaaattaagaaaacaaaagtaaaagtaaccagacatacaataaatatgtcttcttaaataaattgtgtgcagtaaaacttggaccaaaaaatattgcatttagattctaactttattatccggataatattatttattaagctctatattgtctgtctcaaacactcaaaccctcataatttatgaatgtaaatgctattgcaaatcatgtctccataggagtatatgataaatactttctatataaaaagaaagggggaaaaaaatctataatgttacagtatcactatcacatccactaatatctgatacgcatttatttcaatttcttgagtgacctttacgatagattccaactcattttgacaatttttctttggtccaactcttacatattaacattcaccttcctttttgattttcgtcggttctacatgttaaacccttcaaaaattaaattataataagtatagtgaagaccaataagcagttgcatggaccctgattgattcattaccgctaaaactttgtctgaatccttcttcctatttataccactctcttcttcttctccagtttcatcacaccaaacttctcacatctcctcattctgtattttgacaaaaaaaaaacaccctttgttttttctctcctttgcatgttgtgattgtttttgcttcacaacatg

SEQ ID NO: 2484 - DNA, 3000 bp, Unknown
  misc_feature (1)..( 3000): cDNA_ID_3068100_gDNA_ID_1620544_Annot_ID_160116 3000 nt of promoter + ATG
cagtggacgtgatgatgggattgatgtttgcattctctgagagagcttccatgcattcctctttgctcatgttaaaggtcaaacatgtctctatcatgtgttgcacctatacataacacatgacacactatcacgtttttatatatatacccttaagaatgtacctaaaagaaactgttccttcatgagaagaaacgcatgcacatgttcgagttattaccagatgaatgtatacagcgggagaagagtgtctcatttctattatatattttgctacaaccacaaataaactcgtatacttagattaaaaggctccactatatatattgacgctcatttatagaagagcttgcaaagaagaacatgaatagtgatgtaaacatgtggcccgaagaccgcacacgtaggagattaattataattggttgagacatgataagaagatattgtaagaaaagtgaaaaaagagagagagaaatttgtaaaaattactcttttatctcctcttctttgtttccatttccaatctatatctcatttttcatccataggtcctatattttttcccaaaataaataaatttattcaatcaattttgctatagccttatctgcggtttattaggtcataaattttaattaatacacaaatctaaataaatatgttatatagatcatagatttaaaaacttttacgggaatttatctatttaataatttacaaatactagttgaaattcaatgttatcttgttaatgatttattactagatttgaaaatccgaaaatacaaagattcaaatccaaagttaaacttttgtatttcaaaatccacatgtctgattttaaaatctatataattttctgggtcccataaagatttatatattcattaacaaataatggtatcatatatagagttacagaataacaacatttgcttcactaaacatgggaaatagatattggattagcaatagactattaaatttttttgagtacataaatgtaatttctaattactgtgtaagcaacattgtttttctgcaaccactacttccgcataccaaaaagcattcaacataaaaggtttccatgaaaactaatataggctgtggtaatgatttaaacatccaaaaggattcagaaaagaaaacaacaataaggatgaaagcttaacgaaatttgcttcaaaatacttaaataaatatctttgggtcgactgtgtaagcagcattaagaatgggtttacccataatttgtccagataaaatcgtcactctaatgtcaaatctctataatagaacccatctaaaactcttctattgagttgtttgatttttcaacccattgtttacaatctcatgtaatttattttaccactttgtgtaggtttgtttaactaagttctttacatgcatctatcatcaaaacgtgctggtacatagctaaccaatccatatatttatgcttaatttctgttagtttttaatagttagttatccggtaatttagtgtgaatgtttttaattgctactataaaatatgttacatcaattattctaaaatatagcttctttttcttttttttttaatataaaacttcattgatcgatccctaactattgatggtactcttcgtctcgttgtcacttttcggatcaatcgatctacgactactggtcaccaacacattttgatctacaaactcctgatcgatcgttttaggccaaacaagtccaataacgcatcaaaacatccaaatctctcacaaacacctagtatatgtaatagactcaaattaaaacaagagaaaaaaaaacgtaaaaaaaactgcaatacgacaaatgattcaaacgaaaactaaacgaaagacttaagacaccaaaaaacaaaacatattagaactattcaaaagaaaatactttaataaatcataaaatttcagaactggaacaaccaaaaccgaaccaaaatttaaaaaaaaatctaatagctggaaccgaatgaaaccgaatcagaaccgatagcaatactcgaacgcccagccatactttttgtataagaactcagataaatgatggatttaaagcattctaagttttaagaaaaaaaatgatggttataacaatattgacatataaaaaaaaaaaaacgccagccgtcaattagagttttgaaatcgcaataataatgttatgcatgaataggaattaggttcacattctttttgtatttgatctgttaatatcatggccgatatagattgaacattttatctaaaatactattatatttgaccatgaaatcatgttgttcattaccactacaacgtttacaaccatattttcactaatcactagttgaattcatatatctaatttgagaaacaaaatatttcaaaaataaaataattttatagatgatccacttatgtattttcaatttgtctatgtattttaactaaactaattaaatcagtataataagcatacatttaatttcatgcaacccgcgatttctaacctagttatcatctaactacgttcataagcccagtcaaattaggattgaaataaatgtacaaaaagtcaaaaagtcttcagtcaattcaaagtcttggtctctcaagttttccatttaataaataagatatttgaattcgaaataacaaaagtctatattatttaacacaataatatatccaaccaatgaagacatacaaaatatcttagttattaataactaaataaataaaaaacacgtcaagccgaccaaactttcctccaaataagaccaaaaaaactcttaacaattccaacaacgttaagaagaaactaaagaaacttcctatttccaatttcttttcaaacaaggactctgtcttttgtctctacttgccctaccactttccttgcaccaacacttgaaaatctcaaatcttgtatatatatcaacaaacaaacacaaattctatatatcattcataacaaaacataacc

SEQ ID NO: 2485 - DNA, 3000 bp, Unknown
  misc_feature (1)..( 3000): cDNA_ID_3068108_gDNA_ID_1620544_Annot_ID_160108 3000 nt of promoter + ATG
cttgaagatctttggaaactacaagaaaattgggtgtgagactataatgttgtttggaatggtagtgatgagtgtttttgttggggtaataggtacttacattgcacttcgagatataattggtagtgtataaatgttttgagaattatgagggttgtgttgtcctaaatgaagtttttttaataccccaaaaagtgttaacttcaattcataaaagttcttccttttaggtacttacattgcaatttctagctctatcgaagtgttggaaacatttgagtggttggttttttatttccatcaaaatctttcttatttcagtcttgcgttacactttacttaatgttttcttttgtaaagcttctcaatgcaacattataaatttggtttcaatgttgttgaaggcttagaacatgaatcttaagatgacattctttcacattattatggtaaacactatgaattggttcccatatagcaataaagatactatatatatcggaaaaaaaaagaacaaattcagtgcctaagtcattgggatattaattactgatgttcatacatgtttatgcttcaattatgttttaaggaatcggaaaccagatgtaatactgattgaatcaaaccaactctacaactatggggaaagaaaaaaatacattcgaaacaaaagtattaaaaacgttaacaagagaaagaggctttaaatagctaaatctcaagccaaacagaaagcgaatgcttagtgatgagattgaggcctgtaggtgtgtaaccatctgttgaagcggtccataagtgacaattccatcttcgttgttggaacattggggacagttatcggcttacagccttggtgagtggcccgaccacgacttgtagcttaagtccggcctcgcattagacagaaggcattccaaactcggaccaggcagtgtggtggctcaattctatctggatcgagagaagtccactttatagcgcctcggtgcgttcctaccgaggcttaccggatcagccgataaagtatatcaacaacaacaaaaaaaaaaaaaaaagttcgtgcctcggattgacttgtcattgaggtaatgaagtagtggactcctggtttggtgagcttcacaagatcatgccctgtcttgtgcatcgccacgggagaagttgggtcgcatgatatgaattcaaggtctcggctgatctctaagatgtcgttgccgcattaaaaaaaaagattatctccaatatcaaagtgtctttcctctgcccacttgaaataaaaatcactctcttgagaaacactccatcccttggagtcaccaactttgtagatcttgctcggtggtggtggaggaatggaacgtgacgggtcatattcgacaagaacgttattgtctggatgtgcattgttcacggtttgagctgatgaaatagatatagttagagctgtcaaatggtcatccgactatgggctaagcccaatccaaaacattatgggcagtccgtggtcagcccataaataaaacgggtcatgtagtttattgaccaattttgtccgcagacataatgggcgcccatacggacaattgggtggcccagtttcattaaaaattagtttcctcagaaatcgcctctttttgtctcctctctgttgcggcttcagaatcgccatcggaaggttggactcatcatcgagacgggtcacgaaccggagccccgtttagttttcgaactcgctaccgattccgagttgtacgagcaacaatcatcatcatcgtgttgcgtgtttatcctttttggtccgaggtgaatttctgaaacaatcttagtgttcttagtgtttctgaaacaatcttagctttttggatcagaggagagcttgctagctttatcggttaatggatcatattaccaagttaatgtcattctcattaatttgataaaagatacaattgagggtttatatacaattgtaagaggcctaaaccatagccattaaaccgaactaaaccaacactatctacactggtttatacaaaataccagttcacaatgactcactaagactctaattacaacagagactctatatacactaatagattgaggtctcacatcttctttgcttgttcttagggtcttcatgaattgaagcacatcaatatcttggtcgaaagattccccctttcaggtatgtagagaccctttgtgttgaaatctgaatttgattccatagagctaagattcatcacttttgatatggattttggactccaaagagattctgaaatgaataggctcagtttttgtattggattttctcaggtctctatcacaaaggtgctcatcgattcctctgttttttgttttcttttgaaattttcttttatgatcattggattttgataccattcattactgatcattgatcgatgagtatgatccttcaacttttggtttttgggtttcatcggattgatgctttttatctgaaaggttgatgcttttgctcgtacattaaacaatgctttttatctgaattgtatagttttgtgatgtgtattagcttatttaagtttagttaagctgaaagcattaggattattctacatatgtgtctgacttggatgaattgttttatatgaagacactgaaagtgatgattatttcatgataatcttgattagtaaacgttattgatgttgatgttcccattgcatcatgatttgtgggaacgagaaatcatctgttccttgatgttgatgttccctttgaatttttcaggagcaaaaactctgattttggagtatccttagtgttgttctcttcccatattgtaaaaacgacttcgtttaattgaaggaaaaagcttctttttggtttaaagtctctctgctcaacctaagagatgaaaatgtataatccatctttcattatgtttttgttcgatttccttctctgtttttgtagtcaaaatttggtgtggttatttgcagaatg

SEQ ID NO: 2486 - DNA, 3000 bp, Unknown
  misc_feature (1)..( 3000): cDNA_ID_2162488_gDNA_ID_1620545_Annot_ID_160143 3000 nt of promoter + ATG
gaatccatgagacaatttttaaaaaactgaagttgtaacccctattaaaacagcatattaataatattttaaaattttataaatattgattcaaatacatccaccatataatccaattccaaaataaaacctgttgtataatttctttacccgtcccgtgatttttttttaaaaaagtaatttttaaaatttaagaattatttttatatataaaagttttgcaaattatatcattctctaatacatttatattttatagtttaattttatatatagtaacattatacatactacataatattttcggttttatataatcttttctaaattaggatgatttgatatgtttaatattagtggtcttaaaaaataataaattaaatatttaaccagtattgaaacggtggattaattatattttacttttttattaatgttgattcaaaaacccgtcactccaaatctgtcttgccaaaaagccatttattttattaatattaattttattaatgatatgactctgaattataatctaaacattttagctaataaataggagtacaccatatttatttaataggggaatgtaccatatgacccgaatgcacttttacccaaatccaccaaaaaagtcttgcaaaaatactatagagataagaaacgatagtcggttttgataggtaaaagattagcaaatatattagttagcttaaattagttaaagaatacaaattgaaaaggtatattacactttattcgaatatagtatcaaaacttatataacacagagatttgataattttttaattgttgaatacttttttttgtgctaatttttatgtgattaagatttaattgattatatatataaaatattaaattgttttacgaacttatttgtttataatttggtaacagatagatatttgagtattcagtatattttgcttcagtttaggaaatctttgatgacccgtctttagatccaataaaccttataatctagatattaacctgcagtataccgcaggtaggcttatattttagttaaactaaaaacttttattgtaaagatgatttaaaaatatatgatattattttatttgattttaaatgtatagtaaactgtgagttgtatatgttttgttgatattatgtatattgtttagtgtttataattagacacttgtagtttaattgttaatttaagagtttcacatgtagtataccatcttgtattaatatcgatctaaacccgtcaattctaggattttccagcttgtattaaaaattgaatcacatcatacacataaaaaaatctaatatgttattaattattatagtatataagattataaattttcaatataatatgtatgaaattgaatataaatatttcaaattatgacccgttactcagtagaaagttttcttaaatctatttttcaccctttataatattttttcatgtattgaacagtttatatttgtttttaaaaatttaaattatggcatatgcgaaaaaactctaattttttttttataatgatgatattattttttcgcaaaaatagaatcatataaagatgagaagtgaactataataattaataaaaaattaatatgataatttagatataaaatctaatttgttgattttaataggttacttttttggaaattaataatgtatttttttaaatttaattaaattaattaaaatttaaatatcaaatcttatatgttgatcttgattggttattatttttgaaaattaataatgtatttcgttttttaattaaatttaattaattaaattagtatttgactttttaatccttaaagagataaattaatttactctttaaaattttatttctaatgatatacctatgtaattacttaaaaaattaatgttatatttaaaatgtactttccaaataatatagtaggatatgtaaaagaaagtataatattttaatgtttgggtatctttatatttaagacacaatgtctcaaatgtctttatagagacattttggagagagatgtctcaaatttaaagacccttttatatttaattattcatatcttataattataatttttttaatatagctaaagaccctctccttttatatgcaatggagatgctccttcatcattagtatattttgttttgaattcaagatttctaaatatagaatttcctaaaataaatacatggtaaactcgtgggggttattgacttgatttgatacaaaaaatgagaggatatagttgtgatcgcatttgattaatttaggctgatgagcaatatgtatgcaatatgcatggatggtgtagaagcgaagacaactatcaccatacttaagattaaaatcaccacaattttaatataatttaacaatatgattttatgcataattaattggacttaattattactaagacattatcagtttgcaaccatccaatttcatgtagaacaagaagtctttagattaaccctcacaaaagactttccgtttttcggggttttttcttgactaaacaaataatcttggagacattaatgatgttatgagtcatgtgaccaatacagttatttagacatcaaagttatctgcaaattcattagagacgaacggtaatagtcacacatgacaataagaatgaagatgtcacttagataaaaattaaaccaactcatgtatttgcctaaataaatcactatttaccaaatttagcaaacaaatcgtaactaaccaatcaacatcacacaatctcaaccctttaataatctcacattctctcgcttcttcttctcggattcctaaatattatcattcattcatcatcctcccaactcattggctctcttctctcctctcctttgcctattttctaaaatcttctccggccacccaccggccaccttatgatctttttggtggcggcgattacaccatcaatttgttagtttatttatatattaat

SEQ ID NO: 2487 - DNA, 3000 bp, Unknown
  misc_feature (1)..( 3000): cDNA_ID_2162493_gDNA_ID_1620545_Annot_ID_160145 3000 nt of promoter + ATG
gacattatcagtttgcaaccatccaatttcatgtagaacaagaagtctttagattaaccctcacaaaagactttccgtttttcggggttttttcttgactaaacaaataatcttggagacattaatgatgttatgagtcatgtgaccaatacagttatttagacatcaaagttatctgcaaattcattagagacgaacggtaatagtcacacatgacaataagaatgaagatgtcacttagataaaaattaaaccaactcatgtatttgcctaaataaatcactatttaccaaatttagcaaacaaatcgtaactaaccaatcaacatcacacaatctcaaccctttaataatctcacattctctcgcttcttcttctcggattcctaaatattatcattcattcatcatcctcccaactcattggctctcttctctcctctcctttgcctattttctaaaatcttctccggccacccaccggccaccttatgatctttttggtggcggcgattacaccatcaatttgttagtttatttatatattaatatgggttgcggtggctcgaggcttggaggtgtggcgacgacaagggcggaagaaggcggggttgtgccacttccagcgggaatacgtccccttctccggcgaaggttagaggagatgaagaaacggagccatgcaggcgtcttgaaagggagccagacgttgtctaagaaagagcttcttaggcataactcttccgaggacggagaagatacggaggagaacgacggtagcttgaaggcgtccgctaaggttgctccggcgcctgatcataatgtagaagagaagaaagaggttatttatgaaaagattccatccaaagatgatgttaaagaggtgaaggaagaagtagttgtgaacaaacaagaagaggacaatcatcatcaagatgttgtggagaaacaagaggaggaaaataaagaggttgtgaagaagcaagaggaggaaaatcatgatgatgatgtggtcgtcatcaatgttaagaaggaaggagatgatggtaagaatcatgatgttgatgaagggagtatcaacaactttgatgagagaatgattggtcctggatctccaagctttagggtttattgcgtcgatgttccttctgatgatgatgatgaaggtaaatcatatgttcttatacaaacacacatatatacatgtataaatcatttactatttgtatttgtatatggatgcatgcattgttagagacatatatatgtttatatatgaaatgcttgttatattatgtagtttcgttattgaaacaatttatccattcactattgcagaaaaagatgtagaagacgcgagaaagtcgatggaaaccgaaagcgtcacgacagagataaaagaggtggtcaatcacattaattcacattattgattatttgatctatgaggatctctaacaatgatatatttgtatttctataggacggaagcattgtcaaaaaggagaaaaaagaaagaagaggaaagaggttcggaatcgcattgccgaggaagtatttagcaaatgtgactgcgccgtgctatgcaggtggaggatgcatgggaaacactcattctcgtttggtgcaagagaaatcgagccagtgatcgatcaaaatatgtttgccatctttgcattgactgatttgttgaagtaagaatggtgtggtgtacgtacgggatcacgatgaataatcaaaaccaccttacgattttagacctttgatttgttttaagagacgcttgtttcagaatttgtacaacctcttcttcttcacctttgctttctttgatcaggataattaagttagtgtttgacgaatttacttttttccacgtggaaagatgtaattaattgaacttgtgcaataaaaaaagtgttgtctaaatgtcaaatttattgttacattaaccaatgaaaataaaattagagtaacatataggaaactgcaattatagaagaaaaaacacactaaaaggtgtaagtaattgaactttgtgaattccgtttgttttcggaatgcacaagtgttagtcataataggaaagataaaaatcttaattacaaatcctaaaatacaatttttaatttattttttagagtttatattaatatgtcgtcaaaaacggtatattattcagaacaaaattatcgttgaccattagttaattaataaccaagttcaaatttgataatttgaaagtttatttagacaaaattaattagttgaaagttttatcaatgatggcctcttaaatttttaacttttttttgttgagttttataaaaaagaaaaaatggttttcaaactaaatttgtttatgatcatgtttatccgagttaagcccaatttgagatctttgtcagtaatgactaagagtacctcccgcatatagaattcatgtagtttctaaaacatatatatatttttttaacttttaaatatatatatttttttaattgtatgagtttctactaaaaaattactattgaagttggtctaagttgcgagaccaaatttttatatgctttcggttcgaattgacatttctctgtgtaaacgaagcatcaataagaatttatcaaacttgaatgtaacaccatttctttagttgatcatttccaaacatttattaatcaaataaaattgaatttcaaagtcacgtgataatgatgatactcaaatttaaaaaaccaataacactttatttcaacatttctatgaagaaatcaattattaacacttaaagttattaattgaataacaacgaacaacatttaatttagtcaaaattagattttttttttcttttttttggttttattgttaagattttataccaaataaaattttacaaacgaatctaaaagaaagaacaaatttaaacttacctatcagaattgttgtaagatatttgggttttcttcgtattaggtttcatcagatccagactcaaaaa

SEQ ID NO: 2488 - DNA, 3000 bp, Unknown
  misc_feature (1)..( 3000): cDNA_ID_2162504_gDNA_ID_1620546_Annot_ID_160152 3000 nt of promoter + ATG
ttttatagggaatcagatatctttagctttctcatcttaatatggattaaaaaaaaatctttcaccattttctttttcattttaataataataaccagtcacacacataagtcacaattataattattctcacaaaaaaagccataataataaagaaaatattatatgtgtaaagattcacatttgactgctttaaagccatctacgcttttaggtttcctttaaatatatgccagccaaaccctccgataaaaatctcacttccaacatccaaatccctagaaattgtaaatggctgagaacaacaacaacaacggcgacaacatgaacaacgacaaccaccagcaaccaccgtcgtactcgcagctgccgccgatggcatcatccaaccctcagttacgtaattactggattgagcagatggaaaccgtctcggatttcaaaaaccgtcagcttccattggctcgaattaagaagatcatgaaggctgatccagatgtgcacatggtctccgcagaggctccgatcatcttcgcaaaggcttgcgaaatgttcatcgttgatctcacgatgcggtcgtggctcaaagccgaggagaacaaacgccacacgcttcagaaatcggatatctccaacgcagtggctagctctttcacctacgatttccttcttgatgttgtccctaaggacgagtctatcgccaccgctgatcctggctttgtggctatgccacatcctgacggtggaggagtaccgcaatattattatccaccgggagtggtgatgggaactcctatggttggtagtggaatgtacgcgccatcgcaggcgtggccagcagcggctggtgacggggaggatgatgctgaggataatggaggaaacggcggcggaaattgaagtgtagatttagggtttgtaaccgcctatgtgggaaatttgaaatttggtggtgtttattagggttcttcaattcgtcggatttgctttcatgtaaacaatgtgtggaaggcaaattgttttttttagtagacttgtaagcgcttttctgagaatttgattgtcttttggagttagtctcttacataatatcttgttctaaaatcctccgcctaacaccggttactctccgtttaatcgctaagtccatcatatccggttactctccgcttaatcgttaagtccattctatccatgattaatgactaatcccttaaaaaatcactcattcgattactctccttctaatccgattacaaattaattatttttttaaagtaatattaagggccccatttcatgtaaaagtttttttctccaaatatattgggccatttattagatattttcagtcaaattaatttttttataaaatatggcctttttaaaaaataattcagaaaaaatcatggaatcatgggctactgcccttttgcccatcctatttgggccgagcttgttatcatcaacctcgacccaatgggtgagtcgtaaggtgtgagggtcaagactttttttatttttgaagtaaaattgatatataaaaaacccatattttataaaacaacttataattagcccaaaattatagttcaaaaccccattttttgttttaaaaataataagcctgattttgttttttaaataaagctttttatagcaaaaacaaattgggtaaccttacatctctaattttatttgggatggggctgattatcatcacaaggactatgcataaatgttttcaataactccatatcaataaaaaataatctggtttgattgcttttatccagctaactaaatttcacaccaaatgttgaactcatcattgttttttctagattttgcatgattcgtttgttcaagtaatcaggttcgactttcgattaaagcctaaaaatctcatgaaacaaaggttttaggcaaagaactctctatataaatatataggcgcatcatttcataaaaagtttatttccgaaaagttgatggatatccgctttaggtgaccagttcgatcctaatttcctaacttttgtaatttctttttaacaggtgacggcaaattatgtttggaccggccctaaaagtagtaattatttcctttaaaaataatatctaaggttaagagaaacatattctttacataaacaatatctttggatgtttaaattttaagcttgatattttaacgaactttggcgcgaaaaccatctattcaaatatctctttccaccacttgtgttttcattgatttggaattgttatctgcattgagatatctttgaatgatgaaacatgttcctttgctacctttaaattaatgcttcagattagatcggtctcatgcacaagacaaattgacatacatatttgcatctttgaaatgctgacaatatttgcaatctcctaagaatgataacacaaagaagcaggccaagcattggattttaagtacacaactatagctttttcactcgaagccaaagtcaccttatctatgcggaaactccacatactttccattgcgcattagaaaattctcagtttggtatcttcccactaattaccactccaaggcaccacttatagttttcttctttgactaatcagatcttgggcacaaaaccattgacgacattcctcatatgctagctttcacatacttccctaaattggttagtataaaatccaccttatctaaagctatagttgactaatagctttcaccttatctaaattttataagttttaaaatttataaaatccaaaaagtattggttaacaaaaatttataatgaatagaaagtgaggttttgtattttgggatttcacatatattagtaaatattgtataacacaaaacaaaatattaataaaaaataaattttatttttgagaaaatagttgggctgatttcgtagcccacttaatcagcctttaaatatggaaaccctagcctagaaagtgaacaagaaaaacgtaaagatcaaaatg

SEQ ID NO: 2489 - DNA, 3000 bp, Unknown
  misc_feature (1)..( 3000): cDNA_ID_2162750_gDNA_ID_1620547_Annot_ID_160180 3000 nt of promoter + ATG
cgcaatctccttccccacttgatcatccctcccgatttcagctcagacgagcactttccctccggtgaagcagcgcgacagagacgagtattgtacgccggttgagaaaccacctcccttcttggaaatttgttcctgcgagaagaactagaaacccagaaaccccaggaatttctattcatagaaagttcatgaggtgcgattcttctgtaaagcaagtctccagctagctccgaagccatcacatgactctcgtcgaaaacaggaagaagaccaccaccactcctcttcttcatcggtttattccggttcatcctactgtaatcgaaatgcgatcggagtgaaaacatgcttgggtaccggagagacacgtcactcgccgtgattttgctcacctgcatcaataaaccttaaaaaatcactcgaaaacccagacgaacaacaaaaaacgagatctgtctataataaaaggtgaaaaaagcagagaatcgagtgaataccatgacgactctaatcgatttaagattttccggcgatctctgaggaagaatcgaagcatcgatttcgtaataagatccagctcttatatgcgcgactgcaactgtaagaacaaacccaaaccaaaaattcagaaattagaagagaagcgagaaaatcaacaaaaacgaagaaactatagcttcagtagtttaccattcaaagtcggtgacgacggcgaagagattttcccggcggtggtttctctaatcggattccgtttcacgaacatcgtactctgtagaacaagagaaaaactaagagagatattttttttctggagaatcaaaaattgttataaggaataatgaaaaaatcggtttgttgttgttgctgctgcctggagagaatatatttgaaaaaacctgactctgcgagtataacaagaaacacacacgcgctttctggtacgcgcgtgggagacactaaggaaacagaatcaagcggtgatgagttttatttttctcatcatgagactgatagtgactgagccatttatatcacagcgaaaaaaaataaaatctgagagcgagagagatcttacactcatgatttttgctctcgataatcttcgttcctccttttcactggattaaaaaaatcaaaatcagcaacggagaaaaaaaaacatggacgcggatggagaaattaaagcatttctgagaaatagagagaaaacataaacccagaaatatttgaagaattttgttttataccagaaaatctttttaatcagcagagagcttatggggaagacagcaaaaagaaaagttttgaaatgtcgcatttaatgaatctgggaggtggctttatatatgaggttagagagagagagagagtggtgtgagtgtgtgagtcttatatgcgtgtgcacggcacgtgactatattgctttcgcagcaagttggcgtatattgacagatttgccctcaaactgtatctaaactgtaaacgttcgcggaaattggtgtacgaaatcatctacaatgaaagattgaaagcagacgtagtgatattacggattgatgccacgtgtgtcattttgaaaatttaacggtgataagacctgaaggttaatgtaattggccgtagcgaataaatttcgtgttacacgtgcggagaaggcatcattaagctactgctactagagtggggaccgactacacacgtgaggaattgttttttttttttgtcacagtgattattcttacatatgattattttcggataatgatatgtgatttatgatgttttattcacattaaattgtttatgatgtaaggattaatgtctctaatgtatcgaccaattttatactccaatgataactgaatctgtttttctttattgagctgaagcttttttaaaatcaaaaagcttaatttacgtaataacatgatataattgatattttttttataaagtatttaaaccaatcaaaacaaataataagcttgaggacttatgaccatgattatttgcccaatacatttaagttatatttttttgttgagtcaacaatatttttaataatttaaaaatatttttttcttaattatcaaaaacagtcaacaatacatttaagttatatttttttgttgagtcaaatatgtataatgtaagatgttaaaaagataattaagaaaaaagtaaaaaactgtaaacgggcctaaatgggccaatctaagctgaatttttttggggatccgactatgagatggatcaaaataaacgggtctggataccttcataacgggtcgggtctgatgaggaaagagagtgattttttcgatcgccgagagatgaaaggtcagtgctttgtcgtcttctaccgtctccggaccaaagagctcaagtcacgcagctaacaaagtacagatttttcccttgtttcgattgcaaaagcgcataagcttcgtacttgccaaatctgaagtcaaaccaaatacactggtcaaacaaaaagtcgacgagccccagattccgatagcaaaaccagtcggacccaggatttcgatgagccacactggttagcttccgacccaattcacgtcctaggtcaccgagaacgtggtatgtgttttctaaggctttcgaaagggtttaggttatagtttagctttagctaagggattgggttttgttgtgcgtacttattgttcgatgaaacttctgaaagagttttggtcaattgataatgaacaaagtagaaaactttatctccttaaaagtagtgacatgggagctaattctcctgtttgtgtttcgcagaaactgtgtgagcatttgcagtttctctcttgtggttgagctaaataaaaatcattgtacattttcaagagctaattatttctgatcattgttatgtgatactttcttttgcagacttctttgcatgttttggttttgttgagtcggatgagttttatttttggcttctctctcgaccagtagcagaaagct

SEQ ID NO: 2490 - DNA, 3000 bp, Unknown
  misc_feature (1)..( 3000): cDNA_ID_3068160_gDNA_ID_1620547_Annot_ID_160188 3000 nt of promoter + ATG
tgattcctatgtgcctaaattcgaggctgagcttgcacagttttgcgagaagttggtgtgtaatgcttgtcatacttttttttttcttttctttagagtttgattcttctctatgctaagatttggaattggttacaggtgaatgatcttgataggaaagttaggcgtgggcgagaacgtcttgcacaagaagttgaaccggttccaccaccttctctatcagcagagaaagctgaacaattgtctgtcttggaggagaaagttaagaaccttttggaacaagtggaagcacttggtgaagaaggcaaagtggatgaagctgaagcgctaatgaggaaggtactatttgtttaccattctctaaaaaaagaagacttttgaagtcttaacaaatcatactgaaacttgaaatatggtgttctgcttgattcctccgtatttgcagttataccttatgtgtcacctttattatgatcataaatttagtacattgagtgcttatcatttggaaactctggtaggtggaagggctaaatgctgagaagacagtgttgttacaacgaccaactgacaaggtactcgcgatggctcaggagaagaagatggcattgtgtgaggtttgtggttcatttcttgtggctaatgatgcagtagaaagaacacagtctcatgtcactggaaagcaacatgttggctatggcttggttcgggattttattgctgaacaaaaagtaagtctcagaactaatacttgaatcttgtttcatttgagctgtcattccttataaaatggggatagtgatgctttgtttactttttctattctaggctgctaaagataaaggaaaggaagaagaaagactagtaagaggaaaagaagcagatgataagaggaaaccaagggagaaggaaagcgagagtaagaggagtggttctagtgatagagaaagatatcgtgatcgagaccgaaacagagatggtgacagacacagagaccgtggtagagattatagaaagccttatgacaggagatcgaggagtgggagagaggaccgagatcgaagcaggtcacgatctcctcatggaaggtctggtcacagaagggtgtcgagaagccccattcgccaatactagtttgagaccctcgtggaaggtctggtcacgaaagggtgttgagaagcaccatttgccagtactagtttgagataaggtgttgtcactatgtcttggggccaggaactttgcaaattaatgaggtagacaatgtgataccccctttggtttcataagcatgtgttgtcttttggaacttccttgttaaaatttatggataaaatttgtctttctaccggatcacagctattctaagagtttgagaccttaccgattctccttcatcggttatttgttaagaggtcaaaagcgttgaggtaggtattacccgtaaaacttttacattttcattgtatttctcgatacttgagatgctatagcgtcattttattttatttttgtcttttggtacaccatttcaagtttgatatacctttctgatttaaagaatacagaatcgggattgttgggatcgaatgacacgaatctatttgaggtaacaaatatacaacagaagtcatccttaatagaagttttgggttttgaatttggtttattttcttcgagttctctgtctgcacttaggtgtatacacagaaggaatgataatctttggctttggggttaggtataactgttgcatttcttggaatctagccttcaatggattggtctgcatgatatctgatttctatcgggtaaactcactccgttgtttatgaacttttaataatcttttccaaactccaaggctagagcattatagtaaaacagtaggtaaggtattctctggtgggagcaagaactgttttggtggtctgtgttgaggttccaagaacagctgtgttgttggtctaccacaaagccggatggcgtctttgtaatcctggcttaaatcctgatctaaacatttacaactttgtctttttttttttttttttttttgccgatttctcctctacagtctatttgattcaaacaagagctcagcatatgaaaccattgtttcggggctcctggtttgcagctatagataagcttcttttatatggcaaacttgtaagaatgacgcaacatttgtcaaaataaaagttgttgatgagagttgaagagcatgcaatagttggatatgaagagcatgcaatagttggataccaatgataatctttgacggtttcgttgggatcagattaaaaaagttcacgttttttgtagcccaattttctaatgcattgatcagcgggttaacaaccatttattcaatgaaactttatcgttttggcatatatatacaaaaaaaaactttaaatcatttaactaaaattgaatttcttacactaacagttcaaatctggccaaaaccatcaaatctgcaaacagaaccacttgtacgtggagggataaaacgaaaattagttgtttggcgtacttacacataattttgaatcgtgcctataatgacatgaggttaactaaaatttgaatttcttaccataccaatttaactccggctaaaactatcaaatcggaaaacaatgtgaaagaagtcaacaaattttaattatggaaatttcttctgcagttaaacgtcatcgttttacataatgcgtagcttaattaatgagttgagtgagtcaacggaagagaagaagaccaaattagtcttaaactcgtttaggtaacagtttggtttaaagcacagaaacagcccttcaataagtttcaatgtcataaaaccaaaaaaaaaaaaaatagtgaagacgacgaacctttgaggacactcttcggtttctccaatccttcatatggttcgtaaagatctctttttctctctttttctccatttttcaattcaattttggctgatctaattttggatttcagatg

SEQ ID NO: 2491 - DNA, 3000 bp, Unknown
  misc_feature (1)..( 3000): cDNA_ID_2162791_gDNA_ID_1620547_Annot_ID_160193 3000 nt of promoter + ATG
tgcagggaatattaagagttatcagatcctcacacaatgattgaaagacatttcccaaaacagctagtctattattaccctacaagtatgtgcagacccttaaggcaacaaatagcatggtatttggtttcacggaagccttataactatcgaaaaccaagagtttttaaatccttcaggtcagaaatacttggttcttacaccacaactcttaacccgcaggtgcaaacttataattcatgtattttctaatagccaaactacgagctttacattgaattccatctaaaggaaagaaccattcaaaagatgtatatctattctacgtaagaataaagctagccgacgaatattgcttaaacttaacctcggaagtaaaagaccactcttaccttgagagaaagaacaagaagaatgtagatattgagaacaaaacttgccagcaatgcaattgtagtgtgagaactcagaagaagctcaagggtattctcagaattccctaaagaaatgttcttggtgattatcccatcagctctaagtctatcaagagacaactccgtccagacttgtaaacccacaaagctcaaagctgttgttgccacggaaatgtgcaaatatgttatccccattagaaactattatagccttctcactccgaattaacccacagattctcatttagcatgacgtcccctgcatcaacatgattttgcataagctaagcaaaccaaaagcttatgtaagttagagaattgagttaaaaagtttcaatttttttataacgtaggccaatcgaagcaagtaaaattcaaaaccatgatcacgaagttcataggatactgcaattgagagagatatgtattaaataagtaaaattgaagaaactgggaaattcaattaaccaaaggagagagatgagctgaaagattgaggtcaatagaagaaaatatgaagataatggtggattctgcagagagcgaaatggatcaaaacctgagttcgcgattggaaaattctcctcagcaccggcaattgcgtcctctttttgtctctctttctcgatggacaaggaaaaatgaagaatataaaatgcggaagaaaaaaactcaaaataataaaccatgcggtaaataaaaagttacttaaatttgacgatgccgacacgaacgagttctatggtcaccgaagtggttccaaagaagtaaagctataaagagcgcgctttgccaaacagaggtgaaaaaaaaacggtagcaaaattctctaatagtcttgtcccacaaccttcttctggttgctgagacctatatcaacatttccagcacattcaaaatcagttacttggtatcaatttgatgtatcatccccttataaaaccgagtttgaacatcgagaatgagcatcgaatgtatcgttgatcatggctctgtccagcatgtttgataacaccaccatagtccataggtataatgatagaaaatcgtcctagcagactctttttctccataaataatatccaaataacttcaactatatcatagttgctacgatattcatatccagaatccgatatcaagaatttgggaaacaaaatccgaacctatgatatgaaagtagtcaaacgtacatagatcattgatgtaacgaaaaaagtcaaaatcccgaacacataggaccgtgggaaatgtcattctccttgattcaccaaaggacaccttaaagttcacaaattcactcacttacttccattccatctcaaacaatccaaaataaaacactctagtcaacgtttatgtgacgaatattgttacgctcatcctctttaatctttggaatcaccactttcaacacaccattcttcatttccgccttaatctcatcagtcttgtatactttctccggtaactcaatcctactcgtaaacctccgtccatctccagaaacatcttctccctcctctgtttccccttctcctctaatcaccaatgtgttctgttccaaagccaatttcacatcctctctgcttagtcccggcatatctatccttagatgcaacgcgtcgtctttctctttcacgttccaaccacgtctaactccagaagctcccattccacgagtagctgataccaaagggatttcgcttacctggtccatgaaattcagcatctggctcaagcttctcgttggagtaaacggatcgagtatatctgtttgaaaaaacaaccaaattttcagattcaacagatctccaaaacaaagttagatgtactctatacataaatcactaaacatgtatcaaattgggaaaatctatagcgaaattggacggaggaaccatggatttacgtgagaagaaatcgccgccgtggcgagaaacatgtcggtttgagtgatggttcctatcgacaccgtcttcatagtttctggcggcgttggtattgaagaggcgagatgaagcagccaccggacgaacggctcttaaggcgcgagggacggcgacggtggaagaagagagaagtctcctgagagctaaagccgatgatgacgccatttttggaaagagaagaagcttagaattagcaagtgattaattattttcaagctcgatgagatattttttatactctttgaacgaaaaaaaagctgttagagaaaggtttatatagaacagagagtagaagaagctgctagaggctagagagtcgcttaaggatggttctagaactgcgtggtctccaagtaaaataaagaaaaataaagaaaaagaaagaagaaaactttttccgtgacggcccatcactttggggcccagatttgtaaatttatcttccgtttactttggtttggttttaaagtcgaatttgaaagtcggtttagatcgatttggtttagtttcttcttcagtgtatctgcgaaatcagaggatcttcttctcttcaacatcatcatcgtcgaagctgaagagaatctaaggtaaatcgggtgatcggatcaaggatg

SEQ ID NO: 2492 - DNA, 3000 bp, Unknown
  misc_feature (1)..( 3000): cDNA_ID_2162798_gDNA_ID_1620547_Annot_ID_160195 3000 nt of promoter + ATG
gatcgccactagcaaatacatcctcaaccgtcgagcttaactgagttaaccctgcagcatcctgtacatataccaaaaagaagagaatcaattgcagatctacccccaagtgtccacataatggatcacaaaatcactatgaatactaacctgtagtgttttgtaggcagcctccattctctgtttgacattgtccactctagcaagcgcagctatacaatctgctgaagaaccctctgcctgcagagtaccgaattcgataagagcacaagtttcaggaatttgatataatctaattttcgagaagagatccaaacaaaatctcaggaatcagcacaaatgcgtaccttcttgagcttctggaggattccagcaacagaaccacgcagagacacagcatcatcacggagacgcaacacgtctcgtgtggcacgaggaacacggaggagagcaccaccgctctgctcttcaagagaagctccgatctcctcggaggcaatctgaagcttcatttccagatccacaagatgtttctcgagtgaatcctgtgggtgacgcgcctggcacgacgagttaacccatcgcttcgcatcgaacttctcatctgagaatggacctagatccagcatcatccttgatccgatcacccgatttaccttagattctcttcagcttcgacgatgatgatgttgaagagaagaagatcctctgatttcgcagatacactgaagaagaaactaaaccaaatcgatctaaaccgactttcaaattcgactttaaaaccaaaccaaagtaaacggaagataaatttacaaatctgggccccaaagtgatgggccgtcacggaaaaagttttcttctttctttttctttatttttctttattttacttggagaccacgcagttctagaaccatccttaagcgactctctagcctctagcagcttcttctactctctgttctatataaacctttctctaacagcttttttttcgttcaaagagtataaaaaatatctcatcgagcttgaaaataattaatcacttgctaattctaagcttcttctctttccaaaaatggcgtcatcatcggctttagctctcaggagacttctctcttcttccaccgtcgccgtccctcgcgccttaagagccgttcgtccggtggctgcttcatctcgcctcttcaataccaacgccgccagaaactatgaagacggtgtcgataggaaccatcactcaaaccgacatgtttctcgccacggcggcgatttcttctcacgtaaatccatggttcctccgtccaatttcgctatagattttcccaatttgatacatgtttagtgatttatgtatagagtacatctaactttgttttggagatctgttgaatctgaaaatttggttgttttttcaaacagatatactcgatccgtttactccaacgagaagcttgagccagatgctgaatttcatggaccaggtaagcgaaatccctttggtatcagctactcgtggaatgggagcttctggagttagacgtggttggaacgtgaaagagaaagacgacgcgttgcatctaaggatagatatgccgggactaagcagagaggatgtgaaattggctttggaacagaacacattggtgattagaggagaaggggaaacagaggagggagaagatgtttctggagatggacggaggtttacgagtaggattgagttaccggagaaagtatacaagactgatgagattaaggcggaaatgaagaatggtgtgttgaaagtggtgattccaaagattaaagaggatgagcgtaacaatattcgtcacataaacgttgactagagtgttttattttggattgtttgagatggaatggaagtaagtgagtgaatttgtgaactttaaggtgtcctttggtgaatcaaggagaatgacatttcccacggtcctatgtgttcgggattttgacttttttcgttacatcaatgatctatgtacgtttgactactttcatatcataggttcggattttgtttcccaaattcttgatatcggattctggatatgaatatcgtagcaactatgatatagttgaagttatttggatattatttatggagaaaaagagtctgctaggacgattttctatcattatacctatggactatggtggtgttatcaaacatgctggacagagccatgatcaacgatacattcgatgctcattctcgatgttcaaactcggttttataaggggatgatacatcaaattgataccaagtaactgattttgaatgtgctggaaatgttgatataggtctcagcaaccagaagaaggttgtgggacaagactattagagaattttgctaccgtttttttttcacctctgtttggcaaagcgcgctctttatagctttacttctttggaaccacttcggtgaccatagaactcgttcgtgtcggcatcgtcaaatttaagtaactttttatttaccgcatggtttattattttgagtttttttcttccgcattttatattcttcatttttccttgtccatcgagaaagagagacaaaaagaggacgcaattgccggtgctgaggagaattttccaatcgcgaactcaggttttgatccatttcgctctctgcagaatccaccattatcttcatattttcttctattgacctcaatctttcagctcatctctctcctttggttaattgaatttcccagtttcttcaattttacttatttaatacatatctctctcaattgcagtatcctatgaacttcgtgatcatggttttgaattttacttgcttcgattggcctacgttataaaaaaattgaaactttttaactcaattctctaacttacataagcttttggtttgcttagcttatgcaaaatcatgttgatgcaggggacgtcatgctaaatgagaatctgtgggttaattcggagtgagaaggctataatagtttcta

SEQ ID NO: 2493 - DNA, 3000 bp, Unknown
  misc_feature (1)..( 3000): cDNA_ID_2990998_gDNA_ID_1620547_Annot_ID_160194 3000 nt of promoter + ATG
gatttgagtgtttcttgaagcatagagatatactgcaacattatgtcatctaatgcaagtatcagctcgtctgcctctgaccctccagtaaagccaatacacctttcaactgcagcttcaagaagaacaacaacttggggaatagactcttccatcctacgcactgtttcactgagttcaattccttgagccccaacaccacgagtaacagcccctctcagatccaccactgcaatctcagaggataaaatagcacgttccatcttcccatacctaaagcatgatcaaaccttatgtcacaaacagccttgaagaaccacgacccaaaaaagtttcatcaaaaaaatgggacaatccataaatactagaaatggatacaagacatgggggaagagaagtacacaacatgaaaacttacttttgcttaaacgattcaaagggtgagtacacggccttcagcgtatctattaagatcctaagttcagattccgcaaacaggtgctgaatatttcttgcaaaggaaccagttacgttgtgcagttcaatcagagcctcaagatgcttggtctgaatattaatacccttgggcaagtctccagataatagatccatcacacctgttcaaggaaaacatcagaattgtcagtattctcctaaatacacaaaatacagatataagtcaattgaagataatcgtgcattgtctggaaaatttccagtgactaaatgaaaaatgtaacaaataagttgttgttcaaacttcctgcaagtctctcttgcatattgacagattcatgacatcggccactatgcacaaaaattacaaacttaacaagaacagccaaaaactttagctcatgtaaaggcagaaaaaagtgatactcttcttacatctatctacccaaacatgaggatggtagagtagaaccactaaagaagcaacgcaatcccaattcagctgggtaaaaagactagactaagaaggaaacctaataatcaaactgtactgacatcatatctaacctttggcgagtgcttttgtttcaggaacagcatctccagttgcaaggttaagacgagaaacaaaactagcccccagtactcccatggtctcaaccaacagctttgggacgagagtcatgtagtcatcagggaaggcaaccatacacctaaacaatcatgaaagcaaaaacgtacaacagtgattgatacttaaagctgcaatcacctaaagatctgacatactgtcactggaagggcccggaaaatatatacagtttactgtaaataaaagtaaaacatttaccatttccactcttgctcaagatagagtagcaactcgtcgtaaaagcttgtcagccaactggcaaatgatgtctgagatgatgtcgactgaaactcatcgccgctagacaacctttgactttcacttctctcattggcaagcttgtttgccctttgctttgtgtcaaaatcttcccagagttgtttaatcggctttagacggacttttgaatattgcaactccagagacttgaatctcccaatccggatgagaattactcgcaaatcttgggcgacatcaacctgccaaatttggggaaaggcttttcagtccaataatggcaacagagacattacaacctaaagtagttgggttctctagatatacaggttccaaccttgtgatatgttaatgcatcagtaagacgtggctgcaccatcgcctccagcctatcttccaatacctctagttgctttctcacattagcaaattctgcaacctgttgacaaaaattggactttaagtggtgacggaaaaagacttaaatcctcagagtactgaagctgacataaaactacctctccaacagcagacaggcaatttcgcatgctagcaagagtttctgcagcacgaggaagatcgccactagcaaatacatcctcaaccgtcgagcttaactgagttaaccctgcagcatcctgtacatataccaaaaagaagagaatcaattgcagatctacccccaagtgtccacataatggatcacaaaatcactatgaatactaacctgtagtgttttgtaggcagcctccattctctgtttgacattgtccactctagcaagcgcagctatacaatctgctgaagaaccctctgcctgcagagtaccgaattcgataagagcacaagtttcaggaatttgatataatctaattttcgagaagagatccaaacaaaatctcaggaatcagcacaaatgcgtaccttcttgagcttctggaggattccagcaacagaaccacgcagagacacagcatcatcacggagacgcaacacgtctcgtgtggcacgaggaacacggaggagagcaccaccgctctgctcttcaagagaagctccgatctcctcggaggcaatctgaagcttcatttccagatccacaagatgtttctcgagtgaatcctgtgggtgacgcgcctggcacgacgagttaacccatcgcttcgcatcgaacttctcatctgagaatggacctagatccagcatcatccttgatccgatcacccgatttaccttagattctcttcagcttcgacgatgatgatgttgaagagaagaagatcctctgatttcgcagatacactgaagaagaaactaaaccaaatcgatctaaaccgactttcaaattcgactttaaaaccaaaccaaagtaaacggaagataaatttacaaatctgggccccaaagtgatgggccgtcacggaaaaagttttcttctttctttttctttatttttctttattttacttggagaccacgcagttctagaaccatccttaagcgactctctagcctctagcagcttcttctactctctgttctatataaacctttctctaacagcttttttttcgttcaaagagtataaaaaatatctcatcgagcttgaaaataattaatcacttgctaattctaagcttcttctctttccaaaa

SEQ ID NO: 2494 - DNA, 3000 bp, Unknown
  misc_feature (1)..( 3000): cDNA_ID_2162779_gDNA_ID_1620547_Annot_ID_160190 3000 nt of promoter + ATG
gtttttcgcctctgttcacctctctggttacacagcgcttttcatctcatggctcgccaatttcaaactcatactcttctccttcaatcaaggcccactttttccacttccctcaaatctcacccgattcatctgcttcgcttgcttccccatcaagcttcaacaaaaccctaagcgccgagactatttcttccaatgggaataccccattgaagttttgtttagtaaccaattcgtgactaaagttgtaatcttgagtgtagtgttacatatgtataatcacatacaacatatatatcccattgtgctatttgttctctatccactccatctatacttggtacttgagattctcttaaagctcttcaacgctttcttctctatagctcttgattgcgaactcgagccacagctgaatgaaccatacttggcctattctcttcgagacttctggggtcactggtggacactcatgctcccgacgatcctcctgccagacgtctacgctaggatgcggcgaatcactgaagggaaaatgaactccgagaatgctctgtacttgggagtttttgtcacattccttgtctccggtgcacttcacgagtttctcttcttctatataactcgtgagcggcctactggagaggttactctgttcttcgtgttacatggggtttgcattgtggcgtacgacgccaggttaaagaagaagattgcgcggtggatagggtttgaattttgcccgtgtttgatattacaagtgatggttatggggtttgtcgttgtgactgctggttggttgtttttccctcctcttgtcaggaccggcaagattcagagattcgctaacgaagccttgctcttcattggtttcgtgcgcaacttgtttaacgaatccttgttcttcatgcgtaagttttttaacgaagccttgttcttcactggtttcgtcatgcgcaagttgtttaacggagccttgtttttcattggtttcgtcaagctcaagttgtttaacgaatcctccttgttcttcatcatgcgcaagttgtttaacgaagccatgttcttcattggtttcgtcatacgcaagttgtttaacgaagccatgttcttcattggtttcgtcaagctcaagttgtttacttttggctggtgataaattgctaaatcatgatataagggatttaagtgtttctgtagctcgattatcatatcatctctctctgtttcaaaacaattgtggctttacaatttcaatgtgatttatttatttatataagtttactagtttacccttgaatggtaaaaagatttcttattttgtgtgagatgcaaaacgaaggctctaaatggcctttgaattcagctgaattcaacggtaaaggtaagcatctcaccttctacaatatgaaaagcaaagataataagcccttcttacaatctagggatgtgttaaaaaaccagagatgaacaaggcttcgttaaacaactcgcgcatgatgaagaacaaggattcactatgttatcgcgtcaaggttcttgctgctactgtatgatttatgtgtcacaaagcttaaacatgttttttttttttttgctaatatcatttttatttggaatgcatgttctcttttggtgtatgcaactatgtaaagaacacatcaaaatactcattggtccttgctaaaggtttagagacgttccaatggctctttgttttagggaatgcaaggtgatcacgtatacatatgtgaaataagagttaaaacgagtaatgtatcttgttcttgttttcacacaaatactaagtcattggaacagagcattctccgtacgtctttagtacatttaattaagggtttgtttgacaagtctttagtacattgatttttctagctagtaaagtctatacgattatggaaacgttttgaagtcactataatattcaaaacaaaacgttcccatagtcacaaagtttaggacgggtgatgattagtaggcatgtccattttaagacgggttgaatttcgtgaacttttattccgaagtcaattcttagccaaactagttaacttttacgcgtttcaaaatcaacctttatccaaattagtgatagtttgaaaagtgaatttaactacaaatgttttatgaattcattttgtaacctatcttcagtcaaattagtgaatatttatttattttgccaaagtcaactcttagcttaattaatgaatacttgaaaagtaaatttggctacattttcatacaatttttttatggctacatgaatttaacccaatctgaattccatctcgtaacatgaaattttcatttcgttatggccattaatggtgacatagaccgcacccaaaaccgtaccgcaacagtgctgtaacagtatcaaaatctttacatatacatatgtatctatatattttcgttactatttgaaccgcaccgcacttctcctgcaccgcaaaacgcagccaccattcaaatcaataggtatcaaaaataattcaggttgtgttttttactattcggattgcccgtttctgatttttattcgctagtatctgttctaatatctgaaataaatgtatttagcgatcaatatttttctttcccctataatataaatcaatatttttgttttctaaaataataaaacttaaatttgtgattgccttatgtctatgaatttattaaaaatttaatttcgttaagtgttttgttttttcgtgatattattttttagttcaactttttcttgatatgattattcattatttatatagggaatagagttttttattttttattttgcaatcatagagttttaccatagacgaacgccttttattcgtcgtggcgaacgaaaccctaatcatcacttctccacttttgttcgtcatcctcttcaaaatttcttcaatttgattctgcaatttcctttatctctctctggattaagtttcaatttcttcttagcccgccatg

SEQ ID NO: 2495 - DNA, 3000 bp, Unknown
  misc_feature (1)..( 3000): cDNA_ID_3068166_gDNA_ID_1620547_Annot_ID_160181 3000 nt of promoter + ATG
aaactctcaaaatacgaaagcgcagcgatccaaccatcgtccattctatggtcacaaatactcaactcctcaagcacttcacaacattgcccaattgctttaatcccatcaaagctaccttcacaaccactaagctcaagcttcaccaaactcctacatccttgtgctaagaatgttaatcctatatccgacacagatgaactatacaatccgtctacgcttcctaccaatctcaatcccttcagattcttacacgcagcaatgccatgcaagagattatcattacacttatgcaattctaactcttgcaaatcagagcagtctccagctaaactcaataatcccaattcagaagcgttaatcactttaaggttaagcaaatcaaaactctctctgcttaatatcctaagccctctatcaattacgtcactgtgcaatagattctcctcaagaaactcccaattcgacgagtctgaagataaatgaaaagaaatcgacttgtgacagaacaaaataccggaattgacccgcggattcatacacgcgttcaccaaatcgacatgcgtgagattagggaatctcgtggtgagtctctcagacaagagaaaatcaaaatcaagaagctttagactccgtaaacgttgtccctgaagattcaaccagcgtttgcagacgagtgagacgtcgttgctctgtgattcaggaagcttctcgatgatcttgaggagaagagaatcggataaagagagagttgaatcgatttctgaaggtttgattgaattgaaaggcttctcatttttgatgtggttttggacatgcttatcaaattcagacatttcttgtttgctccttcagctgtatatcttctttaactgaatttgcgcgtctttattgttgttgtcttaacccagaaatagtggtcttctttggacaaggactagaaatcaactcttcgtcttcgagttttttcggtttggttagttccggtttaggatatttggttatggaagagactggttctgatttaaaccgaaaaactataaagaataaacctagattcggttctcccagtcaaattcgtcagcttaatcaatcacctctttagtttcccataattctcaatttgatacatataacccccatcctcaattatgctactttcgtttattaatgatcgatttggttcttcatatgtataaacttttgaatcagaaacaaaatgacattactttcttacaaaatttgtcacaaacaaaaatataaaataaaaccctagtttatactcttccatattgatgatgaaatcttcgtagtcctgatcagtgaatctcttctcttccattaatgaactttggtatggagaatgcttttccagtgatcaatgacggcctttgactcagacctgattttagggttaccgttcttagagagaaatagaagaacgcgtaaaccgtcggttttggtaataagacgagcgtttagaggtaaggttcgcatatgtctaaggatctcaacgcattgtatggcttccggagagactatgtaaaaccctttgtctcttgcaacatgagcggctcttgtggcggtgcttatcaattcttcaagttgcttcgtcttgatcgttcttctttttctgtttcttctcgtcttcacatgatcgttcacacgtggtggtggtgggagatcatcggaaaaagccattgtttgagagaaaaacaacgcagagaaaaagtacttaagaaactagagactgagagagaaaattaaagagcgagattgatgaacaatgtgagagatgaggactacctcgttgattatatagacatatttaaagtttccaattttcggaaaaaggaaattccaatttttaatttatttttttgtattcaatctacgtcggtttatttgagatcgccacatatttcctttttctgtaataaataacaaggaaaaccaaatatatttttctttaaaaaaaaaaaaacttatgttctgatcaacaaattacatgtgtttgcttgggggccaagtttaaaccccatatactacacctttgggtttcggatgcagaagacttcgaaatcggtctcattgtcctatgttgattatagtgattgatgaagataagaagaagaaaacgtaaagagctttattgcttttactttatgtaatggttctactgtatatatatacagaggaagtgattattgttcactgcttttatcgagaaaacttaacaaaaacccactcacgatccggcgagctattagattaggaatttgtcggcacaaacgtccgtcgatataagctacaatacctggagccacgaaattcccaatactagctttccacttgattttcttcttcttactgtcactaactactactggtaccattgcagtattggacctgtaatgaccttagtggcttgctgtttcagtaagcgaattgcaaagctgacgagtaaatgttcacacaatgtcataaacgttggcccgatcttccattcctcatcatattgagagataatatgttcacatgactcagggtccatccaaatcaaacaaagagcttatcctaaattgaaggtaaacctctatttggtgagtttccaaaatgagcaaacctctcgtggtaagtctctcagacaagagaaaatcgaaatcaagaacctttagacgtacttgtccctgaagaaattgggttatttggttatgaaagaaattggttctgatttaaaccggaaaaagaaatttggttcggtttggtttagagagagaagaaataaactaaaatatttcccgtgaatatgagcgagcaatcaatgagaacagcttttcactcaaaagcacactcccccatcaaagtttcttgcttttcgtctctttccactgttttagattttcatttcaatcatcttttgtatctttatcagcttttatatatgcttcttcttacagatctctcagactctctcttcttcttcttcaaactataatg

SEQ ID NO: 2496 - DNA, 3000 bp, Unknown
  misc_feature (1)..( 3000): cDNA_ID_2162766_gDNA_ID_1620547_Annot_ID_160186 3000 nt of promoter + ATG
gtctgcaaacgctggttgaatcttcagggacaacgtttacggagtctaaagcttcttgattttgattttctcttgtctgagagactcaccacgagattccctaatctcacgcatgtcgatttggtgaacgcgtgtatgaatccgcgggtcaattccggtattttgttctgtcacaagtcgatttcttttcatttatcttcagactcgtcgaattgggagtttcttgaggagaatctattgcacagtgacgtaattgatagagggcttaggatattaagcagagagagttttgatttgcttaaccttaaagtgattaacgcttctgaattgggattattgagtttagctggagactgctctgatttgcaagagttagaattgcataagtgtaatgataatctcttgcatggcattgctgcgtgtaagaatctgaagggattgagattggtaggaagcgtagacggattgtatagttcatctgtgtcggatataggattaacattcttagcacaaggatgtaggagtttggtgaagcttgagcttagtggttgtgaaggtagctttgatgggattaaagcaattgggcaatgttgtgaagtgcttgaggagttgagtatttgtgaccatagaatggacgatggttggatcgctgcgctttcgtattttgagagtttgaagatattgaggatttcgtcttgtagaaagatagacgctagtcctggaccggaaaagttgttgcggtcttgtcctgctatggagagtttgcagctcaagaggtgttgtttgaatgacaaggaggggataaaagctttgtttaaagtgtgtgatggagcaacagaggttaatattcaggattgttggggactgagtgatgattgtttcagtttggctaaagctttcaggtaacttgtcctttttgcttcattggtcttctcggtgggcttttgaatcatcatttttgttctttgcaggagggtgaggtttctgtctttggaaggatgctcagttttaacatcaggaggtttagagtcggtgattttacattgggaagagcttgagagtatgagagtagtgtcatgtaagagcataaaagacagcgaaatttcaccagcgctctcgtctttgttctcacttctcaaagaactaacttggagaccagacactaggtctcatctctcgtcgagtcttgaaggtgccgggattggaattagaggcagcaaattcttcaagaagagtgttttacattgaacatatgttgtgtaagtgcaaactcttagtttattatcttcttccctggggcattactactctctcttgtaaaataacacatcccaaactcttatgtatagcaatgtatagtattaaaactcttgcgttcacaatactaaatttcaattttagctgattagagattttaaaaaaaaaattgtaaggtttgtagtaataaatctttttatacaagagaaataccctaaaataccacactattaagttttagttccaaaagtatcatcattagttttttttcttcgaataatactacaactttttgtataaaaataattgttcaaccaaaatatattacaaataaaatataagatattttggatttcctattttcaattttgggtttatatttttactatttaaaagagattataattcattttaatattcaatgtgtggtaatattgggaaaaaataatattagtgatagtatttttaaaacaaaaacttaaaaatgtggtatgtttgagaattgctcttatacagctagtgttgcagtcatcgcaaatcaaccacaatagtaaagaagtaccatataagttatatttgaaaactctcaacctaatgcaacgaattataaacacatgatattctcaacatgatccgtgacagccgatattcttgctgacgacgttctagtctgaatttgaactcttctacgtctatttcgttttggtagtaatagtaaacgtgtgttgcatacttactccaatgatggagtataacgaattcatcaccagccaccaggatgagtgacatccgcaaatgtgatcggactaattaaaccttgaagcatgccagaaaaagtaaccttggaccaatcttgtttctcggcatcctccataactcacatatccgcatcctcgttgatcatgttattgcgaaatatccatgctaacttcccttggtagtttataagagtggaacctctatggctaatcgttatgttattgggagtctggacattgattaaatatctcagacctaacatcgaaaactcaccaaaacacaactaccgtccggatccttttctgttgctttgtaatagattgccccgttgatgcaaactgcattatcgaatggaaagtgacttccaatgccgcattgaaaattctcccatttctttttgggatctccgaatgtaagacttctatgcatataatttacacattttaaaaggtttgtttgttaataataatacccacgatctacgaatactgtatattgtccttttctaattcccacacgttgccttaccgaagtgtgatattatctaaaataggtgtaatgtaattatcataaatatacaaattaaatttttgtaaagaaaaaaatcaattaatatttttcttatcttaaatccgcatattaagctaatcctaatttaataattaacaacataattcaatgttttaagggtaaagtatagtagtagaccattttacacaatttaagagatgtgcacaacactatctttgtctcattctaagtcaaaagtcaacttaaaaatcccaccgtgattcccattttcttttattttagcccaaaaaacaaattaataaaaaattcgaaacactctctttttctctttcgttatgtctctctctctctctctccatctctttcaatgtatccgttagaacagttcgtaatccgccgctaaatcaaaccagcgagagagatagatccaacgtgaagaagaaatcgaaaacg

SEQ ID NO: 2497 - DNA, 35 bp, Unknown
  misc_feature (1)..( 35): cDNA_ID_3068222_gDNA_ID_1620548_Annot_ID_160201 3000 nt of promoter + ATG
tctcatcaatcatctcaagaaggaagaagaagatg

SEQ ID NO: 2498 - DNA, 3000 bp, Unknown
  misc_feature (1)..( 3000): cDNA_ID_3068204_gDNA_ID_1620548_Annot_ID_160212 3000 nt of promoter + ATG
aaaatcgaaacaaacgccatggctgaatcggaacctgaactgaaccccacaactgaactggaacctgaatcaaaccccagtactgcattggaaactgaatcaatccccaaagctgaactggaatccgaacctgatgctatacctgatccaaaacctgaaaccgaaccagagaccaagggtgagaaagctggtgagtaaggtagcagccggggaaaggtgtccatactgttggggacatgtggaaacagatgaatataaaattgcttagtaagttgtgtggtttgtggctacctgtaacgtgtgaggatttgtgttttttggttttgtgttgcattcatgcacatgcctatgcctgccttgaggacgacgacgacccttttgacatgtccccgatttttgtctattcattttaccctattttgtttttgttggtgctactcacaccaaaaacagcacatttgttctctgtttctcctacttttttctatcttttatttaaaacaccgtccattccaataaacaatgtttttgtaattcttccccatctcttagctttcctcgttcgtctctacgttattagtagatctcaagtatcaccataacaaatttgtggttatttgaacaattaactccttcgcgcataacttaactgatatttggcttcttctagtatatccttccatgtttgcacttcccttgtctaattacaagatatggaaatggtggacaacaaatattagttgtgaatcaagaaaatttatcaaatggctgatgtgataagtatagaaaatcttattcatgattaacaaacttgtaagttgtaaactattaatgagtcaacattatattccagatttattttggaaatatgcatgtgtgagctgtaaacgatagaattaccatttaaaaacgatagaaagataagaaaaatattttatcatttaaattttcagtgtaggtcaaaacttaactatggttgaataaccatatttacaaataatgacaaagtaaccacagttaagtaaccatagttaaataaccacgtttaattaaccatggtcaagtaactatagttaagcaattatgggtaaaactggtataataaagtaactttattatttttgaattcaaagaggataattagtacctaaatatattgtttacatttaatttataacctaataatatataattagtctaaatctaataaattcaaaaacagacatgtgtaagttgtagaccacagattaagaagaaaataatttattttcatgtttataccactcttaacctactgagtcaaaacttaaccatggttaacttaaccatgattagtaaattttggatttttactttgaacaacttaataaatttcacacccaaatacattgtttttctcacattatatatttgaggtgttctcaagagagaaaaaaaaaaaaggaaaaaaaactaatatcaaagagcagggtttgtgagggtgtatctgaaaaaaaataaagtttggttgattcaaaaaatattcttatcctcggagttgcgatccaacgattggtatgttttctcctattttcatggtttcttcttctctgtttactttgtgccctttcgctttctcgctttatcactttatactagagaaaattggttttagggctttgaaattgcagtgatctataagggttttatgggtttgtatcacacttttggtgtctctgtgatggcgaaatttgggtttgattttagggtagtggaatttgtaccgtttgtgtgtagatccgtttgaaatgtttttgaaatggttacaattttcgcgggtctcgtactggtttgattgattgcattgaatgaaatgtgcattaggtttttttttgggttcgtagtgattatgagatgcaaatggtattgggagttttgattgtgggtttggtgaattgtggtttaggttaggttagatagaatttgaagatctgtgatcgtaattgtgtttatttggctttgattggttttggttcatcatcagtgattatattgttgttagatttcgaggggaggcttcatttaaatctggatacacctattgttaagatgtttgattgcattagatgatagattctctagatctttcttttatgagccttgtgtatctctttaaccataggttaagtttggtgaattgtggtttagtttaggtttatctcttgttagatagagtttgaagatcgtagttgagtttttgtggctttgattggttttggttcttcatcagtgtttaaatgttgctagattttgagggtcttcattttaatctggatattagttattgttaagatgtttgattgcattggattgatagattctcaagatctttcttttatgatccttgtgtatctctattatattcagctgattgttgcggaatctgtattccgtggatacgcgcaccaatatgtattcaacgggttcacgggcaaatttgtttgtgttttatgtggcttggatatggtaatttcataatatatggccaaagagtggttctctttatgtgtttttaaatgtaatgttaccttaggaaggtcgaaccgggtttgtttagtaaaattcggggtccttctaccggttgagaataatgctaccggataagattgattttcttgagctaatgatttgcatttatggttttacccagttggactagatctgcatctatatcaaattttgggaccttgtagctagttaaacctcatgtggaaacaaatctaccgtttctaggaaaatgtgtgtactcttttaaaatcatcagattctactgaatctgttctctttaataataaacatgatatgcttatataaacattccactgaatctaatattttttatttgcttctttgattttgcattgagacaggtttggaacgttccgaggagtctgttgaagatcctcgattctaaaaagcttccagaggacaataatttgtgacggagtaactctcgaggac

SEQ ID NO: 2499 - DNA, 3000 bp, Unknown
  misc_feature (1)..( 3000): cDNA_ID_2048541_gDNA_ID_1620548_Annot_ID_160217 3000 nt of promoter + ATG
tcaagcttggtctctatgttttagaaaaaaagaaaaacttagagaagcaattgttatttatctcatcacaccaatataatttttggaaccaaattgttaaattaccaaatgtcccaaacttgtgatcaaatttagatgattatttttaaatgaacattaaagaaaaactattatatatatacacacccattatagacgtaactctactgcttccaacttttccctaatctttgttcttccggccaatcaaatgggtgataaacttcgattatccatcggaattttgggtattgtattctttactttttgtgtaatatacactaccacatgctcttttcttcgattttcaaactttttttcaacttttaaacttagttttcgctctaaaatgtgttttgtttgtaacatgatatctacacgaaatatatttgtatgagttttttttttccgggttcttaatacttatatatggccacttcacaggaaacggagcttctctgttgctatatacagctccaatgtacgtagatgaaaactttataaatcgcaaatttaatttgaataaccaagaaagtagactatgtactatatatgtagattaacattttctttctgtttatgtagagtaacattttcaagggtgtttaagaagaaaagcacagaggaattctcatgttttccttacgttatgacactctttaactgtttgatatatacttggtacggtttaccgattgtgagtcatctttgggagaatcttcctctcgtcaccattaatggagtcggcatccttctcgaatctatcttcattttcatatatttctactacgcatcaccaaaagaaaaggtaaagtattcattagaatcgtatggtactttttcattagggaaaataaaaactagtgacattgatccatatagaatataaactttgaaatagattaaggttggtgttacatttgttccggtgatcgttgggttcggcttaacgacagcaatctcagccttggtatttgacgaccatcgtcaccgaaaatcattcgtcggaagtgttggcctcgtggcttccatctctatgtatggttctcctctcgtcgttatggtaagccatataatcaaaccaactattacatactaggaatattttgtttactaaaaaaatatgaatgcgtgtgtgctaattaatgtgaatatttgagtgtgcgcagaagaaagtgatagagacaagaagtgtggaatacatgccgttttacttgtccttcttctcatttctggctagttccctttggttggcatatggcttactcagccatgatctctttcttgcggttcgtttttttcctaattcactcattttccataattaatagcagtacaaaaatactaaatgtggatttaaaaacttcttgctttgtggaccgaaaagagaaattgtcgaaaatctaaaaaaaaaacgttttcttatggattcttaaaatttagtcaatttttgcggtgatcgatcacaaactaatttgacgttaatcagttcatggtgtttcagtagttgaaatatttatcttaaagttgagaaatcaaaattcgagttctactatgatttcaatcatggttagccattgtagatgcttttaatatatagcaaaaaaaaaaagttttcacatattttgctaattaatcttgattttagtcgttcgacggttattaaagaaaactaatatgatgttacataaatcatttttttgttaatgcgtagaatactacaaaacttttttttttttctcgaaatggttagtggtctaagaaacgaaatataaagaattgttgagatttttttttttttttgagatttcatgtgcattgttttgatgatggcatatatcgaatgtttttttcttacatgtatagtcacctaatatggttgcgactccattgggaattctccaacttatcctctacttcaagtacaagaataagaaggatttagcaccaacaacaatggtgatcaccaaacgaaatgatcatgatgacaagaacaaagccacacttgagtttgttgttgacgttgatcgtaatagtgataccaatgagaagaattctaacaatgcctcatcgatctaatatctcggatgtgttttccccaaaactccttgtaaatccagagatattttatctaaacacctcatatgttgtacgtgctttcattaaataacgttacatcactctatacgttatggtggtgatgatattgttgatcatgtgaaaaataaaggtggaagtgctatgttttcctctgtatttatattataagatcaagtgtatatgtacacgaaagatcaatgtgttgacaaaaatggaaaaaagagttaccgaaacttaaattttttttgacgaatggagaattattgaaatacttttttttttgtgtaaaaatgttaataaagatgggtttaaagtttaaaccacaaaaaacaccattatggttttaatcaactcttcttgaattttgttttaattttacccctagacgtaatactgggctaataaaagcgtaaggcccattaatagttggttctattcataaagcccaataacgaagacgctcttaaaacaaaacgccgtttaaagaaaccgcgataaaacgcacatatggattctcccaaataaatccctatcaccaaatcttcttctcttctttatcttccccaacgcgaaaccctaatttctctgcagatttttcccaaatctcaggtaacatgatctcttttcttatttcggattctttcgtagtaatatatgaactttgctgctaattttttcatcctataacgtatttgaattcttcggctcgataatgattcttcataagcgtcaatttgtttgattttttgacgaatttgttgagatctgaaaattttgtgattcgtactactgtagctgcttctcgttcataaccttggttcgttgtgttatttgtagctctaagattcgttgtgagcaatg

SEQ ID NO: 2500 - DNA, 3000 bp, Unknown
  misc_feature (1)..( 3000): cDNA_ID_2048538_gDNA_ID_1620548_Annot_ID_160218 3000 nt of promoter + ATG
cttcctaaccgttcagagccaaaatgctttgcatcttaaccaaaatttagtaatttagagcaaccaattatttttttatttttaaaagttggtgaaagtttttacaatacattgaaaaagacaattgtgcagattttcaacaattttaacaaattgcttgatatatcaccgtaaattattcggattagaatattctacatgttttccgtagttaacataattgaataaacaattgatgaacaaaaaatgagtggttgatattgttggattacgattaaaacctccaacgtcaattgtcgcaaaatattctcggatagagacattttattggtgacgtacattcaaatttggataatgcatgacacaatagatgatgacaaaaagtaacctattcatggttccttcgtctttaggtaatctcaatgctaggaaaaactgtgtctaaaactcgagtacatcacttcttaacaaacattaaatattaaatgattaaataggaatgacattaaaaacaatacaatcatcaattttattttaattttgtaaaaatcttaaactttttaacaaaaaacgaaaagataaataaacctttgtagaaaacttttagttgcattgaatttttggtcaatggtatttaatagagttaggtctgaccatttttcttgcattgaaaatcagttaggtggagtaatacaaggtcaaagaggaaaccatctaaaaagaaaaactcgttggatatcaaaatttagaactatgatatcatcatataaacatatattgttggggtggctagagaaaacaaacccatccgaagacgttattttttctcattctcaaaagtcaatttttttttttcttttgtccaaaatactatatctaaggataccagtataccacaatattatttttggactatttttgttaaacgaaacttaaaaaaaaaacggtaaccaaaagacttactcatttgtgattttttttcgttggcttaaaacggtaaccaggatcgatcgactgtctcatcatttgtgatttttttttgccagtactttattttttttggtaaactagattggtcttataacttataagttataacaaaatcacatccctctgtaaatttatttattttaactttaaccaaaaaatcaaaagaataagttgtgctgtgttgaggacaaattttataataaagaaataaggacacgaaggaagaatggaagtccttgctagttggtgccatttccaatacgattccaacaacttagccaacttttttttttttttttttttttgataaagaacaccttagccaacttacgaaaagtttctaactctttcgttctttattagttctatatgtattaatgcatgcattattgtgaccaaaaagtatatattaaataaaaaatgtatattttcatgtaattttgtttgtaatattatttattttagttttataaattcaccgtattctattagttcgctaggttcttgaaactcaaaatttgattcttgagtgatatatggtaatctagcaactcgaattagcctgtaaattaatttagaacaatgtaaagatttcatgtttttacgtataaattacatgtttgcaaattaattagtttggattttggtatataaatgaggatattttcattcatttaagtgttttgatgttgagaaaacataggtataaatgatgaatatataacaccaacatcataattgttagtaaatattcatttgaaaagagtgagatcagaaattgattgataaggaagagacaatacaaaagagatggaaaatgaactaagtaaaccataagcataactggatgtgcatttcaagcataatttggctcaaaactaaatttataattaaaatagataatcctaattttttgacaagattttttttttgttgagaaaatgtttataatatacaaagttcttgataaaggacactagtttcacaccccacgtgttgctaaccggccaccacaaagctaacttaaaaatgtttttaacttttttaattggagttcctttttatctccatgcattattatcattttctattatatattccataagcacttaaacaaatcagtcttctttattcgattcggaatttaatgtgatacaaacaaaataatcaaagtttttgtgtgtatatccgtttaaaaaaagggagatttgtgtgtacgatttggatcaagcctttttgcgcatcaaaattgtcacttgcagacgttaatgtgcccgttagaccttcacaatctattaaactaaataatttaaaaaatttctattactggatatatatatatatatatatatataacgttataatcaggtaaaattactttcgtaaaaacaaaaaacaaaaaatgatttacaaatttggttttgtaagatatatatatatatatatatatatatatgcgtttgtaatttgggatggaatggttgctaataggttgttgaatcacataatttgtgtgatatatcatctagtgttatacgtgtatataagtttgtgtaagacattgtatatataaacaacttaatctccacacacgtctaataatgtcatatatatggtctgataactccaagaacttgaaattagatttagtaaactcaagaaatgaacaaccatctttctaggttcgtttctagttaatgaaacatccgtgtatgaaaattatatgttattctaaaatttccagtagtttttctaattcaagcttggtctctatgttttagaaaaaaagaaaaacttagagaagcaattgttatttatctcatcacaccaatataatttttggaaccaaattgttaaattaccaaatgtcccaaacttgtgatcaaatttagatgattatttttaaatgaacattaaagaaaaactattatatatatacacacccattatagacgtaactctactgcttccaacttttccctaatctttgttcttccggccaatcaaatg

SEQ ID NO: 2501 - DNA, 3000 bp, Unknown
  misc_feature (1)..( 3000): cDNA_ID_2048545_gDNA_ID_1620548_Annot_ID_160216 3000 nt of promoter + ATG
tttgacgtgaatgtaaatggatcagcagggccatgtcaaggcaatatcttcagtggcagcctaatgcattaggagaaagagcacatgtgtgtttgtttcctttctcctttccctgacactgcctctcttttccctactctctccctcacacttccctttatcagatatatattctaggatttgtgagatatggtcttacataggtgtagttagtgtttttgtttgatatcataggcaggggccagctctaccttacataggtgtagttagtatttttgtttgatatgataggatgctactctatctgtatctgcacatcttttgtgatataggactgtgtcatagtttatgtgactgatgaatctatctagaggttcatcaatctgctaaccttttgggctgttccttgtgtctaatgtgattgtttgatatgttggaagacaaatcttatgccttccagagagcgtaacctgaaatcaagcttgtcacgtcatattatgttggtttaatttgctatcttaacttttgtcatgctgtatgaattttatacttagagagttggcattaactaaagttttcttggaatgttgctgaagggcaaaataattacagatgctacactggagtctttatagttaactcttctggctctttttttctttgttgttctaattgctggtttgccatgcaggtattctcagcatttgggtttgtccacaagattactactttcgagaagacagccggataccaagtatgttccaagccattaatttgctattttgctttgtattttaatgttaatatctattatacttaaaatgtttactgtctgacttgctcgtaggcactggttcaatttactgatgcagaaactgcaaccgctgcaaaacttgccctcgatggaagaagcatccctaggtgacagttgtattaaatttttgacatggtatttagtctaactgtgaagggctgcatggttctagatatttgtttggagggtctgacatttggagcctttcaagcgtctgttggagttttagcactaatggcttgttccctagtgatgtatggctaatagcgttaatagatgtaggaaaacgaatttgtaacgagtcttttcatgtaggaacctgggaaaatactgtaggcaatggtagatacttagattaggattgtttttccatgtagaattcttggaaacatcgtctgtttattttatcacaaaccatacaggctttgcgttataagattctatatgtttgttagaggcatacttgtttactgacttatctttctgggcattaggtatctactcgctgagaccgtgggacaatgctcacttaaaatcacatattcagctcatacagatctgactgtcaaatttcagagtcatcggagcaggtatgtatgtgtattcacactttgtgttgaaacatgttttggtttacttggtgattgacatacttctgggaccaaaattactgaattgtttactctctatcttgcagggactatactaatccttaccttcccgttgctccatcagccattgatagtactggtcaggtgagcaatttgagatcagtctcttactggaaaatgcatttatgattgtaaatctgctttctacttagttgaatctcttactggtgatgtttattttatacaaagagatgcatgaaaaaatgcagacttcatttgttggtttagttactaaagtgaaagattaatgtgtcattcttactaggtggctgtgggtgtagacgggaagaagatggaacctgaaagtaatgttcttctcgcatctattgaaaacatgcagtatgcagtaaccttggatgttttacacatggtaatactggctctctattctaaaacctcgttgaaactttggttctgaaaatattgattctcttctcttgtatattgacgagtaggtttttgcggcttttggggaagttcaaaagattgcaatgtttgacaagaatggtggggtacaggcactgatccaatactcaggtaacatcttgtatgatatactctgttttagttattattgatctctgtaaagagcaaattctcaaatgactctggcgggtttcttccagatgttcaaacggctgtggtggcgaaggaagcattggaaggacattgtatctacgatggtggtttttgtaagctccacattacttattcacgccacaccgacctcagcataaaggtgaacaacgatagaagcagagactacacaatgcccaacccaccggttccaatgcctcaacaacccgttcagaatccatacgccggcaatccacagcaataccacgcagcaggtgggagccaccaccagcagcagcagcagccacaaggtggatgggtccaaccaggagggcaaggctctatgggaatgggtggtggtggtcacaatcattacatggcaccaccatcttcaagctcaatgcatcaaggtccgggtggtcatatgcctccacagcattatggtggtcctggtccaatgcattagagagagaaaagaaagtccctcaaaagtcgaagacaaagaaagatgtttaatctctctctttatttctcttagctctgttttttaaagtttggaacacttgtacttgtgtccaaaagatgtttttttaaggataaaaccatttgagaaatgtattagaagctcttgatttctctatctatgtctctctctcgccactcaccatatcattttcattatcaaaactctgtctaatcatgtacaagtgaaaaattattattggccaaattttgtgaaacattggttagaattactggataagatttttttaactcaagtgaagaaaaaaaaaacacaggaagagaaagataaagagaggaggatcttgtggctcccgagtctccaagtaaagtcttctcttttgctctgaaataaaaagagtaagagaagaaggaagaagaagataaaggattcaaaaaaccctaaacactccaatg

SEQ ID NO: 2502 - DNA, 3000 bp, Unknown
  misc_feature (1)..( 3000): cDNA_ID_2048590_gDNA_ID_1620548_Annot_ID_160204 3000 nt of promoter + ATG
cagtaaatgtttagtgaactaatctgtgatttgacttttcgctcaatgtgaatactttcttatatgatacaatcgtaattgtgtagaaaatacaatattgtagtcgcattatctattatgcctgaccactagaaagtctttagaattttggtcatagtcatacactcttacttgtttagttgtttggaaagagttgacttttgtaatcccttcaataataatcatctatctcctaattctcttttcaacaaaaatatttatataaataatgattcaaataatcaaataaataaacaaaatcataacaataatatagcacagcgggataaacaattaatcaacttagttttgcattttaagtaattttttggataattctttctagaactcaattctcacttttataattcgattttctcttataatcccaaaacttatcattcaagtgaatcttatttttgtgattttcctccttctcttcttttacagagatatactcgaaatcttttttacccttttatataggtcacgaacattctatccatcttttacgtaatagatacacacacaaaaatacagtaaaatattttaaaacgaataatataattaaaatgattacgtacactttgggaccaatccaattacaaaaagggtttcgtcactgctttagtttccaacaccaaaccaaacaaaaaaatggatttaacaaaattaatatcattctctctcttgtttctatctcttctaatcccgacgacgacgacgaccacttccaccgttacatgcactaacgccgtttgtcgccgtgacggcccgatcatccgttttccattccgtctaaaacaccaacaatctcattcttgtggttacgacaaaggcttcgacttaacgtgcgatattaacgccggtaacagaacaaccataacgttaccgttttccggtaacttcaccgtggaagagatcgattacgcagctcaagagatttggatcaacgacccaaacaactgtcttcctcaacggatcttacagctaaacctcaactcgacgccgtttagtggcgtttacatgcgtcagttcacgttctttaactgtcctacttcagagtatctccgttttaggccgttgaatccgataacgtgtttgagtggtaaaaacagcacggtgtttgctactccttcgcctagagtgataaactacttgtcgtctcaatcatgccggttaatgaaaaccgtttatgttccggttcggtggccgttttatgagcaaatcgtgtcgtcttcggatttgagtgataacctctggcttacttggagggttccaagatgtagtaggtgtgagattaaaggtggtaagtgtgggattaagagtaattcttctcgtgaaatcatttgctctcatgttcataaaccaggtaattaatatttctttgttttcaccctaattttttcatttttttaattatatttagttttaaaatttctagaacgttaaacgtatttgtttaaaaaaaaaaacgtatttgtttttataatgtgaagatatgattttgacgattagagtatattagtttgacgtagaccatgacgaaattttgtttgaatgagtcatgtgtttatgtgtgtatacaggtttataaatttcgttgaaagacgagctacatataaccaattatatttgtccgttctggttgtttaaatatgaaaactacatgagactattcaactagatatttttgactaatgaaaccaataggcgaaaaatacatcctactatattatttgggaagtacattttaaatataaccttaatttttgtaagtaattacataggtatgccattagaaataaaattttaaagagtaaattaatttatctctttaacgattaaaaagtcaattactaatttaattaattaaatttaattaaaaaacgaaatacattattaattttcaaaaataataaccaatcaaaatcaacatataagatttaatatctaaattttaattaatttaatttaattagaaaaacgaaatacattattaatttctaaaaaagtaacctattaaaatcaacaaattagatttgatatctaaattatcatattaatttttttattaattattatagttcacttctcatctttatatgattctattttttcaaaaaataatatcatcattataaaaaaataattagagtttttcgcatatgccataatttgaatttttgaaaactaatataaactgttcaatacatgaaaaaatattataacgggtgaaaaatagatttaagaaaactttctactgagtaacgggtcataatttgaaatatttatattcaatttcatacatattatattgaaaatttataatcttatatactacaataattaataacatattagatttttttatgtgtatgatgtgattcaatttttaatacaagctggaaaatcctagaattaacgggtttagatcgatattaatacaagatggtatattacaggtgaaactcttaaattaacaatcaaactacaagtgtataatcttaaacactaaacaatatagataatatcaacaaaatatatacaactcacagtttacttttaatattttatatacaaaatcaattaaatcttaatcacataaaaattagcacaaaaaaaagtattcaacaattaaaattttatcaaatctctgtgttatataagttttgatactatattcgaataaagtgtaatataccttttcaatttgtattctttaactaatttaagctaattaatatatttactaatcttatacctatcaaaaccgactatcgtttcttatttctatagtatttttgcaagacttttttggtggatttgggtaaaagtgcattcggtcatatggtacattcccctattaaataaaaatggtatactcctatgttattagctaaaatgtttagattataattcagagtcatatcattaataaaattaatattaataaaataa

SEQ ID NO: 2503 - DNA, 3000 bp, Unknown
  misc_feature (1)..( 3000): cDNA_ID_2048579_gDNA_ID_1620548_Annot_ID_160206 3000 nt of promoter + ATG
aatcatgatagaaatgagctgaacatttattatgcataagtaaagaactaacactgatgagattaaacttgaatgttgaaacatataaaacattatgcaaagtcaatgtggatgaaatatgcactgtgcctgtgtgactaatgggtactctagtgccatttggaagtgagactgtaataccagtaacaggaaaagtctcactaaacattgccaaatcagaacaaacatgactactagctccactgtcaactatccaagcatcatgaggcaaaatggaatataatgatgaaagacaatgatgttgaaatgtgaaagaatgattttcatatcgtaaacttgttgagggaaattcaatagaaacattaccagctgtagaagtagttgccatagctccatgatcagtgatggtagctgatggaaagggagttgactgctccggaacatgaagatgagtattgagttgttgtattaaagaatggacttgatccgtcgtaaaaagactgagatcaagacttgatgcagtcattgcaggaggtggaatataaggagtagatcccatgactgcattagcaacagcattatgtcatttttcattcaaatccgaagaagagaaagatactcttacaaatgtctttttcttgtgataattttacgggtgggaagatggttgactttgactcatatcgtccatattcaaaggtcttgatagtttgaattcgatgttaatagtattttattcgtataaacaattaaataagagttgacaatgtttagacaaatttggattatgaagtagtaacaatgataaaatcttgagactggtctccaaatccgacagctaggaacctcccttggcattcataagacaacgtacaatcagggacacgatacggtcaacggtctctattagcacttaattatcagtatcaattaaactatcaattgagtaatataatagacgttcaaatttaattttaaacttaacggtctaaatttgtggagaacaaaatttggtaaaaatgagaagataaagaggaagaggacacgtgggttggttcgtggttgatcgacaagtactcacgggctatatctttaacttatcatccttttattcttaacaaaagaaatttggtggagataaatttaatcatggtcatggttttagtagctacaaatgcaaatgtgattttcttttttcgtctgcgtttgcaagtttgaaatttttggtgctgatgaaaaaaagaagagatgatgtttcaccatttttttttttgttttttgatcaaaggatgtttcaccaacataagaaaagaaaacatgtcatgaaggagttaggactaacagtttgaaaatacttaagaactcaaatgttaaaaaggctcatatttttttcccaaattatgtcatctccttctataatctaaatcattcgtgatttaacataaaactaaatattaagtaactttattcaaatctatgaaatcgatttaccatatacacgattttaaaaaggatacaagcggaaatgaaactgtgcattgaaatatacgaacaaaaagcctgagtttacgaaatttgacattatctcatcaacacgaaacttcgacgtattacaaagacaaaaatcaaacctacaaaaatagagaacaatagtcagttacagaatttaagtttgccacgaaaatgatacatcattatgaagtttttgtatgcctaaacattgatatcagttaatgtcttcgactgtaataaagaaatgccttgattaactccgtaactacgtcttcttttgtcagcaaattctaatttattacatgcttaagttgatttgatcccataaccaaacaacatatatatggaatgtatataaaaaaaatctaagcaatctaaaaaaattaattataatatatgctataaaaaaaattataggaaactttgctaaatggcataaacagttattttaattaagtatatggaattgtcaaaaaattatcattatttttttaaaaatacatgattgactctttttttttgtgtgcaaacaaatacatgattgacaaaaaaaaaatacatgattgataaagatatttctttcaacatctatggatgagaggatcaggaaatgtagcattattttacttttgaaaactacatatattattgttgtgagcctgtgaattctgtaatcttccaacatattcgtctactaaaaaactgacaactcaattcagaacatatttttctactaaaaggtgaagttaaaaactcaatttaaaaaagatttcgtacttaatagtcaaagttaaatttggtccgaaatctttttgaagtatcaaagactgcaaaggtataactgtctttttggaataactttaaaaaaattaacaaaaacagtgaaacaaaatttaagaaaatcgaagaaaaaaatgataaaatagcaaaagtttgtgactttcgtggaaactccttccccgtcctctctgtcctctgataaaggcttcactttcatcattcaatctcttcttcttctttcttcttcatcactctctctctttctccaatttcttcattttatcagcttcctctcttctttagtttctgggtcactttagtttcgctctttccgaggaaaaacaaaacaaagatttgatttttctttttggtgggtttaaacagtgatttcttcttttgcccttttattggttcttattgttctcctcaaaagtctacaggattgtcggaagcaaacacacttgtccatgttcggtttgattttttacctcaaacaagtttcttcctttttttttgctgtttagtcgaattgcgtttttgacactggaaagttttgaaatttgagtttgatttttactgaaatcgaaattgttgaattgaattgaagtttgttgaatcagggttatgaatttccctctaattggtgaagaagacacatgaagcagtgaaatctctgtttgtattgaatcttattagtctcaaactatg

SEQ ID NO: 2504 - DNA, 362 bp, Unknown
  misc_feature (1)..( 362): cDNA_ID_2048705_gDNA_ID_1620549_Annot_ID_160230 3000 nt of promoter + ATG
gatcaatttgaatttttgatatacatctaaaataagaaaactaaaagaacataagaagtaatatatttttaaaaaattgacctaaaaacaaagaataatcattattatgatttaactccaatgagaaaacaattccaagcacgatctccaaccactcgaatcttcactgtcggaaacaaacggccaatgttttaccacgtcgcattcttaattggatgtaagtctttacaagcacttaaaacattaaactcttttttctcattcgtccacgtttctttttaaattaatactgttaacagataattattcacaaaaaaataatatctgaagaacaaaaaaaaaggtttcagggccttaaaatg

SEQ ID NO: 2505 - DNA, 3000 bp, Unknown
  misc_feature (1)..( 3000): cDNA_ID_2048687_gDNA_ID_1620549_Annot_ID_160236 3000 nt of
tctaattatatcgtataacattaaaacttaggttctcattttttcataaatcatatctatttgctatgattgatttggtctattgtgattcactgttataatttagagattttatttgacttaaaaagtcaaattactttgaaacatttattcggtatttatcaaattgaaaatatataagaacatatgaaaaacattttttcatgattattattcatttgtctcgattttgttttttccttttctttattattataaaatatatacgaattctatatgcttttcgattgtttacaacaaacacaaatttaaatataagttatgatacaacgagaatactagtataaattataaaattccatgtcttggttttatgttttgaagcaacacttgatgtatatgatagatatgttaacaaagtaaatcaaactattattagccttttatcctaaaagatataaatacaaaaaggatagagggtatatatggttggtaaaaaactagcaactaaaaagattggttggtaaaaactaaatattatctacttacatcatacaaagtaaaataaaaactaaacattatctacttacatcatacaaagtaaaataaatctaaatatttaaataaatatgtttggattaaaactttttgaatacatgataataaaaatatcttacgggctactaaaaatatcatttatttagtgtttagtcatgctttacattatcgatatagttgaaatcaacataaattattactattatatatatgtatatatatttttttcttatttaatagaatataaatatatatatatatattttaatataagtaagattaaatatgaaagaaagaagtttagatattactaagggatacattgtttacaaattaaaaattcaacttaactaaaacatcagttataaccactctagtaattatttggacgaagcagaacttattttatttttattattgtcttaaaacatttggatacactaacatatgatttttttttttttaaatgaaaacaaagatttaaaactcaacttaaagccacattttgttgctcatattaatgaacaaaaaccaaacaaacatttcaaagtttagcggggagcatggaaggtaggaacttgctaacatctttttcccctagcaattttcatctgttgcagaaaggagtgcgctaggacctccattgcctctttgaccatttctttgaaggctttaggtgttaccagcagatgaaggaccttgtcttggtccaattcaagaatcattcctgtgatttttggtgcaaactgtggctcaagttcttccaccataaagaacaaagtttcaccaatcaactacaaaaaaagagaaatttaggtcatataaagataacataaactatatttgtaagtagctgcaatcttaaagtaagcaaaatcaattttacatctcgttgttctttgggaggtaaagaagcaagatcaaaaggaggtgaatcaccacgggcaacttttacaactttgttaaaaaagcataaacgattcatgacttaagcaatgaagacgacgatatatttgagagaagaaacaaaatttagtgttttgatgaataagatttcatgtgctatatataacaaaaccaaaacaaaatatctaggtaaatgccaatattctttctttttaataattggggattcaacacgctctttagatcatgtgtgtgaaccacgcgctataatatagctaaaacaaaaatgatataacaccgtatgcctattttttttttctatgtaaatagtataaaattttggttttagatttgtcgaaaaacaatggctatatgttagcacgtatgttgaacaatgcaaaatttactaaatgtatttttaatcatttgttttgtatatctacaaataacaaaattatctaactcttagaattaacattacaaggtagtgtgattggcttataatgcatgagcttttattttttatttttttgggacaaactaatgtgcatgaattttaaaattagatttttaaaataaaaatattgaaaatttcacaatttacaatatacaaaaatcgaaaatgtggtacttttgacaaaatccaatgtttgttacaaatttatacattggaatagaaagaaatctaggagagtaatagcttactcaatcaaaaactgacacgtgtcctccatcctcaccaagtcaacattctctgtatctattttaattttgtaaggtaagaaatcttttgcacaaaaaaagaaaaggtaagaaatcttttgcatttttaaaagagaaggtaagaaatctgagagactttgatctaaccacgcgtttaaaaggagacagtgaacacacgcgctatgaatccataatccatttagttggatgtgaaagcccatataatgtcatgggcctaatttatatagcccatataaacgaaataggaaacacacgagagacagaagcactgtttgggttttggctatatgagagagataataatattgtgggagattgaataagtgagaggacctacctaccttgttggtcttttaacattactacaagtcacaacattggtattggtctgaaattattcttcttttgaatgtcggcaaggaatttgtttaagtactctctacatgatttttttttaagagaaacagaggctgatgtattatgatataggaagcttatgttatacaatgattggaggatcaaccagaagattagacttaagacataacataaagaataaaaatcacattatttgattattattattatttataataaaaaaaaggagaagaagcaagaaatagaaaaaagcattgggctgatgattcgttggtcgagttcaacgacattaactcattggaacgcttcagttttgttcctcctcagggtccgttacgcttcttcttcttcttcttcttctttcttcttcctcctttgtttctgatttcccaaaaattcgatccttttgaaatg

SEQ ID NO: 2506 - DNA, 3000 bp, Unknown
  misc_feature (1)..( 3000): cDNA_ID_2024949_gDNA_ID_1620549_Annot_ID_160241 3000 nt of promoter + ATG
aatctcccacaatattattatctctctcatatagccaaaacccaaacagtgcttctgtctctcgtgtgtttcctatttcgtttatatgggctatataaattaggcccatgacattatatgggctttcacatccaactaaatggattatggattcatagcgcgtgtgttcactgtctccttttaaacgcgtggttagatcaaagtctctcagatttcttaccttctcttttaaaaatgcaaaagatttcttaccttttctttttttgtgcaaaagatttcttaccttacaaaattaaaatagatacagagaatgttgacttggtgaggatggaggacacgtgtcagtttttgattgagtaagctattactctcctagatttctttctattccaatgtataaatttgtaacaaacattggattttgtcaaaagtaccacattttcgatttttgtatattgtaaattgtgaaattttcaatatttttattttaaaaatctaattttaaaattcatgcacattagtttgtcccaaaaaaataaaaaataaaagctcatgcattataagccaatcacactaccttgtaatgttaattctaagagttagataattttgttatttgtagatatacaaaacaaatgattaaaaatacatttagtaaattttgcattgttcaacatacgtgctaacatatagccattgtttttcgacaaatctaaaaccaaaattttatactatttacatagaaaaaaaaaataggcatacggtgttatatcatttttgttttagctatattatagcgcgtggttcacacacatgatctaaagagcgtgttgaatccccaattattaaaaagaaagaatattggcatttacctagatattttgttttggttttgttatatatagcacatgaaatcttattcatcaaaacactaaattttgtttcttctctcaaatatatcgtcgtcttcattgcttaagtcatgaatcgtttatgcttttttaacaaagttgtaaaagttgcccgtggtgattcacctccttttgatcttgcttctttacctcccaaagaacaacgagatgtaaaattgattttgcttactttaagattgcagctacttacaaatatagtttatgttatctttatatgacctaaatttctctttttttgtagttgattggtgaaactttgttctttatggtggaagaacttgagccacagtttgcaccaaaaatcacaggaatgattcttgaattggaccaagacaaggtccttcatctgctggtaacacctaaagccttcaaagaaatggtcaaagaggcaatggaggtcctagcgcactcctttctgcaacagatgaaaattgctaggggaaaaagatgttagcaagttcctaccttccatgctccccgctaaactttgaaatgtttgtttggtttttgttcattaatatgagcaacaaaatgtggctttaagttgagttttaaatctttgttttcatttaaaaaaaaaaaaatcatatgttagtgtatccaaatgttttaagacaataataaaaataaaataagttctgcttcgtccaaataattactagagtggttataactgatgttttagttaagttgaatttttaatttgtaaacaatgtatcccttagtaatatctaaacttctttctttcatatttaatcttacttatattaaaatatatatatatatatttatattctattaaataagaaaaaaatatatatacatatatataatagtaataatttatgttgatttcaactatatcgataatgtaaagcatgactaaacactaaataaatgatatttttagtagcccgtaagatatttttattatcatgtattcaaaaagttttaatccaaacatatttatttaaatatttagatttattttactttgtatgatgtaagtagataatgtttagtttttattttactttgtatgatgtaagtagataatatttagtttttaccaaccaatctttttagttgctagttttttaccaaccatatataccctctatcctttttgtatttatatcttttaggataaaaggctaataatagtttgatttactttgttaacatatctatcatatacatcaagtgttgcttcaaaacataaaaccaagacatggaattttataatttatactagtattctcgttgtatcataacttatatttaaatttgtgtttgttgtaaacaatcgaaaagcatatagaattcgtatatattttataataataaagaaaaggaaaaaacaaaatcgagacaaatgaataataatcatgaaaaaatgtttttcatatgttcttatatattttcaatttgataaataccgaataaatgtttcaaagtaatttgactttttaagtcaaataaaatctctaaattataacagtgaatcacaatagaccaaatcaatcatagcaaatagatatgatttatgaaaaaatgagaacctaagttttaatgttatacgatataattagataatttaaaatatatgcataatatacatatactattatttttatttaatgtgttgaaggatacaaaattattaaaaccatagcgattacgtaatttattcactattcatcagtttcttaatccaaaagaaaaaaaagaagaagataaagaggtatttatatatcagatgttcaaaaaccctaaatcgcgtttcttctctcaaatctgccgccgccatcattgatccaggtattgctctaaccttgactcttcacgtcattcgcatattactctcctcctcgctgatccattcgaattctgcactcaaatcgtgtttttgtacatcatagtttcaagcattatgattctctctagccaatgacttttcttgcgattgaatccttttgcagtctcgttatcaaaagttgaagaatttagtttagtttggttgtgtagataagatttgtaatcgcaaaattcgatctttgttacagtt

SEQ ID NO: 2507 - DNA, 3000 bp, Unknown
  misc_feature (1)..( 3000): cDNA_ID_3410233_gDNA_ID_1620549_Annot_ID_160247 3000 nt of promoter + ATG
gtctccagtcaaccctgcactgtcgttgttgcacgtgcttctctcttctcccacacgtgcttcccagctcattctctctgtttttttttcagtaacaaaaatattccgaaaacaacaatacatactaaacaaataaaaacaatactcgaaaccattattaatatttttttccatttaaaaatgatttgattccaacattcctaacaattactgccactctcggataagttcagatgctttttttgcctttacatttttgtttcgatgtgtagcttttctccaatggtttcattttgcttcgtttgtactttattctttattctctctataaagaaacaagacgatgcatgcatgaacgttatataatcttatcacacttattagatttaatcaatagagcatcacggaaacaaattcatagttaaaaatcgtttttttcgaatcgattattttacaagtatgaaaaccgccatacatactttgatataattatataaaatggttgggacgtccaattgacaaacctcaatatttaataacaacttcgcattcattttccgtaatagatatactttttaatgatcatttcaagatatagaatagagtttcagaaaattttcaaaatttaaatatataacttactatcagaaaagttataaaataaaaatatatgtcataaatttatcgtctaattgtttcaaatggagaatataaatacacaaattatttcttaattaaaatatgcaaatttttattttaagaaaacatctttttcgtttttttttatatccagacaagacatcagataaaaatttataaatgtaaatgccaacgtttgatgaaacactcaatgctatattttaaatattaagcattcgaatttaacatgtaactatctaaacaaagaaatacaaaataataataataatacaaacaaattaaaacaaaacaatggacccctagctagtatagtatctatgcgattgtcatgtttagtaatcgatagccgatagttagactgttagaacttaagaatcataggcagtaccagaaagaagtattggcccatatcgaagacttgaagtgaccaaattagtccatgtaaatcaaaacgtaaagtaattgggtcggatacattttgcagttgggctcatataactttgaaatatctctctcgtagtctcgtataaaggatcggttatattagaggaaaaaatatatagattttttttttttgataaaggacaaatagaagttggcctttcaatatacaaagaataaagatcaattttgggtgtggatactgataaatgatttaaatgtaacaagaattaacattacttcatattcaatggacaatggttatccttttcttcgtcgtcgcccgactattaggagatgacgagtcatcgtttatcttaattatttagaaagcaattgatttagtacgtgagttaaaataatttcgttgcacgttgtccggccgtttatgtctttatgacgtgcctatgatcttatctaactatcattttctcttccttactcaacatcctaaaagaactattcaaatttattagaattccattttcttgagacatgaatactatcaataataattaaactatagttaaacagaaaggcgtaataacataaccaaagccaatgggtttttgcttgacttcccggaaatttaaaagattatgtggttcgataatttacccccaaattattgatgagcaagtagtagtctttagaaaatggagatggacagacctttttcccatctttaaacttgtaattaataaagactttttagactattgcaatactataatgaatcgtgtagtgttgtgttgtgttgatctctgtgttggaacccaaatacaaaaaaatattgtgctaaaaagtgctgcattgatttacaacaatcaaatactcaaccatatttcaagtgggttgaattttaataaggatgaatgattcaagcatcaatctataaacaccaacaacgaaaagcttctattcacaatcgaatgttgtaatcacatacatatatataaactgaaaacaatttttagttaaatatttttagttattaaaagttggcaacttctacttaatgttatatatgttgcacctactattagacaatatctagttaaaacatagcaaaagaaagcttgtggccggtgagaatacaatgaagaatgtaaccccaaaatcatcccaatttccactattttgcctcttaataatagtaaacaattaataagggaacgcatgataaaagttcgaagattatgtacatatgaatatttggttaaacaagacatatgatgttgttacaaacgaggattacataatgtaatagtaatctaaagtcttagggactaagagttcctcattttaatttttaatttgaataaaaattaaaatgatcaatataagagtttttaagatgcaagcaacacaaaaaaacaaaaaataagaaatgaaaaaggaatatttttcattagttagtgtacattttaatagtaataccgtgtatgaccacgacatcatcaaataataataatatgatatcgtatgtaatttttatatagtagtgtgttatttaaaagtttccaaagtgcgtgtaacatatgggttcctagtaccttccgggaatggttagcgtcgtcaagaaactactctgtaaaaagttagaattaggttttccaaactaagaaacatgcttgtaaccaaaatttaaacaatggacaaaatacgaatggaattatcttgcccatgtgatgtgacgtgttttttattttcaatttgtttttattccagaaaataaaataatgacacgttggagccaatacgaagaacacatctatccatcccaatcgctctccacttttctgctcttcgacgacaaaagtttcaaactctataaatacttgaacgcaacagttacaaaaatgtcaaatcgaaaacaaacacaaaaagcaaacaaat

SEQ ID NO: 2508 - DNA, 3000 bp, Unknown
  misc_feature (1)..( 3000): cDNA_ID_2048645_gDNA_ID_1620549_Annot_ID_160251 3000 nt of promoter + ATG
aaaaaaatattatactaataaatgatacctcattaataaaaataaataattattaaaaggcactttacaaatgttaagagatttgcttaagatatatatatactagattttaacccgcggtataccgcgggaataatttattttttaatgttagtatatataaaagtttacaaattgcatctatctataaaatatttttattttatagtttacaattgttattaagtaacgtcctgccaaacccgtcccgtcaacccatcccgtaaaaaaacccatttattttattaatgttgatcttatttatgatatgtttatgaatcattgtctaaatattttgtaattttgtagtaattaaatgctatcaaattatatctatgcgctttgatgattataatccaattgttatagtcatggagaaaagtaatatcaaaaatgataattttgtagtaattaaatgatattaaatattttggaagttttattttagtaaataatcgtgtaatcgtgtagttaatgtgaagagattttgggaagattgttaaatgtcaaatatttaattcgaaattttttttctaattatcaaaaacaaacatcaaaatctagtggcagccattgtaaataagtcccaactacaggatttatttcacaaaatggctgcaaaaatgtatatataggtacacaatagtgaataaagaaaatagtttaaaagcaaaaccctaaataaaataaaagattgagaggcacgttttcctcaaagatcaatgacgatacccgagctgccaaaggatttgatagaggagatactctgttacgttccggcgacatatctgaaacgattacgttctacttgcaaaggatggaaccgtttattcaaagatgatcgaagattcgccaaaaagcattatgacaaagccgcaaagcagtttctacccctcatgtcaaccaacgaagagctttgtgcgatgagcgtcaatctccatggaacgataccatctttagaggtaaaagataagccttggctattcgtttcagattctaagcattgtgatatcgaaatatctcgaatctttcacagtggcggcttgttgttatgcttctcccgagacggcgaaatttcaatcatagtttggaacccgttaactagtgaaaccaggttgattcgaacccggaatcgtcgcgataaaggacgcaactttgttcttggatactatcaagaagacaaaaaaacctactacaaaatcttgagcttttatcttgatagcaaagatttcgaaatcttcgagtttaactctgattcatggaggtttattgatgatatctgtccaggcttgtccttgctatactctgatcaatgcgtgtctttgaagggaaatacatacatgtttgctatagatgacttaagtgtatccttgctcaaatatgatttttcaacagagacatctgttcctgtacctcttccctataaaagtcgttcttttgaagctattagtctttccgtggttagagaagagaagctctctgtgttattacagcgagataaaagttcgaaaactgagatatgggtgacaaatgtgattgatgaaaccaccaccaaagtgatggtggtgtcgtggagcaaggtcttatcattggatttgagccctgatcttaaaattaggtatggagaaagtttcttgctggacgaagagaagaaagtgatcatgatttttaataaccggatggaagaagagaacaaatccgaagacaaactatacattattggggacgacgataataaagccacacaagtatatacaatccatggatatggaccagctgtttttaactattttccaagtttggttcaaatcgagcaaagctctaggcaagaggaaaagagttgactgaataaacatgtaatctccattttttgttctcttaacgtaaacatgttcaaaacaaagatttaaatccatactacaaggtgtttttggtgtttttaataaatattatggtgtttttttaatttatatatttgacctttgaattatgaaattcagagtatagataccaaattaatttatatatataacaccacaatatttataaaaagaatttgtggtctattttgtgatatatttttttatataccaaaataaataaataaaataaataaaaagtattgttcttctagataacacatcttttaagttaaaattgagttaaaatagtcaaaatttaattaattttagttaaattatgggtaaggcaaacttgatgaatttctattagttaactgatcgattcaattagaaacgtagttttagaataaaacaaaaatatatgtagctttatctagattaaaaatttttttgataaatttttcagtgataaaaagtttggaatggaaaactgaaattataacaaaaaattcaggcaaccctcttcacaagtttattttagtaagctcttggaattttatttaacgttaaaataaattttggagagatcacgtgcaacgttggattcagatctaaaaaccatcaagatctaacggcaaggattaattgttgactgaaactccccacgtgacttgagatcaccgatacactgtgtttttgtttttccccaatctaaaaatgtatctctctcccgaaaatttaaatccctagctattaccttactcgtcgttctcttttgattttcatttcccgaagaagcgttttctcaggatatgcttctcgatctctgaggttttccccttcaacttctattggatgttccttttttggatttggtcattattatgtgattccttttttcctgatctgaattcgagatttttattcctttgattaaatcctcaaattttgcatgttttattaatttcctgattcagaacatgttttatttgatttagatgtataaagaatcttttactcaaatgtattttgattgatgcttacagaagaaagggatttgcaaatttgagaattcacattttggattaagatagaaacg

SEQ ID NO: 2509 - DNA, 3000 bp, Unknown
  misc_feature (1)..( 3000): cDNA_ID_2026764_gDNA_ID_1620549_Annot_ID_160255 3000 nt of promoter + ATG
tctaaacgaaagtgtatgatttattatgttgtttttgttaatttgaaaagtatgaatctattggcttatgcaagtatgggatatgtattaggtgcacagacttgacagagactgtagtggacttttggtgttggcaagaacacagacggctgcaacagttcttcattccatattccgagagaaaacaactggtgcatccgcatatgtaaatcctctgctttctctccgatctttccattgcttgtcatggatcgtgggaaataaacataagtttctcttccaatgacttttattttacttggcagggtgtcaaaaagaacgtaaaatccttgaaaagaaaatatatggcacttgtgatcgggtgtccaccacgtcaaaggggacagatttcagcgccactcagaaaggtcttcacactctgttttagctagagagttttatccatctgagtttttagtctattttgttttatctaggagttgctttgtttgttcgaattcggtcattgcttttgctgctttactggagtcaaatttgaaggtaaaatatatgttaaatatctgggtaggtggttgtggatgatggaaaatctgaacgtatcactgttaatgacaatggagaactcgtttctactcagcatgctatcaccgaataccgagtgattgaatcttcaccacatggttagtgagactgacttccatttctattcagttaaacttaaagcaaatgattttgccttgagtttttagcacattgttgaattgcaggatacacatggcttgagcttcgccctttaaccgggagaaaacatcaggtctctatagatattcagtttttgtttcaactttctctcttttttatgttctcttaatactaatctgttttcaactgttcttcgattgccacagcttcgtgtacactgcgctgaagtgctaggaacaccgatagtcggggactacaaatacggttggcaagctcataaagcccgggaaccttttgtctcttctgaaaacaacccaaccaagcaatcatcatctccttttggattggatctggatggtggagatgtctcttcgaaacagccacaccttcatctccattcaaagcaaatcgatctgccaaacatatcacagctcttggagaaaatgcaggtctcttcagactctgatatttcggatctcgatagccttaaattcgatgctccattgcctagtcatatgcaactaagctttaatttgttgaaatctagagtcgaaacttgtgacaaaaattagattttttttcttaccgagctttcttctttgtgttcattgaggcccaagtatttgtgtatttggacctgaatattctcatacaaagataaataattataattaaatgatttttcgcatataatcattattgtggtatgattaacacagttggtgtgatgactgattgacacaataatcaccgtttggattcgattcctttaatacttgtcactagagttgtttgactaaacagctaacttgtcactagagttattgtgtttgtattttgatctgttattaatctgattgggtataattacagatagagagacatctatattgtaattaagacaatcttaaagtgtaaactaaaaagatctctctgacctctggaaaacgaaaggtgggtgacacatcactctagctatgaatatgatgaatattcagtacctaaccgaacaaagactggtttggtatttttattggaaaaaagagataaataattgtgaatgtgaattatcctgtctgaaaggtaagctgatgacatggcgttatatgattggacgagcttcagaacaaaagagtagcgtcgaatcgaatctttacctactacactttgaactttgaagtacattacctacttcctccttgatcgaacgtcttttctcaaaactattttatttccccaattaaagtagtggtgataaattcacaaaaatacaaacacttttatttttgacgtcaaaaacaaatacttctttgaacaggctattacaatatttttaagaaaaaagtaagcaaaatagtccacaaaccaaaatctgtaacatattaaacgatttatgtttttttttttttttcttaactagagaacaattcgggcttttactaaggatgatgagtgtagttaccgaatagtgtattcatataatcttttaatgagcttaagatatgatattatttcgactaatcagataagagtagttagataatttcgtaatagagcaactctttcgcaaataaaaccattgtaaacattaccaattagtttttctttttttttggtcacaaccaattagtttgtttgttctattttatgaagtgcgtattaaagctaacgtgtttacagtaacgccacacaaataaaaataaaaataattatgtactttatggatttatagaaaaaacaagaatagtcaccaaaaattgattgtgtcatatatcttttgtcaactattttatcttatttttctatggatatgtatgtccaaaatgttagacaaaaaaccaaaaaatcatgtccaaaatttcgttaggctgccgatatctctgtttccctttcaacgactatctatttaattaccgtcgtccacattgtttttaatatctttattcgaggttggtttagttttttttaccaaactcactttgctacgtttttgcctttttggtatggttgtatttgtaccaccgggaaaaaaaagataagaggtttggttggtcgagcttactgattaaaaaatatacacgtccaccaaatattaaaacaatatatcccatttttcctcctctcttttggtattacattaatattttattatttccccatttgctctgtatatataaacatatgtcaatagagtgcctctacagtcatgtttccatagacataatctctcaccattgtttttctctgcaaaactaaagaaacaaaaaaagaaaaatcggagaaaccaagaaaaaagaa

SEQ ID NO: 2510 - DNA, 3000 bp, Unknown
  misc_feature (1)..( 3000): cDNA_ID_2048620_gDNA_ID_1620549_Annot_ID_160259 3000 nt of promoter + ATG
tcttcaattgttttatatatatcgagaggccgaagaaatctgtaatcacagacagaggaaaaataagaataaggtgcagtttttttgttctttgttgttatttaagaagattaacgtaaatagtttccgacattaactagtttgcgttacattggtcctggttgataatgaagaagatgtacaatcttccaagagatttgccggaggaggtgctctgtagaattccgttgacatctctgaggcctgtccgatctacttgcaaaaagtggagcactttatccaaatgtgggagctttgcaaagaagcaccttgctcaagcaaaagtactagcagacgcaaaggagtttatggtggtcttgatgatgaattttagggtttatttgatgagagtcaatcttcaaaacaacgttgttgaatcatcatcatcatcatcatcatcatcatcatcatgtataaaacgtgaagctaaacttattagcttaggcgatgaagaagctgatatatctcaagtctttcactgtgacggtttattgttatgcatcagcatcaccgaatccaagactaggctcgttgtttggaacccgtattgggggcatacccggttattcgagcccacacatcaattcaacaaattcgatagctattcgtatgctctcggatacgacaagagccgcaaatcccacaaaatcttgaggggtattacttgtttggatcccttcaaaatctacgattttaactctgacttatggagggatcttgatgtaactccggagtggcacttatggcaaatgctccatggcgtgtctctcaagggaaatgcctactggtttgctagagagaattataccgaaacaatggacacagaccattttttcttactctgttttgatttcacaagcgagacatttgggccgcctttgcctcttccgtttgagtttgctgtttctgaagatactatgagtgtatctagtgttagagaagagcagcttgttgtattatatcagccgtgggattatttacagttggacatctgggtgacgtctaagattgagcccaacgctgtgtcgtggaacagcaaggtgttcttatcagtgagtttaaaacaactcgtcagccctcagtttcagttaacttttgggagtttcttcatcgacgaggagaagaaagtcgctgtggtttttgataaagactacgataataagcgcaacatagcttacatctttggagtggatggatcctttaaagcagttgatctcggagattcagaccgaaagtgttttccacttgtgtgctcttatgttccaagtctagtgcaacttaattagtcgaccatctattccttgcttactttttttcttcctcttttgtcatcttctttgaacaagatcattatttgttagtcaataacatattaacttgtttctcatacttgtttttgtttgccatatatatttgaattcgtttccaaatggtgcacacgctccttcccctgcagctaatcgtttgttactttcagtccccttaagttggagcaaactgtatgcttcttggttggcattctccgcgaaagcatgcatcgtttcttccaagagtctttaggtattgatagttcatcgttttctttttctattgtaacacagtagcagttaaagataagtcgaacgggtgatctttttgttcattagacaaaactagagaggtttctcttctctttcttctagtaaggaacaaggctaaggttaatagatagctagctatctgagatatctcacaaaagctttcactatggccctgtactatatcaacttcatattttaggtgtttcatatttcagataaaatgtgctcatatcttcttcctctttgttcagcgtcttctgcaaaagtgatatagatcttgacatgctgctaaaatacctcttgatatatttagtttttcttaccaatttaagttatagcataatccttttatcatgttagttattgttctatcctaattgtctagcatggagtagaatgattttgaagcagggacttgtagaacgatttttcgtgtgccacaggtttactcccttccttaatgtggtgaccagcgcttgtccttgtggtctgtccactcattctgctatctttcaacgaatatcacaaaataatagtggttagtatgtctcatatgattaccttaaatttagcggctactgactgatgaatcatgaggctttacgctactactatttctcttgtgttccacaaggcgtttccaatacttggtgatatcctccaacgacatctgcctagtattttgaccttgccagttgccaaatcaattaataaacccttcaccagaagattcttactacatcaaacaataaataaaactaaagtttgactggaagaagagttttggaacgttagacaaattttcagcatttgacgatatgaaagatgtctaaatctaaagaaacagagatacaattctttcaatattatatacttgctaactatcaagaacaggcatgaaaaaataaaaatattaaaaaaaaatacatattactatatagaattcatatgtcatcgataacttttacattattttttacaatccgccttacttaaacgcgccttatctaatagatatataaatgtatctctatttatattataatttaatttaaaatcaatataaaaaaatgtgttttttcaatttttaaaccacataacctaatagtataatatttgatatattattattttgttttaagaatgtagtatatttgtattttattagcaaaaccattattaaattgtaacttttttttcttctatataaagtttcaaaatccacttaagaagtgaagatataagtgaacaaaggatgtagcgtaatctagcacaacatatttaaacctcacaaaacccacccgaaagatgaacccatatctctctactctgttgctgacgatacatacacctttacttacattatattcccgccatcgcg

SEQ ID NO: 2511 - DNA, 3000 bp, Unknown
  misc_feature (1)..( 3000): cDNA_ID_2048606_gDNA_ID_1620549_Annot_ID_160263 3000 nt of promoter + ATG
ttatcggggacaccaatgttgttaagctttcttggaaagaagccacaaagccattagcctatacaagagctttgttagtattgttagttttgcaggtttcttatcatgcttcccaaatatgataaaatgcttatcatggctcatcttcttttctgatttttggtttctcagatatacagacctaatgtatggcatacccccggatattgatgcgtttcataattttatggacaaactctcagaagacttgctgaataaactagatatggagggaatgtgcgaattagaagatgatcaggttcaagcacttgtgggttcatcaggacttaaacaagcacaagacacgttaccagaaagtaggattttcttacatgaaaatccaaaagtaccttgtctcttttggaggatacgagaatcggtaatattctatataataaccatctacttattaccttttaagaaattatcaagatttacttttttgtttttgttgtagacattattaaaattggtgacgtccaagtcatggaagaaattcctaggttttattagagaccaactctttcacctcatttgttgggcttatgcagcctctgacttagtcagtgctactagaattatgcgcaactgggaggtagagtatattcctctgtgtccatggtatctttgctccttttgtcgaccagagtatcttggagaagatgaaaatcctgagaaagaagatgatgaaaatcctgagaaagggcattactgttatggaaatgatatagaggattgcctactatacatcaaacagcatggcattcctagagagatctgcaagaagtttgactgtaaggactggcagcctccaaatgctgacgacccacatatgcacacgacaaaattaaagagtgttcgaaaaattgaatcaatggaggaggcgttgctattgcttccacattttcccataggagcggacttagttgtttttaaggaattgtggaccgtaggagaggagatttattatggtcccggaacaaattccagaggtttccgctcatatcatgcagtgatagtatccagtattgagatctataaaggagaagtggtggccatctgtaagatgagcaatggtactaaagtttgtgacgaaggatatgttagggtttctctagcgacaacatacatggttgtgggtgccagtcctaaaaaaaaagaacatgttcgggctacttctaagccgatgcatcttctctctgaattcatcatcatagatatagatgagaatgagaaagagaaagaaagagagagagagaaagaaactgaaagcgaagaggagaatccagaagataaccagaaagggaatccagaacataacccgaaagagaagtccgaagagatgcaatatcctgactttggtgctagcaagtttcataactccttgaacgagcacatcatgcctgattctgacaaggtacagagacgtgaatacctgtgtatatctcctgttttactcaaaccaactattttggtgtggcacatgaatttgaacggaatcgggactcagggccaatttttttcatattttccaacaggataaatacctgattctgcacaatagtttcttggttgtgtgatattgttctttccattatcgtgttcttcttattttagccgttttctgacattttttcaatgattccagagcttgggcaatgtaagtggagaagaaatcaagatggttacggaaggtttgacaagtttgagtaaatttggagagaaaggtcctcaagaaagaatgcacgaacctgtagaaattgttgaaaggtaagctgatttggatccaaagttgaatgtgagtcttttgaatgtttgtgacttgtgattcatggttgtatgtttcctttttgctacgacagaggaaaacggcctgcaaatgaagccggtaatgatgtgggtacaaagaaggcccgtacagagtcatcaggttgtgcacatgggatttgagggaatcactttcatggcctattttagtaaaacaagagtatttcttttgtctattagccaggtacaagtttttgttggctttttaaggctccttaacatgtcacgggacgaaaaagagagaaacaaaacaacaataccaagacattgatatgcaaatgggcctcataagtagacccattaagaatataatgcataatgaagcccaaattacgccgtttctccgttccctttgtcttctgagcgaccttgcaaggctctctcttctttttttcttcttcttctcaactcacccaccgagtttcttctcaattctcgcgggacatttcgcgggcgagggaaaaaggtaaaatttttggcggatagagagatcgaaaaagcttaacatttagtgtctgggttgttttcttatctcgtagaaatttagaaaattcaatactcagcttagcaatacccaaatctaacctcgttatagctaagattactttatcgcgttttttcttctcttgtgctcatcgaaaaccatatcaagggtcgatctgtgttttttgtctgatgttcttgtttaagatctctgtcaagcacgtaagtagcttaggaactagacgaagcaatcgcagaaatatttaccaagctcccatttttcttttgtgggtttttctcttgtgtttgctcatattgattctgatctgatatacgtgtgttttgcttctttgtttgattatataggaatctacaagtatttaaacctttgctgatttagaaacgcctgagtgcatcatcttcgaggatagcagtataaacatagctagttgattgtagagaatgtataaagcagtaagtaagcgggtaactagaagtagtggatctggtttgaagcagacaaatgtagataatggaggagagattagtccaactgttgacagagtatctgaacaaggcaaatcatcagaggcagggagtcacatgccaactgatgcaaacggaaatggacatttgcatcatgagattatg

SEQ ID NO: 2512 - DNA, 3000 bp, Unknown
  misc_feature (1)..( 3000): cDNA_ID_2048612_gDNA_ID_1620549_Annot_ID_160261 3000 nt of promoter + ATG
gtcggaagatgaaggggacactgtacctctgaaacagtcttcaaatgcagaagatcatacttctaagaaacttatacggaagtcgaaaagggcagataaaaaggataccttagaaatgccacaagaaggtcctggagaaaatggtggttctggtgaaattgaaaaaagcagctcttcagcatgtaaacagacagatcccaaaactcaggtaaaaagatatagctgtcttgaggctttaaggtgccaatcttacattattatgagggagggagcaatggattgaaaggatccctcttttatgcagagactgtacatatcttttcaagagaatcaatatccagacaaagccacgaaggagagcttagccaaagagctacaaatgacagttaagcaagtaagaagtttctcctagtaaattgtttgtttagttctcccttttagtcgacctagtttcatctctgctaagaactgattatgttctgtaggttaataactggtttaagcataggcgttggtcgataaacagcaaacctttagtttcagaggaaaatgtcgagaagttaaaaacaggcaaggaaggtgaatgtgagacatctgttgctggaagtagcaaacaaactatggaaaccgagtcagttgcagagaaaccaaccaatactggatcacggaaaagaagaagaaagtagactttagattcaatcatgaaggttttagatctaatgcaaggacaatactggaacacatacttacccaaaccccgagatatgaagacaccaaaccctgcaaagcatcgggtttgttcagttctttgtttcacatttttggggtactttgaagaccttgaaatttgaggcaaaagaaagaaagaaagattttcttcgaaattggatgataggttcatttttaacagttaaagaagttaaggctttgtgttatgattatgaaagtttttgtttatttccatctggagagatgttttgagttatggtttctgtaatcgatagagaccggtttaagagatcaagagatttaaactttaaaagtcttgtttgaaccggttttaaaccctcaaatgtgaacgtttaaccggtctgtaattgcttattattaaaggcccattaagagcccatggatgtttatgatacagtattagagtcctagaattgggtaacgtgttgcagaaggtaaacgaaaatgaagaaggtgctgagagtatacggcggcgttatgaggctggtgagacttttgccggcggattcaaggccgtattacgccaagtacgccagggagaatttcgttaattaccgtgaagtcgatcaaagcgaaacatccctcgacgaactcttccagcgagcctataatcactcactttgggtactcaagaaggtaacaaagattctgggtttcttttaaatctaggtaccctttgtgttaactgtctgttctcaatcatttgcagtactcaattgacgaatcagcagcgacgaagttgaaagagatttgttttgaataataacgcacaccaagtgttcgacgttatgtccctgagagtgttggaacaagtttggacgatttgttaaatgggtaccatcagttttctacttttgatagctatatcaagaacaggggttgttcatgtgtctttgtctttcctttttagttgtcttgactttctgtgattgactgctgaattggtcgttgtcttgtttgagtagctagcttcttgtttgtttccatgatcctgaataaaattgttacattcttagattcgaaaacatcacattacttaatctcatctttggtaatgaaagaaactcatcagagcaaagtagaagtggcagttaagtaataacgagagagaaagattagggattgtttgggtaattaaagtgatatatatgtagctaagggacaataaacagtagctaagagtttaggtccttgtcgaaaactcgaaaatcttatatgaaaccaacctaaccaaaaccaaagtctttttgagattgtttttgcttctggagttaaaagtagaagctagagagaaaagttggactacttaataatctttatgatttttttttgacctttcctcttatggatttattttagtggtttgccaacttgtggagttcactttcttcttaccacacacgtgtttgcagagtctttgcacgtgtcaaacctggtacatgtcagttagtaaaaatttagtttaatttagtagttgtagtttcatgtgactgtatgttcataactatatgataaacatgatagtggtaatctaaaaaatatttgtatggtttggtaataatggttttattgaataaatgaataatgagtactagttcgatattgaatacgtgtgtgacactcatttattattttgtctaacttctagaaagagagactcaaaaaaagggaatgcagcagttactaagaaagaaaaaggtgagaaacgaaacatcagcttcgtgtaaatcaaaactacagttttctcgggccaggtggctttgacccaattttctcttcaacatttctataattccctttctatccctcccttaacgacttatcaatcaacactaatcatcatcacttcactagattgttatacagaagtatccatacaagtgtcacataaactgaatacccattatcaacaaaagtatcactatcttttttcttgaattaacagtttaacactaaccaaatagatagatagtataatgtttttgattttaagaaaagaaacattacattttccttcgtagaatttagacaggtgatgttaaagaaaacaaaaaaagagaaaactaataattgtatatatatatgtatataaataaatattagaacatcagccattttgtgaataaaccagttataaaagtctaaaaaaggtaaagagaaaaacatttcaccaaaaaaaatcctctggttaatgttttctcactttctctttgttttctttctaacctctttccacgaaaagtcacgatg

SEQ ID NO: 2513 - DNA, 3000 bp, Unknown
  misc_feature (1)..( 3000): cDNA_ID_3068242_gDNA_ID_1620549_Annot_ID_160256 3000 nt of promoter + ATG
gaggtttggttggtcgagcttactgattaaaaaatatacacgtccaccaaatattaaaacaatatatcccatttttcctcctctcttttggtattacattaatattttattatttccccatttgctctgtatatataaacatatgtcaatagagtgcctctacagtcatgtttccatagacataatctctcaccattgtttttctctgcaaaactaaagaaacaaaaaaagaaaaatcggagaaaccaagaaaaaagaaatgggaagtgtagaagcaggagaaaagaaggctttaggatgggctgcaagagatccttctggtgttctctctccttactcctacactttaaggttttgtttcctcttctcctttcacaagaaaatttggttttgttatgtagaatttttatggttttattgaacttgtttttgttgaaaattgaattttggttttgttaatatataggagcacaggagcagatgatgtgtatataaaggttatatgctgtggaatatgccatactgatattcaccaaattaaaaatgatcttggaatgtctaattatcctatggttcctgggtaatttcttctctcttttcttatctgccttatttttcagctttattcttgactggtgtccatgaatggcgattttctttcatctgttaaaaatggatgttatcgctagacttcaatttagatcccaatcatatataaataagatggtttcagattttaaatggaattacatctttttaatttatttgaagttatgcatagattgttggtaaacttaagtatattagcacttgtgactagcttaataatttctaagcgtgctagagataactccaaacagtacattttcaaatgtaagtaaattgtttagacatatattttaattttagataacctaagggcaaaaacaaatattagataatcttagattgtaaatacatgaaattcttatttttaatggttcagatgagttgattagtaagtagttaaccatatgatatgtaatattttgtacaaatgttattgatatattcttctcggaatttagatacccattatatgatgcatgttgttaaatgacttttgtggtatgacagaagattttggtataaagttgacttgacattattgttaatttgaagataattgaacgtgctactgttacacatctgacattcgtttataaccacacctgtcactgtttagtcttctaaattaatatgcaaacaaaaaactctgtcaatgtgggacttgtaggggtaactgaaatatacgagtaagattccgtaataactaaaagtgtaattttgatttacaggcacgaggtagtaggtgaggtgttggaagtgggatcagatgtgagcaagttcaccgtaggagatgtagtcggagtcggcgtggtcgttggatgctgcggtagctgcaaaccatgcagctcagaacttgagcagtattgtaacaagagaatctggagttacaacgatgtctacaccgatggaaaacctactcaaggtggcttcgccgacaccatgatcgtcaatcaaaagtaagcacacgcacacaccttgtttcacaagaaacacacagagcatttgtttcttcatccacaagtaacttatttttgtttcaaaaggtttgtggtgaagattccagaaggaatggcggtggagcaggctgcaccgctactctgcgcgggagtaacggtttatagtccgttgagccacttcggtctaatggcgagtgggcttaaaggagggattctagggttaggtggagtagggcacatgggtgtgaagatagctaaagcaatgggacaccatgtgactgtgataagctcatcagataagaaaaaagaagaagctatcgaacatttaggagctgacgactatgtggtgagctctgatccagcagagatgcaaagactcgcagattcccttgactacatcattgacaccgtaccggtgtttcaccctctcgacccttacttggcttgtcttaaactcgacgggaaattgattctcatgggtgttatcaacactcctcttcagttcgtgacccctctcgtcattcttggtcagtactatttcttgcgtttaaatcatatctagctaataacaacaaaattcaatagcaaacctgatgtttttttctatattttgacagggaggaaagtgatatcagggagctttatagggagcattaaagagacagaagaagtgttggctttctgcaaagagaaagggcttacgtcgacgattgaaactgtgaagatcgatgagcttaacattgcgtttgagaggcttcgcaagaacgatgttcgttacagatttgtggttgatgttgcaggaagtaatctggtggaggaggctgcaacaactacaaactaaagagggcagggcacattgatacatgaacgaaaaattgtaacgggcttgtttgtccaacgaatgttttgttgttgtctttttcaaatggttcaaacacgaatgctttggctttatttttttctaatcaatgtggattttctgtttacgtgtgtttgtcacaagaaaatcattatgataagaattttcttccacttgaactcaaatttgttaacaattctgaatctgaattatggctgacaccaattgaaactgagaaccagtttaaagtgattataaagaaaagtgaaatctttttattgccaaccaactttgggctaagtattaaaagaaaataatacttttttgataagaaaaaaaaaagaggaaaataatttgattataattaaaatctaaaaactttttcgcggaagcgttaaggaaaaatctttgatctttggaaaggaagagagcaggcgcaatcgagtaatccaaaggagttgcgttgttctgcgatcacgaagcggtctctcggcaaatctttcgacgcaagacatcgattcgtgtatttcatttttgctttggaactctatgcggaagaaccctaattgattcgcc

SEQ ID NO: 2514 - DNA, 3000 bp, Unknown
  misc_feature (1)..( 3000): cDNA_ID_2048633_gDNA_ID_1620549_Annot_ID_160254 3000 nt of promoter + ATG
gcggtggtgaaactggcggagggggacttggcataggatcagtaggaactggtggagtgggacttggcacagaaggtgtaggagtcggaggtggtggtgaaactggtggggtgggacttggcacggaaggtgtaggagtcggaggtggtggtgaaactggtggagtgggacttggcacagacggtgtaggagttggaggtggtggtgaaactggtggagtgggacttggcacagatggtgtaggagttggaggcggtggtgaaactggtggagtagggcttggcacggaaggtgtaggaggtggtggtgaaactggtggaacaggagcaggaggagtgtatccaccgtcatcaccaccactgtcatcgccgccaccatcgtcgccaggggaaggaggaccacatatgggtttgcaagaagcacattcgacatggcaagagtcagggcaaaacttgggacaaacatgttccaagttgtaacaatgtttgtacttcttgatcttacatgttgcgtggcttgggttcttggctatgcccgggggtgtatcggccattgttaatgcaagtgatgccaggagtatgcatcccaatatttgaagtcttgtgtgtttagctagatccattgccaaaccaaacaaagaagatagaaaggtgtttgttttttcagttgttgtgtgctttaggatttgatggtatgaatgatgatgatgcagtacaagtgctctgatatggtttatatagataaatatgttgggtttattaaatatcatgttggagtctttttaatcttttaaacaagggttccttcttaaatctatatggagcttgtaatttaagattattaacacctttatgcataacttagttatattctgtatatacatgcttcaagtttttatttgatcgcaaaacggattctcgagtgttaactagtagtaggttaaaactttcacaatataattaagatgaattaaaagatttctcgaaattttgattaaaaggataaaaactaattagcctaccattgaaaaaaggcttggccatgatcattattttggttcgaatttttttattaaaaatgagaaatggggttgttaaaattttagagattaatactgataaaaatatcatcaccttagttgacaattaacttgacatgtaaacaattttagcgtaaagtcaacctcatatttaactaggcaatatatacaattagccattagatatgaaatatataatatctagcaaaactgttagaatgagtttcgattccactttatgcaattctacgtaatacataatgtataaatgtgatattagtaattatatgtataatcatgtaaaggctacatgaaagtttatggggaatcactttgcgatgaagtgatccgcatgctacttgaatttcgtgtggtagcacattttgacattttggaggtcacatgatagaaaacaacaatgataagttaagctatgataaacacctgctttacagctatatgttttcatttttctactttgtcttctatttgaagaaacatcaaaatactgccattttctctgttagcgttaacaattcatcaaaattaattttgtcgaacgatactttgtttcttattcacttaactacatgcatgctttggactttatgcgactcaaggaggcaccgactatatgtgttattatcaaaattctcttctttagttacatatgtgttattatgttccctctctgtggttatttggtcctctttattttaaggactactgttagtccatagtatatcagatatttgataaattgatcggcctgaaccagacctggcttgctcaaagaatatgcagaacaaaagccataaagagagctctgtaaagaatatacagtaaacatgttttatgaattaagaaagcttgaagttgaaaataaaacataactcttctttatgtaaggaaatcaaatttgatcataaaaaacttaacaaactgtgtcaattaaaagcaaggaatactatataccaccacttgttattgaaatatatcagtttattgaattattcaagattacagtgaagtaaatccaaaaaaaggtacaaagggtttgccctgtggtttaatcactagctcgcctcttcttcttgctggaattgagttaaacttggaacataattaaacaaaaatggccagtttgaaaagaatcctaaatccacttttctgacttgattgtcctctccaacaatgtatagcacgtttttgaagttggttccatcatatctagaatatttatcacaacacacgaggactttcttctcctcatcgaccaaaaagcttttaccataccaacacctcaaataattcaaatccaatgctacgaccatgctccaagacaaaacgttggtcatctcatcaatcttataattatgacccatatctctgtccttgatgtagcataaagttgtaataacaccgaaagtttctcttctttaacaaccaatagagacgcaattgcataaaaaggatactgacacggaagtagcagacttctaaatctctctgttttataatcaaaactcactaagaatgtgcaaagatcaacttcctttttatcaaatatttatctttttcgcaagcaaaccaatgagtatttctcttcaaattttttggttactatatctcttttttatcacctaagcgccgtcgtttctcttcaaatctctctgttttataatcaaaattcagttatttttaacaactgattttttgtgattatttagaaagtgaagacaaaatgttaatcctcacctcatggaggatttaccaaaataacagagaaattaacgctaaattaacagttacagtattacttttgtcagaattaccaattaattataagcaaaaatatgaattatttgattaatgagtaatgactatcggttccatctttcccaagttcctctgctccaaaacctcttaaaccctaattcgaatttagcctaaaccctaaa

SEQ ID NO: 2515 - DNA, 3000 bp, Unknown
  misc_feature (1)..( 3000): cDNA_ID_2048658_gDNA_ID_1620549_Annot_ID_160248 3000 nt of promoter + ATG
aagaaatgaaaaaggaatatttttcattagttagtgtacattttaatagtaataccgtgtatgaccacgacatcatcaaataataataatatgatatcgtatgtaatttttatatagtagtgtgttatttaaaagtttccaaagtgcgtgtaacatatgggttcctagtaccttccgggaatggttagcgtcgtcaagaaactactctgtaaaaagttagaattaggttttccaaactaagaaacatgcttgtaaccaaaatttaaacaatggacaaaatacgaatggaattatcttgcccatgtgatgtgacgtgttttttattttcaatttgtttttattccagaaaataaaataatgacacgttggagccaatacgaagaacacatctatccatcccaatcgctctccacttttctgctcttcgacgacaaaagtttcaaactctataaatacttgaacgcaacagttacaaaaatgtcaaatcgaaaacaaacacaaaaagcaaacaaatatggctacttcaatcaaatctataaccctagctctcttgatattctcagtgttactaatctccttgtctctcggctccgtcacagcgacggagactacacgaaacgaggcggaggcacgacggatgtatgaaaggtggcttgttgagaatcggaagaactataatggtctcggagagaaagagagacgctttgagatcttcaaagacaacttgaagttcgtcgaagagcacagttccatcccgaatcggacttacgaagtcgggttgacccggttcgctgatttgactaacgatgagtttcgtgcgatttacttgaggagcaagatggagagaactagggttccggtgaagggagagaagtatttgtataaggttggagatagcttacctgatgctatcgattggagagctaaaggtgctgttaatccagtcaaagatcaaggatcctgtggtaagtccaattgcgtttgcgttttaatcgcttattttttggcgtttctattttttggttttgagctaatcagggattttttttgggttggttgatataacaggaagttgttgggcgttttccgcgattggagcggttgaaggtataaatcagattaagacaggagagttgatatctttgtctgagcaagaacttgttgattgtgacacaagttacaatgatggatgtggtggaggtcttatggattatgcttttaagttcattattgaaaacggtggtattgatacagaggaagattatccttatattgcaactgatgttaacgtgtgcaattctgataaggtaaagaaccactgatcagtgataacaacgacattgtttgtactttatttatttatggtgtatagtacttatctgttatgttctgttttttctttcaactcatgcagaagaacactcgtgttgttaccatcgatggttatgaggatgttcctcaaaacgatgagaagtctttgaagaaggctcttgctaatcaacctattagtgttgccattgaagctggtggcagagctttccagctttacacatctgtaattttctatgaaccttactttggtttctcttaatccaagatttgtttcgagttcataaaataatcccttttgttgttgttttcagggtgtgtttacaggaacatgtggaacatctttggaccatggtgttgtagctgtgggatacggatcagaaggtggtcaagactactggattgttcgtaactcatggggatcaaactggggagaaagcggatactttaagctcgaacgtaacatcaaagagtcatcagggaaatgcggtgtggcgatgatggcttcttaccctaccaaatcatcaggctcaaacccaccaaaaccgccagcgccttcaccggttgtttgtgacaagtctaacacttgtccagctaagtccacttgttgttgcctatatgagtacaatggtaaatgctatagctggggatgttgtccgtatgagtcagccacttgttgcgatgatggttctagctgctgcccccagtcataccctgtctgcgatttaaaggccaatacttgtagaatggttagtttcttgttctctcttatggcttaaagactttgcttttgtttgtttacttgactgattcgtttatgaaatttggtgtccacagaagggaaacagtccgttaagcataaaagctttgacacgaggaccagcgattgcgaccacaaagtctacaaacatgctagtgggcagcgcttgaggagagataatacaaacgaagaaccgatttgttttcagcccacgttatcaagattcagtcttttgtctttagacacttccaagttggatcatagtttgattactcttgtcaaatttaatgttatcttggatttgattttacttgatgtaaatgtttaagaagtaatctgatatttgcttccataacattgtgtcatcttcatttgataagtttgtaacagagtatcatcattcacatgatgtaagatagattctagtttaaaacataacgtgttaagctataggaaaacagtttggtgatttaaccaaaataaccaaggaaaagctgatccactttaatcaactacaaaatttgttctcttaaccttccagtaagatagtaaaaaacatctgtacaataatgccagacattagcgttaccatacttcctttggcgatcatcatagaatccatacacctagatagcataaatgattttgtgttagagcatccacattggtgggctctcaaaaatataatctctcacgtttgatgaaaagattataaattgtaattttctagaattaaatacgtgacagaatcatatgattttgatatttaaaaatatttattggtctgaccaataaaatatacaaaaataataaagaaaaatcccaaaaacacaactaataattcatctgcctcttcttgtcttgacgtcaactgtttgcagaaatctcactgaaactagagagaaaaccaa

SEQ ID NO: 2516 - DNA, 3000 bp, Unknown
  misc_feature (1)..( 3000): cDNA_ID_3068248_gDNA_ID_1620549_Annot_ID_160242 3000 nt of promoter + ATG
gctctaaccttgactcttcacgtcattcgcatattactctcctcctcgctgatccattcgaattctgcactcaaatcgtgtttttgtacatcatagtttcaagcattatgattctctctagccaatgacttttcttgcgattgaatccttttgcagtctcgttatcaaaagttgaagaatttagtttagtttggttgtgtagataagatttgtaatcgcaaaattcgatctttgttacagttatggattcgagttactctgattctcgtcccatgttcgtgcaatcaccttatggtggttggaatcaaacacagatgattgattcaatggctaatccaatgaacaatgaacaaggagacttgcattcactatctgaatcacaatcacaatctcaaccgtctcagcaattacagcctgcattgaaaaggcctagacttgttgatgataacttgtttaatcctgcttcgtcgtttcctcagccttcgagtagcaatccttggatggttccatctttgaaccctcctcctgtgaacaaagggactgctaatatattctataagactagaatgtgtgctaaattcagggcagggacttgtaggaatggtgaactctgtaattttgctcatgggattgaggatttgaggcagcctccgtcgaattggcaggaaattgttggacctcctcctgctggtcaagacagggagagggagagagagagggaaagggagagggaaagaccgtctttggcgcctgttgtgaataataattgggaagatgatcagaagataatcttgaggatgaagctttgtaggaagttttgttttggggaagagtgtccttatggggacaggtgcaattttattcatgaggatctgtcaaagtttcgtgaggactcggggaagttgagagagagctcggttataagtgttggtgctactgctgctgatcaaccatctgatactgcttctaatcttattgaagtaaatagacaaggaagcatcccggtacctgcacctatgaacaatggtggtgttgtcaagactgtgtactggaagacgaggttgtgcatgaagtttgacatcacgggtcaatgtccttttggcgataagtgtcactttgctcatggccaagcaggtatgttatatgttgaacatgtatctttgctaatgcgaccttatattatagtatcctagtatagatttgcaagttctgtgtatacaggctatctctgaattctcttcttttgaccgacatttgtttgatcttgatttggttgttgattacgaaattgcagagttgcataactctgttggaagggtagaaggagaagctatgaacgcggtagcgtctgtgaataaacaagcagtggtacctgcgaatgaagcatttgcaatgaaaccgattacacaagtaacagcagattcctctggtctgaatgaagaagggcggcgaaagaagtgtttgctcaagtggagcgactccaagaagattaaccgaatatatggagactggatcgatgatttaccggtgggtcaaaagtcgacaaagccagtagagagttgagttttctagcctggtttcatttgtctcgtccttttgatgatcaaaactgataaagctttggtcgaaaattttgaagagtagaaacactctttattttgttcattagcaattctttgattcgctatagcttagaatattgcttttgttataatctttgattacacaaaaaaagtggcttggctcactaatagcatcttattcttaatttgtttcctttggcttctaatgttcatcattatatggataggtttcgtatttcgtttgccttttaatgttctaacgaatcggaagagatatagaaggaattgggcgtatcctaaatttggcctctagtgtttgttgttggttgacaaaataaaaatgtttgttgttgacttttgttttcagattaaggtttaattatctacatcaaagtgcattaaggttaatcggatgttaaaaataaaccactttaccgatttatcaattttcttatatgataaaccaaaaccggtacggtttgctaccgttagattttggatgctcaaattaaatcggttggatggtgctagtttttagaataacgatcatacattctcttttctaatctgttgatatattatatacatacgaatgcttattgttaggtacttaggttcatcgcatgcaaacaaaatcatggaattgtaccatcaatttttaaaaatatatatgtctaaactacgaataatgcagaataaatccatttaacaaagggaccataatgattctttagtgccaagcgatctttttggtttgtttccctacaaaagaattaataaagatttcatactaacggcttaaagtgattaatcatattgctatggctatggcaatacttatttgataatttcgtcgtagctttattctttttatagaaatcacacaaaatatatgggccctcaaattaatagtgttcgtaacgtctcctttactattccccacttctccatttctatgaacttttctttttgctactattgtttttgtattcttttcaacatgacatgatgagttattaaagagctgttgtaggtagagagtcgtagtaaaaaactaaaactgtcggtggaggctggagagcacttgggaatcctatggccctcccaaaaacatataaaagataagaaaagtagtgaaatatagtaataattattgtctttgttagtgatttagtggattgtctaaccatgattagtttatatatttgttttctcacaaataatgaaagtaggtagtatcaatatctagacctaatattttccatatatttaggtcaactctttcatatctggttgatcagtaatcatacaacgttggaattgtttgttttgtttctattataaactaaaacattggtaaaaatagattttcatttgtggaattttcgtcaagtcataattcacttgtttgaaaaca

SEQ ID NO: 2517 - DNA, 3000 bp, Unknown
  misc_feature (1)..( 3000): cDNA_ID_3068256_gDNA_ID_1620549_Annot_ID_160232 3000 nt of promoter + ATG
cagagaggaataacaacgttcaagattcttagtcaagtctaaaacagaggaatgcaatctgaaaatcatgagcatacagtgtagatgatccttcaggctcccattttccatatactcgtagacaaggaacctgtaattctcaggttagatgagcaaagggcaatccacacaaatggggagaaacgaaatgaaggtcaaccgtaatcattcacctctcgttcttcttattacaaaaccctttcaaagcaactaggtggcggtgatgcagcctggcgagaagctctatctctctgcaaaattcatcttcagcttgttcagagctcttgttcatcttttttacagctgcaaccaacccattactgaactcagctttgtaaacagtcccaaagcccccacggccaatcaccgcgttgaaatcttcagttgctttccttatctccttgtagctgaatttccgaaaaccaaacgaattacctgaaaaatcaaaaccacacatttgttttacatggtctaacatcccttgttagtgtaccatcagaagaactcttcaccttcatgaatcatcgaccttgggcggggagaaggagatgtccttgttagattacaagcgatgctcttggagtcatcaagttctcgtttttttctttggataagaactattaggactacaaccatcacaagagcaaaaactgtgacagcaatcccaatagtcggaaccattgtcaagtgatatggatggtgactttttaatggagacaaaacaagattatcgctgcttggactatcagctaacactggaggagaagcttctggactcagcgatgatggagacgaacctgagtagatgtgtcaagaaagtcagaaaagaaaagaaagtccaatcttgatctgatactaagaagattatacaggacacactagtaatatatacaggatctgtcaagcatctttcccaatatagaaacaatgataagattctacactccatgaatggtatgttgacagagaaaacagtatatacctggagtggggctaagctcaggcacattaaagaagcagctagctagttcaagagccgatgaattgtcaacccggcttgctaacacagcataagttgcatcacgacaagtactcagtttgatgctattatcagcaccaacgaggctcctaaggtagctgatactggaattcaaacaattcctgcattgatcacccggaggaagcgggagtttgcagtttctggaaacatctccaaaacttgtggaatgaagcattggcggtacagtagtcagaccctcacaatcatagttaacaagaatcttggtccctaatccacagaagatggtagcatttcttgggattccataaagctccatggttctagagatagtagtgatacagatttcagtcaaatctgatgtaactccaagatcagctgtgtagtttgcatagcgggcgacagatattgcaacgaaagcattcatgtagcggcagcatttagctctctcggtgttgttcgagcatacggaagccactagagtgaagttagatgaagtaaagtccaatggacaacctgtaaacacaatatatcacataactttgcttcaattttgcaatagtttctttctctcaatgaaaatctcatcaaagactacgactttaagcaacgaattcaccacaaattagaacaaaggaacacacaaaacactttaatgcacatcgaaattcgcacaaagcttaaacctttcagaaaaagcaagattaacaacagttcgttttctcttctttatctagttacgaatcaaacccatggaagaagattgtcaaggaagattctcaaaagactgatgtggtgagagacaaaacctgcttcggtgagtaaaggaaagtactggaatccaagcaatgcgaagaatgcgagcaagagagcttgattataaaccaacaccatggccaaagaacagagagagtcgttaggagaggtcaatgagaagtcgcctgaagagaatatgacagtggaagaaggtcagtgacaatgagatggagagagaaagagagagcccccaactttctctatttcttgatgaaacccattaaacccctgaataatccttaaatttgtcattctcttatgtttttacccgaaagttcgttgtaatagttttaagcacccccatacaaataaaattactaattttcgttcaataaaacttttcatgtataaacataatcattgcagtggtcggtttttaagtttctttttttttctctatcttatctcttcacatgatttggttccacaaagaatattaacaactcttagaaacaataagccgctatatgttttcatcataaaacacctgtaaaatgttaacatacggcggacacctaaatgtcaaactagatgatagtatggaaggaatattaaaacttctccaaatactttatcatatggtttttctctcatgtgtgaggttagttttatgattgatttggaccggcacaaaacgtatttaattttcataagactaaagtactttataattttagctggcatgctaattaacttgatagcatttgattacttgataatgatgacagtctcatgcaagttcttcattttttggttaagtttattctttaaaatggaatcaaagaaccatttcatgtaggatggcatgttaacttgttaagtataataataagaacaaaccataaaggaaaacgagaagccaataaagaactctcttctatagctattaatatcatcattgtatcctagatactcgcgattcctcatgttattttttgtttgaaaagataaatttagatttaagtttttatttaccgttttttgttggttggtcaaaacaacttgtaaatcacccgttccaagtcttttggagttttaccaagtagttgcttcttcccaaagtcaaaatctttgggtttttattcttttaaacttctttatgggattttggtgcaagaaagaagaaa

SEQ ID NO: 2518 - DNA, 3000 bp, Unknown
  misc_feature (1)..( 3000): cDNA_ID_2048691_gDNA_ID_1620549_Annot_ID_160235 3000 nt of promoter + ATG
agagcattgtaagataccggtggcgaagcctgaccgtctgatccttcttgatccggtttaatccggtggggatctttgccacaagggagataaaagaaagacttaaagttaggacaactctgtttccgcaagaaaaacttggcgcattcccatggtgttctttgattcgtaagatctagaatacaattcatacccacatcaagaatcttcctcttgatgagtgttcgacattttggaccgacctgtgtgaagtaattgtacgagagagaaaggttcttgagggctgagagctcgcagacaatctccggtatagtaccgtagaaattgtttctagccaaattcagctgctccatcttctttaggcatccgaaagagtacggaatcggaccggttaactggtttaactcaacatcgaaaaccgtagctcggttaaggttcccaatttggtacggtaagcaaccagttaacttgttattcaagaaaaggacttcttgtagggacttgatgtcaccaatgcttcccggaataggacctgtgaatctgcatcacatcacatgtaattccccccaaaaaaataactttagaaccttaaaaatacaagatacaattcacaaatatctcgtgacatcataataccaaacttgaaataaaaacagagtaaataactctgtaatttgaaacagagtaaataattccctgataacaaaacgagaatgaaagtgtggagcttttgagacctgttattagcgaatgtgaggtaaagagcggtgatcgatccaagattttcagggagtctctgaacaagattgttgttgttgatgaacaatacgtcgaggtctagattgaaaacctgaggagggacagaaccggagaaagaattgaatctgagatcgagaaacgtgaggttcgttgcttttaacacagagcttgggaactctccagagagcttattgttgctgagatcaagctcgaaaaggtacttcaatttgctgaagtttggaacagagcccacaaaattgttactgtttgcgtgaaagatggtgacttcttctaacttgttgaggaagttatctagccggagtttcttgccacccaagttaaaattgttgaactgaatgctggcaagtgcgaggtcgtttgttcccggtaacttggcgcactcgagtcctatgtatttgtcctgagcgcaaatgtcggtgcctacccatgttttaagtatgctctttggatcatcttcgattagcgtctggaaattcttgatgactggataaactttctttattaatgggcttgagaaatgtagcggcggtggcggtggaggaggaagtggccgtggtggcggtggtgatggtgttatataatgatgataaggagggggaggatagtgttcaggctccggagatggggatggaggagggagtgactgtggtggcggcgggggtggtggcgtttgaggaggaggaggcagcggaagatagtcttctggctccggagatggcgcaggagaattgtaattggtgctatcactgccaccgccgatgatgatttcgagagattttctgtaggtgttgtggttgtttccggtggctagaattgaaagaaagtgaacagacagaatcaagaaaatggaaggataataatttggggccattgctgatagattgatgagagccttgaggattggcttaggcagagctacatatagagaaagtgactgaaaatgatgagaagtcaatgcacatgtcttcttgtgggctggttttaggttacaacttacaatgcaattagctaaatttacatttgaattattggtaagaaaaaatattaattaagatcttcatattataatgccaaagggtggttggatacatgtgtagctatagcttcgttggtgtatgatttttttccgtcaacggcttccacgaaaaatcttggtaatagaaaaagagtaacataaattctttagtgtgtgattagcaaaaaataataaccaattagtatttgcaacaaactattttctaatagaatctgatcaaggactctaccatagattttggtgctttggatccattcttagagtcaaaggagcgaatgcctctggtgagtcaaagggcattggctttgtacagtacaacactgaagaatcagctcacaaagccatagaacatatgaaacgaatgtttcttaacgataggaaagtatatacgttggaccttttcttcagagagatttccaagcgaaaaggagatttaatttcacggatatttatgtcaagaatctctccaagtccttgactgataaagatctgaacacaatttttcaagagtttggaccaacgaaaagttggtgtgatcattagggatggttttggatttgtcaattttaagaatccagaggatgcagagaaagctgttgatgctttaaacggaaagaagtttgaggacaaggagtggattcttacaaaatcgaaaaagaagtatcagagtgaatctgaagtgaagcgaggtttgaaacaggctatcaaaaacagatcacagggttcgagtaacttgtgtgttaagaaattggatacacgagtaacagatgagagcctcaaagacattttttcttcctatggaactataacatcatgcaaggtttgaaactctatacacagaaaaatttgaggtcgttgttggattcaagatttttacatttttgaatgtaaacaggtcactcatgagcgacaatagtggagtaagtcaaagatcaggctttgtttcatttttgaagccagagggcggacgcttttaaagttgtcagtgataccctatgggtttctcaaaaaaaaaaaaaagtattttaataagagagtataaaagactaaactaaaaagtaaaaagaaaaagaattaagacattgaattgagtagcaagttagaactaaattaagccccaaaactgatcagctgttatgtatgattcagtagctttccattgatgaatcaagttcatcttctag

SEQ ID NO: 2519 - DNA, 3000 bp, Unknown
  misc_feature (1)..( 3000): cDNA_ID_3068294_gDNA_ID_1620550_Annot_ID_160277 3000 nt of promoter + ATG
gagaatattacatattcttttgttcttattattgttacataatcaccaaaagtaagaaggagtactccaaaattaagttgagatgtcctccttggagaagtggacatcaaagccaattgatggagttgcaaaacgaccagtaaactgatttgtgttttctttcttttttagtttaattatgttatttgcttcaattagaaataagatgagaatctgttctccttatgtttaggatcagagccatctcgttcatattttccttgcttgtagttgttggagctacgactccactttgcttcctgttttgtctgtttctaaaaaaaaaaggcaatcttaattgccaaacaaagtgttattgtgttcttactctaaaagctttggtagagatcaaagctaacaccaatacttggccgttgatttttagattttatctttgtattcttatgaccttgtattgaattatttttaaatttctattgattgttgctatgatgactattcaccaaaaaatgattcaattgaaaatcgtttatatatcgttacgtacagtgtacaccacttgacgaaaacatgatcataagattatgtgtttccccaacaaacctggacctttccacagtcatgcctttatgatgtcagacctcatatcccctgtaacttgtgattgggacagggagaaaataagagaagccttacttgacttagagcaggagattctgagtttaaagctgagtactaatggagccgaggatacttatattgatcaagactcaaataagaaaggcctagtattggatatgtactacaagagagtgggccgaacatatgagaagtctatgaagagcttctagaagaggtgaaggcacacaaatatctcttgtagccgttgaagaggactcacgagtgtctttagcaacaaggtcaaccaatgaccagtcactctcatcaccaagaccaaggaacctcttctcttatgtctctttcagtcttacgttaattgtaaacggtcatattctctttgtgtgtctttaaagcattgtaaacacacaaaggttacaattctaattctatcaacatgatttggtctcatattctctcacatacaaactctcttgttcttcataactctcttaatctttaatacaattccgcatattctttcaacttatgcttggctaccacaaaaatttgggatctacacggctaaatcaccttcaaggagctaacaatggctttaactggacaaaagagaattggaatactatgaagatctgggaagtggctccactaaaacattcgatattcactacatcaaaaactcctactaggaagaagattggcgttccagcttaggtaagtagccactaaccaatttatttgtttcagaatgttcacatgaatggcttgcttggaccattcaaactcttctcattggaccggccatcgtagttaaacagcattatagagaagttatatgagaactgagaaatgtaaagtcaaggaatgagccaagaagcataagaagaagattcatctaaacattgtcaaaccaaggagaaagaacaaccattaccatgtccgtgtaatcaattcagtactgccttctgcccgaagaactacattacgcgattactcgtgtcacgcaccggtttggtttcattgatattgcataacacaacggatacaaattgaagagcttaacttagacataaatattaaaactaaataaaaatttatcaaattttttaggtgaaaacgaaatcagtgggatttttgttttcttttgcatttttttcgaattgatatgttgaaactttcaaactgaactcgtatattttttctaaggtggccaccatgtcacatagctagagagaatccttcagtatatttgtttttgaaaacttcgtcatatcaaaattttctgatacaaaccgcgtgattttatattttaatgattaatcttcagaggtgtcatcatcggctcaatgttagctgttatgacttttcacatcttccatcaatgatctgaatttgatacagctaatgaaatcaatttttttctatcttctttttttttgttaaagggtttgattcttttctatcttcaaggtaattattatttttgttataaccaaatcgtcaaagtccagtggcaaaagaaaaagaagtttctgtctctttctttgagtagtattgattcgggttcgaatcaaacatgatttccccgaatctcatagttaattttgggcttaaatgtttttggaaaatttgtgatagtatctattttctaatactttttgtaataatactttttttaaaacctttgaaaatcaatttaaaactggtcgtatgacattttttgtttttttccaggtaagccctgctcaaaccattactaaagttattgagcagcaaagttgggaagaggaagagcaaagatcataaaataaagaagtcgaaataaacaatctaacggggcagacaaaagtaagaaaattatacaaattcgatatgaatttttatttaaataaagattaaacaaatttgataccatctaattaaatagtcatttcaatatattttatgaaacaaaacaagagaaaactaatcaaaaatctcgaaggtatcaattatcatcgttgggctcaatgttagctgtcatgacttttgttgtcttaattaattaaacaacttgttattgaattaaaaaaaaaggaataaaacttgcatgagagtttgaaaagcaaagataggaaaataaataaaagtcgtagtaaactaactaacatggttgtattactatacaaatcaaacaaataataacgacgtacgtgcccactagttgtattactaatttactatagacatgtcaacgtcaaaattaatgtagtatctgataatgtaacaagtagcattgctataactagagtatatagaaacacgactatattgatccattagaacacaaaaccaaagtgctactatccaaacataaatatg

SEQ ID NO: 2520 - DNA, 3000 bp, Unknown
  misc_feature (1)..( 3000): cDNA_ID_2992061_gDNA_ID_1620550_Annot_ID_160284 3000 nt of promoter + ATG
gtattaagtactactttcattctattttacttattgtttgagttttgtttatcaatagttattaatccataatggctaaaaatttacgtgtgttgtagtttagatgtttgcgatctaacctcatattaatttagtaattttagttggatattttcttattattacgttatgtgaatatgatttattatatgacattctttctgtttatttttgtgcggtctgataacttgataacattgatatacaattttttcacgtaatggtcatctgagacattagacatatccacacaaaatacgagactctatatggctatttgcaagggaagaaaattaaagtgttgacttaaattactagcatatcatgatgtggttggtgtactagatgacgaaaaaatatatggaataaagaattatttgttaaaattaaattagacaagtttcaaaatacataagtaatataactacatattaatatatcatataattttgttgtatgtgttcatgatagtgaaatatttgaataataggtatataaatattcatattatagtaaaattaatatttcaaattatagataaatttaatcataaaaacttataactatataaaatagatatgaatttattaattacaaattaacacacacacaaatgaacatcaaaatcaacaaaagaccataatcatatattccaacaattttaaaaataaaaacccatgcatagcatgagtgttcatctagaataacaaattaactaataataacaaatatgtaggtaattttataaaaattgtatatataaagatcataagtttataaattatctatatgtggtgtaatcatatatatgaaagttggccaactctctttatatgaatgacacatcatcacttagcttttgccacatgtccacttaataattaatgtaagttaattgtttatggtgatttattatttatttatatatattataaatttttacataattaattgtatgaataataattttcttttattttgtatgttttttttcttaaattaaattatttaattgattctcatactcttggatattttcccctaaattttatcattttaagtcaaaatatgattaaataattttatagtggattagctaatagtttccgtaggttgttctttttctatagaatatattaaaaatggtgagaagtacttgagaactctagcatcaaattcttggactcaaatcctcactgatagagtttttcggttatggacttcgtattattttgttttgtttttgcaaaagtggcaacaatgaaaattaaaagaagaaaattattttacatttatgtttcaaaaaatcaataaggcttatcaaggtttggttctatttgtctatttactataacttaataactctttttatttaaacgaaacgacagcccgataatcaatgcttaattttcctacttaaatactaccacaatgaatttcagagcgggtactccgatcttctttgcattttgtcttttttttttttggtttaaggttgacacaaatgaaaaaaaatctgaaaataatgtttactaagaaaatattttgttaggaatttaaatgcaaaatgcaaaaaaaaaatgatgatttatggagcttagtatcaaataggaattctgtcttcttgcctattaaaaaaataacctaaattttatatttaaatacttttaaattacgaaatataaagtgaaagcccgcacgtggtgcggatactcatctagttattaatatttgccaagatttgtgttgaaaacattacgagtaggccttggcaaataaacagaaacaactgaaccaaaaatttaaaaataactaaaaattcgaaaccgaatcggtaccgaaccgaatattttggataaccaaaaatatctaaaatataattatatttttaaaagtattagttatttttaaactaaataataaaaaaatacttgagaatatatataagtaaaaatactcaaaaatcactgaaaatattcaaaaataaccgaaatatacgaaaatatacgaaataaaataaccgaatgcatactaaatttaaaaaccgaaaaaaacagaatcgaattgaaaccaaacaaaaatttcaaaataatcaaatggatactaaattttagaaccgaaaaaactgataaccgaacaccgatgactaaagtctatgagcataacacaatccacaaaaaataaacctccacagttttactggctatgccataaaagcccactggacctaaatgggcccatattcaagcatcctgtaatctcacaagagctagttatctggtgcgggcatgagtataatacgttatcaatcttcctcttcgaccattaaagaagaaaaaaaacaatatcatcgtgacgaatcgaacggtttatcagctcttctgactttgcttgaatagatcggtcaggtgaaaaacacgagagactctgtgaagaagagatcgctgcgatctatcacggttccattgcctggaggattcttcttccttgttttgatcttgttcttatcaacatagtctgtgtaagctgttcgattctcgccattttcaatttctgttttccctctctgtgataaatttcggagttctagggttttgtagtttgattctccgtttttgtactggtttgtgttgttgctatttcaattttggttgaaaatttcttgatttttgttgtttcaggtgattttattggctataacgagatatggatttggcatcccgttataaggtgaatatctttcttcgattgtgagcttaatttcagctgtcaggttttcagggtgattaaattctgttttggatcgaatgcatgtttccttcttgtttccgtgttttcgaatagctgtatttgttgagaggagtctgttttgcatttgctcggtgttgattccaatatgaattttagtagtttctcaatggtgtagaaagagtgactggtagtttactaatcatgaggatg

SEQ ID NO: 2521 - DNA, 3000 bp, Unknown
  misc_feature (1)..( 3000): cDNA_ID_3068277_gDNA_ID_1620550_Annot_ID_160288 3000 nt of promoter + ATG
agatgtgcttgtgaaaggaaaaacatggacttctgggattcaggaagagttgactggttcctttgtgtttgtgtgcgctcatggtagccgagacaagagatgtggtgtttgtggaccagttcttatggagaagttcgagcaggagataagttcacgtggactttcagacaaaatctttgttttgccgtgttctcatatcggtgggcacaagtatgctggaaatttgattgtcttcagccctgattcagctggaaatgtttctggccattggtaagaaaatgtcaaattcaacttgcatatataattcagaaaagtaattgaatgtaatatattatgcataacgatcttggttttatgcaggtatggctatgtgactcctgatgacgtgcctgcaatgcttgatcagcatattgcaaaaggagaaatcattcaaaacctttccaggtctgttttccaacttcttgtttctagattgttgcagatatgtctctgttaaaacagctttacatttcctcgtgtacattgtactttttatatcgatatccatggttgtagtaaaccttacactagacatataccctcgtgtttgaactgaaacggtttttcaacagacaaaaactattgtttgctaatgaatgttgcaactccgtatatgtataactagtatgatactgcaatgtagtcaagaagtttctgcgtgtaatggtactttcgctgaggtttttgtttgcccaactaggaagctcataaccctttactcacccattttatctaataaaatattgttatcactttatttctagaaccatagtcaacaagtttcaggttcataccttgtctgattgcttatcttcatttaacgctgtgttttcaattgaccaacattgtttaacgaaaataatttctatttcagaggccagatgagactaagacccgagggtgaggaagctgagaaagaggatgagcataaaatcccaaacggaaacagtgtaatggtggaagaacgcgaacctgtggagcagaaagggttcacaggaggttgttgccaaggtgcaaacggagtttcatgttgccaagaacaagctgcagagccagtcaagaaagaaggatgcatgaagctaaactggttgaaatcgatggggaaagaagaggttctcttgggagcagcagtagtttcagctgtcgcaaccgttgccgtggcttacagcatttacagaaggtcaggttaagaacctgaaccaccctcctctttttacacttttaagaagaaactttatttttggtagccatattatagaagtaaaggaagaaaagaaaacatggagaggtaataatcttttggaactatataaccatcatttggtttcggtatgggcaatgcaggaatgggatgtaatcttgcttttgactcggtttagtttggtttatcttattatgttgtcattggaatatatcaatcttctctagttttgagtatacgtatatgaaattagcaggtgagggagctacttattttagttatactggcccacgcgttgaggcaatacaaaagtcacagttaggagttaagcaaaaaaatgtcatttaatttcccgagtggtcgtttaaaacatgaactaacttttgagacatgagaattcgttgattaagtcaaaataaacatgtctttatcagtcgttaatggaacctctaacgtccattatcacctctaacgattttattaatcagctttcaaattgtagacattttaaatatcaactttgtatgtgaccatttaaaacataaattaaatattaactaatatttgaaaacatgagaaatttgttgaccataccaaaataaacatatcatcataatactttaaagaaacttataacatccgttaacgaaagtagaaactggaaatatataataaaaccatatattatttgggtcaaacgacacaatttggtttagtttcaagcttgattttgattatgggacaatgttaccattcaacaaaattataagcaaaggaccaaaaaaaagatcaatgagtaattcataatcgacaaaataattttattgattaatataaaaagagtataaaaatgggtttgaaaacatgaaaaatagatatctgcgaaggtacacacacaaggacagtcgtaagctaggtaaatggatcccacctacctcattctttttcaccgacgagatttttctattcacatttcagtttttggtcttattttagttgttgcttcactattcatatgttcattatatcaatggcttctagtcttcttctagaaatcgatcttaattcttaaaccacccacttagttcaatatgtactattatttctcaataatacaaaatagattacaaatagttttgaattatgattgtatttttaagaagaagaaagacactaaaaaaaaggatgaaaaagacccgtaagtgttttttcttaagagatagaggagatttctggtcacctcacccctcactgacgcctacgcggaaaaagcaaacaactttcgatttctttactcctttttttccttctctctcaaaacccctaaaataagaaacttcaaaaaaaataatcattaaccaaaccaacacgaatcatcaaaattttgaccatttctccatcagttccagtgtcaacttcagttcttcttcccattcttctctcaaattcccatctttgccgttcaatgtttttgttttctttatgtagttgacgaaattaggattttgattgtcgtgtttctttctttattctgtgttcggggaatcctttgataattttctctctttatattccaccaaaaaaaaaagcatcttttttgtttctttatctatctgattgttgtatagtttctcaattccaaaaccaaacagaatgattaatcaatcaaaaagggcccagctttgacatatctctctctttctctctttagccaactagggtttttgtgatttttgttctggggttgttgtgggaaaatg

SEQ ID NO: 2522 - DNA, 3000 bp, Unknown
  misc_feature (1)..( 3000): cDNA_ID_3068269_gDNA_ID_1620550_Annot_ID_160290 3000 nt of promoter + ATG
ttcggctgatatgtccgagcctactttgcatcatctcttctaaatttgttcaccattaccttacctgattctttgcattccattatcagtctatatcatgacgtgacgtagagttcgggccgggtcactgttaactttaaaattagaaactcttttatttaaatatttcgaataaaaaaataagtgttttaaatttaaatgatcgaacttcaacccaacttccaccagagtgattacggccattcgtcacatcaatcttttaatgacctattggcctcactattttatctaataattacactttatccaatattaattattgagtatattatgtggctttgataattggccgagttggataaaatagtgaggtttatactaatattgttgttaagttactattcagattcaaactcgtaaaattttatgtaattgacaaaagggtaagttggtttgatataactacgccattattctttcccaagagacaagaagtttgcaagggcaagataataaaaaggtgttatgggtatggttgcattgacaatttaggtttagtatggatataagtttggttgattcgaaatttgttcggttagtttttttttttttttttttaattttaaatttcctttaaaagagaacatacaatgccaaaaggctaaaaaggcacacaggcctgaacagaacaaggcaaaagcccaacacaggcacgcaggccccaaaagaaagaggaagagaggaaggaaaaaaggagatagagaccttacccgaacaacctaaaccaggttgagagaaccgacgatcccggtctggctaaccgttgggcacgagccaacggatcaaggcgcgccttcaagataaccttaatctccttgacaatagttaaggaagttttctgagaggaggaatgaattctttggttccgctccttccacacaagatagactgaggcttgaaaggctaatttgatgatcaacgccgtattaggttttagtttgtttggttttactttggtttgtgttggagttgattcccaaagattttaaacattcaaaagtaattttctgtgctcttatataccaaacaattttccaaataaacttcatcgtttggtttagtaaaaagtttattaatcaaacatcaacatgcaacgattgtgacatggtttgggttagactagttcggtttagtttgacttggttcagttaaaatactcacctgtacccgagacgaggatattagaagcgcaaaataataaaatacgccggaggacgacgacagccgtcgtccacgtgctgttgccggtagtccacgtgcgtccatgtgaggcattgaggcgcctcggtcgtaacttccgcctacttcctacattatgttaactcaatttttaagtgtaattaattactaatcactattcagtttttgttttgttaacatgatttctcgttttttttttttgttgaataatttttagattcatcctcgtaaaatggtttaactaatggagtcattttaaacagtaaaattaattatttctagaaataaagaagaacatgcatagttatttaagttttaataaatttattatcagtggttcaatgtaccagccatctcgaattcttaggaggacatgtctcctgatagaaaaatattttaattaaaatctaccaacaagattgcattggtgcaattaatatctaatgattatgattccatgttgtataatctcattgcatagatattgattcgaaatagaattttcaaatcacgaaaatatgaaaatggataaccttgtcagttgtttcatgagtcatgaccctctcatctatgtttcgtttaacttaatttaagaacacaatttttttctcatgcacaaataattagtttaagagtttaatgcgtagggtaatccaacaccaagagtgaattttctcttcttagcttaaacaaattatacatcataaaaaatagctaatctcagttttataaaaatttcaaactaattttttattattgtactttaaaatccttaacaattttcaaaaccgtaaaatgaaaccacattcaactaaaaattggattatttacacaaacatagaacatttagtaaaactctgaatgataacatacagtttaactgcacataaagtgcgatgcagttctaataataacaaaaaatatatatagattttttgttactattacaaccgtaccgcatgatgcggttctgtctctattcgtagcctagagatcagtcgatttcatattttaaaatttggatttcagattcgtcgaatatgaccaaaatgaacgtgaccctacaatcattttttacggacctactactaaatctatactaatactcaaactttatagcctagacataacaaaaacataacacgaagattcatacacaacgagtgtataatataatcttactaattagtgcttagatgcggctccctacttaattacagtaattaaatttgcttttgagggaacatcgcaagatcgagagtttaaaaagttgcttaaaaaaactttcccattaaacgacgaaacatcgaactttctctttatcttcttcattcacctgaagaaagcaaatttaaagaatacgaaagaaagaaacatcttcttcttcttcttcttctctctcggacactaatcggatcggatctaacaaaactcgtcaaagagaaagaaaatattttcataaaccactgatttgtctatgatcaggttatagtttctttccttcttcttcctctatgtttctgcaacttttaccggaacttcaaaattttgcgggaaaaaaaaatcgaaactttttctttctctctacgttgtctcggcggttacttgaaattgattcgttgattgagtttaagtaaccctaatcattgctgggtttcacttttttcgatttctttattcgggtttgaagttaacttttaaaaacctttctttcaggaattttgtcgaacaccttcaatg

SEQ ID NO: 2523 - DNA, 191 bp, Unknown
  misc_feature (1)..( 191): cDNA_ID_2162868_gDNA_ID_1620550_Annot_ID_160292 3000 nt of promoter + ATG
gaatcaactttctgaggaaccctgaagatccctttcacggatattacaagcagaagcttagtgaataccattctcatattcaacaaaatggaactatcgttgaagattttggtcacattccaacaaggaatgttagtacataagtcactgagccacctccaggtatcatcagaaataatatcgagatgatg

SEQ ID NO: 2524 - DNA, 3000 bp, Unknown
  misc_feature (1)..( 3000): cDNA_ID_2162848_gDNA_ID_1620550_Annot_ID_160287 3000 nt of promoter + ATG
ttaaaccacccacttagttcaatatgtactattatttctcaataatacaaaatagattacaaatagttttgaattatgattgtatttttaagaagaagaaagacactaaaaaaaaggatgaaaaagacccgtaagtgttttttcttaagagatagaggagatttctggtcacctcacccctcactgacgcctacgcggaaaaagcaaacaactttcgatttctttactcctttttttccttctctctcaaaacccctaaaataagaaacttcaaaaaaaataatcattaaccaaaccaacacgaatcatcaaaattttgaccatttctccatcagttccagtgtcaacttcagttcttcttcccattcttctctcaaattcccatctttgccgttcaatgtttttgttttctttatgtagttgacgaaattaggattttgattgtcgtgtttctttctttattctgtgttcggggaatcctttgataattttctctctttatattccaccaaaaaaaaaagcatcttttttgtttctttatctatctgattgttgtatagtttctcaattccaaaaccaaacagaatgattaatcaatcaaaaagggcccagctttgacatatctctctctttctctctttagccaactagggtttttgtgatttttgttctggggttgttgtgggaaaatgggatctgcaagtgggttttactcgaacgaagagtttgaattggatcctaaatggcttgttgatcctcgtcatctctttgttggtcctaagatcggtgaaggtgctcatgccaaagtttatgagggaaagtaagctttgacttacaatctttatcatccatatatactaagaatcaaaagttaaaagttgtctctttttatctataatcattgcttgctacagaaatttcaaatctttgtttaagtttgaaaaaaaagaacttagtcttgaaaaaagtttgactctttgcgtatatgaagcacaagagaatcttttattgtctggttcagttacttattaggctaattggtttaatctttctttctagtatttattgaagcttatctgtttctggagatgcttgaagattgttgtttgatggattgaaaatgtgttttttgttttgtttaggtatagaaaccaaacagtggcgattaagattattaaaagaggagagtcccctgaagagattgctaaacgagataaccggtttgcgagagagattgctatgttgtctaaagtccagcacaagaatttagtcaaggtttttcaattttttctatccaccaactctgttcatttggctaatcagagagtattgggttgtaatcaacaacgtttggtaatttgtatagttcattggagcgtgcaaagaacccatgatggttatagttactgagcttctactaggcggtacattgcgtaaatatctagtcagcttacggccaaagcgtttagacattcgtttggctgttggttttgctcttgacattgctcgtgcaatggaatgtttacattcccacggtatcattcaccgcgatcttaaaccaggtaaatggaaagaaatctaaatccgtgacttctaagtatgtatggaaagcttatgatcttattgcatctgcagagaatttgatcttatcagcggatcataagacagtgaaactcgctgatttcggtttagctagagaagaatcattaaccgagatgatgaccgcagagactggtacataccgatggatggcccccgaggtaactatattactactaacccgggatttttcttttcttttcgcggttgtcttatcggacatcttggttaatgaatgatacagctctacagtacggttacgttaaggcaaggagagaagaaacactataatcataaagtagatgcttacagctttgccattgtcttgtgggaacttattctcaacaagttaccatttgaaggcatgtcaaatctacaagcagcatatgctgctgcattcaaggtaataattcatctctcaatcggttctgaagcaaaactgaattacaaactaagaccgaatagacgaactcatcatcgacacgaaaaaccaaaccgaaacttagattgaactcccttgtatctctgctgtggcctctctgcatttgatctttacttatttggaagatccttggattcgtgtatcaaaatttgtcatttcttggttaccaaattgatgaattcaaagtaatgaaaccggcattgtgactaatttgtgtttgtttttatgatagaacttgaggccaagtgcagaggatttaccaggagacttagagatgattgtaacttcatgctggaaagaagatcctaacgaacggccaaatttcacagagataattcaaatgctcctccgttacctcaccactgtttcggcaccacagatcattcctccaccgaatcgacgagtcttctcatcagaaaacatagttttatcaccggaatctcccggaacttgctctctgatgtctgtcagagacggagacgtttctcgtcagaccgttaacactgctgattcatcggagaaacaaacaaaaggaagcttcttctcctgctgctcatagatgatgtatttcgttgtgtaatctgtaaagaaaacgagaggaaagtgtttatgatggaaaaaagtataatgtattaagattagaaatttagatcacagtcacaagaaattgttcgtgtataaaaaatattgagcctgaaacattaataatgtttacgtttttgcataaatgtcgaaaaagagttaaattaaaaactacgccgttgccggggatcgaacccgggtcacccgcgtgacaggcgggaatacttaccactatactacaacgactttgatgttcaatctctagaggttaagcatatatattacaattttattggattgtcttctaaaaccctgaaacccttgagaagatctctcttgttcgaaagatttgccacttcgtttgcagaagcgaaatg

SEQ ID NO: 2525 - DNA, 3000 bp, Unknown
  misc_feature (1)..( 3000): cDNA_ID_1032240_gDNA_ID_1620550_Annot_ID_160283 3000 nt of promoter + ATG
cacattgaacacagatgtaaggagaacgatcgcctttcgtcccacaagcatcacacacgaaggagatcaattttggcatgtgtgagtgtatgcttatggatcttcatatttgatagagaaactggtggagggccttcagtcgcgcaatccagatccaagctgaacttacatatatcacaatgatatagtaagttcccagtagtgcctccacatatatcacaacttcggtccgtataatctggagctccactggagataagcttaagagggtgtctgacatgagaagggtgaataatctctggtgattcaaatacagagacacatccctcatgaatcaccaacctgcaacgagggcagcaatatccatgtttgctagtaccatgacaaaagtcgcatgacataagagaagcttttaagtcaaccatcagtaggggatggtggtgccactccatattcagatcagatcgagcacacaaggaatcaattatgcaatcgatatccaaattgactttacaatcatagcaatgatagagaaggcgcttcgtgtttttaccgcatagatggcatttcgggtctgtgtgatcaggagctccggttgtcagaaactcaagactatgcccatcatgagaagggtggttgattctcgcttgtatgttgaacacgaatacacatttcttgtgtatcgtaaacttgcattcaccacatgagtagccatcaccgtaggatcgattgcaagcatcgcattcaaaaccttcgttaacgtcggatacacgatgctcgtgtccttctagcacataagtcatggctgttgcggttagcagagatggagagaatgcaaatttattgttggaataaaatcactttggttttgtgtaataataatggatcaatatagttgttcatttatattatcatatctgacgttaacgttgacaactagtgggcacgtcgctaccattcgtttaatttaagcactatttagtattgattgtcccgctaagtttgtgtatgtcatgttaatttgtttatttcaaatttaattaaataacaaaaaaatgttgccctcaaggtaaaagaagatttgatatcattataatgggaaatctgtttttttatactttcataattgtactatgtttaaatttatacctaaattatatcgttgtttagaatatatctcagaagataatgtgtatgcaggatttcgtatacagatcctcgaaagagagtgataagttttcaggattatgatggttttatacatcatcaaatgacgaaacatcaagtatgggcgctgttaatctccgtagaagtctctcctactccatcaaaagtcgaagctcttctttgggcgatgaagtgtatgatcggtgcagataatcaagatgtagcgttctttacagactgttcaaacctggtgaagatggtgtcttccccaactgaatagccagcattttcaaaataaaaggaatttctgagcgacaaggatgagttttcatacttctctttatctttattctcttgaaagagaatcgcaaatgtaaaaataaataatttggcacggaaaatccgttctgagccgcatcaaattatctatgtaaacaatatttcacataaataactcttttgagtttttattaaaagcagatgacaaaaaaaaatgagatatctctcgatattaatcaatcgattaaagaaataaactgagtttgtgcttcaatagaatttgaggctcgtgttttagttctagggaagtgaaactacatcactttaagaaagaaaaaactcggtgggtacccaaaattttttatagggtaaatccgagtaaaattatattttttttgggtatccacctattttaaatctgttttttttttaatacaaaaaacaagtctcatgcatgtttaataataaacatatattttgggtatccatcggattttaacccagttttaacaatcctaaatatagacatttatataaaaaaaatttaaattaaaacatgaacaaaaataaaatacaaaatccgaagaaccataaatacttatattgaaacaaaattatacaaaagctatatgcagtgtaaactatttattagatttacctcatacatgttgttctctaaaaaccaattgatatcaaacaactttttcaaaaataaagaggataaaattttttttgtaaatattgaattataaaacagagtaatttatattttgttatataaagttgtactcagtgtgtatactatttgtttaaatttgattggttgtttttctaaaaataatgtgttttaataaataaaatatttatgtggtaggaaagctgatatggtaaactgaagcacgttgatttgtatgaatgaaaatgttttctattgatgataattaaaatgagatgtcaacttgaaaaaaccatactgtattgattcctattttaatatttgttagtctttgtttaatttaaacgctaatatcgaagtttggcctgccatgttagttagtttactttgacttattcatttttgtatctttgctcttctaagaactctcaatagacaagttttctttctttctttttaattaaataatagaaaatcattacactgaagataaaagaaatatttatttcagcagttgtatgaatcttgatcattgaaggaagaagtcaatgtcatgacagctaacattgagccgtcgataacacattcgagattagtcattaaataaagaccatggtgtgtgctataataatgttaagaacggtattaaacggtgtgcttaataattggcttttttgtgggttaacttatattttacacgaatatactattgggccttaagtatttagttatcggcccataagcatttaacgataacgggagtttggtgaatccgaagctaatctctaaaatctttcagtttcgagatccaaagtcactcacttttttctgaaattcgctactcagaattttcccgctccactgcatctctacggcga

SEQ ID NO: 2526 - DNA, 3000 bp, Unknown
  misc_feature (1)..( 3000): cDNA_ID_2162876_gDNA_ID_1620551_Annot_ID_160298 3000 nt of promoter + ATG
aatttgctttgttgtggtgagtagatacttttttttttttttttttttttttgagtagatacttcagagttcaactgcaagtggaaggaaattttgatattttttttttccataaatatacactgaaatgtatgtagcttttgttttgtcttttctgaataacatatgttttttggggttgaaatctaacctttttttataaagaaatatgatcatcgaataattgatttttaaaatttctgatagattaaaacgtgataccattgtaactcactacaaagaaaaagtcgaattgaatcatttatattgaatcacaaaattaaatgatattattttaaattacttattaataattgatgcaaatattaaaatgtaacatcagttacaatagctgatgctgttattaatttgtgtcgcatcaattaattaaaactgatgcaaatctaagttagtttgtatcacttttacatattgatataaatatataaatttacatcacttaaataactgatatgtttattaatttaattaacatcacttaaaaaatgatatatattttacatcaataaaaaagtgatgccaataaataatttatcaactacatcattttttttttatcgattcttaagttaatttaattagcatcatttcttttatgattttacatcacttcattttttttaattgccatctttaataacttttgtagtctaatattcttttggaaacagaatatccatttacttttttccccacgattatgaaatcttcctagaatcctaacttccctaatatctctataaatctacgtttcctttgctaatatgatagatttttctttttctttttaatataacttcttcttcttttcatcatctcttcttccctagaagaacaaaacaccaaaataatgaaacaaaaactatgtcgccaaaggtaaaccgaacctacgttcgtgtaatcggttaagaagtcggagacacaagttctttcggtctctcccctaattaagaaaaccagggaagatatcgcaagaaaacgccaacggtgtacaatcttcagggtaaaatcatgagaagccacaaagagatcatgagaaggttaaaaacattaagcacaatgaaaacatttttttgatgcttagatatcttgtaaggaagatgaccgtgaggaaaattatggagacatatgtggtatgtctctgtgtgattacaagagaatcaaagaacaaaagtagtttatagttttgaagtttaatttgtagtattttacttttgaactatgtacgtggtttaatttcttcaatgaatttaagattttttgtattattttatttataattagtgattattgaaaataaaacaattattaaaaaatatttatgaaaactaaaattaattcaatcggttattcagtatttgacaaaaaaaaattaacatccattattttaaatgatacaattatttgaatcatttattaaaactgacattaatctttacatcagtaatttacaatcaatacaaatatttaacatcacttacaataatcgaaacaaatactaacatcatttttattaatcgatgcaaaattaacatcatctatttgcaaatgatacataataacatcggttataataatcgatgcaaatatttattttaaatgatgtaaattatttacatcaacagtatataaatcatttatttaaatgatgtaattttcttttacatcaattataagtaatacaaatatttaaaataaatgatataaaatgatcacttttttgtagtgactggctaaaccgatgaaaacaaatatgaattgaaatcaaagaaataatgttatcttgtgtaacaagactttgaaaacttaattagcttattctcttttaactttggtataaataaacaacttttatatttgctatgaaatataccaaaaacgggctttgtaattggtcgactctcttatcagaatttgatgtcaagaccgcgtgataaaacatcaagaacatggtctaacatagtggaaagaaaaaaatatttgatagtaatagaatcgttgaaaattcaactatcgtcaaccttattcaacaggaatataaaacgaaaaaccgtaattggctcgaagtttggttgaaaaatcaaaagccaaaatctatgaacgagattaatcgcccactaaagtcccttctgttattggcacacgctcttgtcgttatagttaaaaagttcttcaaatacagagacattttgtttatgtactacatacgattcggtttggtgaacaaaatatcataaaacttggttcatgttgatatatagattcataagatgtatttttgtcttatatatgtttctgtatcatgggttaaaatgttttacaaatatgtttttttttttaaaatatgtatttatgtatatatgaatccgtacgcgtagtagtaaaatgaattagaaaggaataggaattgaaaatttcatattatgtgtatgtgtggaatcaagaaatgaataaaatgataagtggtggaccttgtaacctaagatccaggaaactacagaggagagccactgatagtgtgtcaataattattctcccacccatccacaaagaaaagttaatttaatttatcactctcagtaaattataatcaaaataaacaccaacagtagtcaactttcaacaaatgggtctgagcctatccaatatatataatcgatcgaagcaatctattcgacattaatgaatctcattcataaaatcataacgtaaaataataaatatattaattacagagacagacaataatgaaaggtgtgaaaaatgaacactacaatataaaagatgacatttaaaataaaataaaagagagaaagggattaggtgtgaaatgtggtgtgtctatttaagtggagaagagtccttgacactccatacatactacctttggcctcttcttcttattttatcatagctaagctcaaaaacaatcgatagatg

SEQ ID NO: 2527 - DNA, 3000 bp, Unknown
  misc_feature (1)..( 3000): cDNA_ID_3068304_gDNA_ID_1620551_Annot_ID_160302 3000 nt of promoter + ATG
gtagattaagacaatctagtttttgttggaaattaacatcattttaaaggtatttaaatatttaaggagagagatcatatacgtttcacctctcgaattcattttcatctttataatatggtattgtatttactatctatggtttctaaatttttttgaatatttaatcacttcggataagaaacgatcatacattagagtttggtataaaaaaccgtatgcaaatagttcatattgatttggcggttttctcgacatatttacacatataccttagccaaaatggtcttttcattttcaaacaaccttttcttttcaaatcctattaatcctcctacttcttcatcaccatatttgaatcaaaactatctaacttctaatgtaataattgttcaagaaaaatataaatataaacatttcacttttttgtattttattaatataatttaaaccattcatcgacattaaaaaaaaaaagaaaaaactaacacataacgagtttacaaatataaattatcaataaaagtctcatcgtcaatcccaccaaagacgaagaagggttatctccactcaaacatgtgtcatgcaattgaaaacgataaaaatacgtactgtgggaataaagtgatacgtttttccggcattttttgcaacataactccagttttagacatcaatttttctttgacgaaaaaacaaaaaaacatcaatttttcattgacgaaaaaaaaaaaagacatcaatttcattttttttctaaccatgataaaactactacaaaacaagttaaaagggatacgatgtacatcaaactcataagcttgcgaaaattatcaataaaaagtgatccaagaagataaaattatgataatccacatgtgattgctaacaaattgaagattcgattacttgaaatagaagctaaaagccaatcccaattttccaaggaacaaatcttctttgatttttttgggtaaatcgttgaaccaacgacacataagtaaagagaatctgcatataaggtagaagaaagtcatcgaatctacaacactaactcttgcaataattatttaatactaaaagaaaatacgtactgacaaaaccgtgacataaaccagatatattggatggcaaatttggatctcatccaaacttgaaaactgccaaaacatactggaaaacgaaataaaatagagagaatatccggtaggagatatttttaaaattttcacattaattaacttttttgcgttttctttttttttgttactggaattttattaatcaagccaaacatgtttacaaaaccggataaaccggaaacttagccagagactttaacaggaaacagagcccgactttaacgggagacaaagccggcgaacaacaagatgtccccggaaacaaaagctcaaacgagagaaacaaacgagggagacataaccctaaagtacagggaaccaacttacaaccaaaaaaattagctcactaagagaagtctacaaccaatgcactaaacatgaccacatgttccaaagagaagcctactaaaccttcctatagaaactgtgaacgccagatagcatcaggaagaccagataagacacaacaccaaagcctaaccaatcgcaacaccgacaaggaaggcaaaaggcttcacccgataccaaggaatcatgaaccactagagccaagtcacaccatagcagacggagataaagagacaggctaggaacaaggagaaaaccttgtgattcggcttgagacaagtcaaagaagaccaacagctcttacacgcggacactcgtcgacccagtttcagccatctaccaacaaaaaactggtaacctcctcgcaagagaagaacatgtgatcgttccactgtgacgcctgtagcccaacttcaaacctcaaagaagctagaaaggagcttgtagatgacgctgcaacgaaacaccatccaaaagacaagcacaacccgtaacctagccaaaaacaaaaccaccaaacgcccaagaggacccagcaaagcagaagagcaaaggacataaaggcaattccataaccagagagaaactgacttgcgcaaaacacaaaccaagaaggatctctgagcttagctaattcaattggttaaacgcaacaaaacaaacctaaaactaggaaaattaacacaaacgagccaagacttagcaaaaccaaggacaaactatgagcagagactaaattacccaaccaaaggcaacctaatattagcctaagacagaatcgagactacatagcttccactagatcaggtatgtataagatgaagaaaccaaacctccatctccaaaaacaactgccgtaacagtgaagaaccacacgggctccgacaaaaacaccaaccacccacggagaaccaagcgacaccatcactagaacggaaccaaccttccaatcgaagcacaaccatctagaatctcgtctttaatccgccataggaggagccagagaagacccaaaacaaaggaaaagcaaataaaagacaaacagacacaccctctctgactccggccaagggcaccagataatcagaaaggtaacgtcagaaatttgagaagaaaagtttggtggtggctagacctaaaaaaatcgcctctcaaaggccgtagagccaaacctttttatgttatagaaaacttttttgcgttacattgatattaaaattcttctaaacgaaacaatataaattaatttactcatgatttgttagaaatattttttatttttattttgtgtacatgacgtggataactaattaaggttagaaaacaaaatccaacaatctgataacaattagtcactaaatattcggagtaatgactaatgacctccgctcttatccaaaatactgattagtgtctgttttaaatgatcctaccttataaaaacgacgacacatctctctctcgtcttcttcttcctctaaacctgtgaaaaactttggatcaatcaaca

SEQ ID NO: 2528 - DNA, 1725 bp, Unknown
  misc_feature (1)..( 1725): cDNA_ID_3068401_gDNA_ID_1620552_Annot_ID_160308 3000 nt of promoter + ATG
tgagaaagtactcttgtgtggtaataactgtgatgcgaggacgtccaggaacccgacgaataaggacagatgtattctttgggattaacattgcttcatccagatactctgaaaattcaaaacagagaacatataaaggccacagattgcaatcatattggcacgagacacagtacactaaagcttcctgagaaattcaagaatcatattccaacaaaccatttcctaatagttcacaaaagtaaaaaaaaaataagacaaagctcagctagtaaacaatcataacataaaataaagttcattgtatcacagctgcaagcaaacagtctaataatacgaaaagcgcagcacaacatttgacatagaagacaaaccttcgttagtttgggcattggagacgacaatatcaaggtctttaccagtgcccaaatgcttagtttcgaaaattttgtctttgagaataccgacggatataaaaggaccatccatggcaatggtatcataatcccttgcactcttaaacttgtaataaattgccattgaaaatttgtatctgatataaaaagcaaaaaaatacatatatctattacttatcttataaagatcatgacacaaagctactagattttgaaaaccctaatcaaggcctccggattattaaaaaaaaaaaacgaggccagagatttgatttccaaaacaaaaaggtaaatacaaactaagaaaaccctaaagattcaatttttacttcgctgattcgacttcacagaaggaaactccacgcgtgtagcaaaatcaatccaaatcaacgaatcctggaaaagttcctgcagattcaaggaacgagaacgtccgtgtgatcgccgagctgagaatggcgccggtgatgtctccaaatctccttctccgaggaatcttcgcagctacaaaacgacaacttgtaacaaagaaacggatgatcgggcttcactccataagatccggtagctccaagctccgatttgggggatcaaaatcgagaaacctttcggggggaaattgaaaaggatctagagagtaatcataggaatcgagtagagagcggtgtcttcacgagaaagaagatagatcgatcttgaaatctagggtttggacacaagagctctctttctctcgtatccgtgtttatgtaaatcccgtaagagaattttcctttaaataatgaattaaaatcttatcttatgggcccacttataaagtaagaatatggacagaaccacggttttgtttttatttattttccttcttaaaagttaaaacacattaaattacctaacttttgttaatttgaaaacgtaaaaagttgattttagtatattaataatattttatttgtgtaataaatagttttgacttttaataagctaaaatcatacagtaaaatcaatttttgtgaaaatatgtaaatttggtggtactttatgctatcaattttaacaaaacccatttcttattgggcccattttgattttgatttgtttattaaatgcccattttgatattttcacccgagtgaaaaatccagattttttattgctcaatatttacgggacgacaaaaaaaaaaagattaaaaaaatggaagagtggagcgcgatcctttggggaatcgggacggaccgtgattggtcggtctctctcgttacggtgaggctgaggctgaggcggagattgagagagaccaaccatg

SEQ ID NO: 2529 - DNA, 2707 bp, Unknown
  misc_feature (1)..( 2707): cDNA_ID_1029535_gDNA_ID_1620552_Annot_ID_160338 3000 nt of promoter + ATG
ctgagagcaaacagtccttaatatggtcaaggatggccatcctaacttcaactaccctatcggtcagccttttcagaaactccaaaaaaattgaatcgaactcttcagagatgacacgtccaggcaaggaaaacaactctccaaccaatccaaccactttcaaacgagtttccagtttatccgcctgtatatgttaatagtatgcattatgtattattcaataccaatctacttgaaaagatgggctcataccacatgaaaagtattgaaacaacaaatggataagagtgattattcaaacaaaatacataataataaaagtattgtgcatggcagagtcatgatgacatttgacgtgcaagatagtggcagaagaccaaaaataaaattataccaaaagctctccagtgagatatggtgcaactccagatagggcctgaggagcacagcggtacaaatcatagataacctcatggtagtcaatttgactgctggaaaatcggctatctccagacattgaagagataaggaactgctttatgtcagattcaactttgggcgcacaatgctctatgactttcatagcaagtcttcttgcagcatctctaacgtcctgccatcataaatgcagaatatgagctgtctgatattccataaaacaacgaatcctaaattggattataatcagtggccagagccagcaacgtgagtatgctcacacttctattgcggcccaatttagagagtaaaattagtaaaaggtgctcttgcacatcttcgctttcttctaaaagaacaatcattatattttgcattgatgagaaaacaatctccggatggtcatctctgcacatacagaaataaaacaatctttcagtatgaagcccaaaagaaaagaaaaaaatcacagaaaccattcatattttgtattactagccaagaacaccaacgaaaagcacaactgaaaatcagaaaatttgaagatgttttgtaaatcagcggaacttataatcactcagaaaagaaatctaggttgaaagtgaaacacacctagcaacatcaagaaatgtagtaaacacttctttcaccagatcatcacattcaagatccaacatcactacacatgacctgtactttgcaaccgtttctaaaatgagaaccctccttccaaatgatggaccactgacatcattcaacccagcaaaagcgctcacaattagttgaaaaatatcctgaaacaagataggaaacagaagaaatcagtaatggacatgtctgtgatcacggtgccagaggaaagtcaggacaaacaaccttcataatattatcactgtaaggcgcttcaggtgctgtaatacgagttatctcagaaacgcagcttgcaacaagaagcttgacatccttgtcttgatggttgagaatttcaggtttaataactgcatcaagaaaaggctgaatggacttgagcactgcaggtggtggagactgctccaactcagaaagacaaacagcagcttcctgcatgtagcaacacacaagttaaggaaagtctttttgataaatcagtcacagtattgcacggaaaagtgtttaaggagagagatatcttagtaaactaacccgaccaattcaccccaatgaaaccaatcaaaagcaaatcacatttccacaaaggtggttgataaagaaacatcttagtcaatgtagaaactgaacattggggtaactactgcatcagtcaaattgctggtgaagatagcgcagttcaattccatcatgaccagggacagaaaaatactagggccaaccctaaaaactcgacattctaacagcagacatcataaaagtcgcaaatctaagcaattatagacactgaattggttctcctaggaacagtcccgagttttatgcatgacctaatttcgcaagaacaatctagcgtagacgaaaaagatggtacaaactaaccctaacgcagctcgaaagaagaaaacactggctcaattaatgagcattacccagaacggaagaggatctacaaagctgaaaactttattcggttccaatttggcagaatttaaacaggggacaaagatggaaaaaagttccctccaaacgaaaaatcgaaacttggagaaattgtagaagagacaatgagaagtagagatggggaatcacacctttaagagtttgagcaatgaatctttagaaacaggagctaggtcaagcttcgatcccagctctttcaactgttcctccggcttctgagccatggggagtgaaacagagaactcttaaaccgaagctgttagagacgagccacaataaacgaacaaggaaacaaaaagggtattttcttgaataatctggttctcagagtcactatgcggaagaagaaggagaagaagaagaaagccacatctgatctgagctctctctaacacaacaagagccccgattagctgacttacgacggctttgtgtctctcatcgcttcctcattttctcttattttatattgatggtccctcactttctcttctctttaccctttttccccattcttaaagcccatcgtttaacaggcccctttttaaacatccaggcccattagtgtaagaataccgacgtcgttttgagtggagtttcaattttagttttttgacccttcttctttgctctctcgctttgctttctcgcggcaatg

SEQ ID NO: 2530 - DNA, 3000 bp, Unknown
  misc_feature (1)..( 3000): cDNA_ID_2992170_gDNA_ID_1620552_Annot_ID_160335 3000 nt of promoter + ATG
ggtttttattgatttaggttctcactgtgaaccaagttttggagatactcgtcaagtttctggagactagggactggaaaacagccttcttcactgtgattcctcagaggaaaagaaccggacttgatcctgttgattgttcgaaattggaacatatatctgaagagcatcaggagaaagatactgaggcaaacgagagtgcagacaaacatgatcttctggagaggaaaaaggtatgcgttgaagttcctttggaaagtagtagctaaatgaaatgaatgaagattgtgagagttgtttctgtatccgttaaacactcatttctgtagctgagaattgaaatctggaatgtttagtctctttctattttgaaccaagacgcattacgaattcaccgtgaattttgtaatatcacatgcatgcggtttgcaaaactaatgctttattgacatactttaccacaagacagatcagatgaaaaacacaatgttctttcaactagatagataataaacaaagaaaaagcagcattgttttcgcttaaacttgaattcataagctacagcttgcacctactaacagttatgactctgtcagctgtctatgttattagccattgttctcagtacttatgttgttgagtcggaaatacttcaactctggcgccacttgctcctgaagatgaaccactcatcttagaattaggttcgttaccactgaaaacaaacccgttctgatgacgataatggtactgcgccatgtgaatccctggcacaggcccgtaggctccatactcggtcatggtcccattaggcctcttgaccaccaagccgttggtcatactaacggacccagcactgcagctaacccctctttcaccttccaactctctgtagcggtggaggtacaacgtgaggggttcgatgtagtcatcaaaaccgagcttgctcattgcccacaagacgtcctcagcagtgatggtcttgcgctgttcccgctggcaccgctcattagcctcccctgttatgaagctgatgtactccgaaacacactcttggatcgtctccttggagtcatctgagatcttggcgtgagcaggtaagatcctccgcatgatccgtatcacgttggcaataggcatgaacctgtcttgctccctcaccgtgcactcctcctcaccaccattactggttttgttaggctggttgaattctggaggacgcatactgccctctgccatcagaaaattcgctgctaatcctaacaaaaataagaaaaatggaagttttagtgcataatggcttcgatgacgtctgcatgcgcggtttataagattgaaaagctatttcattaactgttcgtcatgaaaagagtacagacatgacaatggagggattgcagagaatggtttcgcatgcaactgaaatgaagagagcctgtgaaaagagggggtatagagaatggcactacctggtggagaaggagtggtgttgttcacggacagcttgcggtagccatggaagcctccacgttccatatctttcttgttctaaatacacgacttttgtgtttgtgaatatccctataaataataataaccaatgcccgaaattaagaagcatttgaagaagagaatggaatgagagagaagaaagagtaattggaataaagctaatagtgttggcaagtgtcagcatttgtaatttcagacctcacaagttcaacaacgtggcagccataatcgatgtgaccgaggatccttctcctcgtctcccttagccgttacaaaatcccaatcaccccaacgtatttgtcttttttattcgaaccttctacaaatacagagccgtagagttttaaattataaactacaccaaagatataaaaattaaactcgaggtaatcatctacaagttctcccgttttgcgtgccaaaaacacctaaatttaaaatctttcactcatttttccctctctcccgaggaaatggtcttgtaaaaatttccaagtttctcaaagtatgagcgagtcttgctgtgctcaggctgtttctgcccaccttccgtcactctcctatagtacttgttcatgttctcccacttctccttacactttttcgcagatctttcgtaccctctttctttcattcttgctgatatctcatcccaaatcgctcccttgttgatccccgtcttctcttccacatcgcttctcgaacttatcaatgcctgcacttcctcttgcggccaccttctaccactgctgccactgccgcttgagtacctaaactttatctctctttctctctgagcggattcacatttctcgtctttacattgttccggaagaatctgctggagtggttgcgggaattcacactgtttagggatctcgatctcgtcaccagtaacacttctgatgaaagagatgagagacaagttgcgtgccatctcttgcttccgtgcttcttcattctgtgtcatcctctcggtttcctgttgcctccaagcttcctcacggcgtattctctccacttccatcttctccatcacattaatcaactgattatgcatcttctcctgccgcttcatcatactccccacaagcttctccaagaaatgctccagctttacccttgtttcccgctttcttttacccgtgacggtcttgcgaacgtctggagatgagtcactatcgctgctatcaacagaggagctgcaaaatcaaaaattggaaagtacttatcaaaaactcaaagcttccaacatggttacactatctaagaactaataatccaaaagttccgcagaatatatagacaaacactgcttagaagtggtataaaccaacactgtaaaagcttgtaatgacggcacaccaatctgattgatatctgcaaagtttaatgctttaagctgagagtgttcagtgatgcaccagtcaaccaatctagaatcaaatgataccgcaaagctcaaatatatcaagaggaagagaatg

SEQ ID NO: 2531 - DNA, 3000 bp, Unknown
  misc_feature (1)..( 3000): cDNA_ID_2105937_gDNA_ID_1620552_Annot_ID_160331 3000 nt of promoter + ATG
cagccagtttgacctccaccatcttaccattgagttcgtggaatgtcttctgcagtactttgtcaacagcttcctcagagtcatatgaaatgaacccaaagcctctaggccgctgggttctgtggtcatacatcaccacaacatcagtgatcatcccaaactgagcaaaatactttttgaactcagcctctgtcacggatgatgccaaacctcccacaaagatcttcttggagtttgatgggccaggtgatccctgaaggctgctgttacttttattaaatactacgtgatcatctcttggaacagccttctttgcctcaacctgtatatcatggagaaaatcaacacacgacacaactcaaagaaagcagtttttcattcattgtgaaccactttctttcacatgaggatatgaaacgatccaagttttacatttttatttgtgagtgtgaaatgaacaacttctgacaaagatatgcatttatcagagcggcaaagctgattgtaaacaatagagtctactaactaaaacaggaaggaataaaagtgagtagctttgctttgctttgagaagcagcaacctcaaaatgaagcaagtaagcaggaagattgttgaaattggaagcaatgtatgttggtatatagcaggaggaaacttacaattttaccatcaatgatatgtttaagcaagacgactctttcagcaacattaggatcagcaaagacaacgaaaccaaagccacgagcacggccagtggcacgatccttcataataacagcctctaaaacctcaccaaaactgtgaaaatagtcacgaagacgatcttcactggtttcccaagatataccaccgatgaagagcttacatgattccatttccatttctgccaaacaaacaaaaaaaggtttgtttttggttccagattctatatcgatctaagtgagaaggagaatggaatcgatagaaacacctcaagggaagcaaaataggatgaaaaagagcagatgggtcgtgatcggattgtgtaaaaaccgatcgacccacgatcttggattcctgcagaaacaaaaaaaaacacaaatgatcaataaaggtgtaagcttggaggaaggaaggaatgaaaaacccagaagacagagaatctatgtatgtgtgtaataccgaaaataaagaaacggagaaagaggaaaaaaaaaagattttaggattgagaaatcttcagatttggagaaggcaaggttttaataagagggcgagaggccctcctctctcttttctgcttatcgtccaaatttttagtcttttcttttcttttctttttctgcaatccaaatcgaattaaaaggaacaaaaatggatggaagcaaataagcaatgctcagcacaaatttcagaaaatggaaaaaaaaacactcacaaaaaagaatactttctcttacgtttttgtttttatatggcaatgtttggctatccttgtaagagacgagggtattttcgtcacttccgtttcttctctgtaataagtaattaatttattaataaccaatgcgtgcacctttttacccataagttaaagaataaaatctatcgttaataaaaaatggctaattggcttaagttgatcatgatttcttcctagttctagattttagttgatcatcataactttaatttgaagagaggtctatgttttttaaatggttcgttaatcagatgattatgaaagatgcaacatgtgacaattatttgattgcatgaaattttaagattaaaatgaaaatggcatgaaactctaattagagcttttggggaatcaaagtgggcaggaacatggggaatggttgatgacgacgataaagattgccatcccacagttttttttttaattatgtcccttcattttgctttcaaataaactaatcaaatttgttatgaattgaataatcatttttaaaatcattcatcaaccaagtggaagatgtttacaagtacacaaggcattacttgtgcatccaaattattattaccaactttcataagcttacttttcttctttacattaatcactttcttgccgtccaattattttatttgggtttttttacactctttagaaaacaaaaacatcatgttatgtcggttttatcctattagaaaacacatcgacaacatttaaccactaaattacatatatatatatatatataaaattacaactattgatcgtttttgtattattctttacaagtcaaatttccaccgttgaaattttgatttacaacattaatccagagtttaaaaattcggatcatctaattcatacataagtgaattaattaattaaaagcgtgacatcaaacgttagacacatgtggagatgagattgaataatgaatatcatccactaaccattataggttagagtcttgtagcctatgtaccaactatctcttttatactatttaagtttaactctcatcttgcaagaatccaagattaagcagccttactaaatcggggaaataaacttaggtttataatcagtgcaatcacatggccataattataaatgagcaaaacaattgtctgaaaaggccataaaatttgttgggcctacaatttgattaaaaaagacgaagcgccgcatatattttatcttaaagcccaataatgttttcggcccagtaggtgttctctgtactcctattctctgctataacttatcattgtctcccgcttcagaggaatcagacctaagaagaatcctcactcgtaaagtcgcaggtatggcttcgaagagctctcgatctattttgtggttggaaattaatagtccgtgtattaaagtttcaatttttatgtccttgaatttgatttcttccatatcagtgtcgaaacattaggcatcaccagagggaatatttaaggtttttctttaaaagctgaagacttgattagaaattagtccactttgattgaaatgttcatgtttgtttcag

SEQ ID NO: 2532 - DNA, 3000 bp, Unknown
  misc_feature (1)..( 3000): cDNA_ID_3068365_gDNA_ID_1620552_Annot_ID_160330 3000 nt of promoter + ATG
tcgttgagacaacatttcaaccaaaagatttgaacacaaacagctgattcttcaagttccttcatgtgaaaagcattttttttgttatggtcctcgtttgcttagctggcgctccagtcacagaaccgagttagagtctctctacattgtgtttcatgttcccaaagtgtaagaacaaacaactgtaagcatcatgtatataaaggctcccatgtttttggtacaaaagtagtgtgatcacattagaatatatatcatataaaatgtttagcagcaaaaacccaaatgatcatattggctgaagcaaagacacactgacacagagcatgtctctaaacttgcattaactaaacattgaaaacaagagagacagaaaggcagagatacaactcaggactcagacgctttggtaggagtttcagagagtatgtatgttgcaacatcaccacaacaagtaagcttatcagctttctcatcagggatctcaatcgagaactcttcttcaatagccataactagctccgtcttgtccaagctgtccaacgacaaatctttctgaaaatcagccctttcagtaacctgcaagtaaacaagccccgtgttacaaaacaaccattcaccaaaataaaaggttatacacaaagaaaaagcagcagttttgtaatccctaacctcagaggtgttggttttgtcgtatttcttcaccagttcaataaccctgctcaatatttgatcttggcctccatctgcagctgcttctgatgtgaaattaaaaataccaatactcttgaaaccattctcgttctgaagaagcgaagtgggtctgacagagactctcagtctcaagtgttgcaggattgagctcctaatgcaatgcatctgaaacaaacatgaacatttcaatcaaagtggactaatttctaatcaagtcttcagcttttaaagaaaaaccttaaatattccctctggtgatgcctaatgtttcgacactgatatggaagaaatcaaattcaaggacataaaaattgaaactttaatacacggactattaatttccaaccacaaaatagatcgagagctcttcgaagccatacctgcgactttacgagtgaggattcttcttaggtctgattcctctgaagcgggagacaatgataagttatagcagagaataggagtacagagaacacctactgggccgaaaacattattgggctttaagataaaatatatgcggcgcttcgtcttttttaatcaaattgtaggcccaacaaattttatggccttttcagacaattgttttgctcatttataattatggccatgtgattgcactgattataaacctaagtttatttccccgatttagtaaggctgcttaatcttggattcttgcaagatgagagttaaacttaaatagtataaaagagatagttggtacataggctacaagactctaacctataatggttagtggatgatattcattattcaatctcatctccacatgtgtctaacgtttgatgtcacgcttttaattaattaattcacttatgtatgaattagatgatccgaatttttaaactctggattaatgttgtaaatcaaaatttcaacggtggaaatttgacttgtaaagaataatacaaaaacgatcaatagttgtaattttatatatatatatatatatgtaatttagtggttaaatgttgtcgatgtgttttctaataggataaaaccgacataacatgatgtttttgttttctaaagagtgtaaaaaaacccaaataaaataattggacggcaagaaagtgattaatgtaaagaagaaaagtaagcttatgaaagttggtaataataatttggatgcacaagtaatgccttgtgtacttgtaaacatcttccacttggttgatgaatgattttaaaaatgattattcaattcataacaaatttgattagtttatttgaaagcaaaatgaagggacataattaaaaaaaaaactgtgggatggcaatctttatcgtcgtcatcaaccattccccatgttcctgcccactttgattccccaaaagctctaattagagtttcatgccattttcattttaatcttaaaatttcatgcaatcaaataattgtcacatgttgcatctttcataatcatctgattaacgaaccatttaaaaaacatagacctctcttcaaattaaagttatgatgatcaactaaaatctagaactaggaagaaatcatgatcaacttaagccaattagccattttttattaacgatagattttattctttaacttatgggtaaaaaggtgcacgcattggttattaataaattaattacttattacagagaagaaacggaagtgacgaaaataccctcgtctcttacaaggatagccaaacattgccatataaaaacaaaaacgtaagagaaagtattcttttttgtgagtgtttttttttccattttctgaaatttgtgctgagcattgcttatttgcttccatccatttttgttccttttaattcgatttggattgcagaaaaagaaaagaaaagaaaagactaaaaatttggacgataagcagaaaagagagaggagggcctctcgccctcttattaaaaccttgccttctccaaatctgaagatttctcaatcctaaaatcttttttttttcctctttctccgtttctttattttcggtattacacacatacatagattctctgtcttctgggtttttcattccttccttcctccaagcttacacctttattgatcatttgtgtttttttttgtttctgcaggaatccaagatcgtgggtcgatcggtttttacacaatccgatcacgacccatctgctctttttcatcctattttgcttcccttgaggtgtttctatcgattccattctccttctcacttagatcgatatagaatctggaaccaaaaacaaacctttttttgtttgtttggcagaaatg

SEQ ID NO: 2533 - DNA, 3000 bp, Unknown
  misc_feature (1)..( 3000): cDNA_ID_2162979_gDNA_ID_1620552_Annot_ID_160328 3000 nt of promoter + ATG
cattccacgaactcaatggtaagatggtggaggtcaaactggctgttcctaaggatatggctctcaacacaatgcggaaccaaatgaatgtaaatagctttggcactagtagaatcagttcattactgaatgagtacacccagggattcagcccgagtccaatctctggttatggagtgaaacctgaagttaggtacagtccagcagtaggtaataggggaggattctcaccgtttggacatggatacggaatcgagctgaattttgagccaaaccagactcagaactacggttctggttccagtggaggctttggacgaccctttagccctggatatgctgcgagtctcggcaggttcggtagccaaatggagtcgggaggagctagtgttgggaacggttctgtcctaaatgcagcaccaaagaaccatttatggggaaatggtggtctaggttacatgtcaaactctccgatatcaagaagcagcttcagtggaaactctggaatgtcttcactaggcagcattggtgacaactggggaacagttgcacgtgcacgcagtagctaccacggtgagagaggaggtgtaggattagaagcaatgagaggagttcatgttggtggttacagcagcggctcaagcatcttggaggcagactctctgtacagcgactcgatgtggctttcgctgcctgcaaaggcagaggaaggattgggaatgggaccattggacttcatgtctagaggaccagctggatacatcaacaggcaaccaaacggaggtatgaataatgaatgaatgaacgccttttttctatccgagaattcaagcatttgtagaaaatctgatgatatcatatgaaaatggtgttgttgcaggaattgcagcttagagaagtgacaaatctataccatggagatcagatgattgcagaagagagtttttagaagaggaaaaaagtttattaaaaaaaaaaaaattattggtaccaaaaagcttaaagcttttatttactttttactattttgatttgttgttatagctttcttttcacccttttttctaatttggggttttgtttcttttgtttttatcgttaaagaaaaaagatgtaaacttgagtgatataaaaagagacaaagaaacaatgaagtgtattttgttcttgtctttctctctcttttatcatctaaatccatatattgacaaattcaaacatgaaaacgaattaaaaaaagagcaatttgcctagaatgtaggcaacgtagtgtgaggacgacgtgtggcaaacatgtggatgatgataagccacaggacaaagaaagcaatccctcatccatcgcaataatatccattaatgtgaagtggaccaaaagagagagaagcgagtgttacagtcctcaaaatagagacgaaaccatcctaatccttcaaactctctcacagcttcaagactccactggaagcgccactattgtccctacactcctctcctttataaggtctcttctcacgaggctctctctcaaaccattaaaagatgcgtttgctagtagcagaagcagcttcaccattgtcctctgctgcaactccaacatgtaactctcatacttgcagatggaagccttactcaaactctactgacttcacagctaatgcatcagtccttctcatccttgtcatctctgctctcatttgtgctctctctctttacgctgcaattcgttgctttctccgaccaaccctcgagactgaagacgaccacaagcctgaccctgaagcagctgcttcatccactccaacaactcctacacttgtctactcctccgaccttgaactcgcaggagctgaagcagagtgtgccatttgcttgtcggaatttgaacaaggagaaagcattcaagtgctggagaaatgtcagcatggtttccatgttaagtgtatccacaaatggctctctactcgctcctcctgtcccacttgcagaacttctatcttctcacaacactctgaaactccttcaagccacatcaatgcttagcttctttttttaatcttgtttttccaaaagctttagagttgtatcatgttttgcttgagattaccctgtatctgctctgtattattaggtaacgtagaccaaccaaagtatttacttaagtacttgtattgtatcaatctaattctacatcgccacacaatgaaacagtgtttttttttgttttgaaacaagagttcattgtactaggaaagtttctggaccaatcttcagtaagaatcaaataaaactcagagcaacttaaattataatgtgtatggaggagattagatggaagctgaataactaacatatactgcaccaaatcaaaagcagttttcgaattttaaaggctcaaacactcattgggccgatgtatgggccaaatacacaagtaactaacatatacatacttgtgtttgctatggtacccaatgattcatgtcatttgttttcacaaacttttaactctttttttttcctctaagccgattgaaacaaattgggtccattgcataatttacctaaagctaagctgatattgaatattagtttcttccatcaaatgtcaattgtttataattcatcccccgacaaaactaaatgggccgattcttaggcccatattaggtggtcactccggttgtgctaaaaattgttcagagaagtcaaagtctccagattgatgtcaattgtcaacactctacaagatcactcctttccatggagttcaactagaagagcttttcgatcaatttcaccaaatcagaaacaatttcgaatttttaacactccttgggccgattaatgggccaaatgataggtcactccaggcctttcccaaaccctatagtcctcctcggctataaatagcaagtggagtagagcgactttgctcactcagtttccttccaaaagaaagagaaagagcatcgttttgagcaaatgagtaggaacatg

SEQ ID NO: 2534 - DNA, 3000 bp, Unknown
  misc_feature (1)..( 3000): cDNA_ID_3068382_gDNA_ID_1620552_Annot_ID_160317 3000 nt of promoter + ATG
gatctcgcaggttttgagaagtttgacattcccttttcaagaacaatggatgaggcaacaaacaatttgttaaataatttcatctacagtttaaaaggccgaaaatattaccactccagagacatccaatatggttgttgttgacgaaacatgcttatctgaagcaattgaacatgctggatatctcaagctcattgttttctcttgttctttgatatgatagttaacatatctctcaatggtggttgctttgagaaacgcgttaaggtcagtcatcccgagtctctcaatgtaaataggcctaccagttttgtctaccttatgaaacccatgagggtaatgtttcttgacttcaccatattcctcaaacttaaacttctgtcagacatttcgtcgaacaccttgtgagtaagctaataatcttagttaacgaaacataaacaagaaaaagtgatcgcctttttaactcacctgagagatcaaatccactttatagtccactcgccacttcatataattgagaaaagcctctttagatttctccagatcaaaatctctcattttaagaaacctaacattttgagaagaaaaatcaaccagggtgattttggggttataggatgattttgaagattacctgcgaagtgtattatgatccccgtgcttatcaggtaagtggccatggaggagaagcaagttacgaaacgcttcaaccatctcttcattatttgggctctgctcttccttgttcatggtaccatcagagatgtgaatatctctgtctgtttcttgcatcatccgcaacgatagattatgcgactctgtttccagaattcaaaacttgtaaagaagaagaattgatgaaatagatgcattgaagtgctgaggaagaaaagaaaagttcagtgagagaatcgaataattgatttctctcggcgcgggaaaagttaggcgagaaagagaaagagagagaataacggtatttttgtgttgttaattctgctttacggcgtcgtttttgtttgtttagaaaacaaggaaggcccacttacgattttattagataaaatgggcctacttttattacttaataatgagctgagccatctgtgatctatgtattacactggttatacatttctccaaaattagttttttttttctttcttttttgtcaactgctcttgaataaacgagaaaatataaaatttcaaaccaagaaaaagtattcatttacatatcttaattatatacatcaaataagattttaaaatagaattatatacatcaaataagatttaaaataaaatgatatacaattttcaaaaagacatttttaaaaggccaactttcacaaatatcacaaaaataaactttgtaaccaaatttagcacacaatctccaaattttcaaaatagcacaaatttaatattaaaaagactaatataagattttgattgacgtttcatgcgatcatattgtaatcgtgattgcaaattgcaattaactttttattttacataattaggtaaaaatagttattttgtatatttacttatgctaattttagagaatgtgtgctataattatccacaaacttgttttattgctattctagggtatttctcattttaaaaacagacctaggactaggagtaatgtaaaaagtagcttttaacaaataaacaaaaaaaaagaagaagtaaaaacaacactgggtcctttgatatgtgatatgtcacaaaatataataacctaatattcatgtaaatcttcgtttaaaaaaaaaaatattatattaatttgtaatttaccgatatttagacatgcataatatatcctcgtaaattttatcaaaatgtcattcggttcattctaattaatgaatagaaaattatttggttgtagcattttattgctttatggttaactataaattttagatccgtcgaaataaaaggtaataatgaacgggatcggatatcaaaggagtctatggactatggtccccttcggatttaaccaaaaaggtttggaacaatctccaacgttcaaaatatatctagctaggttgataggtttgtggattgatgaatgatgatgagtgcaacttttcaaaggaagtaggaccccaaaaggaggttcacgtgatgcttaagaagcagtgtgtccgcactatcataaatttcacgtccttattttctcacccatctttcttctttccctcttttatatcccattttgctttagatcgttttcaaattcatttttcacctcaacaggaccgttttattgtccatattcccattttacaccgaaactacttttaaatgtcaatagattggtgtgcatgtgtatatgtataaatagaaattaaactaagaaagagagtgtgagagaaagagtgggttcctcatgctacattgtggttaattaagcatgcttcaaataatcttatcatgattatgggcattctccaatagtccaatatacaattcatggaagcagtaaactattaatatatttattatcaaagttatattaaaacaattatcatgggcagctatttatgattaccaataaagctgttacatcattggttgaatctgaaataaacgcaaacctttataaactcaaaacctgaaatagttagccaaacacgtaattccaaatagaaaaaataaacgacctaacacgatataggcaggcaggctaccttttattaaaattataataaggactctcaattccttggtttaaacagtaaaagctaatacatatgaagacaaaaacatttagatcttgttgtgtataattctttgcctgatgtcaacaaaaaaaaaatactttgtctttgtttccttcacttcaccacaaaaaatatgaccgttgagacagaaaggtaaaaaggaccactttagtacaagtacatatataaaacctatagatcctccatcgtaatttacttactccgaccgtttcctttctcacaagccaatg

SEQ ID NO: 2535 - DNA, 3000 bp, Unknown
  misc_feature (1)..( 3000): cDNA_ID_2162951_gDNA_ID_1620552_Annot_ID_160321 3000 nt of promoter + ATG
agagggaagacaagaataagtagagttggcataggaaacttgagaaacagtaaagattgagatctaagagaaacaagagaatctttaagatcacctgtctacttgaggtagcttcctagaaggttcagtggaacaaagttgactaaatatcaaaactttcagctctcaaccaccctaagaaaatctatcacaagcaaagtattcagcacataaacgcattctggatccaaagtaagacagcaatacaagttacctcttctgaaagcttgatctggctctttaacacctcctagagaaacttgttatacaagctcatgaagcctatatacaacaagtaaagctaactttagttataatctcaccctaagaatctaagttaaagtcggtagatactgactattcacaaatcatgaaagccaccaataggaaagcagagaaatattctctctatcataaggagaaacagaattgagacagaaaagacaagcgcgggcccaattcaaccaacaatactcattcacttgatcacacaaagtgcaatcttaaacactgatagaaaattctcagtcttgtccttagggctcacattaaagatgaatcgagttaatgattgctgcaggtttataatatctgcctgaatatgaaaatcttcatatacggcattagaaaatgaaagtaggccacacatttctttctgaaaaagatgatgagacatcaaaacttataaaacaccaattcaaaaaaataatcgaaacttcacctaagaaactaaacccaagtaagaacccattttcgcaaaagagaaggaggagatattgtaagaactctttaaagcaaaaacagagcattgtaatagaaacaatcaaaccaagtaaaaacagaattttacatgagagatcatcacattacattcccgtcagatgtaagatcacacacatacatacacacacaagacagagaaaacgttgatgatcacgaattatgaagacccattagacaaaacaggacaaaaaactcgcatttacagggataatcataaggggaaaattgagaaaaaccttctctttattctcgggaagtgcagaggaaaacaaaattaccttgtggaagcaacaccgattaaagaaattggggaacatgggaatggaatggatccaaagagaagaaaacgaaacaagagatcccaaaaatggaatcggaaaacgaaaggattcaacgccttcttctgggaaatcaaagacacgcagtaactctggcagagagagagagaaagaaagagaccggagtttttccatttcggttcggattggtaataatgggctcagcaaaaataaaacatcttgggcccttatggaccctcttaccctattttaccataggctctacttttttttaccacctttgttttagtttcacttaaaattttagttaaggaaaaaaaagttaccgattatgtacactctactgttatttattagacacaacaaaactttcaaatatgatggattttccatcctattttatttataaaagaaaatatttatatttctaacatcaacaaactctacccaaatcagattatccttctgaaactatgcaatttgtattgtttttcaggaaactagtgattttttgaataattgtaatacttttcattcatcaaaaaaacatattatatctttcctttttttccatcaaaaacatattatatctaaatatctcattttgggttgttttttgataattaacacttaagcccatataaaagagtctagttcaaactgagcccagctacaccaaagaatctagtgggggacatgtggcaggtagtaatttgagcgttgaccaagaaaggacattattatacatccacctggttagagcatgcttataggtgatattctcaaagtatcattaaaaaaattttagtattatttataatgtttgtttaatagataaatattttttttcttacttttaataaatgctaccaatcaggagatgtcacgtagatgatactgatatcaagaaaatcactggaatgatactaatcaaactcattctaattgtttggttaataaaaaaataatttttacactgatgatattctaaaaatatcactcatgtacatggtcttaaccgttgaaatgttggtcgcggcctatatatagaagaacataactctaaaaatagctaaacccaaccacttcccttggattggaatctctcataaacagtttgttggtctggtccgctccagtccatactcataaggtggtagatgtttacttagggtacatcatacatgcacaacgttagtagttgcaggcatagacgtgtttgccctttattacgcgaaaaccactactcccttcgctagtctactttcgtcaattgaaccactaaacccaatgaaacctaatattttagtgtgctcaataatttatcatcatcccaattcccaagcgtaccaagattataatctaacttaacgcgcaatgtcatgacaaaacctatatacaatgaaaaagatttttcatgacaaacaaagaaaaaataaacacgagaaatgagttctcgtaataaagttggtgtgaactggtttttgaacgtgaagatgaccccttcatatttttatttcttggtttttgcttgagagggttaaagactcttaaggaagaaatacattacacgtcaaacctttttgggaaaacaatgaacgcttcatttataatgtttctattttttactcttaggtaaaacattgcaattgatagatgaacaagaacaaaagcagaggattaaaagaaagattaaactatgaaaaaaggacacgtgtgaagagaattagagattctgtattaagacagattaactaacaaaccaaaccctacttgttccactttctattcatacttaatctcattctcctctcttccccttcatacttaaatcttatcattcatccatcttttaatcattactcgagattctgtttcc

SEQ ID NO: 2536 - DNA, 3000 bp, Unknown
  misc_feature (1)..( 3000): cDNA_ID_3068373_gDNA_ID_1620552_Annot_ID_160322 3000 nt of promoter + ATG
cagcttcatacttgctctcgccgtcgaacactacaacatccatcgccggcttgcccttaacgttagtctttcctttatctctttatcttcttcttcttcttcttcttttttctacataatttattcaatatttgattctttccgattgtgtgcgggtccacgggtgaattaattacaaaatatgatcgttaaataggtggattgcttcaattgaatccctacttataaaattaaacattacaatgtgtagtggtccatgttttatacgtggtgatgccagattatatgtttttccttccccatacatttttttccccacacacatttatttcgttttaattcttcttcaataatttgtgtgttcaaagtctaatgataacttgatcatttaaagttaagttattaacatacaaagagtcctttatttcaattttttaaacaaaatctttttcatatgcattttattttattttatttgtatcatagatgagatgtcatttcatgaggccctaggccaatccataattccatttatatgacaacccaaaaaaaaagatgagagacacgtaaacactatgtttctccagcaaaagcaatgatagtgagtatgatttaatttgtgcaagtgcgggctccaataattagctcacaagtcacaactataatcattgtttacttttatcatgtttttaaactataattaatcgtacgagagatatcctatgattaagagaaaactcaccagtcaccacgtatctaattatgataagctaataccataacttaatggataatctaattcttgaagataacgttggtgttctgcgtggagccgctaaacgcgccgctacttctgcttggcatctgcgccacaacagcgttcgtaagcatgtggatgcataacgtagcagctgcagtcatgatgatgcctgtcgctacggggatacttcagagactgccctcgtcatcatcgacgacggaagtggtgcatccggccgtggggaagtttagcagggcggtggtgttaggtgtgatatactctgcggcggttggtgggatgagcacactcactggaacaggagtgaatctgattcttgttggaatgtggaaaagctacttccctgaggctgatccgatcagttttagccaatggttcttctttggcttcccattggctttgtgcatattcgtggtgctttggtgtgttctttgtgttatgtattgtcctaaaggagcaggacaagctctctctccttatctccataaatctcatctcaggagagagcttgatttgttagggccaatgaacttcgctgagaagatggtcttagccgtgtttggtgggttggttgtgttgtggatgacaaggaatataactgatgatatccccggctggggtcggatcttcgccggccgagccggggatggaaccgtgagtgtgatgatggcgacattgttgtttatcatcccaagcaatattaaaaaaggagagaagctaatggactggaacaaatgcaagaaactaccatggaacattgtcttgttattgggagctggattcgctatagccgatggagtacgcaccagtggcttagctgaggtcttatccaaaggacttgtcttccttgaaacggctccttactgggccattgctccaacggtttgcctcatcgctgctaccatcacagagttcacttcaaacaacgcaaccactacattgttggttccgttactcatcgaaatcgcaaagaacatggggatccatcctttgctcttgatggttccaggagccattggggctcagttcgctttcttgcttcccacgggaacaccctctaacgtcgttgggttcacgacagggcatatagagatcaaagacatgatcaagacaggcttgcctctcaagatcgctggaaccatctttctctccatcttgatgcccactcttggtaatttactcaaaaccttcttctttatataataagattcattgtagtttagttttcttatagatattgttacatgatgccaggggcttacgtttttgcatcaatgggaggagtttagttctacaagccaagcacaagaccatgtacacaattgatttattgtactatattgtttactaccgtaatacatatgtagatatatagtcaatggaatgggaaatttagatgaggtcaaaattcacaaaatcggcccatttttgtaacccgcccgattatagtttccggtaccattgctttcttttgtgcttccaacgtaccggtaactttggtccctttttttttttgtttggtgtgtatatgaaaaagggttaatacagatttgtgtgttcttcttcctaacaatagcaactagtggcaaatccagcgcgcggtccaacctggccataccataccacgtcattgtccagcgtgtcttcttctgttttcggttttctacaaacacaaaaagcaaagaaaacaaaacatcaatgcatggtttataacgtcttgctttttaattagtttttgtcctttacactcatttatgttctttctttgtcctttgctatacactacttgtctattgaataatatgcttataatcgtaaaaaactacaagtagtcataatccttttggatatttattttcgtaggtagaagttggccattgcaaattacataaatgatatccaacctctagaggataaacctcattaatttgtctatattatgctgaattccataacatataaagaattatgtgagtgttaattatttaccaataaattagtataaattttgaaatacaaagcaaaaaagtttttcataaaagttcattaaaccttttgcctaaattatggcatgtgttattaagattagaaataaatattctgctagaaatctagaattctgccacacgtcatgccacgtggcggacctttaatgtatttaaaagcccttaaactcaatgccataatcaattttgaggaaacaacagttacaaagcaaaatg

SEQ ID NO: 2537 - DNA, 3000 bp, Unknown
  misc_feature (1)..( 3000): cDNA_ID_2162975_gDNA_ID_1620552_Annot_ID_160327 3000 nt of promoter + ATG
aataatatccattaatgtgaagtggaccaaaagagagagaagcgagtgttacagtcctcaaaatagagacgaaaccatcctaatccttcaaactctctcacagcttcaagactccactggaagcgccactattgtccctacactcctctcctttataaggtctcttctcacgaggctctctctcaaaccattaaaagatgcgtttgctagtagcagaagcagcttcaccattgtcctctgctgcaactccaacatgtaactctcatacttgcagatggaagccttactcaaactctactgacttcacagctaatgcatcagtccttctcatccttgtcatctctgctctcatttgtgctctctctctttacgctgcaattcgttgctttctccgaccaaccctcgagactgaagacgaccacaagcctgaccctgaagcagctgcttcatccactccaacaactcctacacttgtctactcctccgaccttgaactcgcaggagctgaagcagagtgtgccatttgcttgtcggaatttgaacaaggagaaagcattcaagtgctggagaaatgtcagcatggtttccatgttaagtgtatccacaaatggctctctactcgctcctcctgtcccacttgcagaacttctatcttctcacaacactctgaaactccttcaagccacatcaatgcttagcttctttttttaatcttgtttttccaaaagctttagagttgtatcatgttttgcttgagattaccctgtatctgctctgtattattaggtaacgtagaccaaccaaagtatttacttaagtacttgtattgtatcaatctaattctacatcgccacacaatgaaacagtgtttttttttgttttgaaacaagagttcattgtactaggaaagtttctggaccaatcttcagtaagaatcaaataaaactcagagcaacttaaattataatgtgtatggaggagattagatggaagctgaataactaacatatactgcaccaaatcaaaagcagttttcgaattttaaaggctcaaacactcattgggccgatgtatgggccaaatacacaagtaactaacatatacatacttgtgtttgctatggtacccaatgattcatgtcatttgttttcacaaacttttaactctttttttttcctctaagccgattgaaacaaattgggtccattgcataatttacctaaagctaagctgatattgaatattagtttcttccatcaaatgtcaattgtttataattcatcccccgacaaaactaaatgggccgattcttaggcccatattaggtggtcactccggttgtgctaaaaattgttcagagaagtcaaagtctccagattgatgtcaattgtcaacactctacaagatcactcctttccatggagttcaactagaagagcttttcgatcaatttcaccaaatcagaaacaatttcgaatttttaacactccttgggccgattaatgggccaaatgataggtcactccaggcctttcccaaaccctatagtcctcctcggctataaatagcaagtggagtagagcgactttgctcactcagtttccttccaaaagaaagagaaagagcatcgttttgagcaaatgagtaggaacatggaagttaacgcaggcagttccggcgaaattccgtctccaagtaaagttttcatctttcactgtcatttcttataaaaatcaaacctttatagtttacacgtcaaatctctctttctaataacgaatttgtgtttgttttatcttatgtatgtacagtaaggaaccgatttcagaaaagtgggagtcaagcggtgtacgaggtgacagagacgaagaaatcttgcgtgacgagagtcgacatgcctggttgtcccgagtcagatctcacctactgggtcgacgccaacaacgtccacttcttcgccgacgaaccagcaatgcctgagtacgaaaacgccggacgcaaatacggaggctccatgattttcaaccctgaggcttacgacgtcaagaaaactaaagtgaagcttatcaacggagtgctctggatcaccgtccctaagatcccaggcaaaaacgcttccattaatgtcaaggagaggatcctccattactgatttaacaacaccttggtttgtgtctcgtaatggtacttgtgtctagcgtctctatctatctatgaactttgatgcagctactgctttatgtttatcattttgtggtttagttaagaacgatcttgcttctatatgtcgtgatctcaataaagaaaaagttgtcagctttctttgttctatttaatcttacattaacctagctattcgataagactatatagatctttgccattattaaaccggattacgagtatgtaacctggacatgttaatagatatatgttgttgtaagtagggatcaaactttttaatagcgttgtcgtaataattggataaacactaaacgacggttgaaaccttatttgatctttgatgaaaaaaaaaaagataattgagagctcataatttttttactcttgaagattgctgacgtcagcgtcgtcttgtcaaaaatgtttgaaaattaatgaagagtgaagagtgtgggtacggttttacttttgcagtcatttttgtcgtacataattacatataaacgaaaggagtaaaaaaagcgtgggatagctcacagagctggtgacgtcagcttattctctaccgtaaaaaaaatcaaaagagtaaaagcaagttttttttcttaccgagagagagagtcggtgacgtaggcaagaccagtcaaacttatgctatgaaggttaaaaaaaagccagctggagcgtgccacgtcacagtctgtaccacaagatggtgcttcgtctatatttatcaacaggagaacaaaacgccatttttacgcaacctaccttgaactagaagagaagagagagcaaaaaacaaagagagagatg

SEQ ID NO: 2538 - DNA, 3000 bp, Unknown
  misc_feature (1)..( 3000): cDNA_ID_3068369_gDNA_ID_1620552_Annot_ID_160323 3000 nt of promoter + ATG
taaactttgtacaaaggctatactataatgagttttctttaaaggacttcgagttatagaagttgaacaccacaccggggctaagaagttgatctatgtcttcttgtctatacatgagttgaattgctgttcttctttttactccaaatgttacttctcttagtgtccgttggccaagaatcatagactttgtatcaaaggctattatgatgtgtcttgttttgaagaacttagggttatagaggttgaacagcactccaaggctgagaagttgctctatatcttcttgtttatacatgagttgaattgctgctctcttttactttagaatttgttctgtggcatatcatctctctgcttttgtgtcattgtggaacttgttttccatatcatgttaatctcttactgtgttgttgcagacaccgagagtgtatccatatgacaacctgagagttgagcttggaggagagccatagagacccatctaagtgatctgctcatcaaaacaggaagcgtgttttcttcactgctttgttctttaaaatgtttgttgtttcctgcttagaacttgaagacaaaagaataaaaagaagactttgtttttattatatgcgttgtctctgtaattaacagtgaccagtgagagagatccataagagaagacttctggttcaggaaatcttgagttgtgttttgtaacttttagaaaacaatcgtctcgcaattcagttagcgccatgtgtcgaaccaagtttgagcctcgtacgacttcaatcaaacaaaggctacaataaaaagaaaaaagaaaaaaacagaaagacaaattaaacctaatggggcatgtgagtgggacattgagagaaactcgaacttgttcgtatccgtcttggaattgaaactttggttttatatccattacgtattcggtatttctttcctcttctgtatattattcatatcttatacgcatttatttagttctctttgttttctctgatgattatctctatcaaaattcatcacgacaagtagtttagtaagaaattcgtatttgtaaacatagatcttattcttacgggtaaaaattaatatgataaaagattggtgtgacttgtctaaaatttttatactaagaagaatactttaagaagctctaatttgaaatttgataagtgactgtgggatgatgaattggatttgacttgtacaaatacacgtctaatgtagacttgtcacaataaggggcaagtttagagactacatagtctacaatgcagatgattaaaactatagttgataatcatagaatcttaaataaaaatcatagaatctatggactgaaactttccaagtgatggaatcaaagacagccacatgagtcaaggatttctttcaatcttttcaaatattccataagagtaaataataatagtttcatgatcaaaatcatcaatgtgatctgcctatgtgtcatttgtaccggctcttgttcaacctgactgttttggaccccttcaaaacaagattgtgattggtaccacacctctatttttctctcttattatgttatatccagttatatttgagggaatagttcttataagtcttccttctctttgttggcaaactggatatagcaaatctcatcgtacgtatatctttacatgcatgtgtgtatgtgtgcttatcttctttagaccaagtgcatctatatctcttagagagatttgacagacaagttaaaaaatccaaatacatgtcgattcttgaacatttctaagaaaatttgtatctatatgattattacaacaatatgattattattattaaatttggaggaaaaaggacaaaaaaaaaagagaggggagggtaagaaccagggaagttgggctctggaggagtaccaaaggctgcatataataacgtgtctcactcgctctctttactcttgccaactatcaatttggctttcaattctttctcttttgtcctcatttatttccatatttttcaacatttctatatcctcttaattctaaaccataaaaaaggatttatatatcaattcgaaaatgattatgtttttctaaatatttcgtaatatgtagcttatttagcaaaagaatatactttgaaattttagttattctactatccatttgacatattaatcaaagttacaggcttatggattgtggataaaacgaaaccaataaatgttaatggagaagctacgatcaatattatctacaagttataactcttaagtttacatatttttaatgattaattccctataggctatagcacttggattatatgactactgaataatttattagcaaatagattgttatgattacttgtcatcttaatctctagtgtccttttatgggtcatcagattctagagtccagacaaaattacaagccatcacagcgtcgccacttgtaacttgtaatttgcaagaccccatcattttcattttcatggccgattattttccttagataaactgaaaagtcatcaatcacatattcactgaagaatgacctttctttcgtatattaacccattatctaataattcgattttggcttccaaaaaaatacattatttgtctctttaatcaatcttaccccatacattgttaattttatttgcgtgaaccagcaaaaatttgtgattgaaaatacaatttttttttacaggaaaaaaacacaagtttactaaaaaggccttcacatactaaaacatgtcacatgtgtcactcacggtcttacaccgaatattttcgtcatatgaccacaaactttaattattctataaataaccttaatataaacacatttcgtatatttatttttatgttttgcccaaacacattataataaaagaaataaataaatttataaaaaggctcatttctcttcttctttggttcttacatttctctatatcattttttgtccttccattaaaaacggaataaacagaatg

SEQ ID NO: 2539 - DNA, 3000 bp, Unknown
  misc_feature (1)..( 3000): cDNA_ID_2162934_gDNA_ID_1620552_Annot_ID_160316 3000 nt of promoter + ATG
atcatgctatttcccctatccagctaccccacactcagatatatcactggatcgagtagtcctaaggaggctttctaagtataccaaccaatacgcgtcagaaaaccattgcttattgcttaaatgtttgtcttttctgataggatcagactgactcctcaaaagacaaagctcctgatggggtgacacaggtgaaatcaactcggaaggtgccaagttctcggtttagccgctttggtattggcatattgaagaacactgtagggaaggtcttcccatctcgatcatctaatgaggtgcaccttactaaatcttgaggtcgtgaggagtcttgttgaacttatactaattgttttgagtcattctttgggtaaaggcaaaactgggtaatgagaatcaattctactatgacgataacctaaagagatgggtggaaagaggtgtggaacccccagctgaggaagctgcactacctcctcctccaacgtcagtcccattccgaagcaactcattgggtcatgaaaacaagtctgagataaagaacgagatgtctccatctagtgggagctggagtagtggcagcccaactccgtcagagaattctccgggaatcccaccagtctcacagggctcaaaccaattctcagctcgtggacgtatgggtgtgcgtgcaaggtaaacaaaccacttgagacacttgagaattatatataatctgtggaggctatcctggatcctaagttagaatggcaataaggaaggaatataagccaccattgatttacgggtacaaaagagcttttgatgtgagatgggaatagttctcctgatggtagtgtacggttgtgcaactgatagctataatttgtctgatcgtttattaaaaaagctactggatataatattccctcgttagtgttttactgtagataatgtgcatgcttagaactgatcattttactctttttcgggggcaggtacgttgacacctataatcaaggctcctcgagcatgtatcagtcacctcccgtgcaatcttctaaaccaccgattcctgcgaaagcaaaattctttgtcccagcagcaccggcatcgtttgcaaacgaccaggtaatggaatcggttagtgctgaaaccagacaagagaactcaggagatgaagcagtagtaggctctgcaggcgctccaggaccaagccaggcttcattccagtccccgacaccatctccaattgcaatgcagagatttccaagtgtagacaacatcagaagaagtggatcaggaacaagccttaatggtgatcttcctcagtcagtatcaagaagaacagcttcatggagcggaagcgtcaacagctcgtcgtttatgtctccaacgagtgcatcaacattcagaccaagcccactgaacagtagcagtagcagcttaggagaggagcttcaggaagttgaactgtaagttgaaaaatctgtaatatcacaaaagaaaaaaaaagttttgctcactgtcacaacaggttagatcgatcaatcaatcaaatgttaatccatgagttaccccaaaattacatgaagcactttctctgcttctgtcaatgacagggggcaaatatgtattatgccgtttgtattttttttttattttcttactaaatataaattcattaaatttctttgttaacagacttgaggaattacacaataatacacattaatatttcgttcatgagtggtaatgaaatttgttcaccatgtgttggcctctaatttctgcatccctttgattgtgtggtttcccgtattcatagtttagatggagtatgcattttggaaagaagaggatggaaccagaacataattttggttttgcctttaattatgtttagattaaaaataataataatagttattagtataatgatttacttttaataatatagcataataaattttaatttgatacacggctgaaccaaattttgaattatgcatgatttcttttggtaattcggtttggttcaattagattcgaataaatttgcatcacaattttttttataacattagtgaccgaaaatgtggctctttggaccgggaacgcggacttttaagaaaaaaccccgctggtatcggcatgtgccgattcatttgtgtttttgttttatgtgggctggccattaataataattgggccgataattcgtgttttatgattaatcgtccgatctgaagctctaattaattaattaacggatgaagaaccggtttcttaaagcatcttgaagagcgatccaatggctaccgttggattcatcagatctctgtagcttctttagaagaaacaaacagagggagtcttcttcttcctccaacgtaaaaaccagaatttcaatatcttcattccctgattatatcacatctggatcaggcatttcgtcaaacaccttgtgagcatcttttagcgagccgtttcttttgtagaatctcagcaaggaatttggaatcaaagtgtacatgtggcaaacagacctgtgtgtttatgaccgtagctggacatgaagctttcgtcacaaagaaacgtagccattgtcgccggaaacgctcttggtttgtctccttcattgagtagttacgagatatcggaaattttgtaagtttcttagacacagatctttgcatttaaaacagatcggcgccaaccatcctcgatgcgtatagaaatgtcattaagaagagataatatgaatcacattgtatgatacttttgttgagaatgacgttgaaggttgagatggaaaagcttcgaatagacgtttaagttattaggaaagtagcaaatttgggacgaatcctttctaggttttggatcggaatctatggcatcgtgctccacttgatcgctgcgttctatagagcttcttccgatcctctctcacggcgatttttgttggggattagattcgggttaatataattccgattttcatctctttttcgattg

SEQ ID NO: 2540 - DNA, 3000 bp, Unknown
  misc_feature (1)..( 3000): cDNA_ID_3068389_gDNA_ID_1620552_Annot_ID_160314 3000 nt of promoter + ATG
ttttcttacagaagcaaaacctgaggaatataatgatagagtaaaggaaagagagagaaaggaagaaaatggtgattccagatatattttctggatgaaggtaaaggagagagatagagagagtaattcatttgttttattgcaatcttatcctaacgcttacaagggaattcatgccatgcaatttttttgtgtaaatttgtatcgatcggtgctcaatctccttgaggagaggatgaagacggagatgatagaagagatggtgatagtaggaggtttagtaatggttcaatttgtatacgcaggcaattctttgctcatgagttatttgatgtcactcggtcttggccctttcaccattgtcatcttttctacattcgccactttcataatcctctcccctttcgccattctcttcgaaaggtctgtctgataacattttcacatagcctagaaaaccaaacttgtctttttttcttttcacgttgtaaatgttttgttttgtttttgttgttctaaaggaagcaatggccaaatgagcttagcttgaggctgattggtaagctagttttgatctcctttgcagggtaagctatttactctctttttttgtgttaaaattagaaaacttggtttaaattttcacagctttttttggttctgtattcgaaaacaaaaacagggttactctgttccagtctctgtttctagaaggaatcaggttgacatcaccagcaatggcaacagcgatgccaaatcttgctcctggtctcatttttttcatcgcttggatcgttgggtgaatcactaaatccttgttctaactcgtaatttcacgacgtgttccaacattaagtgtggtcttattttatggataggttagagaagatgaatctgaaatgtgtgtacagcaagttgaagatcttagggacattgttgtgcgtatttggcgctttagctatgagcgtaatgcacagcacttcgatcagtcacaaagaagaagatgacactccaatattcgtctttgatcgagacaaggtcgttggatgtatctaccttcttggagccgtctttgttttatccaccaacgtcgttcttcaggtaagtaaacccggttcgtcataaccggtttggttcggtttctaaaatgtcggttattgtaggcgtcaacgttggcagagttcccggcaccgatatcgttaagtgcaataacggcattactaggagtgttgataacaacggtggtactactattacaaaaccgaaaaacaaaagtacttgccagttcattaattagtttcggtaacctcgttggttattctgtcctggtaagttcaagtagatcattcgtagatataaaacataatcaattggtttatggttggttggttataatgtatatagtttttgaaatggtcaggcaggggcagtgagtggagcatgtgttagctttaatggatgggccatgaagaaacgtggaccggttttcgtttcaatgtttagtcctttcgctaccgttatttcggttgctttcgccgttttgacattaggagagtccgttagccttggaaggtgagcattattaacacaactcttttaacaatattttaggttttcattggtaacattacacatttggtcttcaaactaagaaacccatcaaattagtaggaaaacatacaatggtaaaacttactcatacacggttatattaccggagatatgctaattgttaccggattctaatcaaaccgtcaaaactaatattcgattttccgaaggttatatttgattttgtttcttttaatgaattgattaacaaaaaattgcagtgtgggagggatggtgttgatgttcgtagggctataccttgtgttatgggctaaaggcaaagaagggttctctgaaattgagagttttgagagtgagttcgactctaagaagcctcttttgtcttgattgttttctttttgttcatcttcttcttctattaaatttatggaaaagaaaaaatggtcgaatatttagatatagagttttagtctttatttctagtcaacattttagacgaagaaaatggaaatctatatatgttccatttttatattgttttttttcgcagaacattgatagaagatctgatggatgaagttacaaatcatatcgaattacacaagttttgttccataattttaatttatttttttcatgagttagagcaattatcttataagtccaccaaagattacaagttaggttaacatataaatcatgttagaatatcaaacctataagaagttactgagcttagatttgtacaaagcattgtaaataattttaaatgtcgttaaattacttgatgacataatttgtaaaagttagctttgtgactatttttcaacatactagtgttatagataccaattagattagatatatcatcatttatggaacacaatctattattatgtctgatctatttattacagtgataatacataaattaatttgttttttttgttgttgttgtttaatcaagcatacactgtattctttatattttgttcgaaaaacgttatataaaatattgttaatctttttaggacataaaaatgcggtcaataatcgatagttattggctcataatcgtcactatgaaatatttatgaatcttatggaaacatacatataagggtaaatccggaaaaaaataataatcaaagagtctctctctctctctctcattcgatctcgacgatttcaccgactaatcggagtttggatcggagattagatccgggaaatcactgacgaatcctttctggattttggatcggtctatgcttctctactctacttgatcttgatcttctagaaatttaacttcgttttgcaattgatcgtctcgctttaagaagcttgcagatccgttgatctctttctgtgattttgcggggtttagggttagggttttaatttcgatttcggttgtcaattttg

SEQ ID NO: 2541 - DNA, 663 bp, Unknown
  misc_feature (1)..( 663): cDNA_ID_2163072_gDNA_ID_1620553_Annot_ID_160359 3000 nt of promoter + ATG
gatccaagcttgcggaaatcaagtgaagacgtggagtatccgacacgtaccctaagttgctgtctactgggtcggtactccgataaagatccttgttattgggccagtcttatttcggactctttccattcttcttcggataacattggtttaatatattttgttcattggtcatggaggattcaatgcaactaaccaaagtttatcattagctttgtttcaatgaatcaataggagaaaattttctttgatgccctacacataactaaggacgtgataaaaaatggccgacatgatagaagagaagagacagagaaatactcttcattctttaaggtctctcgttcaataatatgactcgtcgtcggtcaatatcttcaagcgtgggaaccgaatattgtcgcacgtgccagaattacatgacaacaatgatacttttttttttttttttttttgttctcactcattttcaagttacagtctttctctgaatttattatcacacaaacaaaatctcttctaatgtcctgaagacgcaaacattctcgattccacgtctttttgcttttccacagaaacccaatttctcggatctgggatcttcgtatgagctggtgttgttgatccatcttttgtgatacgaatcacacaggatcgccaatg

SEQ ID NO: 2542 - DNA, 3000 bp, Unknown
  misc_feature (1)..( 3000): cDNA_ID_2992000_gDNA_ID_1620553_Annot_ID_160369 3000 nt of promoter + ATG
cttgtaagactcatatcttgaaacctcgataagctctaaatgaaaatggagatgtgctgtgaagagaatcagactttgaattgtttcgtgttgatttagttttgtgttgttgttgttgttgaaacttgcaggtccttaagattctaccttgcaggtctttaacttgtaaaagagtagagaagaggtctggtttatctttggaggggtttctgcgtgattattatctgccaggtacaccagttgttataaccaattctatggctcattggccagccaggaccaagtggaatcacttggactacctcaatgctgttgctggtaaccgcaccgttcccgtggaggtgactgccatcatttcttcacttagttcttagttagcttgtgagtgttgattagtagtcattagacgatggttttagctttagttggctcctacgctgctctaagttgccatgtccatatttttttagggttcttcttaagaatgttgaatctcatagagtcgtgtcaactgtatgataaaagggtttagggtctaggtttgaaataagatttgtatctaggttagattatcacataaaatcagaataagaacatgacaatttcacgagcgtaagatttctcatttttgcttcatagagatatgagtcttattaccactatttagtctgagctaataagaagatgggttggatcagaataattttttccgtagctgaaagctggtgaagtttaaaatgctattcaggtggggaaaaactatttgtgttctgattggaagcaagagcttgtgacattttctaagttccttgaacggatgcggaccaataaatcgtctccaatggagcctacttatcttgcccagcatcctttgtttgatcaggtatataagtaccgagatgtttgatgtatatgtttgtctgtactcggtgtgtgtcatactaaacctatggctattggtttaacacgaatgggcagataaatgaactgagagatgatatatgtattcctgattactgttttgtcggtggtggggaactccaatcacttaatgcatggtttggcccggctgggacagttactccgttacaccatgatccacatcataatatacttgctcaggtaactacggtgaaagatcttttccttacgtgagctgagcatggctcttgtctgtgctcgctgtctttaatgctatccaatatatatatatgtatgttctgtaagtgtttaacaacctttttcttctttgatgttcttgcataataaagcctgatcttctcgctggattgaagtttgatgactctttgactaaccaaagaaatcgtttggcctgcaattcatatgtttctagtttacggaaacttctttacttagatgctttctccttctactgaagttttgatatcatctgttcttcaggttgttggcaagaagtatataaggctttacccatccttcctgcaagacgaactttacccttactctgagacaatgctctgcaactctagtcaggtaagctttttcattccgaagtcaaatctcattttttggattaaacatacaaccgaaagctgactcgattcttctgttccaaaactgggtggtttcaaactatggttgaaggttgatctagacaatatcgacgaaaccgagttcccaaaggccatggagttggagtttatggattgtattctagaagaaggtgaaatgttgtacatccctcccaaatggtggcactatgtcaggtccttaacaatgagtctctcggttagcttctggtggagcaatgaagcagaatcttctagctcgtagcgaatggatttatttttaatctctgtttcaggttctaagttcacgttgtgtctttatgtaagaagaaactatgtagagaagaaaacaactgctccgagcatgaagatgtttgtttggtttacgtctatgttgtaaaagacaattgagagctcttggtacagacattttttaggtattggtaatgtttgtctttgtttcaagtaagaaatggtttaatcaaaatctaatcttcaattagtatcttccttttagttggcttatgtcattgtaattgcacttatcttgttgatatcattcattttatatataacttgcgacctaaccaatgctttggagttcgtgggtgattaatatactcatgccaaaaccaataattaatttcttgacacgtaatacccgcagcaactgagctgtcgcatgacaagccaaaaaaccatcaagtttaaagaaacaaaatccaccaagatgagatttttaactcgcaaagatttttgttctttgggatgtaacattaaatagtagacgacagattttatgcgaaatacaaaaactttgagaaaatagttttaaaaaagacatattgtacccctccaggtaaaaaagatctagtccaacacctataaactttgaaaactctactagcattaaactttggacattactatgtctcgcataatcgcctttaggaatgctaaggacaaaaacatgttttacagttattgtctgtgagcagtagtttcatgtggctgccgtttattacgaaaccgtcggtgctgaattagagacacggacggtgaaaaatcataaacggtaaatgcttttacaaccatttatctatatgctttgaagcccaatcttagcccaagccatgatactagaagccgaatcaaaagctaatatagggcttgattggttctccctctgccacccgcaaacgcagcgtttgcgggtggtagcggttattagcggttggcaccaatcatagaaaccgctagataccgctttggaccgcttgaaatcaccagatttcaaaagctccttcccgcaagcgtttgcggttgcgggcggtagcggttaggttaaaaaaaaattaattaattaattaaaataattatgtcttccacccaaaccttatacttattcttatcagaaaaccctaatcaatgaaaccctattctctcaatt

SEQ ID NO: 2543 - DNA, 3000 bp, Unknown
  misc_feature (1)..( 3000): cDNA_ID_3068429_gDNA_ID_1620553_Annot_ID_160375 3000 nt of promoter + ATG
cagcatttcttgggaaccacggtattggtattgggtccagctcgactgttggatcgaccgaggagtttccaaccgttaaaacagattacgatatgccttccagtgatggaaccggagggtatagtggttggaccagtgagtctgttcaggggtcaaaccctggtggtgttttcactatgtggaatgagtaaacaaggatctctttcttgcggcacaaggaatgggtctgaatagtaactattttaatctctactctcaatttttatttctttcttgtcttggaagtaataggatcaatttagagggggccttttggtagaagaatttaggtgacgcaaggagttctttctatatttacggcgaaggtattctcagactggttaaatggttcttgagggttagggttttatgggtactcaattaagtttgtgtacccaaattttgtttacagctaacccttttgactaatttccaaatttgtaattcgtttataaagatgttttctctagctcttattttattatctatatatataatataccaatggtagccgacaaaaagtcaaggattagtaaaatagtttgttaaatttgcttagaaagcatcaaccaaatcaacatatatatcatataatctaagagtaatttgtgaataaagtcagtgtcgaactttacttgtataaatccaaaagaacaaccgttctcttgatattttaatactactacttaagtaagcttactatttagaggaaggcgtcaattgattaggcaaagaagagaaattgaaaatgcaaacaaaaacagcaaaagccgctcaatatatacttaagaactacaatagaaaatgtcctaaaagttagtgggaatcctctaactctctaatcaagagcttccaattaatggattaattacattataaaacatagttatgtcaaggattttaacattatcattgaacaaagaacacaactactaaaaatggtgtcccaaggtatttccttaactctagtttttctcttggtaacactaatcacacttggtgaagccaataacaaccgtaagctcctctacacttacaataactaccaaccacaacattctcctcttccatctccggtatattcttctccggctgatcttcctcctcctcctactccggtctattctcctcctccagctgatcttcctcctcctcctactccgtactattctccaccggctgatcttcctcctcctactccgatctatcctcctccggttgcttttcctcctcctcaagcttatcaagcctactattacaggaaatctccaccaccaccaccttctaaatatggaaaagtgtatccacctcctccagccaaaccatggtggtggttgttgtgaagcgtcaaagacattagtccattaattatgtgatgtctttgatgtctcttaatttccccgaggtttcttttatatatttcagttacgattttttttttttttccttctcttttttctcttttgtaatgtgagtgaagtttgaaaatctttgatcactaacggtttgcttaattttgtgttgtattgtattgattctttgtcatattttcaaatcttctcgactgaacataattatatgttgaatattaagttttgattcaaattttatttacccttttataaatttaattaatgttaaaaatgaatttctccgcaacatgcatggcgagaaacctactatagttaaaagaataaattttttaaacgaaaaaaaacttttaatcccgtaaaacaattcaaaactgcaagcattttactttgagacaaaaaaaaagaacgaaaccgagattgaacggatttggatagtaaaattacaaaaatatttctaggcttacacacacgtcatagtcgactcatagcaccatatattaagaaatggtccaaacttttcaagtttgacacccataaattgtcatctaatatcctcttgttaaagatttaactaaagactcttatctcgaaaatgttgtggtgttagagtccatactctgttactacagagaaaattctttaaattatgctaatggtaactgatgttcttgagtcttcatatgaaccatacatgtcacttgactcacttctaaacctttacatatccaaaaatatatataacagtgtatatattataaaagagtgatttcaatatgagactttctatagaatatttttattatttggttgttctaacttctaaccaaaacagttaagatatgatccaaccaaaagatttaagaggagatcttgagacggtacagattttctttggttggtacaacaataaaagtcatgaacttcacatttggtcaaataaataaactctcaagaattaagtttgacaaaataatcttaacgacccaaacataataacaaaaacaaaacatcaatcaaaactcagagaatgttttttttttgtcaaaaagtataaaagtgagaaagagacatgtcaacaataataaaaaagcacttgaatgtaataataacaacaaacatgtcaacaacaacaacagtctgaaacctcaagcaaaattgctttggtgcctcttatctgtcaattgaatcttcttccattctttttatttcttaattcatttaaataattttccctctctgaccaaagcaaagaatataatttccttcactttctctgtacctttctttgcttcatcttcaaatcttccctccccatcttgttcaaaagaagaaaaagaaattacgaaactttcttcttcaagatatttcaaaatcaaactttggtttaagggtcccattttttttgtttttgtttttcttgcctgattctttaattcttgattctcattaatgcttcatgggttttatatgaatcccctgaaagcttataggctccgttgaacagttataacttgtgaaagttgaatccttttaaaccgacagaggaagatctcagatggcaaacaagataagtgaaactgcttccaag

SEQ ID NO: 2544 - DNA, 3000 bp, Unknown
  misc_feature (1)..( 3000): cDNA_ID_2163126_gDNA_ID_1620553_Annot_ID_160378 3000 nt of promoter + ATG
aatttttgcattgaataagctagtggcagccattgtaaataagttacaactccatgatttatttcacaaaatggctgcaaaaatgtatatgtagatatactttggtcttcaagatatgattttctatactaatgatgatttagattctatcgtcgtgagaactaataaacatatgaatatgatagataaacgagtaaattatttttcttttatcattttacgacataagataaagtaagtatccaaaggatttttccatgatcaatatgtgaaaatggtgaaaaaaaacaaaataatatgtgaaaacatcttgcactgtaaatcattcaaataattactttagaaatctaaaaaaaggttttaaatataaaaataacatcatggcgaatcccaaagcaaatagattggaagaacagatatactaaacacatacagacatccacataaatacaaacacacatccaaagactttacattaaagaataaataataacatttttaaaaggaaattaacacaaaggtgcatatatagataaaaatgtttgagaagagagaacaaagtatacacaaaagacacgctagagagattaaagaacgcacttaagaacttacaaaaaagcttcaaatacaaaaatccatccacacaaacacacactcgtgcttgcttgggaacatctcctgttttatttatactaatataatctaatacgaactaattaatagcaaatcaacatgttctctaaattatttgactttctggcccaatctttccgagttcacacattgcgaccaatgcactttctgatcaaaacccactaattttgacccccttgatcttacaatgtcgcattttactacgacaacatttgaaattcttaaccttggtttgtatgaaatataccaaaatgtcataagaaatttttgtttttctcaattctaactcttataaaaacatagttacttggtcataaaactattttttttttaataactaaatattcgtaaccacaatccaaaattatagaaaccatgcaccgccagtatttacgaaataattaacaaacataaactgatcataaggatttgtccatcccaaccgtcgtcaccattcaaacttttagtactaaatataacccgtagatagacttaactttataaaaaaaaattagctttaaaaaaatgtataattatatactactgtaattttttcttataacattggccattcacatgtgcaaatggtatacccggaaagtactctatagaccccaacaatgatgaggccatcttatcaatcaagtggttgtagacttagtttgggttttcttcctactcaaaagtataacatctacaaagataggagaagtagcaaaaggatatttaatttaattagtgaacaataaagggtcttttccattcttttgaatcactcatataatttgtttatacccaaaaaataagccaagtaccaggccatctttcaggtgtatattttacatccaagaaatacattgttttaaaaaagaaaaaaaaaacgagcaatcttatttttggataattggaagaaaaaaaagaaagtgatgatgatattccatcttttaaactagactatttttttttaacatcaaacaaatagactatttttatttataaaacttatactgtttttaaaaaaaaattatttaaatttacgataaatttattaatttctcagtcactttatcatggtaagcacctattaaaggcaagaataagaatttgcacatagctagggatgcatgaagtaaacaagtaacattacatgaacataaaaattaaacatccaagatggcaacatcataatatttattttcgtcaattattactatttcttgtaaaaatccattagttaactatacgttagttcaattaattaaataaagatttggggttcccaagtaatatgtttctgaagccgagccgacatagagatgaggccaccaacgcaagtgctgtcctggatcacgaccatctctttttccaacgcgatcaatctccccacaaaaccaaaatgtttatcatcttgattctatgcttcatcactctatctctctctacatacattttgtaattcaccgttagacattaaaggagacaaacttttatccttgattgccgatcttgtccatttatttgatcctttccatactatgttttgtctaatggactctcatttgcccagagatttaaagctgttattggtatcaaaaatcatactaatcaaaccaacaacacatattaactatacaacatttaacctaatcagtaatatattaaaatcgatcgatgatcttaatcaatagattcaaaagactatgagatgtagatgtataacacagtttacatataatgattaaatatatttagatgaataatttatccctcattttttggactacccataggttttttgccattggctacttcttaatttgggccatggaccaaaacatgtcaataggtttatttccaatagcaaaacctcctggtacaccaatttacacacgtccggtagaacatcttacatatctactacacttagtgacaataaagatttacacacgtcctagtaatactcatgctagtttataacgttatatggttgtttcataaagatttagtaattagtaattgactttaatttagtaaatacatgcgtgcacttcgagtcccaagatagcaagtttctttttcccttcttcaaactttctcattgtttcttttctacctactatcttctccgtacccttttctatcaattaacatatgctattttccactgttttgtcacatcgcaccttatatatactcacatgtcctaatacactcatacactcatacacacacccacatatacatgcatatctagctttcactggtttcttaacacaactccatcatctagagatatcttgccttcttcttctttttttctcactatcttctctcctaaagttaatg

SEQ ID NO: 2545 - DNA, 3000 bp, Unknown
  misc_feature (1)..( 3000): cDNA_ID_2163112_gDNA_ID_1620553_Annot_ID_160373 3000 nt of promoter + ATG
tcccaaaatctttgatataggaaaaaaaagtaaccaattttggcagcaagatgtgacatcaaaggtaacagattattctggattttatttatttatccttcttaaaaaagtagttcagaaaatgtcatttgattattcttctgggtttagattctacttatacgtagcagactgaaactctgagtggtacagtctggaagaaagccataaaaggaagctttcttctgaactttctattttttcttttctcacttgtagaaatactgcagataaatttttagttatattgtattaaatgataaaagtgagaaggatataataaaatctgaaaagtggaatgagaactttcctttagcagacctacacctgcttgatattgtagtatttattttttaatgtgtatttgaattgataaatccatttgttgttttagtatcatactatatcatctgacatgtgttaacataaaaaatatatttgtgtgagtatatgtaatatgtttaaatataaacagaagtaacaacatattatcattcaaacatgttttttttttaactaaatcatctcttttaaaaaatgtttcagtttcacttattcgaattttttgctaaattatttttgaaagtaagtatcacgtatagtagagtacaatgaagttgacgaagatctggaccttttgggtatattgatatgttattacaaatgcctgtatgatgagtatacttttatctttttgggaaatttccggaatgagtattctatgatcacattctgaaacataatctagttttttttggcaacctaatgaagtactatagtggatactaaaacgtatttgtgccatactaaaatttcatatgtgaaatcaagtttggtacacatgtacatatatatcgacatatagatttaaaatacgtacattgtaataagaattattaaatgaatatgatgttaatggatgacacaaggcatgcgattaaaaaagagggctggctcctagcacaatacaatgcaaaggacataagcaataataacttttaaacttaaacatgctctttaatttaattaattcgtaaaaactctctcttttgacgggtacgaagaccgagtaagcggtcaacagatttttactcggggagacaaaaacaaattcccctaccaaatttacgatttttttgttcctgtttgaactttttttaatcttcccttctccatgagaaaactttaaactaacaattaaaagaagagtacttttctcttgtcaatcttgtatgcaatttgttttgaacgaagtgttacttttactatatatctttctttccatatgtgatcttaatatttaatgcccccttattgaattggctcttataatattgcatgaacgtacacatgcagaagtgagagaattcggggatctacaataaagtatcgcttttttagagtaacccatttgctgtgttttgtaaagttatacctttaatgcatagactagggaatgtaatgtatacgtaggcgtatgctttaaacatgcatatactggatcaagtatgcaagtatacatggtaaagcagagcagatgtagagagagggagagagggactttacgtagaatggtcaaatggtaattaaggcgaagaggtgatttgcagagtgtgggaatgctgggctttgtggagtcatgaatcgcattaaacgaggacgtgagttcccataatcctagtggggtttagagagagaagcttgagtgagagagaaagatagagagttaaaatctgcttttacaaaaagtttataagtcatttcattgtgagtgataattaatttgcctaaaggttggattttttcggttggaatcttaggtttggcttactatacgaaggtgacaccgcccattttattttattgttttagattttatagaaatgcatatgttttttttttgttttttttcttaaaaatctttcgtattctgcaaaattagttgtcactagctcacaatatattacccatacacaattgtttttagctggctattaaatgatgttttcagataaaaaaaatatatacaaatttgtatcatttgtgtaatttctaatgttgtgcgtttaaccaatacgtaatagaaaaggaaacggaggagcatatatagttaacgttatactatagtaaaagatattttatggcacaaaatattttaaattttgaagtttaattaatcgtatgaaatatataatttcacaaatgtctactagtctacgtagtaaaagttttaatagagtttattaaatctatgcttattacttactgctgaaaaattagacataattaattatggttatttagataagttttacagaatggaggaattattcatgagctagaacccgttgcatataattacgtcaatcgtgtgcacctttctttatagcagataactttttgtgtggatgattttctatactattaatgttatcgccgtatattcactgaggtttaaatccgacaaaatacgttggtatagtgtaagaaaacaaattggatgctggttttagttgaactcctataataattataaacaataataatgtatagtgcatacataattatttatacaacaaataatattctaaaggggtctctcaccataaaacttctctggtcttcctcaagattcatctctcacaaatatcttctcctttgttaaaaccctaaagctagagtttatagcttttgagagaacgagaacgagaaagagaaagagaaagagaaagagagatagatatataaatctgaagaatacatctacctatataaatacatattctccaatctttgaaagcagtcttgatcattaaattatctttccccaatccttgatagttgaatcttcctttcttctctgattggcttagagcttggtatattgatcataccaaagtggtagtgatttattgattaacccaaacacaaaataaacagatttgactcaaaaagaagaaa

SEQ ID NO: 2546 - DNA, 3000 bp, Unknown
  misc_feature (1)..( 3000): cDNA_ID_1377706_gDNA_ID_1620553_Annot_ID_160368 3000 nt of promoter + ATG
ggtacaacgggatatgagctgtgcacaagaacgaagaaaaggcataacaacaaattcatcagttgtattgcttcacgaaataaactgaaaccatgcaataaatatacaataaacagataaccccactaactcgtatcaaatagacaagagcatataatagacatccccaatggtacatactatataacattaagcttagcctgatgaaaagaaaaagaacattacccttgagaaataacattctcgtgtcagaatgagatgctacgcactgcagagtaaaacaacaagacagaaaatcattagaaatctgatggattcagcaaaatatatgaacatgaaataaaacatcctaaataagaagacgaaatctccatgtgaacctgaagaagagcgagcgagttgcaaacacggttggactgagcaggagtcagatttggaggtgcaagaacagagtagattgatacaatctcctgcaagcacaaatagacgaaacagtcaaatcaaaaccacgctactaacaccgaataaatagcatttagatataaaagaatcatttgcattcaacgctcatcaatttaacaagaaaggaaaagcatttaagtaactggagataaccgaaacagatgcatttaagtcattacctgtaacaaggcagcaatggtaccaaaagagttccacaacaaaggcgccagatcctgaaacaattctcttttctacaaaagaaaccactaattcagatactgaaccaagttcccaaattcacatactcaacacaatttgagaaaagttctcaactttagcaaatttcaagagtaaccctagcgctcgttgacgaatcagacaaaaaaaacgactgcccagatggaagaaatgaagaagaaaacatgagagattataagaaaaccttggaaagctcgagaagagcattttctctgagttcaggattgctgagatcgagtaccaactgttcagcagaggccaaattgcgatctttgttggccggagctccggtaggattttgtgcggaggtgctaggaccaccgaaaggtgtgcccatggagagagaagaaggtagattcgccattctccagagttggttttctcgtttgtttgttaatgggacttttcaaggattcggtttctcccttcttctctcttctttatagatggcgattacgcccctttcttccttatttatttattttcatgtcaaaacaaaaaaaaatgtttagtttcaaaatagttttaatcatcactatttacgacttaaaccgttttttatttgttattcataaattataatatgtagtgatgcatatggtaaacaaataaacaaaaagtagtgttaattggtttgtgtacaaaattaagttataagttaaacaacatgaatgtgaacggaaatcaatttatcaaagcaatggcacataagcaagaaatagttctctaataatatcattaagttttttaatcattgatgtaaaatatcacatatgagtccaacataagaaaatatttttaaaaaaaattgttgactgaacgaatttagacggaccaaaacgtaagaactcgaacactaaatgagatttaaattttcaagataggcgtaaatgtaaccgatgcttctgaaacaaataataaaagagttagaaagctttataagaaaagtacaagcggaaaatctgcggttttccaagtgtgacgatatctttaaaaaaaattctattaattttcaacttttttttattcagaatatatattaaaaaactaataaaataatgttttgagtcaaatgtcactatgtttgtagtttaatttctgcatattacgtaaattttaaccttaaatctacatataaatttttgcagccattttgtgaaataaatcatatagttgagacttatttacaatggctgccactgaattttaatgtttgtttttgataattagaaagagagtcggctatggcctatgggccaaactggccaagcatgggattgtagtggttatggctcatagtgggaaggtgtttgagtaaccatgtttacatatttttttaacttgtaaacatactattactgaaccatatattattttgggcttgtggtcttcattttgttagggccatttctgcttataaacaatttactgagtataatttcaatattatttcgcggtcaaaaaaaaaaattcaatattatttctgtgtcaagtttacattttatgaattgatttccaataaagcatagcataagcaaaacaaaatacttgggacttgaatgtttcattgcattttaatttttggaatatcagtgtcataaagcatagtgtgtttgcagtaagcccactggaaaaaaaatcatatgtaaagagtgcttttactaggcccagcgggaaaaaaatattttgacccaaaagttaacaaaaattaggactgtttttatgtgagatttcatttgttaattgagcatccattttgtaagtgctcaattaacaaatgatattttgacccaagttaacaaattaaaatgtgtatgtcacaccaatcaacaacataatactataattcttatctaccaaactaaaaccacaaacatagattttagcataaaatacacaatacaaaataaaactaaacgtaggcatattataaaaccgattcagagcataaatttaggtttattctatgttgaaaatagtattttgattttttttattctatgggtttatgaaaagatttatccaaaatagaaagaaataaacaagaggagtggttgaataaattgtactattttggagggttcgttttcaaaattagaaagaatacagttatagatacgaaaaatatctgatcctaatcatcacttcaaaatatctttctttccctttccactttttcgcttacactttccccaactcatcatcactctaaaatatctcccaccacataccacttaacccgacccgacccgaccggaaaacccgacccgatccatccca

SEQ ID NO: 2547 - DNA, 3000 bp, Unknown
  misc_feature (1)..( 3000): cDNA_ID_3068442_gDNA_ID_1620553_Annot_ID_160365 3000 nt of promoter + ATG
aggtggctgcaacagttggtgcacaatgttggagttggtcgcgtcccaacacatcaaggtggaggatttgagcacatgctttgagctgaatccatctcaaacccatccatggagtgtgtttcttctgtttttgtttctaattatacatgtgctttttaatgccttaacttagatgatgggttataggctttttagtctgtttgaaattcttattgtaattatttttaagctctagaaccaatcccccagaatgcataagtcttgggataataaaagattggttacaaaagaaatattatagagtttgtattatcatgttgaacggtaacaatttttattccagcaaaagctttagcggtatgttggagtctaatcgtacttaataaaggttcaaagctagaatttgttgacagggactacggctccatttttcgcaccagactcgagcattgcttcaagaactgcaacgtcacgagcaccttccacatatgatagacgaggctcttgctcctgaaacggatccataataggagagtttaggtaatagaatactcatgttatgagttcctgcattccaaggctaagattctaggattacctttgaagtttctgaaatatcattgaagaacgcttttaactcttcagtcactccgctgaatgggtaaaagatggtccttgatgtccctccttccccgtaaatcgtggcctgaaaatttcataagatcacagccatttgagttgagtagtttcaagcaaaatctggatcattcagatggtcacatgttaaagtatacaaaccatgtaaccatgtcggccaccttccactccacgctctagttgaacagtgccctttagtcctacgattctccatagtatctaacaaatagaagttatgtaagaaaaactatggttattaggctaaaccggtgtggaaagaagaaaatctaagtcttactacatgcctttggagaccttgaagacacaaccataacaaaaaccccagagcatccgttctcgagctgactatagagcaaacatcctggattagtatgttcatgtgaaattagtgtgctaagaaacaagattgatgtatttacacttacaagtttgatgttatattgtctggtccaggtaaagtcttatccacatgggtagtggtggctgagactgatgttacctcacatccaacaagctgttcatgaaaaaccaatatatcatacttgggatccacagcaagataagcttatcagctaatgaagttacacggtaccattcttaatcctgcaatgtaatgtacacccatatccaagatgaaaccaccctgcatatgaagaactttctgtaaaatattaacagataacacagtttcttcaagatatatatgggtgattgatatatatgtcagtgtaattcttatgttacagtctaagtaagcagcgtgttaggaagatgcaatgcaacagagtctgacaaaataagaatgtgacggaatagaaagtattacatacactcaaatttcgcctccaggagcttgagaaataaggattagaactgttcattgatccctcaataataagctggacgttcatcatatctccaatttctgctatcagtttcttcaactgccgaaagcaaccatgaaatacttcaatttttcaaggacaatattacttgctcaaataggtagtgccaagaagacaataagtaacagttacctcaacaaaagctggctcaaaacgataattttcagccacagcccaaattggacggcatggggaatcagcagaaatatttctatagcttgacattgcagtttctatctcactgattgctgcaacaaaaaaacttgtaaaacaataggaataaagcatttcatctgcactttagagtggcataaccaggaagactatagtttcacgttaaatgggtcatgctcaacaggaaaaattgactctgggctagagtagtggaacttaaacaacatgccaagttggtttaaacaagagcagtgatcaacttacaagcagcagctggcttctctgcagaccgatccaggacagcaatatacatatcaagaaaaaagaaatatctttagctttttaagttgggacacatttccaagaagcaataacattgctaaagaagacgatcataaaagcagagcagaaatgaagtggacaagtcaccttgaaggacgtgctttcctgccttgagcatcttcagtgacaattcaacctaaagcacaagactttgagtaagaaatatcctatgcactgtcccaactagattcatacgcatctctcaagtctaagatcaaacataccatggtttctgcagctacaactacagcaacaccaactattgaactgtcttgaatgatctcattgagaccctcatctccccatttgcacttcacttcaggaaaatgctttcttgctatctccacagctccttttgcagattccttcaaccataacaaaaatcacaattcgccaaagttttcatctttttagacatttggcataaacatctcccaaaaatcaagcgcattgatcgaaatgtcacctcagtacggctccaaatcgctttcaggtcgacgagatcggagatctcagctaatctcggaatgtattgagttttgacgaagatcccagctccgagtatggcaattccaggtgaagaaggattcaccatttttttcctttctcgtgtaatggttttctctattggatccaaacagaatcaagttaacttacaactgttgctgcttatagtcacaccacacaactcatgaaacactaagtccaatcgcaaacgctataatttagtaaaatgaccgatataaccccagcaaccaatctctttgatcgagtttccttaacttccctccataaaaccctagatcctgctttgaattttgattggaaacttgtagtgttgtactctgagacatttggtttgatctgactcaaattttcacaatttgttgttgtttcaatg

SEQ ID NO: 2548 - DNA, 3000 bp, Unknown
  misc_feature (1)..( 3000): cDNA_ID_2163093_gDNA_ID_1620553_Annot_ID_160366 3000 nt of promoter + ATG
atacttatgactgaatttgactaaagagatagcacaggcttagtaaatataaaaggcatggatgattttctcagaataataaccagcaaaatgaagcagaaaattgccattcagaatcagcaaacatttttagtgaatataataatccgtctaatccatcaggacatgtgatacagaatttcttaattggatatcagatcatttccattggccaagtaaaagtactgccaaatgtgatgtgagggggaatattaaacaacttcaaacttatgtaacaaatgagattgatgtcatattaccaattaatcgtgctgcaagggttttgttaatattcacaaattcattttgaagaaactgcagaagggtctttttggaagtgtctgtaataaggcgcttgataagcagcaagtcaactgacgatggatggtgctttgtctcgataggaatagggggcatcacatccgttcttcgagtaaacttaatagtgacatttttcctacatgaaaagaagatttaaaaacccgataatgctgcacataaagagctatgtgacagagcagcaaaaaaacagaaagatagtgatcttactctggtgtctctgatataaatctaaacagaaactgcgcataaggagtaatgacagccatttggcgcatatagtgcaagatctttgactggatacaacaaaaaaataaaatgtgttaaacaagtttgcgtgcatatatgtctaatgaacacttaagaaataatatacagcagaaggacgagctagaccacgtactctgtatgttgtccagtttccttcgataaccacctgtatttcagccccatgccatttctctttgttgcccttcttttcgtgcagatgaatatgaggaatgttcctgaaaattttaaccatttgaagacaattatacggcgtggaaaatccgaaggattcatagctattatgtcaaatgcccaaacataaaaaattagattgatatccgctttcgagaagctgctcatgtattcagatgggtacctgtgaatatcaatatccagtctgcagaaagtaacatagttttggctcttcatagatgacgagatctctatggggagacctgtactcattttggaccagattaaggcctgcacgccaggaaaatttagagaaactagaagggttaaacaagttctctggaaaaaatatcgatatgaagggaaacatagatatgttatgaatatgaatacaaaaacaaaagaccagctgcaaatcaaagccaatgattaaatcctcctaaagcaacatatacaacatatattccttttgtaaacctaggaacgagccatctaaaggctgcaaatttgaaactgataaaccacttcagcatttcatgcagttttacaggctaatctcagatatcaaacttgataagaatagattattaccatctttgcacccagaccaaactttccacgtgtttgcttcagtccatacttcgtcccggataaaactgtaagaagaacaatttgtaaacttagcctcaatataaaggtttattataaggttgatatgccaggctaaatcaatagaggaagtgagggtggtcattagctattttacctctcccaaacatatttggaatgtcatcatgtggcatccccttaccattatcctacattatgatcaactcaattcataactcaaaaaatgtttaagaaaacaattaggatctccatatatttatacatatacttaaaattgcatatataaatttctgttgaatcaaacaaatattattcaaactctcaccttacatgtcactttgtaatatgaggcttccccacgggcctttaaaaccttcgatactccaggctctttgtttttctttcccgatgccaaatttttagcttgtatctcactggctcgagcttcctttgctaaccttttctacataacaggaaacaacaacaaatattagaatcacaaggattacagaacagtgaaacttcttgaacactaaaaagtagcttcttaaaagcacaaggatttgatcagaacgaagaagagagtaataaacacagaattcacgcaccccacgggccttttctgtctcataatcatcatacagctgtgtgtcaacacgttcccgatcgataagaccaatcatggagttgaacttagattttacaatctcttcgcttcaaaaatataaacaagacagtcagtgaactaaacccctacacagtttctcctaccagaactaacatctcgaatcagcacgaagtaaggaacgtacatagttacttcaacctcagggagctctgaaatagactctgcagaatcaagagcattttcaacaagctctctaactgtagtataaagcgacttccctggctgatgagatccacaattcaaaattcgtgtgatacagaattgaaattacaaagatgcatcgtttgaattgaaaccaacaaattggggactcacattatcaaatccagcaatgttcttgttctccgcgaaaaactcagctggagattctgcaaattcacgaattcaaaaaagagagtcaattgagcttaatctcaattgaaatcaattgtgcagcaaatgatacatagagcattactttgcttgagcttgctctcgttgctgtccttagagttcttcgagcttcccttcttcgtttcaactaaatcatcacccgccattgaaacaacaacaaattgtgaaaatttgagtcagatcaaaccaaatgtctcagagtacaacactacaagtttccaatcaaaattcaaagcaggatctagggttttatggagggaagttaaggaaactcgatcaaagagattggttgctggggttatatcggtcattttactaaattatagcgtttgcgattggacttagtgtttcatgagttgtgtggtgtgactataagcagcaacagttgtaagttaacttgattctgtttggatccaatagagaaaaccattacacgagaaaggaaaaaa

SEQ ID NO: 2549 - DNA, 3000 bp, Unknown
  misc_feature (1)..( 3000): cDNA_ID_3068438_gDNA_ID_1620553_Annot_ID_160367 3000 nt of promoter + ATG
acctagatacaaatcttatttcaaacctagaccctaaacccttttatcatacagttgacacgactctatgagattcaacattcttaagaagaaccctaaaaaaatatggacatggcaacttagagcagcgtaggagccaactaaagctaaaaccatcgtctaatgactactaatcaacactcacaagctaactaagaactaagtgaagaaatgatggcagtcacctccacgggaacggtgcggttaccagcaacagcattgaggtagtccaagtgattccacttggtcctggctggccaatgagccatagaattggttataacaactggtgtacctggcagataataatcacgcagaaacccctccaaagataaaccagacctcttctctactcttttacaagttaaagacctgcaaggtagaatcttaaggacctgcaagtttcaacaacaacaacaacacaaaactaaatcaacacgaaacaattcaaagtctgattctcttcacagcacatctccattttcatttagagcttatcgaggtttcaagatatgagtcttacaagtaattgtagattagccaaaacatgtctcacctcattgacgtcgacgggaacttccgggaccaatctctcacctttgaaatctccagaagcttcttcaagactcttcgtcatcttacgagcttcagaggagaccaacaaaacagaatcatgaagatccttgcggagaagcatacctcccatgataagacccatatcaagcgcaccaagcgcctcaccaaactcgccggcggcgaaatggattttagctacgtggagacaagccattgagtaagcgtcgcgccaaacggggagaaccgagtgccacggaccagagtgaagttgctcccaagccatatcacgcgccgcctccgccgcgctttggtcaccggccaccgctaacaccgccatgcgagcataagcgtaacccccttcagcagaaatcgattgcagcagagtttgcgattcggcgtcaagcgtcggagttgggagacggaggttgttgtggtctccggaggaagcggtggtagctcctgacattgggatggatcgggtcgggttttccggtcgggtcgggtcgggttaagtggtatgtggtgggagatattttagagtgatgatgagttggggaaagtgtaagcgaaaaagtggaaagggaaagaaagatattttgaagtgatgattaggatcagatatttttcgtatctataactgtattctttctaattttgaaaacgaaccctccaaaatagtacaatttattcaaccactcctcttgtttatttctttctattttggataaatcttttcataaacccatagaataaaaaaaatcaaaatactattttcaacatagaataaacctaaatttatgctctgaatcggttttataatatgcctacgtttagttttattttgtattgtgtattttatgctaaaatctatgtttgtggttttagtttggtagataagaattatagtattatgttgttgattggtgtgacatacacattttaatttgttaacttgggtcaaaatatcatttgttaattgagcacttacaaaatggatgctcaattaacaaatgaaatctcacataaaaacagtcctaatttttgttaacttttgggtcaaaatatttttttcccgctgggcctagtaaaagcactctttacatatgattttttttccagtgggcttactgcaaacacactatgctttatgacactgatattccaaaaattaaaatgcaatgaaacattcaagtcccaagtattttgttttgcttatgctatgctttattggaaatcaattcataaaatgtaaacttgacacagaaataatattgaatttttttttttgaccgcgaaataatattgaaattatactcagtaaattgtttataagcagaaatggccctaacaaaatgaagaccacaagcccaaaataatatatggttcagtaatagtatgtttacaagttaaaaaaatatgtaaacatggttactcaaacaccttcccactatgagccataaccactacaatcccatgcttggccagtttggcccataggccatagccgactctctttctaattatcaaaaacaaacattaaaattcagtggcagccattgtaaataagtctcaactatatgatttatttcacaaaatggctgcaaaaatttatatgtagatttaaggttaaaatttacgtaatatgcagaaattaaactacaaacatagtgacatttgactcaaaacattattttattagttttttaatatatattctgaataaaaaaaagttgaaaattaatagaattttttttaaagatatcgtcacacttggaaaaccgcagattttccgcttgtacttttcttataaagctttctaactcttttattatttgtttcagaagcatcggttacatttacgcctatcttgaaaatttaaatctcatttagtgttcgagttcttacgttttggtccgtctaaattcgttcagtcaacaattttttttaaaaatattttcttatgttggactcatatgtgatattttacatcaatgattaaaaaacttaatgatattattagagaactatttcttgcttatgtgccattgctttgataaattgatttccgttcacattcatgttgtttaacttataacttaattttgtacacaaaccaattaacactactttttgtttatttgtttaccatatgcatcactacatattataatttatgaataacaaataaaaaacggtttaagtcgtaaatagtgatgattaaaactattttgaaactaaacatttttttttgttttgacatgaaaataaataaataaggaagaaaggggcgtaatcgccatctataaagaagagagaagaagggagaaaccgaatccttgaaaagtcccattaacaaacaaacgagaaaaccaactctggagaatg

SEQ ID NO: 2550 - DNA, 3000 bp, Unknown
  misc_feature (1)..( 3000): cDNA_ID_3068446_gDNA_ID_1620553_Annot_ID_160361 3000 nt of promoter + ATG
aagaagagatggtggtatcaatagatctctctaggattgattcatcagatgaagatttttcatatttattcatgctcatatcaataaattatagtgaaaaaataataataataaggaataaataaatgaaataagacctgatcagtggtggtggtgggagggcttaaggtcagatgtgtctcaacagtcgaatttggcaaacccaacttcagtgttaagtccagttccggctccatttttcactatagaaaagttcaagaaaatcaattaaaacaacttgatataaaagtttagacagtagttttatgaatacaatttacaaaaacatttttcgagaatcacatatagaaaaacaaggttcctataaacaacaaacaaaaaatatgagtagggcatgactatttgagtttctaaaaaaaaaaaacacttacagagattaagcaaatcgatcaacaaaagttttagtttttattttttcagatctgaagcagctaatcgatccactaatcttgtggagatcgtgtgttgctttggtgcatatatatacaaatagacaaatacatatgcgtttacatatatatgtaagcacgtatttagagagcaacaataaggcatgagaaatgtgattatcgtcaaatcatgattgctacatgacaaatcgatcttaattttgaaaaagagacatttaaatattcaaaaaacggtaaaaatttctttaagaccaaccatggaaataacatgagaagactgagagggagattagaacttacaacaagagaatctttttccttcaatattttttttaaacacttttcttttgtagggaatttgataatatgaaatggatagattttactgcttaatttttaatcattttttatcagaaactttttcgttttaaatctacggctagaattttcggtcggttttatactttatatagatgctagatttttttcttctagtcatcgtttattagtacaattttgtttttatatattgattacttgaatttataataggattggtacaaaggtggtaattataaagtgcatttttttggatattgttcaattcaaatatttttacttagattctcaaactattgaaaaatatccaaaatatccggaaaatttcaatttaatcgaataaaaaaattagaatggaaagaataaaaaattatcgggtacaattagaagagtaatgtgtttagtttggtttttactcggataccagttcagttttcacgtattattcgatcctataggagcaattgtgaattagttgtgagattttgggagcattcgcttccagaacttagtgctaggagaaatgctattttcctataagagttgtacgaggaagcgagcaagtacacaacaaccacaaaagctttcaatacttgtttactcctagggtttaaaactagaggttctatagatctctaaatttttttgaacaaatgtgttttccacacgtgatattctacaataccactcgaaaattatccataattgctttaaactatttttttgtttaaattatataatttgtaccgttgtaaactgattatttcaaattataattaaagcactataatttcatatattacattcaacatatattaaaataaactataaccatgtatttttttgtcttcctttcctataaacattgattggactctatcgtaaattttgtcgttatcgcaaattttgtcgttatcgatgagtttctcaaagtttggaccttgattatcttgtttggagatgttcaaatcgttatatccaaatagtgaacttctaattttcttttttgataatgtgacttatttggaaaagtattccaaagtattcaaataaaccctttaaaaatccattaaatacattttaaataagtaaaatgctctcaacgaagagatatcatggtaaataacaacagtgagaggataaaatgttaaatcaatttatttacaacttcaaataggcggacatcaaacctacttagcacactttctattttcaaattggttatggtttgtctattagttgttgcatctatgttttttaattcttatatcggtgatcttgattttgttttggtgtatctaaaatctattttagttaaagtgcaagaaaataaaataaaaacttaaggtaagagatgaaagtaagctttaaataaaacagagcacttctatggtcgattatagagccaagttcgttcctccattttggcttaatgcaatattacaagtaaatcttataaaactttccataagtatcgtattacccatggatactatgatatataaactctcggaggtgtagtccagaagaaatgatccatatttgcatacagtaaacttgatggaaaaaatatgtggtactgttggaattgtagctattgagtatcaaatttgagaaaaaggtaaaaaaatatgtaaaatttgggtggaagaaaagaattacataaaattgagaaatgtatgtaattgacaaaataatgttttcaaaacataaaaacgtgataccatttaaatccaaaccttatatcatttaaccatttttagtaaaactaatagtaatgaatggtcaataatataagattacatattaaataattactactttcagaaaatttcaatcaaatctataatattcctttgaaaaaaaagaaagacaaataggtaaacttcgatcgtatcaatcaaagaatatatttatttttcatcgtaacgtttaattctaagtcctattaaaaaacgttaaatttgatttttcttaccatttttttctaaaaggtgagttgtgtgttgtgtcaggtccaaaataaaagtttgtcgtgaggtcaaaatctacggttacagtaattttaataacctgtgaatctgtgtctaatcgaaaattacaaaacaccagttgttgttgcatgagagacttgtgagcttagattagtgtgcgagagtcagacagagagagagatttcgaatatcgaatg

SEQ ID NO: 2551 - DNA, 3000 bp, Unknown
  misc_feature (1)..( 3000): cDNA_ID_3068480_gDNA_ID_1620554_Annot_ID_160396 3000 nt of promoter + ATG
aaaaagtaatattacgttatatgaataatagtttgggtggtaatatatagagatattcttccttgggttttctgaactattaaaaatgtaaatgattaactaaaaaaactttaaaacaagattattataaatttagttttttaaattaacatggttaaaaaataacaaaaaattatatgtagcttcatttgtaataggattagcggatattgatatttttaaaaactaatatctaaaattattgatagttaggaattggtcttacaaagtttgaacgtaatctaaaattatctaaaagctattaacattactaaaattatccataagttcgtataccatgtttttaaaaatgatccgtaaaccatgttcgttcacgtagtgattcatatatctgaattacctttttacgtcctaaatgccaaaaatatgtggatattaaattgaaatgagtaatgaaataatgtaacgacaagttaaatgattctcccatctagaaaagttaattaaggggaacaatacaaagcctctttgacatcgagaagttagcgcgcgattaacaacatatgattaaatagttcaaaatacaactcccaaatgtgagatggacgctatatacgaaaattacggacgtgcatgagtgggaggtttaatcagaaagtttgttgcatgagagctccaccaatttgtttttttgtcggacaatatcatcaatctgaaatcgggaaatatgtgtttatctatgcggggaatatacatttcattctttgaaagtatgtttctaactcttttggattgaaatgtatattgggaatacttattcaatcaaatgtgacaaatactcctggctactacgaatattggttactatatctttatatatagcttttttttttttttttgaataccagaaggttctgggccgaagcccgtaatccctccaaacccgaaatcacaacatgtaatattaattttgtcccaaacatcatatatatagctattaactaatctatatatacatttttgcagccattttgtgaaataaatcctggagttggaacttatttacaatggctgccactgacttttaattattggttttttcagcaataaattgattaacaaacgaaaaacattccaaatatattccaatcccatatatcacgcagatttttccaaaatttgaactcgatttcggcaactatttaaaacaaaaaatgtttgacaacccaaaagacaattgcaatcccttaaaatgagcaaaacgcaactaaatatatttcttatcaattcactaaatcttatttctccaaaatttgaactagatttcgacaactatttaaaacaaaattttgtttgacaaactaaaacacaattgcaatcccgtaaaatatttattttaattataaatttaaattagcggggtaccgcagtttttttaacaggacgggtttggtggaacgggtttggaaggacgttacttaataacaattgtaaactataaaataaaaatattttatagatagatataatttgcaaaattttatatatactaatttagaaaaataaattgtcttcgcggtgtaccgcgggttaaaatctaatattagtttacttttgtttctaccataacatctacacgatttattaagatttgtcatctcttataagtcgagtttaagaaaattattcacacgattcaagttctcgatttgactacgataaaaaaaatgacacatctattgattttgtaatgttttcttcagtttatcatgctttggtttcactaatgtgaattactctattttccagttctatatataattaattaatgaagttttcaataacgttgcatcatcatattgtttttagaatcttggtacattagtaacatatattattctttattttttcatttataatattgtaactcagtaagatttacgtttacatgcaatcaaaatagaacacacatagctacttatgtttgacttcacattacttaccaaaatagtataccgatagataattgtcatttattcatttatattaacaaagaaatctatgaagaaaaacctaattaaagcttgttgctgatgtagcaacagacgccacttaagacagttactaatgtccaaacttgtatatgtgtgtttgcttcgtccttcactctataaattcacttcatttcttctctactttcactcatcaagtaatatttttatttcacttacttttaatttagagttcataataagttgtgacaaacaaaaatcgtaaaggagtttggcttttggttgagtttttgtttttaacaactacttattattatatatctctttggcctaaacatgtgtactggaaaatcatcatacacaaaatcctctcccaaggttattcaataattggttactttttctttatctacttcaataagtggttactttcgttgttacttttgtgcacgtatatttgtatacacacatttcacgtaaatattttcacacgtttatgtataattgggcacgtttgtaataatatatacatgaaactaaaacaaattaaagaggcttacatattgacaaagtgttttgtttcgtgtcttcaaagtttgggaaaacaagtcctacttcttctgtactctccctgggttccaatggtaaaggaatggtgaggatacgattccatttttaatttcttttcttacattatttttctcctattgaggcatttttcacattaatccaacgatcacattttcatcaaaaacttttttttttactgtagtctaagtttggctatataacgtcatttgccaaaattttatcctaatgtccatcacattaaaaaaaaactcaaactatgtaacgtcatttgccaattccagcattatatagttaccatttgatatatatcctaatgtcccaacaatttctacagttttcacaatgccagaagtgtaagtatgtgtttttataaaaacattgttgtgtaattcaagaa

SEQ ID NO: 2552 - DNA, 3000 bp, Unknown
  misc_feature (1)..( 3000): cDNA_ID_3068470_gDNA_ID_1620554_Annot_ID_160403 3000 nt of promoter + ATG
acgaagaatggatatctgacaaaacccgattctgttatgacggcctgaaaagacaaaggctgagcgaccctatgatccgagattccgatggacgattcaaggcagtgagctggcgtgatgccttggctgttgtgggtgatatcattcatcaggtgaagccagatgagattgttggagtagcaggtcagctatctgatgcggaatccatgatggtactgaaggacttcgttaacagaatgggctcagacaatgtatggtgtgaaggaacagctgctggtgttgatgctgatcttagatacagttatctgatgaacactagcatcagtggacttgaaaacgccgatctcttccttctcatcggtacccaggtgagatttccaccctgtcttttttgtatggtttctggtaccggattagacagaccgctctgtatttggaacaatgacataagaaaaaccaaattgtgtagtttgatactttgatttagtggtgtggcttaaggttctgtgcataatttggaatacagaggcaaatagaaaggagaaacaagcaaaattaagtttctaaaaaacagatcagatgttaacatttcgcttgtattgaatattcctgatccagaccaatctagatcaagcaaaacttgctcttccagatatcaaagttgtgaaggttttttagcagtacattcaccagtttttgtctatttttaccagcctagggtggaagctgcaatggtgaatgctaggatctgcaagacagtccgtgcatcaaatgccaaggttggatatgttggtccacctgcagagttcaattacgactgcaaacacctcgggactgggcctgatactctcaaggaaattgctgagggacggcatccattctgtacggctctcaagaacgccaaaaaccctgcaatcattgttggtgctgggctcttcaacagaactgataaaaatgctatcctctcttctgtggagtccattgcacaagccaacaatgttgtccgaccagactggaacggtctcaactttctccttcagtatgctgcccaagcggctgctcttgatcttggtctcattcaacagtccgccaaagccctcgagtctgcaaaattcgtctacttgatgggagcagacgatgtaaatgttgacaagattcctaaagacgcctttgtggtttaccaaggacaccatggagacaaagcggtttaccgtgcaaacgtaattctccctgcatcggccttcactgagaaagaaggaacctatgaaaatactgaaggatttacccaacagactgttccagctgttccaacagttggtgatgcaagagatgactggaagattgtgagagccttatccgaggtctcgggtgtgaagcttccatacaactcaatcgaaggtgttagatcaagaataaagagcgttgcaccaaatctagtccacacagatgagcgagagccagctgcttttgggccttcattgaagcctgagtgcaaggaggcaatgagcacaacaccgttccaaaccgtggttgagaacttttacatgacaaactcgatcacaagagcatcaaagatcatggcgcagtgcagtgccgtgctcttgaaaaagtgagagctttaacttgggttttcacattttctctcttttcgcaaaaataaagatactgattcttcgtttgctgtcctctttatagaccttttgtttaagcctgagtatcactgtatctcgggtttagcttgcggtgaaatctataagcaatttgcaataagcacattgttagattcaaaactttgcagtgttaattggatgctttgtggcatcttgtattgttcttattaggactcccttttacatttgcatatatgaatttggaggcatggcgatatatacaatctctacttttatcgtttgttcttaaccattgtgattgttacaaataatgcaaatcttgaaaggattagatggtttccaatgtgagatgatcacttgtgaactaaactgtttttgacaagttatgttacctaaaatcatttcagtttcaactttgtgattggtcataaagaaaatttcagatagattatgaaagacaatcacaagtaacatataaatttattttagaaaaacttacctaaaccaatcaatttttttttatagctgggataattaatccatccaactttttttatctttctcaaacaaccaactttttattatcaaattgctttcttactgattaggtcttatatctaaaagtataatataagcaaaaaaattatttaatttaattaattttaaataacctgtttttttttttttttgaacttcaacacattgtttattggttaaaatccatgctaaatggataagatttttttgatacatgtccaaatcttgttgaccaataacacatgtaaaaaacattttgttagttttttttgggtaagaataattagtatatgtaaatattcttttaattagtttttattttctgtaaaagaaaacaaaaaaataaaacagttgttgatatctaatcgagaaagttacccgtgtcgcaatcatgtgagttactaattttgaaaaccaaagtttatataataaaataattataccaagttaagttcataagttagtaatctagatttacacatttttatacagatacacaatacatgtaataacaataatcatgtaccataacacttaataaaaaaatgagttaattatatagttcaaattttatgaaaaagaaatcatgtgtatctagaaaatattaatgttatttatatttctctttatctcatttattttgatattattatataaatctctctttactctttgattgccactccaaccttatttcttagagaatatgaaattaagttttccaggaaagttgttcttcttgttaggttatatcctatgtttcagcgatatatcgagtttcaataatcattttgtggatgcagaaacattgcaaaatttcacctcatttgaa

SEQ ID NO: 2553 - DNA, 3000 bp, Unknown
  misc_feature (1)..( 3000): cDNA_ID_2163029_gDNA_ID_1620554_Annot_ID_160399 3000 nt of promoter + ATG
caggcttaggagatttctcaacctcaacaagacacatcctgcaatttccagcaatagataaacgagaatgataacaaaacctcgggatatcaactccagcgacctcacaagcctgaagaacagtgaatcctttagggactttgaccgcgtaaccatcgacaaagacctcgatcgcatcttcaggattcgagaagtggacgcgtgctccacctacagggtttctaggagggagaatctgtgtcggcggctcaggctcagagacagcagcggattcaggagattggagctctggttttgagacgattgtgcggaggaagaaattggaggtttgagattgaagaagacgtgaagctggtcgaattgttcgagaagctaagatgcctaaacccatggcgttgtggatctgtatcgtcttcttcttcttcttcgtcttctatgtgtgtatttctcgatcttgttgtgagaactcctgaagcatttgtgcgagagagaaggagacacgaatgagtgagttttgggctttatgggcttttattttggatattataattggcttatgaatgagtgagttttgggctttgtgggctttttcttttcaaactgaattaagttaattttgggagatatagtttaagagttttgatgatctttctctaattcacttaatgacattgagtttaaaacaatcttgcttctagttccatacaacatattagaacctctagcaaaataaacctctaatcaatcattagtcctagagacttttaggtcaatgtactaattgaacatttgtatatttcagataaagacaacttaaaatatggttataaatgatgacaattttaaacatctcaacgtcgtctatttaaataaaaggaaagaaaatattgtcaacacctatgctgcatcggttaaggtttacgtgtaagagttagtttattttcctcgtttgtttaggtttacgtgtaagcatcattatcagtgatattgttattaatctaacctttgcaatgacaaccaaaaaaaaaaaaaaatgaagtttcataagctttgatatatattatcttatcattacaggcagacatgataagtataatttaactcgtttaatttgatagttttagttataaatttacatagtaattcgttataattttaattatgggtttgaatggttacggcggttcgggcggacaaaaccatcaacggatcagactgttttttatttaccattaatcaattatagtgcacagtggtccggacaaaaaaaaaagaagaaaaccgcaacagatcatctgtgaatcatccacgaactatttttacatataaataaacttggtccacagcggtttattgtccgcctcaaaataaggtagattaaaccgcatacaaagtataccgctttgtccactgcatccattcaaaacttataaagttataagttatagctaataaatatgacactttttcaaattgttatagatcactttaagagtgattacattcctctcttgtttttttttgtcaaacagagtgattacattcctttctttttttttgtcaaacagggtgattacattccttctttttttttttttgtcaaaacagagtgattacattccaaggcaaagaaacataagggagaaccactaactacaataaaaattgttgggttaatggcaaaagaaaaaaaagaattagtggttcttctatgaaaaagaattgcatccaatggaaagaggatgtgaccgagttgataagatatgaaacacaacatatatagctttttgttatcaaactatttatcgtctcgtatttgttctaatctaaaccgaaatactaatattttaaggaaatactttgcgaaaaataaataaaaattctcacctttattcaatcaaagccaaaaatgaaaaaaaaaaatagaagcaagacaatcatattcatacaactcgataaggtagtacctctaaagtgcaaaacgaaaacaagaaatatctctgctatctcattctcgtcaactaggaaactctgcataatctctcttttacacaatgcaaagaataaggtgaagatgaactgattatctctagcgtactatgaaagtcaatatttagatgcaaattaggtgatttttattgtcgatattcttctttttctggacacgtcctcatattcgtgtatatttaatttcttctcttggttttatacaaagccgaccatttggaaaatttaaaactaaaaatctcaaaacctgatgtaaattttgattttactttaaacagaaatcctacgttaaacatataggaaatgctgttacacacccattaatgtctataactagtacatcaatttacaacagatttattgtcttaaaaaaaaataactcccccacttaccccgtgaatgttcaagtacactagtccagattaacttaaattcgattatgctagaaatgattcacaaaaaccggtttagggaatcatcatccagatttggagcatcgtaatcttttggtaaatttttattagccgttcgtacaattcaattccaaattttaatttagatgagattttttatattaaaaaaacaatgatatatgttcgacaatcgacatgttctgatgtcctatataaattcggtccttctagacaaaaccttacgttatacacttcaactaataaagagtccaaaccaaacaaaaaaaaaacagtagtttctcgacagaaacaaaatcaatatagctttaacatcacgagaaagaagaactaaagaagaccaaacaaaaaataatttggaaaaaaacagagaagcagctctcgtgatcttcccgccttttctcttcaacttgtaaaacattacaagatctatcttctaccaaaaagacgaagtttcgagtgtcagattcaagagttgaatcgggtattaaactctgtttttctagatctttgtgtcgaagagatcgccggagatttcatttaaccgattcttgaaaacatg

SEQ ID NO: 2554 - DNA, 3000 bp, Unknown
  misc_feature (1)..( 3000): cDNA_ID_3439420_gDNA_ID_1620555_Annot_ID_160417 3000 nt of promoter + ATG
gtttaccgatcattaaaggaatataaagcgattatacaaggaggatccaggaacaatcaaagatctgaattaggtatgtgatatagattgactagtttttttactcctattttctatctgagtgtacaatttgtaaaattgaaagtgaaatggatatgtttctaagtttcttatttctcttcttctgttgcttttttctgctctgaagcagagacaccaactaatggcgagaatctaaaatctccacttatctatttaatggattgcacgttgaatgattgcagcttgatcctaaaatcaataaatcaggtacctttgatgatagcttgtctggttcgttttatttattttagtatttgcatatcacagttttgctattgagtagttagagcttatgattgtacacaccgtattctcatttctgaatccagtattcacttgctctatgaatctgtaacattgcagagggaagtgtatccttctctgatattatttccagccgagagaaacaaagtcactccatatgaaggggagtcatctgtaactgacataacagagtttctagctcgccatgcgaataactctcgcgagtttttcagtaagtctttcagttgtttacacatttatgctgaatattatctctaaagtgtctgaccttccagaaaaatactgttttctgcagaatcttaatatgttttacaacttgtgactcaattttttcgtagtaactcgtttttttcctgcctaagctggttactgaggaatgcttttggatttttattattctgttttgatctggagcataataaacaaagttatgaatctttctctggcaggactccttcctactctgtctagaaatggaagaagaaactcaaacaaggtggatcagtcttcttcatctgcggtaaataataaagtgacagatggtgataaacttgttgaggtcgttttaaggaacagagagcccgctgaaagagaggtaaaccacgaccaggtcaattcccaatcgcctccaatacactcgctcacaaacgctccccaagtgaaaactggcacagtcctggtcgctacagaaaagctagctgcctccctaacatttgccaaatcaaagattctgatcataaaagcaggccccgagatcggtttcctgggcctaatctttaacaaacggataaggtggaaatcattccctgacctcggtgaaacagccgagctcttgaaagagactcctctatcgttcggaggtcctgtagtggatccaggaataccactattagctctgacccgagagcgagactcttccacaaaccatgatcacccggaaatctcaccaggcgtgtatttcctagatcatcaatctgtggcccgtcgaatccaagagttgaaatctagagagctaaatccaagtgagtactggtttttcttgggatactcaagctggagttatgagcagttgtttgatgagatcggtcttggagtgtgggatgttgataacagtgacattgactttgcttggccttagaagctcttgcgttgcatctcttgcaatgtttttcttttacgttttgttttagaaagaagaagaaaaagagtagaagatagtaaaacccatcatgtgggtagaagaaatgtttaaactgtaagaataacacttgaaaatgtcttctaaacaaatacaacacagaattagatatcttcttttgagatcattcctcttgcagattacttcaataggaaaacattttaataagcaaaagcaaaggtcagaatcataacaaaagtcattcatctctctttttgccagtcttgttctctaagtagcaaatcttatcctcaggatcagaaaatgccaagaaggcctctctatgagtaacatcagcctgaaaatgagtcaacgatgcacggtataaaggcgaccacatcctaacaccaggtagatcatggagtgccttcattgaatcaaacacaatactagtcttgttggaatctgagggttgcttattgctggttcgtagagcgctaagtgaagggattctagcagcaagaatatcatcgagtccgtctgttaaatcatcatacatctcatcataccactcattaatcatttcagacattagagaatccacaaggttttcttcatcgcttgattcttccgatccgctcgcatcagacatatcatcatcatgctcttcagactctatagaatccaaactgttttccccaacgcttgatcctttcgatccgcttgcatgatcattgtcagcttcctcttgagaaataaccatattgagtgagaatctaccaatttaacaattcaatgttacaacagcatacatatctctaacataacatggaaaatcaaaggggattattcagaaaaaacaaaatctgggactagaattccataatgaaaatctcaaaagccgattacctgatttttttcgggaatggttgtcaattcatcctcttgttgttgaaatctgaaacgaggaattgggaagatgttaaactatttgagcagaaactgattgtgttgtatagcaatcaacgctaaaagagtagatgagtgactagaatggaatctaatgttcgttcgaattactaataaggactcaaaattcaaatcaaaactcagagaagcaaaatgtggaaaaggagacgaagaagaagatatatcagattaccttttcagagaagcgatggagagaagcttttctgggtccgagggttttaagaattgcgcaggtctctttttgtgggttcccagataaaggtaagggtattttggtcataatctcagcttacatacttgtttgacttttttagtatgacttacgacttttgtttctttttttgtaaatttactaataatataagtatgagaagaagacacgtgaagcgccaaaagacttgtggggagtgtataccggataaggtttgcatggtctctaagacctcaggttcttcctcacagtcctttctaaagaatcatcatcc

SEQ ID NO: 2555 - DNA, 3000 bp, Unknown
  misc_feature (1)..( 3000): cDNA_ID_3068520_gDNA_ID_1620555_Annot_ID_160423 3000 nt of promoter + ATG
tcattcataagtttttgcacagcatcaaggcaatttatatttacagtctgtgaataaacttaaggtgatttgtgtaataattcacatgctcttacaacaagttcactgcaataatatagtaactcgacaatcttaagcaacttcatacctattgataccaacaaaggatcacaatcccaatataaggcccggaaaatagagaacttcatcagctaatgaatatatgacatctaggactttacaaaaatctggatcaaattctgacattgtaaaacatcaattcggatatactagaaatgcaaatacgtattatagacacgaactcataaatgacatgtcgtgaagcaaaataggtagacgtgataccaaatgcgtatggaatagacgtagtctcaactaatgaacaagccatgtaatcagcaatactcacctcccctccaaaaccaggaggcttttcgtaggtcgattgccctgtaacggaattatagtagtaaagaactcctgcttctgatttatgtgcagtccaggcatctaaccgatttcctactagttgagaaccagctctgtcatctgcaaaatacaagatgatcctgataaaaaaatatgtaaactcaatagaataaccattaaggtcaaacagctcttacatggatcagtaatctatcatgaaacctcgagcgtaccgattcctgagagttcttctgtctttcgcccgggagatatatcaggctgacgacctggtaatgcatgaacattgccaacacttcccataggactggcaccaagcggatgagaaccagaatatggtaggttaggggagattccacgaactggaaatggatatgaaccaggaaaggtagtaggatgtgaaagaaaaggtgccctgggaataccacccatagaaggaggctgcaaccacattccttgaggcgttccaggcagtgaatgatatggaggatacatgtgcggatgaataccaggattcatttgagcaggacctgcagacatcccaggtcttggcgttgtagaaaaagggttggaaccaggaaaagcaggcggagatgtcattagtccaggaggggcgagtgttcctggtcgaccaaaaggtgcatttgctagcatgggcgaagcttgaggtatgggattaacatttgaggaggctgctgcattagtaccccattgtgcagtaacagaatatggaactgactgagagacaaaacctgtactagcaatctgcacaacagcaaccaaaataaccacggaaccagtttagagactaaaaggaaacaacctgatgatagatgaatcagcatgtgttcaatgcatacaccaaaaaaggttgaatcctgacaaattctattagtgagctaaatcagaacgacacgaaaattcgatagattcaattagagacatgaattcatctaattataaggatttctgctaaatcaatatacgacaagttcttgtaaaaggttctacacaaatccacatcaaaagataagaactagagacaagatcgagcttctttacgagttaaacagcgctcaagataaacaaactatgcaacaatcagaaatgagcatgagcaacatacagacatagagtgtagctccttcagctccgactgagagaaattcgaagtagtagccaagactggagcaattggaggaggacggacgaagatactctgtcccgaagatgccgccgttgtgtacggcggatccgttgtattctccccttccattacctttaaagactaaacaggtggtggtatcgagtaatagtttccgacgagaaattgccagcagcttcgtcgacgcgaacgaagaagttagggtttaggaaaaaactagtgaggaagaatcagaagatgtcgatgtcgcgcgattcaggagaacgaagttcagccgacggtttagatagatcgtaggatgatagaaaggatggacggctgagattacgttccgggggaaaaggaagaaaggagatattttaaattattaccgagaagaccttatattttaaagttaatttatgaaataacccagtattttctttatcgtgatttggtcacctcctaagtcaatttctttcgtgaaaaccccctaatcgatcgaaaagaagacattatgttatacgcacgtggatagtgtttttagattcaaaaagtatataagaagctaactcaaacatatgaaaattgaaagttgactgaaaataatcaatttagtgacattagttattgacatccgacaaaaagaaaacaacacacaataaacatggttgcacaaaactaaaattagtaaccaatgaactatctaatttaacagcaacctgttgaccataattcatccaccactattattttatttttaacttgatggacataaaagggtggccgacccataagtggaagagtccaaaaagcaaaggattacgaacgaactactaacaagttgggtcgccgacctcccaagagtagcaagacgatacagaagcttttcttttcttgtattcggttctttcatttaaataacgatagtataacaacgttagaaattaaactgatctgatagttcaaatgaaataatgaccaaccatatatagtaacgcgcctaacgcgttccacaaaaaaaacataaatggcttaagtttgaggggtccttatagtcagtcgcatattctttggtcgcataggtacaacaaaaggtcacgacgatagactctccaccgatcacttacttgccgattcacattctcccatcttctgcgcatcccttgtcgctactactttcgaaccttctcgattccaatttcttatccgaaaccctacggaagacagacctaagtttctcagctaccgacctaccgtgaacactgactaatacattcgctattcctctgtttctctgtattctgtctgctgttgtaacggcgaagatatgcgtcaattaggttcacctgcgtggagtttccggtgaattcgattgatgataaatg

SEQ ID NO: 2556 - DNA, 3000 bp, Unknown
  misc_feature (1)..( 3000): cDNA_ID_3068516_gDNA_ID_1620555_Annot_ID_160425 3000 nt of promoter + ATG
caacactttcacgagctagagagctaagttcaaaccaataaaaccctcaaaatcaaaataaaaattcctttgattaagagaagtaccagattgtgatcgaaaccctaaataggacgatgaattcaggacgatcaaattgaagaaaacaataaggcagagattcaccggcgggaagaatcgacggcgacggagagattcgatgagctaagagaagacaaggtggttcggcgaagatcgattctcgattctctagcctcctcgctcgctctctctctctgctcacaagcattattccattttctcttatccccattttttcaattattttaattaaaaaaaacaatattcattctatctacaattctgtatttttaaaaaaaaacaattgtgtagaatttaatatgtccaacttcgcaaaagctggaattgtttttttcttttcactccaatttatgcatttatcaaaacagacactcattgttgattttaaaagattcaattgtactttttatccaacacaattataaagtttgaaaagtaagtacgagatttttattgtgaaactaaattaactcttttatatcttgaatcgagatggtgacataattgtaccggacaaaatatcgaaaattttaaaaaatatttttacataacctcgactatttttgtgtaataatcaaatcatttaaaattgtcaaattataaaaatagttttcacaaacgtaagagatacgtacttctagatatacatactttctgcaagcttttagtatatttagaaattgtaaaaaaatacgtactttatgttcttacaacttgactgcaaagtaggtgtactttgacagtttcttcttccactacccaattgaatccatcaacaaatattttggccaaaatgcacatcaaattttaatgttcgtaccgcgtttcgaatgatttgccgctctgttgtaatatttgaattataatcagttcgttgatgaagcaaataaatcatggttcttgaacagtgttagccgactagtttttatgtcttaaccatttttttcttgctctctagagcactgcttgaacattatgatattgtataatttttggcatagaaatgtaaacttgacaaaatttttgatgattacttaagttttggtctcgagattctaaagatttgcacaaaaaaacaaaggattgttcttctaaaagaaaaagttaaatcgaaaaggacacaaaatttatgtaattttattgtatcctctttttgggctagctttagtcgatgaggccaaatgggcctgttaattatttatttttactttagtattttttaagtgggcttcttcctttggggctttacatttttgttggtccctgtaaaatcctgttaaagggcttaaatactagagcacaaaaattttaaaacaataaaacctaaatcctctcgtcgccttcgtttcttcgtcccactcccatcccattgatgaaccctcagaagactttgccctaaacctcacatactattcataatttgtatggatattaaaatgatattttatttggaaacttcatttttaataataaataaaaactattatcggaagttagtcatatttttttattttgtactcaaagagtcgtaatgtatatcgacattggtgtatcttttttttataacatttttgttacatatatcgttttcaattacatatattttacatggctggatttggataatgatgaaaagcaagtagtcgactttattcacaaacgttagagtcataaaaccctacccggcccattcacatgcaatgaaagtgaaactcccaactttacaagcaactgatatataaatattctacaaataaaaagggaagaaaactcttgaaattacatggaagtggaataatagtattacgaatttataatgtaatgccaagaaagggagaatatttataattcacataaaaacaaagggggcacattcatatatacgttacgtgtgtataaaacagcatataaatacagaatatatatattacaacttgagtagcatagtccttgagctattgacaagtcataagtgagagttcatgaagcatcattttctgtgctactggaaatatatatttgatattagtcgtgacctatagttcactgtctaaaatgtaaatcttatttgatttgatgcaatacatttttactttaccccaaataacctgaataatgttggtcataattatgaattattctcaacaaattgtaagctatttccctgctgtttgtttacccacctactgtattttttttttcttcctctaacaccaatttttattttattttttggccatcctgatcaatgaagcattaaggaatcaatctttgcacctggttatttttagtaacaactaacaacgcctcgtcatattgatttgtgctctgcacacaagattatatggatttcaaaataaacatgcagtcaattaatgcagtttatataacttttcttaagttcgatgttagaaaaaaggttttctaatgtaaagaagtaaactatgcatgtcaagctaattgctccaaaattaatatcatatagtacatttcgattaagcaatgaatcttattatctaataccaaaaaaactaaacaataacgaacaataattttttcattacaaacggcaacaaattattacattttcactattttagatggtctacacactagggttacaagttggtccatgcgaccagtttatacaatttttcgatgacgtttgtatataagttccttttgcataaatttatatgagttataaaggatgataaaagaaagtgtacattagataattgaaataaagacgccgaaaaagagatatataaatagccgtttccatgtgataactattattgctctctctctctctctccaatccaaaaggaagaacaagaacaagaaagctcacaagaagtttcatcttcaccaaatgcaaaagaagttgatacaatg

SEQ ID NO: 2557 - DNA, 3000 bp, Unknown
  misc_feature (1)..( 3000): cDNA_ID_2163206_gDNA_ID_1620555_Annot_ID_160428 3000 nt of promoter + ATG
ctgttatggtggaattggatactaaaatatgtctaagagtgggactgcaatatgaccttcttagtttattcgatgttttggttgcagaagaggaggtcatggacgtttctgctagaaagtcacaaaaagctgggcgcgaaaagttgaggagggaaaaactgaatgagcattttgttgaactgggaaatgtactcggtatagactcaatggttatgtggatttttctaaacagcagatgatctcactttgatcctcacatagctcttctgtttgcagatccagagagacccaagaatgacaaagccacgattctgactgatactgttcagttgttgaaagagctcacatctgaagtcaacaaactgaaatctgagtacaccgcattgacagatgagtcccgcgaggttcgtaccttatcccttacgctccaggcttttcctaacagaaaaaattagcagtctacatgacgtaaagatatcgatagggatcccaatatagataactcattgtctttttgcttttacgatatggtgactacacctatttcgtaagatgcaaactcagacgggctatataatgtaactgcttataggacttgttgttatcatcaatagcaacacttacaaatttactggtacttgtataacaacggttctttctgtagttgacacaggagaaaaacgacctgagagaagaaaagacatcgctgaaatcagatatagagaatctcaatcttcaataccagcagagattaaggtcaatgtctccatggggagctgcgatggatcacacagtcatgatggctccaccaccctcctttccataccctatgcctattgctatgcctcccgggtcaatcccaatgcatccatcaatgccatcttacacatactttgggaaccagaaccctagcatgatcccagctccatgtcctacatacatgccctacatgcctcctaatacagtcgttgagcaacaatccgtgcacattccacagaaccccggtaaccgttctcgggaacctagagcaaaggtttcaagagagagcagatctgagaaagcagaggactccaacgaagttgcaacacaactcgaattaaaaacccctggatctacttctgataaggtagagagacttaaaactagaagctagagatctccaatttttttcggatttattatcttcacagttattcgcgaaattgtattttgaaggatacattgcaaaggccagagaagacaaagagatgtaagagaaacaacaacaacaactcaatagaagaaagctctcattctagcaagtgttcatcttctccgagcgtacgagaccacagttcttccagtagcgtagctggtggccaaaaacctgatgatgcaaaatgattcgaaagaatctgatgttgatcatctcaagtatccaagtatcgtttcgatgagtactgtatatagtgcgagtacaaaatgcacttagctgtttaaagcagtgttttgatgcaccgtggcattcgttttcctcggatagtcatttctcagatgattttcatccttaataggtctgctttagttctaaaactcggatgatttgtaatttccagtgtccaaatctactaattttattaatcctataaattaaacaaacttatatcttgatttttttttaaaaatcatagattatttatactattgtacaaaaagaattacatttaaatcggtaaatatagtttcaccataaatatatggtttcattaatatcataaattagtaatgatatagatatatcaacaatatatatttatatatatattatatgtaagaaatttctttgaaatatatttttaatatttagttctcatttgtacttatttgaatttagttctaatattttactgtatcaaaaaaaatttggtgttattttttagacatgagaattattttttacttataattagttataaaaaaaatattttttataatgaaagaaatcttatagtaaaaaattactatgaaaaatttctttataaattaataaaattttagaatcccaacattattaatttgtaaaggttttactgtagttaagttcaagttcaatttaagctggtgctaaacgttagctacgtgttcgtatgatgtcaactgtctagatacaggaaaatttctccgaatatacagcgactacacatcaaccatagagaacagtatgaagtaaatataccctctatccatcgcatatgtagtttgtgggagtgctctgttggtttcgctttcctctgatgttgtataccctgtattgtcaaatatgactgcgacacggttcccactcatctcatagaccgctagataatagtctgcatgtatataaaataattgttaaagacaaaacatagggcatacccaatatcctttgtgcatagtatttagtatgtcatggaagttaactaggtctttgagagttcgaacgccatgaagagcaaaagaaagagaggaaatacggaagagaaagacaaaacaaactaaaaaccaaaagacatttgacctatcgtttctgtttcacaggacgaccataagatgtaaaagtcttgcccatccattccacaacccattatcgattcacaaggcaacataagaagaagtttacatttcgatgagctagagcaattctctagcgcagatcacaaacaaccaactccaacctctggttatactatccaagatttttacaggatggtgcctgaggctgccaggtttcgaaggaataaagagttttggtgtagcaagaaaaattaagttacaagacactaattatattgtagatagagacagaattgaaataaaatatggaacataaataaataattagataaatgagtcagcagcttcggtgaattgttctgtatctcggagtattactgccggcgacgaggatagtcttatcttctcctctctaatgactttgattcattttcctcttcagattcaaatcctagattcaatcggaga

SEQ ID NO: 2558 - DNA, 3000 bp, Unknown
  misc_feature (1)..( 3000): cDNA_ID_1387960_gDNA_ID_1620555_Annot_ID_160434 3000 nt of promoter + ATG
gaaaaactgaaaaaggtttacagctcaagataattaaaggatttttctgtagtgtaaggagcctacctgagaagtatgactctcatcctctagatcttcaaccacccctgcaaccaataacagttagcataatccaaaatttattttagaacgcccctcaaagagaacttgaatgatagctataagtgtgtactcacggtttgctaacccagataaggcagacaatctagcagccatatccctttcttcagcttcttgaagagctctagcataggcctcatcatctgtataagcaacttcttcaatgtcagagttaccgtcatcttcttgatcatcttcattggcgtgcacattgacatcaagcccatcttcctgaggatcatcatctgtttcatattcatcttcatcatcatcctcatcctcattctcggggtcatcaaactcatcctcatcgtatacatagcttccagtttcccagctcccatagtcactgatttcactattcatggtcaacatcatatacgcccgctcctgaaacccgaaacatacacgcacacatacaaaacaacaatttttcaatagacaatcctacataataacattgcaaatgcaattagaaagaaagccctaagattttcgcctatgccggagaagtagcactaacaaagccctaacaagcatggaataacctaaaaacggagaaatccgaaatagagagatgagaaagaaagacgcacctgttcttggagtgtgcgagcaagagcaagatccgcatcaatttggcttagattagtaaacggaactctagcagaggaagatcggggagcaggtagctctcccaccgaaatcgatccgctctcctccaccggcaccgccacagcaactgccgactctccaaccccttgctctcctctctcgctaccacttccggtgtcagagacaacaccggtctgccgattctccggcaaccgtccatcagtctcgttaatcttggtcgcttgctcagcggtgacgacgacgttgccaacgtgtgggccattgtcgttctccatgggcatgattctgggaatccgaatccgggagatggaggagtggatgaggtttggggattttggaatcggaagggaatgattattcaggaatctgagaaaacgatgacacgacgagaaagaaaaatggtgcttctctttctctctttagctgagattttcaaattttgaaaactatgcaacattttcttcgaaatcacacccctttaatttttgtttctttctaaactcaccgactaatatatatttattatcatttacacctccacctttccgtttataatgtcaataggtagtatgtgttaatccaaaagtcatcactaggtagtatgtgttaatccaaaaatcatgattaggagtatattcatttttgatcgatgcttttcactatcggcctatttaaaacccctacataaccgaaaatttatatagactttgaatggttatgtggtatatactacaccaaccataccgatattatggtatgctaaactctatattggagtacgttttaattttaaagtaaaagaaattaaaatatagatagtgatattttggtatgtaatagttgttctttgtgatttgtgtactcatctacattgtattcgtcctgtgtagatcagtttaaatggtagaagaaaaaaagattggtctaactttggtcagatttggaatggcttcaacaaccattcaagaccttaatctttgtgcatccaaatatttctttcacaagctaacaagatatagtagatctatattattaatcaaggcagtttatatcttataaacgtatgagatttaaataagttctgcttgttgagaaaaatgaaagaaaacttcgattttgagtcaaaagagttttgggtattcaggtatgttggtttacatattggaatgtcgaatcaatttggtattttatttaattaaaacaaaaacaaaaagatatgtaagatggtttagcttgaaatctcatgtgtcgatgctgcaagaaaaaaattcagataatgagacgagcaaaagaccaagtagatattatgtgtcaatgtgtggaagggccgagacgccaccgtttcttcgctgaagcgtgcaagttacaaaaccttgactttaatggaaaaaaactttggcttacttttgtttattctgataacctatccaatatttaattatttacttttatctcgaaaattaattcatcataattgttgactatttaatccaaatttatatattttttttatatcatagcaattttaaaattaaatatcatatttatctaaactaatttggataaatatgtgtttttttttgtctttttataagtcatgtattttaatttaagacgtttttgtgcatgctatcttttttttttgttctactataatttttagcaaatcttatgatatcattgatatagcgaaaatgaaaactatacgcaaagttttaagagttttatttttgtttcctccttcaccgttcattcactgatatgtgtgatatctctttgtcccccatctattaatctcctcctccgcatcgtcgccgtgcacttccccacctcttccggcggtaagattacgctctccctctacttcttgctaaattcttaaattgagtctctgcttcactggttatctccctcacttgttcatgtttagtcgcttctcgatgaatcctcagataattgctgcttagttagcagaacagcgatttctggatgaatctcttagaatataaaaggagtgagattgattatgatgctacgagattcatattcttaacaattactacgcaattgtctgtgaaatcactttatcaggaacttttgctttggttctctacttagattctgtatcactgtgttcactgttggtttgaggattagattcatcctctattagattctgcaaattgcttcatggtttggaatttcactggtttacaggatatg

SEQ ID NO: 2559 - DNA, 3000 bp, Unknown
  misc_feature (1)..( 3000): cDNA_ID_3068508_gDNA_ID_1620555_Annot_ID_160438 3000 nt of promoter + ATG
gtgaaaatatgctaaccagttaacctatcggaatttggtagaaattttcttccatttcacttttcacatagtgtgacataggtaaaagagggaaaatagcatttggtcgaagtatgtcaaccagttgagctatatatcagaattttgtaatattcaatcgcttatcaaaaatatactgagatttaatttacctaaggcaaatatgttgcaatgtatatatatatgaatcttttgattcaaagtggaatgttatttaatttgaagacctttgtatcgctggtttcggttaatttgttggtcagcagttcagtctttcagtttccgctaaagattacaaattttagaggcaaattatttgcgatatcgagatgtgactggttaggagaaacttcggaaggtcacacgctatctaaaccactataccaggttggaagtctccaactaaagatgtttgacaactttttgtcatcgaaaaatgatcagaaagcggtgtttttaactattctccgataaatattggtaagaatttgatctattatggtgagtacattatccaggtttatatagatatggtaaattatgttttgagttgggtctagttagtggcaaagcatagagcaaccgattgcatatagtttccggtgaatatgatataactaacacatgatggttataatgaataattatgtcgaataccatgcggcggatcatatgttttaggctgtatatgccatacgtgatcttggatgacatgtctttttttcgagatgataacatttattagtcggtcgcttaattgatttcgagttttctgttgccattttaaatacacatttgcgtcaaaaaaaaaaacgagtttgctgtctcgaaaatagcaccaatgcccattatttcttaattgtattttttcggctaaggtttctaattattaatttattatcaaaaccttacatatggtaatggtacactgtacgagtttttggttgtcttgtgtttttcaatttgttcttcctctttatgttttgagttttgttgtcctgtttcattttattcttacttttgttttctctgaattttgttttcagtgaacgtataatttaaaaatctgcaatacaaacaaacaaatatctaaaagtcaagttggctttacgcatgtgatcgacgaaacacctaattgtcttgttctttttcattcgtctgaataatttcatgaaattaacaagacaaaggttcacatttataaaaagggaacgagagcaatcaaactacagaagatcactacatcaaaataacgcatttctcagattctcagattcaaacacattcacctaattgttttgttctagctaggccttttagctatacaaattttgcattaacattacaatttccatcggcatgtaaacaattagcactaactaattaattagtactgcaatatatcaaacataaaagatggttaattaattcagtgtcaagttgctgatcctaatgagaatgcagtgctgagacaagatctgatgagtctaacaaaaatgtgactaattcaaatcacattaattactgtatgtagcaaacataagattatatatataatatatcacaccaatttatatagggaataaaacatatccttgtatgcaatgcataacgtagttattaatatagccttacatgaataacgtcgttaagataacgatatgacactataatgacgaaaccttatgggaacatcatgaaaataatgtaacgcgagttttgactttccaatgtaaacgaaaggagtagaaagcaacggaagactacgaatgaaagtatggagctacgtatagtttacgaaataattaattatacatatagaaaagtagtgagtcaacttttctttccatcgtaatcaatagcccaactgtttactatcattgtttgaaatatcctctgacacagaaatgttatcttatagtcaatttgacgtacaatatgctctcttaataaaatcaagaaatctagtttttatcaaaaactaaattttgtccccattccatggataatgttaaaacattacattcattatagatccatgcatgtgaatgaaaaggctcacgggtaaaaaggttattaaggtatcaatatgacctcaaattttggatagatattgaagatttcataccactttttttagtgtcaaaagacggaaaagtaataactaaactatactacttttaaaagtttgaaaattgaaaaacagattttacacctaatttaaaatatcagatcaaagatcttatctacaagactaaaattaaactagtagcggtctttgctgtccattgaccgagttttgcgggtggtttactcatttaagtaccacagcatcaaattaaaataactgtcacttgtcgaaagtgactagataaaaccaaaaatagctttaattgagtcaaaattgtagttctagtgcaaagtaaagagttatcatcttacaaaatgcgactcattagtgtattaattaattaattttcagtccaataatctggttaatttggtaaactatccaaagagtaattaaatgattcctcgtcataaatactaattttctacgttttaagcaaaaaagacaataattatttggtctgaaaactaaaaaaagacacgagattaagggaagaagataacgatctagaggaataggcaagtggaagaaccagaacaacagctgttcttttcttctaaacttcagaagtcagccgacagttaatttctcctttttttgaggttttgtcgaatcctataaatttcaactaaactcttcttcattttcaatatcaaatcttgtcttcttcttcttcttcttcttctttttcttcttcttacatttgatttctctgtctgaattcgagaaccagatctactaattacctgagagaaaaaagatctgctctgtttgtctgaaacagacagaagtcaacaaatctttcatttgttttttagcaaatcaaagaa

SEQ ID NO: 2560 - DNA, 3000 bp, Unknown
  misc_feature (1)..( 3000): cDNA_ID_2163233_gDNA_ID_1620555_Annot_ID_160437 3000 nt of promoter + ATG
aagaacagctgttgttctggttcttccacttgcctattcctctagatcgttatcttcttcccttaatctcgtgtctttttttagttttcagaccaaataattattgtcttttttgcttaaaacgtagaaaattagtatttatgacgaggaatcatttaattactctttggatagtttaccaaattaaccagattattggactgaaaattaattaattaatacactaatgagtcgcattttgtaagatgataactctttactttgcactagaactacaattttgactcaattaaagctatttttggttttatctagtcactttcgacaagtgacagttattttaatttgatgctgtggtacttaaatgagtaaaccacccgcaaaactcggtcaatggacagcaaagaccgctactagtttaattttagtcttgtagataagatctttgatctgatattttaaattaggtgtaaaatctgtttttcaattttcaaacttttaaaagtagtatagtttagttattacttttccgtcttttgacactaaaaaaagtggtatgaaatcttcaatatctatccaaaatttgaggtcatattgataccttaataacctttttacccgtgagccttttcattcacatgcatggatctataatgaatgtaatgttttaacattatccatggaatggggacaaaatttagtttttgataaaaactagatttcttgattttattaagagagcatattgtacgtcaaattgactataagataacatttctgtgtcagaggatatttcaaacaatgatagtaaacagttgggctattgattacgatggaaagaaaagttgactcactacttttctatatgtataattaattatttcgtaaactatacgtagctccatactttcattcgtagtcttccgttgctttctactcctttcgtttacattggaaagtcaaaactcgcgttacattattttcatgatgttcccataaggtttcgtcattatagtgtcatatcgttatcttaacgacgttattcatgtaaggctatattaataactacgttatgcattgcatacaaggatatgttttattccctatataaattggtgtgatatattatatatataatcttatgtttgctacatacagtaattaatgtgatttgaattagtcacatttttgttagactcatcagatcttgtctcagcactgcattctcattaggatcagcaacttgacactgaattaattaaccatcttttatgtttgatatattgcagtactaattaattagttagtgctaattgtttacatgccgatggaaattgtaatgttaatgcaaaatttgtatagctaaaaggcctagctagaacaaaacaattaggtgaatgtgtttgaatctgagaatctgagaaatgcgttattttgatgtagtgatcttctgtagtttgattgctctcgttccctttttataaatgtgaacctttgtcttgttaatttcatgaaattattcagacgaatgaaaaagaacaagacaattaggtgtttcgtcgatcacatgcgtaaagccaacttgacttttagatatttgtttgtttgtattgcagatttttaaattatacgttcactgaaaacaaaattcagagaaaacaaaagtaagaataaaatgaaacaggacaacaaaactcaaaacataaagaggaagaacaaattgaaaaacacaagacaaccaaaaactcgtacagtgtaccattaccatatgtaaggttttgataataaattaataattagaaaccttagccgaaaaaatacaattaagaaataatgggcattggtgctattttcgagacagcaaactcgtttttttttttgacgcaaatgtgtatttaaaatggcaacagaaaactcgaaatcaattaagcgaccgactaataaatgttatcatctcgaaaaaaagacatgtcatccaagatcacgtatggcatatacagcctaaaacatatgatccgccgcatggtattcgacataattattcattataaccatcatgtgttagttatatcatattcaccggaaactatatgcaatcggttgctctatgctttgccactaactagacccaactcaaaacataatttaccatatctatataaacctggataatgtactcaccataatagatcaaattcttaccaatatttatcggagaatagttaaaaacaccgctttctgatcatttttcgatgacaaaaagttgtcaaacatctttagttggagacttccaacctggtatagtggtttagatagcgtgtgaccttccgaagtttctcctaaccagtcacatctcgatatcgcaaataatttgcctctaaaatttgtaatctttagcggaaactgaaagactgaactgctgaccaacaaattaaccgaaaccagcgatacaaaggtcttcaaattaaataacattccactttgaatcaaaagattcatatatatatacattgcaacatatttgccttaggtaaattaaatctcagtatatttttgataagcgattgaatattacaaaattctgatatatagctcaactggttgacatacttcgaccaaatgctattttccctcttttacctatgtcacactatgtgaaaagtgaaatggaagaaaatttctaccaaattccgataggttaactggttagcatattttcaccaattacatttgtactctttcagactttcacctatgtgaaaaattaaagaaagggaacgacggcgtatgagtcccgacaaagatttaaccgacaagacataaaatgcttacacgacgacgagaacacacacccgtggatcaaaggcggtgcacctcatcataaactttggaaagaagaaatatccaaaccaacctctatcttcatatatatatacatacatagaccgatcgaacattaattaatttcgttaagagagacaacaaaaagagagaacaatg

SEQ ID NO: 2561 - DNA, 3000 bp, Unknown
  misc_feature (1)..( 3000): cDNA_ID_3068512_gDNA_ID_1620555_Annot_ID_160433 3000 nt of promoter + ATG
tgacctttaagaactgagacttggtttccctgtgctttatacactagaattatattaaacagtcaatgtggttttaatccttgttgtacatgaaagcctcaaactctctagttcgtgagattacttagaatgttgatctactcctgcttgatcctggaaaaagtgcgtaactaatttgatttcttgagtccttttgatgtctaaatgtttgtccatctctgtcatggcttagtgacacagcaagtaaacaagcgttttgtttaaatttattggttgcttgatatcatctaatcatttagaattactttttttttctttttctttagcaagcgaatgatatgaatcgggctaatcttgaaagaatggttgggtcagatgattctgcatttaacggcttagatcttgcaaccctcatcagacagaagtatggaaaatcttatgatgttcaactcatcaagaaggtatgcccttctgtattcaagtgtgtttgtgattctgtatcgtagaaagaagttaagacctccaatcatcttcatttcattgcatgaatacagaatcagcttttacgaaattcagttgatcattttccttttcattttgagatttttggtgtgagctttattttatcaatgtggaaagatttgtcgctttagaagctaaaaatataaatcatagttcttagatgtgattaatgtaggagttcatggggaagaatcttcttgcaatgaatgtcatgtggaagtacagagaacaggtaagagaatcctttgctgtatacttgatcacagaagcctaatgatatgatagttcaattgattttagtgtacttgtttggactttagataattatgatcttcgttttccatatcattcagatttggtatgagaatctttgccacatagaaagatgaagtgtatatccatattttgttggtatagttcttgcttttgcaagtcaatccttgtaagctaattcacctttatatatttcttgcttcttcttcaacgcctagaggtcttttcctctaaccgaagaagaatatatacttagacttgacgatgtagccaacatgttgaaatgctggggagcagtctcacatatccgtagcagcctagcaaagtcgaaggagcgacctcggatagggaaggtgagatcaacctaaaacagtaaccttaaaattcagacatatattagctagatcacctaggtcgattagagaccactttgatactttaacatcgttttttctagtttaaaaatcgacatggatggtttctcctcttcatgcaggctgtcagcattttcatagacatggattcgacagggggaagagcaaatgaatggatttacaagtaaaaatcgaccggtttgcagctgctaaaccaagaaatcaaaaggttttgtctctacgtttatcgtcatcaattcattttgaaggctcttcagtgatggttgcctgcagaaaccgaggtttttgctatatttgatgtccaaatcaggtagtatatatgtacatgtgtgtattaagtagacacaaatctttacttgaactctctgtgtaaaatatctccatgtgttgaaattcaatcatctttgtgaatcttcctctctttgtgatctgtaaaagtattagttttggcattcatgtcagtttggggacctttgagttggctttgcccccaaaacaaaagtagctttgggaccattccttgattaatttcatgggtttgtttacttagttttgtttcaagttatatgatttttattagacatatgataatcaaataagttatagtttccggtttctagttgagcaagtcctgctccaatattataagagcaccttaaaatacatattttttagttggaaacttaaaccaacatcatgttggagcatcgtgatacttttttatacaacacataatgataatgctcatcttcatcatcattatcatcacactcatccacctccacgtcctacatcatcattaatttgaggttatttttcttttctcataaaataagaaaaagatcatatcatcattatcataattactattattgatgatgttgtcacatcacgatacacatcatgactcacatcatcaacgtatgcttcttaacttcatcatgaaaattcaaaagcatccctctcttctcatcaccacaaccactaacaagtaaaacatcctcatcatctttaccatcccccatacatcctcaattcctcattcatcatcacccctatatccccttttttagtcaatatatactacattaagtattgattatattattgcccacacattaatgctactaaactaaaaagatttgtattaagataacgttttataatcgcaacttacatcacaatttttcaaatttaatctttcaattaagttttgaccaattaattaaatttaatttcttacaatacatacaattatgtgtagtgacaattttcctggctacatcgcatgttttatttaattgcgttctgtagtaaatttttaaaaaaatgtaaattaactaaaagtaaaattattattattttgccaccaagtaataatttattaccagaatacatcaaattaattagtgaatcatttccaattcgaatatgtaggtagtttgaccaaaaaggtaaaattacaaagcctttaacacaaactcaaaaccagagtctactacattagaaattttcacaattacaattctccggcgaatccaacgtttccggcacaattctccactatattgacggcgatatacccttatacggcgtttcgtggttacaatttgtaacctaactactcatcgtctacccaattcaaaccagtcaggtttccgtacagtagtaaaatcacaattcctctctgtaacaacgatctcaacgacttcaacgagacacgttactattccaatccatttttccgacgccggcaactgaatcagaatcggaaaactctagagacatatggttgattggagtggcgatg

SEQ ID NO: 2562 - DNA, 3000 bp, Unknown
  misc_feature (1)..( 3000): cDNA_ID_2996012_gDNA_ID_1620555_Annot_ID_160427 3000 nt of promoter + ATG
accataacagaatcttaaaaccaagtcgaacccatctgacccacctggaaaatcttcaacctcgatgatgattctactgttcttgtgattctttttcttcttattgctctgttttatcatcttcctcaagaagcctgagtactctgagatcaaatcctaacccaagaaacagagaaacagagtttaattcagaaaatggaaacagaggaagttagggtttgaattagtgtggagatttgatttggtttattacctgattgacgaagaaagtaaattggttattgagattgatttgaagatcacagcaaagagacattgtatcaacttcttttgcatttggtgaagatgaaacttcttgtgagctttcttgttcttgttcttccttttggattggagagagagagagagagcaataatagttatcacatggaaacggctatttatatatctctttttcggcgtctttatttcaattatctaatgtacactttcttttatcatcctttataactcatataaatttatgcaaaaggaacttatatacaaacgtcatcgaaaaattgtataaactggtcgcatggaccaacttgtaaccctagtgtgtagaccatctaaaatagtgaaaatgtaataatttgttgccgtttgtaatgaaaaaattattgttcgttattgtttagtttttttggtattagataataagattcattgcttaatcgaaatgtactatatgatattaattttggagcaattagcttgacatgcatagtttacttctttacattagaaaaccttttttctaacatcgaacttaagaaaagttatataaactgcattaattgactgcatgtttattttgaaatccatataatcttgtgtgcagagcacaaatcaatatgacgaggcgttgttagttgttactaaaaataaccaggtgcaaagattgattccttaatgcttcattgatcaggatggccaaaaaataaaataaaaattggtgttagaggaagaaaaaaaaaatacagtaggtgggtaaacaaacagcagggaaatagcttacaatttgttgagaataattcataattatgaccaacattattcaggttatttggggtaaagtaaaaatgtattgcatcaaatcaaataagatttacattttagacagtgaactataggtcacgactaatatcaaatatatatttccagtagcacagaaaatgatgcttcatgaactctcacttatgacttgtcaatagctcaaggactatgctactcaagttgtaatatatatattctgtatttatatgctgttttatacacacgtaacgtatatatgaatgtgccccctttgtttttatgtgaattataaatattctccctttcttggcattacattataaattcgtaatactattattccacttccatgtaatttcaagagttttcttccctttttatttgtagaatatttatatatcagttgcttgtaaagttgggagtttcactttcattgcatgtgaatgggccgggtagggttttatgactctaacgtttgtgaataaagtcgactacttgcttttcatcattatccaaatccagccatgtaaaatatatgtaattgaaaacgatatatgtaacaaaaatgttataaaaaaaagatacaccaatgtcgatatacattacgactctttgagtacaaaataaaaaaatatgactaacttccgataatagtttttatttattattaaaaatgaagtttccaaataaaatatcattttaatatccatacaaattatgaatagtatgtgaggtttagggcaaagtcttctgagggttcatcaatgggatgggagtgggacgaagaaacgaaggcgacgagaggatttaggttttattgttttaaaatttttgtgctctagtatttaagccctttaacaggattttacagggaccaacaaaaatgtaaagccccaaaggaagaagcccacttaaaaaatactaaagtaaaaataaataattaacaggcccatttggcctcatcgactaaagctagcccaaaaagaggatacaataaaattacataaattttgtgtccttttcgatttaactttttcttttagaagaacaatcctttgtttttttgtgcaaatctttagaatctcgagaccaaaacttaagtaatcatcaaaaattttgtcaagtttacatttctatgccaaaaattatacaatatcataatgttcaagcagtgctctagagagcaagaaaaaaatggttaagacataaaaactagtcggctaacactgttcaagaaccatgatttatttgcttcatcaacgaactgattataattcaaatattacaacagagcggcaaatcattcgaaacgcggtacgaacattaaaatttgatgtgcattttggccaaaatatttgttgatggattcaattgggtagtggaagaagaaactgtcaaagtacacctactttgcagtcaagttgtaagaacataaagtacgtatttttttacaatttctaaatatactaaaagcttgcagaaagtatgtatatctagaagtacgtatctcttacgtttgtgaaaactatttttataatttgacaattttaaatgatttgattattacacaaaaatagtcgaggttatgtaaaaatattttttaaaattttcgatattttgtccggtacaattatgtcaccatctcgattcaagatataaaagagttaatttagtttcacaataaaaatctcgtacttacttttcaaactttataattgtgttggataaaaagtacaattgaatcttttaaaatcaacaatgagtgtctgttttgataaatgcataaattggagtgaaaagaaaaaaacaattccagcttttgcgaagttggacatattaaattctacacaattgtttttttttaaaaatacagaattgtagatagaatgaatattgttttttttaattaaaataattgaaaaa

SEQ ID NO: 2563 - DNA, 3000 bp, Unknown
  misc_feature (1)..( 3000): cDNA_ID_2163192_gDNA_ID_1620555_Annot_ID_160424 3000 nt of promoter + ATG
agttcccctacaaaatccttgttcccttcctgcatttctccagattttaagtcttctgaaacaggcccaacagcttttcccttctggaaatccaagacaattttctttgggcgtacaaataatcgaggcaaatcttctgtcagtagtttggtcaagaacctgaaagagatgaagcaaaggaaggaggaaagaaactgatttatcaatacgtcggaagagagtaaacaatcaacagagagaagaagctaaaacgaatacattgaggagacttacattgataaaacaggaattcctgatgttgtcatccaaagcattcatgcaaaaagaagaaaatgattaaagctattactaatgtacatgattataaaaatcaaaggagataatgagaaagcaacagacaattatgattaactaatacccattagattaaacaatcggaatggtgcaagctcaaatttgatctttggaagtgaaacaaacgcccatgatgctgctccaacccaaggcgctgacggaatcaatcttaatttaacccatagttcaccgtcaatgtcaaaatcccgaataccaactggcacaactactgggatgataccaaattttaaagagagcattaacaacatccgagcaccaccagtataccgaagaccaatctggtacctataagaagaaaaataagagtataagcaactttcaactgagccgtgaacagactgtttggagtacccaagctccaaacgaatcaacagagaaaatttctaagatgcagtgaccattggtgtgttgaatccgtggatcatgtcagaacaatcccatccgtaaaaaccaagtaagaacaatcccagcatttgatccaccaacacaatgcattagctacctaacatataagtaacgtaggcaatcgcaccaaggtataaacttactgcaagtcattaacacggcgagatgtcctcctctcaacatttctaacagacaaaggctcatccccaagagagaattgcttaatttcaactctctgcacataatcaggcttcttcaaatcatcaatcacaggctgcaacaatccaacaagccaattctcaatcccacctctataaactttccagagcttaaccaacaccatgttcacccactccaccgactctttcctttgcaaatccttctcaagggacagcgagaaactggtgggaacctgtgcccatggcccggctcctctttggcctccatcaccagccatttgtctccgcctctttctccaagtccatagcttatcacaaataacaccaacaaagaagaagaatgcgaatagaccaattgcattacgactaatcggtggagacgggattgggtggattacacctagctgagtcctgagcttatccactataggatcttctctaaagttagtgaaattgtttctatcaccttgaattgcagactcctgtgaagatgaagatgcttcttcatcctcaaattcattcgaaaaccgagtaaccacaagacttctggcagctcttctcgccgaatccgctaatccaatgttcttggaatccgtacgaattccgctggaaacaaacctagaattcgaattcgccgcatgaactcgacggagaattctccgcctctttgtgaatccatcggagaacacaatcagaccgtgctcattggagcaaggacagagcagacgacgtgacacaaaagaagggaaatcgaaactagaacaagaagaagaagactgtagaatcatttatcatcaatcgaattcaccggaaactccacgcaggtgaacctaattgacgcatatcttcgccgttacaacagcagacagaatacagagaaacagaggaatagcgaatgtattagtcagtgttcacggtaggtcggtagctgagaaacttaggtctgtcttccgtagggtttcggataagaaattggaatcgagaaggttcgaaagtagtagcgacaagggatgcgcagaagatgggagaatgtgaatcggcaagtaagtgatcggtggagagtctatcgtcgtgaccttttgttgtacctatgcgaccaaagaatatgcgactgactataaggacccctcaaacttaagccatttatgttttttttgtggaacgcgttaggcgcgttactatatatggttggtcattatttcatttgaactatcagatcagtttaatttctaacgttgttatactatcgttatttaaatgaaagaaccgaatacaagaaaagaaaagcttctgtatcgtcttgctactcttgggaggtcggcgacccaacttgttagtagttcgttcgtaatcctttgctttttggactcttccacttatgggtcggccacccttttatgtccatcaagttaaaaataaaataatagtggtggatgaattatggtcaacaggttgctgttaaattagatagttcattggttactaattttagttttgtgcaaccatgtttattgtgtgttgttttctttttgtcggatgtcaataactaatgtcactaaattgattattttcagtcaactttcaattttcatatgtttgagttagcttcttatatactttttgaatctaaaaacactatccacgtgcgtataacataatgtcttcttttcgatcgattagggggttttcacgaaagaaattgacttaggaggtgaccaaatcacgataaagaaaatactgggttatttcataaattaactttaaaatataaggtcttctcggtaataatttaaaatatctcctttcttccttttcccccggaacgtaatctcagccgtccatcctttctatcatcctacgatctatctaaaccgtcggctgaacttcgttctcctgaatcgcgcgacatcgacatcttctgattcttcctcactagttttttcctaaaccctaacttcttcgttcgcgtcgacgaagctgctggcaatttctcgtcggaaactattactcgataccaccacctgtttagtctttaaaggta

SEQ ID NO: 2564 - DNA, 3000 bp, Unknown
  misc_feature (1)..( 3000): cDNA_ID_1396885_gDNA_ID_1620555_Annot_ID_160418 3000 nt of promoter + ATG
acatgtgtgtatacgtatgtgtttatgtgtgcttattatactctttttggattcaagaaactaatctttagtatttttgacattctggtagatttatgctcacttcttaggccttgttgacttttacagtgatggattttgaaactctggttgatttgattttctttttggtttgatgcagtgaggagaggaaatgtcggatcttcagacaccgcttgtgaggcccaagaggaagaagacttgggttgattactttgtcaagttcagatggatcattgtcatcttcatcgtccttccattctcagccacattctacttcctcatctacctcggggacatgtggtcagagtccaagtcctttgagaaacgtcagaaggaacacgacgagaatgtcaagaaagtcatcaaaaggcttaagggtagggatgcttccaaggacgggcttgtctgcactgctcgtaagccctggatcgctgttggaatgaggaacgttgactacaagagagcccggcatttcgaggttgacttgggggagttccgtaacatccttgagatcaacaaggagaagatgactgctagagtggagcctcttgttaacatgggacagatttcccgtgctaccgtcccaatgaacctgtctctcgctgttgttgctgagcttgatgaccttaccgttggtggacttatcaatggatatggtattgaaggaagctctcacatctacggtttgtttgctgataccgttgaggcttacgagattgttcttgcgggtggagagcttgtccgcgccacaagggataatgagtattctgatctttactacgcaatcccgtggtcgcaaggaactcttggactccttgtagctgctgagatcaggcttattaaagtcaaggagtacatgagactcacttacataccagtcaagggtgatcttcaagccttagctcaaggttacattgattcttttgctcccaaagacggtgacaagtcgaaaatcccggatttcgtcgaaggcatggtttacaatccaacggaaggagtgatgatggttggaacatatgcatctaaagaagaggcaaagaagaaagggaacaaaatcaacaatgtgggatggtggttcaagccgtggttctaccagcacgcgcagaccgccctgaaaaagggacagtttgttgagtacatcccaactcgtgaatactaccacaggcacacaaggtgcttgtactgggaagggaagcttattcttccatttggtgatcagttctggtttaggtacctcttaggttggttgatgcctccaaaggtctctcttcttaaggccactcaaggtgaagctatcaggaactattaccatgatatgcatgttattcaggatatgcttgttcctctttacaaggttggcgatgcactcgaatgggtccaccgcgaaatggaggtaaaactaaaagctcggtttcatgattgatcatcttctagttaaagtttcttttgatgttattaacaaaatcatgaattgtttgttctctttcaggtgtatccaatttggctttgcccacacaaactcttcaagcagccaatcaaaggccaaatctacccagagccaggcttcgagtacgaaaacagacaaggagacacagaagatgcacagatgtacactgatgttggagtctactacgcacctggctgtgtcctaagaggtgaagagtttgatggatcagaagcagtgcgtaggatggagaaatggctgatagagaaccatggattccagcctcagtacgcggtgtctgagctcgacgagaagagcttctggagaatgtttaatggtgaattgtatgaggagtgccgcaagaagtatagagctattggaacgttcatgagtgtttactacaagtccaagaaaggaaggaagactgagaaagaagttagagaagccgaacaagctcatctcgaaactgcttatgccgaggcagattaagtaataataagccttggtttgatgtaatggctcgggatgattattgttattcctagtagtgtctgttatgttgttgtttcctaatttcagttttagtgtcttgaagactcttgttgttgttgtttgcttcttgttgttgtttgactcattctggtttgagtggattttagagtttaaaacttttggatttgcctatgaaattgaaggtttccggttttatcgtgttgcttgactgtcacaatgtaagcatgttgctgtaatgaattaattgatctaccaatttgagagatcatttcaacttctctctttataccaccaccaactaggctttagatcattcacgacgtgaatctaaaacactaaaacccgactttgttagttttattggggtgcggttaggtttgatataaacctggaaataccggtatttgaaccgaagttgaccgggtgagactttttaggataaacccaagcagccatttccgagtaagaagagctctgtttctgaaagaagttttacagagtcgatcgtctaaagcgttgttgaagcacttgttagtggtaagtaatttcgatttattaattcttgttgtatcttttgtattcgaagttacttgcttgtttttcgatttcgtctccgtcatgatgtttgcggctctgttaattggaagtggaaaggtctgtcctttatctacataaaatggtgcatagaaggtgttcgaccaaattcctagctcaaattcctttagttacattagctctgactggaatgtaactgtgaagtctcgatacccaattcattcttttcaaaaacaattgaagattattatttcccttctcaagattttctgtcttttctctattgttgacactatatcagcaaatgtttcttgcaggtgctctgtttcaagctggataaacccaatcctattgggatttggctggattttataccatattttagcatgattgtttgataaacgcttgataaattgcctcttgttgtcacctttgctacgaaaatg

SEQ ID NO: 2565 - DNA, 3000 bp, Unknown
  misc_feature (1)..( 3000): cDNA_ID_2105302_gDNA_ID_1620555_Annot_ID_160420 3000 nt of promoter + ATG
acagaaggcacaacaatttaaaataaaaactggatcgtgggtgcattaaacaaagtgattttgttttccattctcttttagcaagaatagtaataaaatggaagtggcagaaaacaaaaatttgaataataaaaagggattaataagaagtgagaaaaaatggagaattagtaataaaattacaaaaaatgaggaagagaaatcacgtgaaggagttgagatcacgtcaggcacatgtggggagtaggacagtcctcgtttatagatttgttatcttcaactctcctctcttcggtttctccgttctcttttgtctttttctttcacctttttttttttttttaatttttttacttcaagagaagtgtttagtcataatacgcttcaatcttaacaaatcataatttatgtgggttgttgtctctggcttcttcacacttttttaggtactaatggaatggacaaagacggtttttgttgatgcagaaatgacgcatgggtttatttggcgttggaccaaagagtaatgtctttgtatttggatatatatataaacaaattggtgtttcttgtaatgtaaacattggtgtgattacacgaccttgtaacggtttaaaactttgtcaagcgtcaaccaaattttcactgacgtcaaactgtcaatgtcaaaaggtgtgattcgccaaatagacatttatttttccatactacaaaaaaatgatttgtagctgtaaatgtgagtaagaaattagttggcatattttaaagagtaaatatattttatgagagattttgcaagagctggatattttctcagacaggccatcatccctgtaattttttttttctttctatgtcaaataaataaataattactttttggcgacaaaaaaaactttttgagcacttcattactttaaagtgtaaccatttttctaaataaatcatgattttatttgcttttctaaatcaactattaaaatacttaggtggaaatcaaataattggttacagtaacagaattatatattgagagcctttttcaccaaataacgtgatagtttgtgtgtttattactgtattatgtaggcactgataatgatacaaatgatttcatatatgaattttgatgaaaagcatggctattgggatttgggaaaacatttctcatcacagccgtagtttttttttttatataaataagaggcattttatataaaattttttactacacattagtttctaaaatactacattgtaatctgaataagatgaaagtgaatgactaattcacaattgttttggcttaaaaaaaacactcatttgaagatcccttaagagttgagagaaagatataaggaactctcattagcattcataatgtataatgttttcaagatattttaggcagtgctttttttgcttcaatcataacatatcaaaactaaatgttaaagattgttgtaataactattatgataagaaaagttgtaatgaactttttgccaataaacaatatataagatcgtcggcttagtaacctcacgaggatggaatgtgctttaggtacatcaacaaacatgtaggaggactgtttcgctaaaagcatttagaaaacaaaaatcaatacaatcaacccataaaatgcatttaaaaaaaaaacgaattggacaattacatttccttcattgggcacatgtcttcctgtaatttattgtgatttacataccaaaagaaagatatatttttctatttaaaagaaatttaaactgctaagatttgttgcctttttttatttatttgcttttacctatttatagcagtaaactcttttcagaaaaaatatccctacaaagaatttgtcctcatattccttttatatgctaactgctaagtaagaaattatattttggaagatatgtctaattaagctctaggttcgatttacatataatttctaaatgttaaaagagttggtaaaaatatattaaatactgatataagtaaaaacaatttatttttattttcttacatcagaattataaactaaaaaattgctcataaatataacacatgtgatttatcaacattacaactaacatcgaatttttaattgcgataacaacaaagaaacttagaaatatgaaaaaccacttatacaaacccatgaaaaatatacattatatatttcttaatttctatatttttgcgttattattaccttttttattttaaaattatataaaaaaatgggaaataaaaaataccttgttttgagcgaaaaatgcaagtgaagcaggctggcttgaatcacgttttattataaagacaaatgctctcacactcttggggacactttcacatctcatcctctcactctctctctcctttggattcttcaggtactctctctacctctctttctctctctgtctcagtcgctgacttatcatttcctgtcgttagatctctcagtacttggttcatagttgtttcatagcacgcactagtgaactatgtgggttttttaattttaatcatctcagtcttggagaatttcaaacaaagtttcaaactttgctcaccaacttttatttatttattttggtggtagaaaacagactttgatggctttgtaggaatactagatgtgtagatctaaagattataaccattttctgtgttcttgttctttcagaacataacttcatgtctttttgtctctctgttcactagctctctgtttccatggactccacactatcttcttcttacagatttatttcatacacatacactgatacacatgtgtgtatacgtatgtgtttatgtgtgcttattatactctttttggattcaagaaactaatctttagtatttttgacattctggtagatttatgctcacttcttaggccttgttgacttttacagtgatggattttgaaactctggttgatttgattttctttttggtttgatgcagtgaggagaggaaatg

SEQ ID NO: 2566 - DNA, 3000 bp, Unknown
  misc_feature (1)..( 3000): cDNA_ID_3068542_gDNA_ID_1620556_Annot_ID_160451 3000 nt of promoter + ATG
ctgagcactgaagagagaacgctcctgcttgacttgttccgcaaacaaaagcaagatcctggtgcatcaactgtagttacccaacttccagctgtgcaaattctgctcgcaagactaattatgattgcagttagttactgtggaaacgattttaacgaggatgattgggattttgtcttttctaatctgaagcgtctgattcaatctgcagtagttgtgatggaggaaacttccgagaacgtcaacgacttcattagtggtgtttcttccatggagaaggagaaggagaatgatacccttgaaggacttgggcatatagtttttatctctgatccttctataaacagtgctcagaatgctctctcagcattttcgttgcttaatgcgttagtaaaccataaatctgttgaaggtgaagacaatctgaaatccttggcagatgaaacatgggatcctgttaaagatcgaatacttgaaggtgttctgcgtcttttcttctgcacgggtcttactgaggctattgctgcttcatattccccagaggcagcatctattgttgcttcatttcgagttgatcatctgcagttctgggagctggtagctcaccttgtagtagactcttctccacgcgcaagagatagagctgtcagagcagtggaattctggggactaagcagaggatctataagctctttgtatgcaataatgttctcttccaatccaatcccgtcattgcaacttgctgcatacactgttttgtctaccgaacctatttccaggctggccatagttgctgatttgaatgcaccactgaatgatgagtctctcaatgatcaggactcaagcaatgctggtttaccatctgaagacaagctactgctaagagatgaagtatcttgtatggttgagaagttagatcatgaacttcttgatacggacttgactgcgccagaaagggtaattcttacttttcaaaagctttatttggtttattttccctctttgggcaagtcattcactgtttaatcacttttaatggcaggtgcaaacgttcctggcgtggtctttgttactctccaatgttaactctttaccttcactaacccaaggacgagagagactggtgcaatatatagaaaaaactgcaaatccgttgatattagatagtctttttcagcacattcctctagaattatacatgggacagagcttgaagaaaaaagatggggatattccgtctgagttatctgtggtagcttcagcagccactcgtgcgattattacgggttcgtccctgtcaacggttgaatcactttggcctattgaaactggaaagatggcttcgcttgctggggcgatatatggtctgatgttacgtgtccttccagcttatgttagagaatggtttagcgaaatgcgtgaccgttctgcatcatctcttattgaagcatttacaagaacgtggtgcagcccatctctaatcaagaacgaactgtctcaggtatgtacaataaaaaaccttttctcatctctgagagttgcagtgaagatccactaatgcatttgcaaatattctgttcattgtttatgtgagccgcagataaagaaggcagactttaatgatgagagcttttcagtcagcataagtaaagcggcaaatgaggtagttgctacatatacgaaggatgaaacggggatggatctcgtgatccggcttccagtttcttacccactcaagcctgttgacgttaattgcgcaaaaagtattggaataagcgaagcgaagcagaggaagtggttgatgtctatgcaaatgtttgttcgtcatcaggtactgtactttatgagtcatatcgatctttgttaacctgaatgatatctccagttccatcatgtagaccatatatgattaatcttgtcctctccatctaagcccaaattgagtgcctgtcttgattgaatgtttttcttcttcttctttttctaatgtgttgttactgaaagcagaatggggctctggcggaggcgataaggatatggaagcgaaattcggacaaggaatttgaaggagtagaagactgcccgatatgttacagtgtgatacacatagggaatcacagccttccaaggcgagcttgcgtgacttgcaagtacaagtttcacaaagcatgtttagacaagtggttctacacgtctaataagaaactctgccccttgtgccaatctccttgctaatacaatagctgaggatatacatttttgtgacattagtctgtgagttttgctttaactctttaacgttcttaggttttactttccaagaaaataaaagggtttaggtggaaccgcattgccattgatatacatatacccgtatcatatgtgaaaattggaaaagtaataaatagagaaatttacttcgggtacacacacacatgtagtagacccggtcgagaatacaagctaattaataagcgaaagatttgggtgactaattttttttttcctttaattattttattttatggtcaatgcatatatcttaacagacaccaaaacacatagaaatacattaccaaaaaaaaggaatatatttaagctggggattcgcggaggtaaatgagaaaatacaaaaggaaacatatatttaaatttaagaaaacaactaaatgttgtaataataaaggaaacaaataattgaaattaaaaaataaagtgcaacgtccttcgaaatcgtcctcactaagaaatgatgggatttttgatatatcttggaaagaaataatcccagtttgtttccaaaatggcgtaagaagaataagtcaaagctattaattgcaatttaaacaaaaaaaacgttcgttattataacgcaaagactagaaataaaaagaatatttcgaaatatataaactctcctccatcgcattcacatatatcaaagaacaaacaacgaatatcaatattacttttgagttttgtatctgtttgtaagagaaa

SEQ ID NO: 2567 - DNA, 3000 bp, Unknown
  misc_feature (1)..( 3000): cDNA_ID_2163280_gDNA_ID_1620556_Annot_ID_160458 3000 nt of promoter + ATG
tctcaagcaagcttggggaagtctcgatgctctcatcggccgtctaagggctgctttcgaggaaatcggcggtggtcttcctgagtcaaaccctttcgctgccaaggctgttaggatctatcttaaagaagtccgtcaaacacaggctaaggctcgagggattccttacgacaagaagaaaagaaaacgtccgcatacagacacggcaactccaatcgccggtgacggagacgatgccgaaggaagtggtggtgctgctttggtcgttacggctgcaactacggtatagtggagacgatccagctactagctagatgctaaaatcttaaaagaattacggtatagtaattcttgagttctttactttttttataaattatatatttcgtttagttaattatttgagatgtaaattgcaatttatatagatggaaaagacgatcaccgattattagtaaaatgagatcttatttatatttcatttattatctttcaccgtgattgatagatagatcagtacgaaagtgtgtaatggtgatgtgtggacgtgcgaagtctcgggtctaacgtgagtcgtgatttctctgaaaagtcataaatcttcaggtgctttcttttaaaagctttaggaatgatgatcatcatcttcttactttcactttattttcatgttcttctttacaaatccaacctctaaaaaaaagatttagttcttgttttgatttaggatactatttacatttggtacacctagaaatgtggacaacttttttttttttccatgaaatttacaaaagaggaataatggtacaagctcaagaattcatttatcttagaatagcaaaaacaaaaaataatagtgggtggtctttgattaattatacaagttcaattttgaaaaggactagtgaccaacctagcattaattctcttggtaaaccaatagtccaatagactgattattaatcgcggacatattattaccaaacaaaagaaaaatggtacattgaaaaaaacgatttaattaggaacgtcaacagcaggattcgaacctgcgcaggcaaagcccaacagatttcgagtctgtctccttaaccactcggacatattgacatttcgtgataattgcaacactggatttatataaacaaaactaaatcacttaaaacacttaaagatattctcatgttcaaactttaaagaaaaatctcagagaggccagattaataaatattaattggatgttcataccataccataggccagcttatttattacaaaagtgcaaaatcgtatatcatatgaaatgtttctgctgcctagagattgtgttaattgctcaatcaaacagagttacagaggtaggtattaagagataaatcctttgcttttaagactctccacaccttccttgatgatttcctccatggaaatgaactttaaccccaaatctatgagcttctttgatgcattcttatctcgaagtaaacccggttgagtctctctcggtaacctaagagatttttccaattcaagttattgaaatctctctctctatatataacgtctgtttcaaagaaaaatttgtggcttacttggggacattgtaattgggatagagctcagcaactttggctacaaaatcaccgtagtgagagatagcctcaacgcacaagtgccttcctttcgaatatggatcctcgtatacaagaatatgagctaaagccacatccttgaaatgcacagaccccataaagaagttctcgtatgtctccgtgcaccctaagcatccatatctattcaaattcaaagatgttccatggaactcaagacatattcaatcaaacattcatagagaaccaaaataccctgaagaaggcgtagaagcatgtgcatgctagcgttaagagacggaggaatcacaggccccatgacagtgcctggattcaccacaaccacatccaatcctttctcctctgcaaattcccaagctgccttctcagcaagcgtcttcgacagtggataccacaactaccaacaacaacacatcatctataaagataaccaataagatgttttgcagtaacaaatcttaaattagagaataacatactccattttgcctgcagtagtcttcagcagcccaacattcctcattcttgatcttatcagcaggccagttgggacttggagtaatcgccgatatcgaagacgtcacaacaactctcttaacactggcttcttttgccgccgtcagaacatttatggttcctttaaccgccgggtcaagtagttgcttctgtgaatacactcatttatttatatacatttgaagtgatcaaattcactattggtcctttttgggagtggagattagaacctggggatcttggacttcatcgacgatacaaggtgatgcgaggtggaatacgccggagcaaccattgatggcggcggaaacggtgtcgtattgtaggagatccatctcgaatagatggaggcgtgtggctgcaccttcgagaccttctagatgtttcgtctctttctcatcctctgcaacacagaaatgtaagggaattaggaggtgatagggtaaccagaagcgtaatcgaagagagaaatttgtgaagattacggaggtttttcacggtggcgtggacggagtagccgcggaggaggagctgatggaccagccacgagccgatgcagccactggcgccggtgacacagactacttctctctcgtccgttaacattgatgattgaatttgagctttctctctctctgtctctctaagtttcagataatttctatttcagagatgatgatgattagggaatgtgaagcccaagcccaatttctaaacaccgtgtcgttttgatagctaaataacagtgagatgctgagtcgtgaaacggcacgcagtgttttgtttttttaaacattgaatttctcggcccgacattatcgtggaagtacgagattcactggatttgatg

SEQ ID NO: 2568 - DNA, 3000 bp, Unknown
  misc_feature (1)..( 3000): cDNA_ID_1393705_gDNA_ID_1620556_Annot_ID_160459 3000 nt of promoter + ATG
catacgaaccattttccctctgactaccactaccatagctaccaccactcctacttccaccatcatatctactactctcatagctcctaccactatcgtttctaccaccacgaccacccccacgatcactgtcacctccacctcggctatatccaccacctccacgatcattagcaccagaactagtaccagaaggagcaagtgcaccacacttgttacattcaactctccttgcaaagttcacgttcccacaactatacaaacagtttcgagggtaaacaatttcaaaacatgctcccacaaaggaattcaacagctaattcaattcattacatatgcagaaagaatggaatcccaaataatttgcaatcattacctggggttgggacaacgccaatctccatctctgcctccgccgccacttcctcttccaccgcgatcacctccttgatatccaccacctccaccgcctaaatcaaaacgaatcatcgaaatagtgagaaactaaagatttaacaaaagtagctcagcaaggaatggagaaatctaaagaatcataaggttatatcaatcagatctgcaacaatctaaatcacaaacctcgatttcctctaccaccgcctccaccgtaaccaccgcgtccgccgtaactacctccgccagaggcaccgcgtccaccatatccagcatcaccacctccataacctccccctccgccgtatccatcaccaccgtacgacggaataggcgcacctccgccgccgtcttgattgtacatcccagccatgacctagggtttgcgataaacaacagaccaaaactcttaacgaatcgtgtgagagcctttttagacgtagaataaaaaatctcgcgttttatttatatttctctcaaaaatagtggaactttattattgcatttatcttaaatcttaaattcttttacatcttatcttttaccgaccggtttcccaaaataactggacttgctttttttatcaaataagacaacatggttctaaggcccataatcatctaacctttacgaaggcccagcccaataacagttattttttacgtagcccaatacagttttgaaatgtggctattagagagaaattagaggcaaaatccaccaaaattttgctataactacaactttaaaagagtccggacagtaggaacaataagaggagaggccagctctgaaagaaatttggagtttgcgaagatgaatgagaagtgtcaagttgaatcgagaaccggcaattatcctcagaaggatcaacagtagtgatcaaaccaagtccaccaaagttgcagctttctgcactgtgatcattttgctggtacaagctattgaacgcgtatgaaacgttgcctggccatctgatgcctgaacacgacccgccaggaagtatcgatgtacagtccgcaacagcacacgcttctaatgctcttgctgacgcgtttgacaagtccttgttattgttcaccacacaccacttaggaggaaggtactgaacattctgcgcgtttacctgattcttatggttgaaactgaaattgtatttggcttgaccgtcgaaagtgaacactccccagtgcctctcaaagttcccagcagataagtttctctgatcttcgtccaagagactttcaatgtaggtttcaacaggaggacgcgggagagaggccgtctttttctccaagtgaactatcagtcctttaaagaacgcctcagcagtcagtgatgttgcattttctgctccatctgtaggccaaccgatctttgacacaacgatatccacctccgaaaacccaattgtgaacaatgcagagacaagtgtgtcatagcttagatcaaagctgtttctgtaggttttacgtccgtctttgtgagcctttgctgtttctttaaagaggctaaagtcaagggagatgttcttgttctggtgaaagcttaggaaaggagagattgtcacaaaaaaaggagagtggtgctttgtgagaaaggagaggagttcaatcatcgtcttgttgaggtcagccctaaagtgtcctgaagaaggtcgaccagattcagaaagaaaggaatcaaagcttgaggggactacaaccttcacttcatttgccaagttcgccttaactaaagcattttggatattcatagctgccccaatcacaaaaggcttatactgattgccatagctctggagaaatggctcttctccaactgctacatacctgaaaatcaattcttttctttaatgataatttcacaataagaagattggcaatttggcattgaaacaaatccgactcattcacattccataagttaaattccagcttaaaaatcttaaatctatatatatataactggataagcagaagagaaggagaaagaagatactcgattcgaactctgtttccaccgttgaagtaacgagtgacattgtcatgtacccagctctctgctacctttacggatgcattcaagctcttgagcatcgaattttggattccgatagtgacaccaatattagaaccagagagagctcggagaacttttgggtcggcatcgaagagcttcactttgacaatgccgtttgatttcagaagctctacaacctttgaaggcggaagagggtgcgacgcttctgtcccccaatttatgccaactgctctgacggttgttcccgtcaagctcaaccctgccgtgacggcgaggaggaggagaaacagccgacgagccatcaaatccagtgaatctcgtacttccacgataatgtcgggccgagaaattcaatgtttaaaaaaacaaaacactgcgtgccgtttcacgactcagcatctcactgttatttagctatcaaaacgacacggtgtttagaaattgggcttgggcttcacattccctaatcatcatcatctctgaaatagaaattatctgaaacttagagagacagagagagagaaagctcaaattcaatcatca

SEQ ID NO: 2569 - DNA, 3000 bp, Unknown
  misc_feature (1)..( 3000): cDNA_ID_3068550_gDNA_ID_1620556_Annot_ID_160464 3000 nt of promoter + ATG
tatgtggtccgttaatacaacattacgctgcaatctcggataacaacagtttcggacctatatactctattacgagtatttttcccaaacggaaggatcaaatttaatctcatgtggatttgtgttgttctatttatagaaattttaggctgtataatatctatcctatcaatctatggctaattaaatttcctacaattttagaacttaaataaatgcaaagtatcgatagctactacacatctatggtcagaaaaattagttgctatcttattaggatttcataattcatctaagttcagttttaaaataaaatatttattcttaccctgcaatttaattcaaaagaagtattcaagtcttcaatatctttactaaatacagaaaatatcaaaatatttgtaatcagaattcacctcacctgtattaattacagatttgatcttcttattaataagtgtgttcaacctacaaatcttggaaaatggagaaagtattaaacagaatactaactatatttagcatctaatttcttttacctaattataattagtaacgctaaaatcacaaccaaatgttagaaaccaaaacaaaaacaaaataaggagagagatttaacaattccaaaaatcttccaaccacttttttattaaccagccctctctcttcttccccaaatctccattttctctgcaaatcccaaatccatcacaaaccctaattttagtctctcaaaatctccaccgtttctaccaccgtcaatgtggcggccgtggcgtaaatcgtcggttaagattcacgacacatactctccaaccaccgcttccttcaaagacattcaccatctctgctccgacgactcaccttccttcccttcttctccctctccatctccaaaaaccgcttctagagtcttccaccgagtccgtgcagctaatttgatcctcaaatcgtggccaactcgtcaatctaatcacctcctccgcgcagattccgaacctatcaatctaagccggaatcaaaatccagaatcagattcgaaacaatcgaaaaccaaaaccgaaccagatgtacggatttcaatcccaggcgcagagaaaagcattgtcgtatacttcacaagcctacgcgtggttcgtccaacattcgaagcctgcaaatccgttacatcgatcctccatagcttcccggtacgaatcgacgaacgagatctctcaatggacgcgtcattctccaccgagctacaacgaatcttcgggaaggatcagaaccagaaccagaaccaggcgaagacgccgaagctgccgcgagtcttcatcggtggtcggtacataggaggagcggaggaggtgaaacagctacacgagatcggagagttgaagaaacttgtgcaagagttgccgaagattgaaccaggggtatgtgagatgtgtggtggtcatagattcgtgccgtgtaaggattgtcatggtagccataaggtgcatacggagaagctagggttcagaacttgcttaacctgtaacgagaatggtctcgtcaggtgttcttcttgttcatttccacaatctcctccaccctaattcctagattttcagtttttttttttcaatttcaattttcgaataccagaaattggaataattaaatattggtttttaatctaatttttaagaagtttccaattttgtataattcgtaatggaaaagaagtagtttcggattattagattcgtcgaaagaaaaaacaaatcattagatcatgtgatgaacgtgattagcagctaagtactatttgctgtccaagagtatatatattttcaaattttaaattatagatctgaaatgttgtacggaagaggaaaaaaaataaaccagaggtctaaattgttagtataaaatatagcaaaagtagcaaagattaataattgatggacgttaacacatttctggcctaagaaagaatgtatatgtacatgtgcgcattacatttcatgttatttttgacattattattactcgatttataaaaattataacgcttcatagatgaacaattgattgtccatatcgttgagttaacgtacaaaataatgttggctgtttgagtttttatttatatcaaattttccgagaataggtgaaaatgaaatataaccattggtccactgcaaatatttttagtatttatttatcaaaaaaaaaagcaaaagattattattttttaatgatttttaatttgtaactctgccataccatgattttaaaataaatattatgcacttgtaaaaagtaacaactctaatgaatacaatttgttttacagaaatgaatacaactagattttaacctgcggtataccgcgaagacaatttacttttttaaaattaatatatataaaagtttgcaaattatatctatctataaaatatttttattttctagtttacaattgttattaagtaaagtcctttcaaactcgtcttaccaaactcgtcccgtaaaaaaacctgaagtacaccgctaatttaaatatataattaaaataaatattttacgggattgcaattgtattttagtttgtcaaacagatttttgttttaaatagttgccaaaataagatttagtgaattgataagaaatgtatttagatgcgttttgctcattttaaaggattgcaattgtattttggtttgtcaaacattttttgttttatatagttgtcaaaatctagttcaaatgttggaaaaacatgcgtgatatatgggattggaaaatatttagaatgtttttcgtttgttaatcaatttattgccaaaaaaaccatcaattaaaagctaatggcaaccattgtaaataagtttgaactccacgatttatttcacaaaatcgctgcaaaaatgtatatatagattttatatatcagttattatgttctaacataagacattgtatatattaggtaaatactgttatttatcttagttaatttatatgtta

SEQ ID NO: 2570 - DNA, 3000 bp, Unknown
  misc_feature (1)..( 3000): cDNA_ID_3068562_gDNA_ID_1620556_Annot_ID_160454 3000 nt of promoter + ATG
gtttcccattttctctgcgtatccaacctgcgtccaattcaagaacacaactctttctttaaaactctggactctttgattactagcaaatttatatattcctatcctctcttctaccgcattatctttaaaagaactcattttcatttgcctacaagagacccatgaatgccatctttttattctacttctccactcttgaaatctcactaagaatgaaatcacacactttgtgcttaaactaaacaatctccttatcacattcttcactctattgggcaattaagaaaggcatcatccttctaatgttaatgtgctgcataataataacgtacctggttaacaacaaaacccttcatcatgttcatgaagtctgcacgcctttctctgtccaacctctcaacctcagatcggttgttttcctgcaatgatacaaatttacacagagcataaccaaaatattcatatcatgttggtaaaacagcacaagttgtgatatgcatagggttattactaaataccttgattcgctcataccctttgatggcaacattttttgcatcctcagtgaccttgattgtttcttttaactcttctatttttcggatccttgatttgtcaccaccaaataccttcgatgatgcagcctctagcttctcaactctagtttgcagagaaggaagctctgatagaagcgtctgaactgtcagtaaagcactagatctatctgcaaatgcgccttggacagccatcatcatgccaaggtactcatggagtgtgtcctgaaatgaacaattaaaataaaagaacagctcttagtgaagctcaaattccagcagcatctccaacataagctgacaatctgccaagtgtccactagttaataatgaagatacttgctacgcatggcgagatttccgaaatcctaatgtcaatcgcttaaatcgaaatgatcatttttttcagatgaagaaaagaaaataacatttcatttgattccaagtaagggaggtagctgtataattctgtagttatttaccaagtgtttgacagtttgggaattcaactccctataaaatctgcttgcttttacagcagcagtggctaaattcttcatatcattagcacgagttctttgggggttgcagacagcttcctcgttctcgaacttagtcagcttaatgaatgctaatcccagttcacccatggtttcacccatgtcttgctgtgctttcacaagggattccgcctacaaaaagaaaccacaaaagggggttgttccaagcaggatactacatactgccagaatgatgcacaattcacctaacaagtatgaaattttacctgctgtgaggcattgataatttgctgctcaagatcatgcatcttctccttcttttccaagaactctttatcttcttcaacaacgggaggttttgatccaccccagtcattagaaactgactgcctcagctccttgaataatctcagcagatccctacctcctcttgcaggctgacccacctcagtcaccggcactgcagaggctccgccttcaccgaacaactgttttgggagcttcaccgccccatccaacatccgagaggccacatcagtactcattggtagtggcaacttcccttgcacctgaagaaacactttcaactcgtcactgttcctaataacagggtgtgcacttagcctgcgcaagtatttctccaatgcaactcttctctgctccacgaactcttgtttctgcattacttggctctctacgacgctcttatctggccgtggtggtatgcagaaccctctatacgtctcagccaatcgatcagccaatgtgacaacatctctgaatcttcttcgcacgctaaactccgatgggccgccaaagtcagggagattcgttctggtcgtaatttggtaggtgatgtaagtgtttcctccaacaatggaatttgaaatctcctgctctttctgagggttagatacagtgatcttgatgtaatcagagcttgaagaagaaggagatctcgatagtgaatctgagaattgactatgaaggctattatcctcggtaccgttaatctcgctatctgagttctcatcaaagggactgaagataacatctgcatacgacggaggctcgatgtaggagttatcgctgctgatcggcttagagctgaagctgctgcggaaatcttcgtaggaggatggcgcaaggagtggatcagaatcagctggaatcataacggtcggtggcggcgagagcgggtcacggacgttggagagtgttgacatggcgctacggtaaccagagttcgatgtatcaccgttgacatcgcttatcttcagaggatggtcaccaccatctactcctaggtcgagattctccatatcatccctttgcgcattgagattagtttcttcgaatccatcggcattctctgagcccatcatttcgacttctctggagtaacgacgaactaagctaattgaaattaacagaaaattagggtttgatgatttgggaacaaacggagatcccctgaaatgtgacgctgagcgacggtgtggctatcgaattaaaagaaaccggagtgactaaaatgcgcaggtggggactatgggagcaggagactaacgtgcacaccgtggcgggttaggggtggcacgtgataatggcttaaagtctcgtcaattgacaaatctgccaatgcgtacatgtgatgtgaagaatctgacaactttcaggtaaagtatagtcgccgatgggcttgtttaggcccattaggaaagcccaatattaattattgacggagatagccatatagctgcatccaaacattcttattaggtttcgttaagcagctgcagagcttccctgatcgtgtcgaaatcctgtgtttaactggaaccgagtcttttgatgtaaaaggtcaacaactcataaagacacttcaaaaaggttttccgacaaaattcttatcttctcag

SEQ ID NO: 2571 - DNA, 3000 bp, Unknown
  misc_feature (1)..( 3000): cDNA_ID_2163518_gDNA_ID_1620558_Annot_ID_160513 3000 nt of promoter + ATG
agttgtcacaagcaataactcaatattatcatatcatatattatatttttgaagatgaagatgaagagatttacttcaaattataatttaaggtagaactagaaactaaaatattatcattttaaaaaataattgttgatatgtgactttaatcaataactaggagcgaatcctcactatatttgttgacatatagtgttatcctgtatattttatgattttttataattgaaaaaggagaatatgtaatatttcttttgtttctttttaattaattttttagaaaaaatacaaagattaaaaaatatattaaaactgattataaatatattagtttttatgatttatattttttaataattctaaaccaataatacttaattatttgtcttgaagtttaaaattcatcaataataactaattaataatatatataaaacttaaataatcaacatttttaaaacatttttttcctaaaaaaaaagtaataaaaaaaaaagagtatagtggaaaataaaatgtcaaagttgaaaatttgaattagttaatatttatataactttttaccgttttaattttggatggaaatatggttctcagcttctaataattaattcgaagagagcacaaagcccatcctatggcacacgttccaatgtccaagtttcatagaatatccaaatatattatctgtttaaatattttaataccatcatcttctatcggaatctcaaacaacaagttcgaaaataaattatctgtttaaggtgacgtcattcccgccacgttcttgtagcttcctgatttcatccacgagctaagcaagtagcatcctcttttgtccgttttctcgtgacaactttactacctatacatatacatatacaatcaccgtattaatatgctttgaatcgtctaatcacacattatttgcagtaatatattggtataaacatcatttcttgtttgagcctaggtttgtggtttataatgtttcatatatggatcggattgcaattttagtttaattttctatttgtgttcaggtttgtcacacagattagtttaaaactaaattaggtgaacatatataccatcgtattatgaaccatctgttttaggttccaacttccaacagcaatatcgttctctttttgcatgtggacgtacgtagacaacatgacgtttgtgaatcacgtaaatttgtgtatgttttgtgtgtgtctatttgtttcttacaacggtaatagtagatagtttaaaaagataatttatacgttatgtgagaaattttttaatatatgatcatgtaattattttatttgtttttttcataattccttttcttttaattattttatttgtatttaattgattgatatactacaaaaaattcacactcaaaagaaaacattcaatttattaatatttaaatagactactagcatactagtagcagcacactgatttgggaaaaaaataaacattgttttggattatggacctataaaaactatttttaattgtattttattataaatgatgattttatgattctacaaaaactattcaataacaaacaattctacatacaccatacatgtttatgcttaatggttctattaattatgatggaaaactttaattatgatatacaaaacatgatgaaaagttataaagcatgcaccttgctgacaatctctaataaatttgtttacactaatcaaaaataattcccattgtgtgggaatcaaattccatccatagatgtaaagttttcgtaaaccaaaaaaaaaaacgcttccgagaaaaacaacaacaaaatgtttaggctcaaaagaaaacaagatcaaataaaagaagaaggaaaccgacagcaacaaaatggaaagataggattgccaagtcgtatccaatctcaatctgcgactcaattcaaagcaagatagggtttatctatattcctcgggaaacaaactgtttattttaaaatttattcagtgttcaaatacgattttaaaactttacccacattaatatataatcaccaaataaaatacatagttgacagaaaaaatgacgatacgtaaaattttaaatacatttccttgtaaaagttatttcactttgaagttgctgataaattgtgtatgaatgattgaatatgtatgataagttaaatgtatagcaattgtttcaagtaaaatgtataatgctcttactcttaagtataatgtccatcaatagttgcagattatgtcacaattgatctacattttgaggctttagtgttcaaacgtttgagattggtaggatgatacataaaaaattggtgttctttcttaattgcaccagcttcctttctattagagcgaggctacctagcctatattatacacccattggaaagaatctacgattatttcttaaacccgattcattatatggctaaaatccttgtgcaactctttaattgttcgaaccattctatatacatcacattttttcttaatgacatcaaatgaacgagacaatgaagatgtcaaatggtaattcgtttctgccataatgccctcatacgtgtcacaatcatttaccttccgaaaaaaatataattttagtccaacttggaaaaaagatatatacatcagcacaagtagtttctttttgatcagaaataaattttaaaatattttaatctaatacttcataagaaagcaatatttgccaatgcagaaattagtatataaggagatgatagggaagaagagcaaatatgcttgaagcttctctaatttcatagctcctaacaaagcaatatcatttccaatttataaaagttaaagccatggctgcatctttctctgtcccctctatggtaagaaaacgacccataattctcctttgtattatttgattaagttgaatacaatagaattatttcaccagtaaataagactaacatggaaattgatgatcgataaaccaaatcagataatg

SEQ ID NO: 2572 - DNA, 3000 bp, Unknown
  misc_feature (1)..( 3000): cDNA_ID_2163557_gDNA_ID_1620558_Annot_ID_160527 3000 nt of promoter + ATG
agtcacgaaaatctattattttctgattttctcatgatgaaagggtacgtacacacgtgaaacatgcaaagtagtatgtagcagaatcctagtcacagataacgttcaagaccgttgcattgattgcgctagtttcctagatatcgtcatgcgtgcgatcaatgcgagaccgagagaaagccgcttcaccacacaaagacgagtcaaaaaaaaattaaaattaaaactcattgtgggcttttaatagggacttataaaacaggccattttgtacttattgggctttcttcaaaacaaaaccctaaacccaaaaagaaaaaatagacggtgtagccgctgaaaaaaccctaattcccaaagctaatccgccggcgtttatttgagtatatatacgtttcgtcttctttcctctattcagaacaacatatgcttctttctgcttaataatttcaatgagtctagggttttgttatcaaagttttcgtttttttctggggcgtagaaagggtttatggtgatgaaacgaatatttcgtggactagagtttcagatctgggctcttcacccagaatttgaagaaacaacccttggctgtctgagtaaatcctttttcgcccactataatgaaagtttttgttttggtgttccctttgaattgcctatgatgataaaaacaattatcttagcggatttcagtgaggtttttttaaaatcaatgatctgaattgttacacacactgaggctttattagtttgatttgtttttgtttattggggaaatttggtttgcgatgatgataaaatagcacgaaggtgcgtgaagggcagtggacaaagcaatgaaaatttgttttgccgtgagctctctttaataaacgacttctccttccactgagcattttttagatcttccctaaatctttgtgtttgttattattgttgttaataatgaatggcgtcttttaccaattctgaaggattaaatatggttcctttaggtataatggcattgacgcaatattgattgtggtatatcctgatcatttggcttttttttctatgttatttgatcctggaaatgcctcacacatttgttctatcttctttttcattatttacgaattgggtttcctctgaatttacgatgaggtttgttggttgaatataaagttgttggagcgagatggattgtttggagtgcaatgatgttttcttttctcagatttggtttttctaactgaaattgatgattgttctgttttattattcgattaagaccgtctccaatattaatccctattttttcgttggagatgctcttgcttcttcctgttttagttgtcaaaagtcttatgattgttaatcatttgattaaagacattcgcatacaattctgttatcaataatgagaaggaaaatgtgatgatttaacatacggaacaattatggttgctgtcattacttatacgagttcgatgttgagaattgttggtggataatttgtgttgccttcttgatttcctgcgttgaaacaaaaaggttgccacattttgctggatgaagaattgttggttctgtgtgatgttgtttatgtgatcttcaggtgtgatcttacatgagagactaaaaagagagcaacgggtttggtttgagtttgtttaggtcaaaccatcagagagacattacgagatatcgtatcatacccttgggccaattctgcaatatgcgttggagttttgttaatcttgatcatacctttcatatgcctattatcggctttattgacttagttgtatcacttggtcctatactccttgttccctttctctgataagtctatgacttcgctgttatgatcattgcgtttggtttttgtcgtccctgtttgtaaatttgccaagattgaaaatgtaatttcgaagaaccaaaattgtatcacaaggcaaatattttatatacttctaactctcccaaaatatcgagcattatcttaatatctttactatgtcaacttttggcaaaactttattagaaatctgaaaataaaactcacaagattaattatttttcagaaaagagaaactaatatataggacttacctatattaattgtttagagatattcatactccatttacttgaacttttttattaagtgttcagattatgttccatctcttgtattttattgcttttttctctacacataagaacctttcagtttccatttatgaagatttataaaatggtacagatactttagtaaaatgttgtatcattatatggagagatgtacaaatttatatagagataatattcagtaatttaatttagacagatcatacaaatgttaataacaaaaaagaaaaagaaaaaagacaaaactggaatagaattagagaactaaatacctctaattaaaccggatttgatggtagtatacaaaaccaaaatcttgacattttgttaatccttcgaatacataagggcaaaatagtaaaataccagctctgtttttacttattttctttcttaaaagaaatatataaatacgaaggatcgatccttaaattgtttcagctttctttttgttttcattttccggtaatatcattttcgtccgacttgttttctcctccttgccgttaagttccattgaagaagaagaagaagaaggtgtgattcaacgataaacctagcgagaaaacgaaccgcataaaatcgccattgtaggttttcgattttctcagtcttacatagctcgaaattgatgtataactggtttttattcatgctcgattctagagatttttagaaaatcctattccagtgagaatctagagatttccattttgaagcgtttcttctgtttcgtatgtaggaacgagacggtggtgttaatctatggttatggaggtttgcttgactttttgaggttggcttgacttttgaagttttgatctgaagaaaagaggtttcgttgtaattggtttatacatc

SEQ ID NO: 2573 - DNA, 3000 bp, Unknown
  misc_feature (1)..( 3000): cDNA_ID_3068622_gDNA_ID_1620558_Annot_ID_160528 3000 nt of promoter + ATG
aaaagaagaattatatagaaacttaggagtaaacactgtaaaacacgaattttctaattaaaaaaaaagttgtagttataatctaaaagacacatagaaaaatactttagtggaaattaaaacaacataacatgagtagataacttaatgattttgtgacttacttgacacgatacatcatacatgtatctatgaaagttagggcttacatactaacttacaagtaaacacataaaaatgttgtggttttaatcaaaaagacacataaaaaaaagacttaatggaagaacaacatcaacatgagtagacatacaacttcatgctttcgtgacttacttgacacgatacatgcatctatgaaagttagggcttataaatagacaagactcataggttcataacttcattaccttattactcaatcattttctcaattcttcaatctttcatcaaaatttcttccagagaaaaaaaacaaatctcccccacaaagaaaacaacaatgtcgacgaaaaagatcatgttgaagagctccgagggtaaaacgtttgagattgaagaagagaccgcacgccaatgccagaccatagctcatatgattgaagccgaatgtacagataacgtaatcctggttttaaagatgacaagcgagattcttgagatggtgatcgagtactgcaacaagcaccacgtcgatgccgctaatccttgctccgacgatgatctcgagaagtgggacaaggagttcatggaaaaagataaatccacgatctttgctctcaccaatgctgcgaatttcctaaacaacaaaagccttcttcatctagcaggccaaaccgtcgcggatatgatcaaaggcaacactccgaagcagatgcgcgaattcttcaacattgagaatgatttaacacctgaggaagaagcagcgattcgtagggagaataaatgggcttttgaatgagcggattatcaaaacctaaacagctttctttcttttcttttctttcttatttagtatgtgtttcgttatcaatctaggtgatggtgacttcatctacgttcgatgatccaataatgaaagcagctgctttctttcttttatcttttttttctttggtgtgtttaagtgtttttcaatttcttgatcaatgtaattgatgatgacttcatcaaagtttattaattaaataatgaaagtagacatatatttcgttctttgtgaaagtaaaaaatactcctttttactcaataatatacttttgtattcctatagttgttttgactaaaattctgatagtttatgtcttgtttaaaccttataaaatgtatttaaagttatacatatcttgagtcaaaataattaaagttatagatttaattaaaaaactatactgacatattcttattcttattcttatccttattaacaaaattgagatatatacaaaattgtttaacaaacaaaagagttcttgagatttataaatttgttgcaaaacaattattgaaacatgtaaaattttaactaaaggttgtagattgttaacattgggtatgtctttcaaattcacatataagacgtgatatttatgcatttacagaaagtgtgtgcattaatctatactatatgaaaaaggtttaatactttattttgagtcgatcggtgcttaaagttcaatggattaaaaaaaggaactacataaaaatttaggagtaattaaatactgtaagcaagagtttccctagttaaaaaaaaaaagttgcagttttaatcaaaatgacacagaataggtaaatatatcaaagactttgtggaagaacaacatcaacatgagtagatatataaagtgatgcttttatgtgacttacatgacacacaatacatctataaattgaggaaagcattaacaagaacgaagaagaagaacaaaaacaaaatatatatacaaaactctttttctcttgttctactacgaaaagaagaattcaagaaatggttcttacagaggctgagattgaagccgaattggatcgtctcatggaagcaccggaagtagatgaagagcaagtgaaggtaaatgttttttctggtatttttgaaacttctaatgtttttattctatgtagaacacattagttaaacctttgtaaaatctaggatttggagaagagaatgatcgagttcactaaaacaaaccgaggtatagatcccaagtatatgaagacaattgaatatctaaagatggataaacgactcaaatctatgatcaaagttacaggaacttctattgtgaagcagaagtcttcctcttcatcttaattagttggttttttcagatgataagtaaaagaagaattattagtataataaatatgatcatcatcatattcttaaaaaaaaattagtgaatactttaagtttaaggtttgttgtattaattaagaaaactaagaaaggcatgtcttttatcttacttattcgtaaaaggattctcataattaattactcagttttctaataatattttcctgtcctcaatttctttttttgtgtcaacaacatacttcttgattcatataattgttttgaactttgattaaatttttggtaggttatgcttgtttaagttaaccctatataatgtattttaaattttacataattcagtcgaaatatttaaattaaagagatttaattaaaaattatttatacgtttccttactataacctaattttgataacttttaatagtttaatttcaattcaaataaaaagttggatattatggatcaattacaaatagttctaatgcctaaaatcacttcacaaagacaaagtttcactaatttggtttagaaattgaggacgggtatggatccggctcgggtcatccatctcaactccaaagagtctatctggtccttccggacccaaacagtcaaaatagcaccaaattaaaaacacagacgcgccgccgtacgagaaaatctccggctatg

SEQ ID NO: 2574 - DNA, 3000 bp, Unknown
  misc_feature (1)..( 3000): cDNA_ID_2113272_gDNA_ID_1620559_Annot_ID_160544 3000 nt of promoter + ATG
acgaatcctaaacatccataatgacggtggtgggggtaaatatttgggtttaccagaacagattggaggaaaaaaggagatctttacctatattgttgatcgggtacaacaaaaaacaaaagggtggtcaactcgatttctatcagaagccggaaaagaaatcttaataaagacagtggctttgtcattaccagtttacacaatgaactgtttcaaacttccaaaggggatatgtgatgatatcaacagattacttgcgtcttactggtggagtaaaagctcggataagagatcaatgcactggatggcttggaagcggctgaccataccaaagaatgaaggcgggttaggatttagggacattgaatgctttaataaagccatgttagcaaaacaagtgtggcgaatacttcaagcaccatcatccctgctcactcgcctcttacgtggaaggtactttgaaacaacaaatattctgaatgcaagaaccggaggaagccctctttcatttggagatccattctagaaggacgagacctcctgcagcaaggacttcgaatccttatagaagatggcaaacagacaaacatatggactgattcatggcttccaacacacccaccaagaccacctcaaaaacgtgatgcgacggtcaccaatcatacacaagtcaagcacctaatgcaagatggcagaaacatgtggaataaagaagtaatagaagaactctttgaagcagatgaagcacgattgatacaaggttaagattaagatcacaaccgtcccctgatgtactaggctggaactacacaaagcatggggaatacacattcaaatcaagttattggctctgtacacatctaccgaatcaacaacatgattatgttcccccaccaggtttacccgagtttaagagagtagtatggaagctagacacgacaccaaaactaaagcacttcatgtggcggatagtaactcaatcattggcgacaggcgaggccttgacacgacgacatatcatttcagattcacagtgtaaacgatgttgtgcagctcctgaaacattagaacgcctattctttggatgccattatgttcaagctatttggaggggctctccggtgtcacatacagcgtttttcaatccacacttaccttttgaagataaattcagattaatccttcaatgctgtactgatacgagacaagaccatatcacaagacaaatacctttatggatgttgtggcacatatggaagagcaggaatttgttagtttaccagcgaaaagggagtaattggcaagatgatgtacaaaaagcgataacagactcatatgagtggattcctctgcagcgagacacacaacgacgaagtctaaatgacagaagcgggcaagggtagcaaaaacctattcacggctttatcaaatgcaattatgactgcagtttctcaaggaatgatctagcaccaaaggctggttggattttacgaattgacacaggcagttatctacttgcggctcaaggtacaagacaactatgcaactcagtgctagaagcggaactacaggctctcttgatggcaatgcaacatacatggagtagaggatatcgaaagattatatttgaaggtgataataggactgtggaaagcttactcaatgggaacacaaggaattttgaacttcataacctcgtcatggagatacaacattggcggaagaagttttctactgccattatcaaatggtctttccggtcaactaacaaagcagctgatcgattagctaaagtggagttagaaaacattgttacttttgtctctcattcttatgtacctctgtttcttgtacaaatcctccataggattacacatcatccctctaataaagtatatctgttaatgttaaaaaaaaataaaaaaaaaagaatcggttattttcgggttttaaacttaaaaaccaaagaaaccaatatccgaatcgaaccgaaccgtaataaatttcggttagtttcggaagaattttcaaaaatccaaaataaccgaaacccgaaataaccgactcggttcggttcggtttacccgaagtcgcaggcctaatattttatatcaacaattgacatatattttgacccaaaaaaaaaaaatcaacaattgacatatatttgtttttattaaagtttaatttacatattatggaagtctcaaaatatttgttaaacaatggcaaatatttgttagacatatttcatctatttagcatgcacaacacgaatccatatctaatattagaaagaattatcctttgattctttttttctgaaggaaattttgattaatggtaagatttgtttataagcccaaaagcacaaatattctcctacttatagcatgatatattttgaagtgaatgtaaattaagaattattttcgtaacaacaaattttatatttatacaaaataaattaaattcagtttctttctctcttctctttctcggtttccccattttctatctagacaaagagtgttgtctgaattggctctgtctcaaaaaatgaaattctcaaattaaccacaacgatctttagagccttcttcgctcaccgatctctgaaaccctggtttgctctcgtcctcttcgtgtaacgattcttcttcttgataaatttttaatctttgtttcggcttttcgatgaaattgttttttttttggatctcgtctctatcagctcatgttcttctttgattatatgataattgttgtttcctttgctctgttttatgattattgttgatttttgagattgaaatgttcgagggtttctactgttcactgttctttacacgtatcaatgttttcttgatcatgttctcttatgatgttaatagagagactagtgttattgtgatgaatgattcttgttaactaaatttgtcatttttgttttcacttgacattcatttctctaaccatttattataggtagtttctatg

SEQ ID NO: 2575 - DNA, 3000 bp, Unknown
  misc_feature (1)..( 3000): cDNA_ID_4254803_gDNA_ID_1620559_Annot_ID_160563 3000 nt of promoter + ATG
ttgctactgactaaacgaatttgattagtaagttgatttttgaggaattggttagttgatttttgaggaatttaaagatttcaaaagtttagagattttaaaagttttaaaaaatcttatggattcttctcaatgagttgtctaaactctagcaatgattttcatggatttttgtttacttttcctaaacgaagttttacaagacaatattttttccctcttatcatttcatttacttgttttattttactcttttttgtttattaacctaaactaaattatatatttcatatgatataaatccttggcatattttttgtattattatcaattatcactatcgttaatgtaaaatttatgaacttagaatttctactgttatttatgttaacagatgaaagattgatttttttgggttttttgagttttatttttaagagattttgaaagttgtgtcgaagagaattcatgtcccaataacatgagaatttaatagaattgtaaaatcagtgataactaaactttttgaataacaagaaattgtggatggagtttaaaagtcatcaaagcaataacactagaatatactaagaatataataatccattaacgaataaatgtggaatctgaaaaaattttaaattaaaaattcatcaaccaataacaccttcttagcagcaaaactcaaaagttaggcgatcgaatttgattttgtctcaacttagcctgtgaattcaaattatttttctatgattttgtcccttaaattataactgatctacttcatatagactattataactaaaatcatttctagtcaataatagaagatgctacgaacaaaagcacttaattttgaaaccttaaataaaatacatagtataacgatttttatatacttatctattagatcacaaaaactaaattcaatgttaaaaataaagtacataaatttatttgagatatggaagaggtaagaaaatattatttgataaatatatcacaacaattattttgttaaatattacataaataaaatgacacacgaatattatcgaaaatagtcaaatatccaaaatagataatagagatagatcttttcaacttcatttccttgcatgatggtcaaaattgatattttgttacatgtatcaagacttccagtttacaaaggtgaatttgaactaaaataaatatgaaaatcaaagaagaaataagtataatctagtaacacaatataaataaagggttttgtgcaaaaaaaactgaaattgtatattgttgcagctttacccttcacgttaaaaaaatgcaaataatcctataaattttaaaaataatgcgaaatatagccatttttttgcaaatttacatatattgtaaatattttcatgatcacatacatttgtttttgaattagactcttccaatatagcaatctattgaagaaataagtattatttatcaaaaaattgaatttttgacaatagcaaaaaagttaatttgcgtattattttgaaattcataagtattttgcatttttttatgtgaaagataaaattgcaaaaatagacgaatttgaaagttgtttttgcacaaaacccaaaaataaaatacaacaatataggatatatagatcatagcctctaaaaataaatttaaaattagactcttccaatgatgtttcaacccatataacaacagaaaagcaaaacaaaaatatttaaaatttgagataggttcgaagatgattatctttggaacttggttttcttgatgtatatgattaaatttggtgcatatgtaattaagtgtgcactggaccaataaaaaacattgaaaccttatataatatatcttcttatgacacattattatttaaataaacaaacaaacaaaactttaaaagcgtttgcgttcagcgttcagcgttcagcgtttgcgttcgacgtttagagttggcacaaaatccaccaaattaaaaccattcaggcggaggattcaatatatctcacagtttcactctcaacatttcaatatctctctctctctctgtgaagaacaaatacagcgtttcttctgcgattagatctatttcgatactcacgaggattgcctcctgaggagactacatatactaaacaaaatacaagctgaggagactaaatatatttagttaataccaataatatatgatatacaactacatatttacaaacaaagaaaatatagtagatttgtaatatatacataattgagatttgatgattgattaaaccaagaataccgtgcgtagcacgggtactgacatagtatgtgtattattctgaacttcataagattatttttcatttttgatgtgaaagataaagttgcaaaaatggtcgaatttgaaggttttttgcacaaacccagaaataaaataaaacaatataagatatgatcatagcctctgaaaataaatttagaactagactcttccattgatgtttcaacccatataacaacataaaagcaaagcaataagttgaaagatgataatcaaaattaaaaaatgagtatctttgcaacttggttttcttgatgtatataattaaatttgttacatatgtaattaagtgtaaactggacccataagacctttttcatccttgtaagcttaatgggctttatcaatataatgttggccgacaaaaaaaaaaaaaaaaagacccataagaaacattgaaaccagtctggcccatgacccatataatttatctttaaaagagtctgcgttccacgtttgcgttccgagtttgcgttccgtgtttgcgtttagagttggcacaaaatccaccaaatcaaaccagtcgggcggaggattcaatatctcagagtttcactctcaacatttcattctctctctctctctcaacaattagatctgtttcgataatcacgaggtttccctcacttcctttccattgctaaaccaggatttgcctcctgcatttggaa

SEQ ID NO: 2576 - DNA, 3000 bp, Unknown
  misc_feature (1)..( 3000): cDNA_ID_3068657_gDNA_ID_1620559_Annot_ID_160564 3000 nt of promoter + ATG
agctaagatttcgtatagcatctgaaatcgcaaccggtcttcatttcctccaccagatgaaaccggagcctttggtgcaccgtgaccttaaaccgggaaacatattactcgaccagcatttcgtcagcaagatttcagatgtgggcttggccagactcgtccctccatctgttgctgacactgcaacccaatatagaatgacttcaaccgctggaacattcttttacatagatcctgaatatcagcagaccggtatgttgggaactaagtcagacatttactcattcggcattatgcttttgcaaatacttacagctaagccaccaatgggtttaactcatcacgtcgaaaaagccattgaaaagggaactttcgctgagatgttagaccctgctgttcctgactggccattcgaagaagccttggctgcagcaaaacttgctctacaatgtgcaaaattaagacgcaaagacagacctgacttagggaacattgttttgcctgagcttaaaaaactcagggatctagctgaagaaagcattaaatttggtgtaagacagccttcaccgatcaggagctcagggtccgcgacttcgatacaggtattaaatccattaagcaccttctctagattttaaacatgtttcggttagttaaactatatattttccttatgtaggagattataagtgatcctcagctacaatatggatctgatagctcaagtttgcacaacagttctacatcttgaaaaggaaaatccaagtcagaaactatcaaagagagaacaacatacgttaagaggagcaaggcaaactaattttggtcaagatcaagacttgttgttgtcaatagcggttgtataccaaatatttttaaacagagttttaaatctgtttatatgtaatattgggttttacagtgtgctaacactaaacccttgtagttaaccaaaaaaaaaaagaagaaatactaaacccttgtataccacagaatctatacggatttataagagtatataccattttgattttttttttcacaaaggtttagttttattaatatcacaacccatgactacaaaactgaaactggaaaacatataaggcccaacacgagcccaaccatttgcatcgcttaagaagaagattggatcgaactataagatctcaagacaagtgtcaacattgataacgcgtgtaacatgaggagacaaaagatttcagtcatcgtctttcgccgttgaagccatcgattctaccggagattgaaactaacatcgaatgaatcgagtatagattcttctgtaattcaccgataactgcaaaacagaagtaaagatctaatatggaaccattaatctcaatcacttgctttaatcatcaatattattttttttttagattcatcgcaaagcaacggaaatgagataagatctcaaactaatctacttctgttaactaaaccaatcaatgctttaataaaaagaaatagctaaaagcagtagtaataagttgaggaaattgctttggatcttcaactaaattgcaaattgcctaattattttccataaaccgtaaacctaaaggatatgtatgacccttttgagtggagaatcgccacaaacgccaccactaatatacagatccgatgaggtttaaccgcaacttctattaaaaaaaactaatttataagaaaaatgaaaagaagcaaaggagcgctgacggcaaagccgaccattatcgatatgaaagcgacaagagctggccaacaccggaaatagctggtagttgccagatgataatccctatcgagagacaaagccagaaagaatttcggacgaccataagagtcttcagttttctttctctgaaaaatttgagagagaaaagagagagaaaacctatatcctttttttaccattttgattttctgaaggtaaaatcgaaaacttcttaaggaagtaaaacagataaggtagaagaaatgaacactagaaaggttcatggtctagtggcaaagtctacataatgttctcactttaatagtgagataaaaatggaaattttattgtttcttctgtttcagtttataataataatatgtgatgttttcggataattattttgtttcagattaaatgatgttttcagttttctatacaaagttcattagattttatatgttttttttactatttatattttggagtttattttatagttggttgaattgtgttaggtaaataataaatgatgcttttatctatatacaagaaaaaataaatgatctcttaatatatatgcaaaaaacttataaataaaattttttgaagtagaaagagtacaatttatacaaataaattgtttaaaaataaatatcgttttatattttcaatataacctcatctctataaaaaaaaactaaaagtcatcatgattttaaggaatataatttaaatttgaatttgtgtttttatttttaaattcatgtgaaaaacgttaaaataatatttattgtgaatcgaacagagttgaaatctacatttaaaatataaaccaattattatgtaaccaaatttaagttctgaaacgaaatttaatgtgaagaaaaaatgaataatttgtttttccttgcaaaaaaaattaactaagaaactaaaaaaataaattattagtgcaacatcaaactcgtataagttccggtgagcaataaataaaacctaatagtcatcgtaagaaagaaaactggcctacttcataaatgctcgccgcaatttattactaaatcttcccttgtgtaattttcaaagcattcaaacgttgccttcctaaaataaacaattataaggtgatgataatggtcaccaccacaccaataatacgtttctggtcaaacttaacaacacaacacaaaaaaaaacaagaactcattcagattcttctctgatgatccacttcttgtaataataacaaaaacaaacagagtggtttctctatg

SEQ ID NO: 2577 - DNA, 3000 bp, Unknown
  misc_feature (1)..( 3000): cDNA_ID_3068677_gDNA_ID_1620559_Annot_ID_160545 3000 nt of promoter + ATG
aagctctctttgtccgaattggctccgtctcaaatatgagattcccaaaaattgttgtgaacatgtgaactagaattccacatgcatgtgtagtccaaacttgggaggagtaagagcatgagaaaatcaagtgatttcttgcctctactccatctccacaaagaacacaacttccgttcgctccaacattccacaagagaaatctatctcctagacaattttgaatatcaatccaagttatgaaaaaatatttaggagtagagttggggaaccaaactacctgattaccaatcacattttggatttgcttcccaaatcaagtgccaattatgttgggacgagaacttgcacttataggagccattttgccttttccacattgagatatcctgaccagtttaaagaactattgcggttagtgtcaagctcatctttgataatgttcaaatcaagccgatgtcgtctacggcggtgagtagcaagcacgtcagccacgtagcttcgagaggcaatttccagatcaatacttcctcgtgggcctagaatatcgaacaagttcccaagtgtgcaccaaacatcatgctgaaaaaggtaccctcacaagatattacttccacctataaagaggtttcgttattggtctatacttcagaattatttatagccacaaccgggaggagttcccacatacggaccatagcgaagcattatgaaacaaagtttatggacccaatcgacccacattgaatcccctgcagagactaatctccatataagcttcaagacactaaccctattagcctcggatagcaatcttatctcagaccaccctttttgttttggcttacaaatatttttccatacaatctcgcattttttgggtttaactcagatcttgaccatataaaaactggatatagacttttaatttctttaatgcacttacttggcaagcggaaagcggagagccaaaaatttataagacttgaaagtattcattttatcaattggaggcgacccacaaaagataaaaacccaccagttcaagagcttatatgcgttctgattctctctggcgaaggaagagaatctgtccatgtcatacaattagtgagtagtagaagaccaagggaaactatccaagtatattttttcgatgttgagaagtagtccctgccatgaacaaggtagatttcttcaaatctatttttaaccccgaatttgttgcaagctgatcaaagacctacaaaatacctgcaactgaccgagaacttccatccgagaaaattttaagaataagaaacgtaatctctatttcttaacttccgatacaccgtttaactcgagattgagccaccaacacatcaccgattcataactctctctcacaagtgacacatatgtcactgtacattcatcaaacaatgcatgatcctctctcgtaaactagtaaagattatatataaaaggtataaaccaacttaaccgggtcttcttctaaccaaaccaaactgagtctttgctcccacgtgcttataagaaaaccaatatgtcatccgcaaaagacaagtgtgtgagtctcaatgtttttacatctaagatgaattcgtatttgtttatcagcatctgtcttgtcaagcattaatgacaaaacattcatgcaaatgaaaaaatagatatggtgataaggaacagccttgcctcagtctcctcacactccaaataaaggaaacaagctaactcccgtttaacctgaacagaaaaatagtcggtaccaaccaatacacaagttacacaactcgatcaagtgaataaagctttcaagtagattcatggccttaagaatattaagctaaaaaggccattgaacctaataaaaagcttcagagatatcgatcttaagagcgcaacaactagagatggactcgtgacaatccttcactagtaagaatattttcttttgatgttatcgactaggcctggaataataacccgaaccgatttatccgaaccgaaccgaaccaagatttgagcaaatcggttcgggttcggttattagcatataaccgattggaagctttaataaataagaatcggttatcggttatacataaccgaatggttaaccaacatttaatcctaaaccagactaacctagtagactcacatccaaccctaattttctaattgtttcactcgcactctctcactttctcccaccaaacgagatcatgaacgctctcagcctctcaccattcaacatccatcttcttcgttgaatttctctcaccctcacacaaagtcaatccttctcttgatctcttttcgtctctgtttgttcgttctcttttttttgttttaagttagttttcttctcttctttcatcctttcttcatattctcatctctactcttcaattaattcttcttctacacaaaattttctcttttcttttcctttaattagctttaaacaacggattatgatgatgaatttgtttgttcttcttctattgccgacaagacaccgtctgccccccgccactacaacctcttcaaagaagacaaaaccctaatcatttggacttataggcttgtatttgtgtgagcttttatttaatgtttgggcaatcaaagcccaaatggttttaattgaatcccatgaataaaatacgaaaaaattaaaagaaaataaaatttaaactcaaaatggcgatttttttggcgatttatatatggttacttaaccgttctcccaccatcactctggtgacggttcttctctatttttccgacgatgtggtttcctttcgacccatttctccgacggttatctccatgactataccaccttctcgtcgtgatgatattggagcaattgtaaagatctcaagtctatttatacccagatttgcaattcgtctattcacagttcttgaaaaaattatccctcttagactccctttccccttttgatattatcacactctacgcaaaatg

SEQ ID NO: 2578 - DNA, 3000 bp, Unknown
  misc_feature (1)..( 3000): cDNA_ID_2163474_gDNA_ID_1620560_Annot_ID_160580 3000 nt of promoter + ATG
cgtaaatttttgtgcaacctaagcctatgcgttctgattgcgtaatcttaaagcgagaacaattaaattttgagaaaaaaacaaagtaatcacacaaagaaaaaaaaaatcatgtgaacgacaaacaaaccccacataaaatggtgtattcgccactcgttaattggctatgttccgcgtcgctcagcaaatggatcgtgagtgtatcagttacaagtgaagccgaaaagaggaaaagaaaaaaagaataataattgtagattttatcaataatttataccatttcgtttgaaattattgaaagaatttttttaacatcatatttatatatagattttactgtaatgcaagttatggttttcagtaatacaaatttctaacaccgagcccgccattaaggtttatgtagtttctagtagattttacattatgttaaaaacgtaaaatttgaacgatctacatattattatgtatttttctaatatattttttagttgaaacaaccaattttgtaaatagctgtggtatgatcgaatcaagttgaagtgcaacccaaacattaatcgggtctacgtacataaaatctctaatcacgttgaccaagcgctccagctcgatctgctagtaaaaacagaagcaatatattttttatttttttttatgtacttagttagtggtatatatatagttgtaaattgggtatttccaaagaaccaaagtaatgtaaactatacataagcgaaaatttaaacgtttttctattctatagtcttgaaaattaaaacaatatttactaggaaaaagaataatataagggcaccgacagtttctataagaacatgtggcacgagggcttggagaagacagtacacagcattcaatcaatcatgaaaacgacatttgatgtggtaacctactaaagttcgatctttttttatgaaagtttcttaatatttctttaatttccggactatatctatcaacaagtcaaaagattaaaaaaaatcaacaagcaaaatactgttaaaatattgttttatatataccacgaactatttgtcggcaaatgtatacatatagtatagacatcatacatgggcaaatcgcatatatttgtgtgatgtgataccatagtctcaataatttgaacatttttctcttatttaagcacggaggaaaaattagctatatggcgacttggcgagtggagccaagattaaaaaaaaaaaaagcatgttatttaaaaatatggtagacataacatacaaaaaaatatagtaaaataaacagaactgattgaacaaaagagagtgatcaaagttgaaaaataatttaactataaaaactaaaaagaaaattatcagaggatggagatattaaactaataaaaatgtaattaaataagtaaactataaattaaataagtaaaaaattaaacgtaattagaaggaacaaaaaaaactagaaaagtaaaaacataagagaggaaggagggaagcaaaagtgaaaaccaatgcagtcaacagtcaaaaaccatgatacagtccatgcgtagaacataattaacttaagcaataaatttaataagtaaaaaattaaacgtaattagaaggaacaaaaaaaaagtatataaaaaattagaaggaacaaaaaaaaaaactagaaaataggatcttggacacgatgcttacagattgttttttgtctgggaagtaaatgcccatatctgtttctcgacattttgaagtctctctaacaaaataattagaggaattaagaacttgattgtgtaactttttttttaatcttaaattaagataatactatttcattacaactattattttcttgcacatgttgcaagaacgtgagagtgtacgcagacaaataattaaaacgaaaataaaattataatgattatatacaatctcggctatcaattgattaatagagaaaattgactaaccactctgaattggctcaaaatgtagttattaattcaaaccgagtttcacttcatttatattattttcattttttaactttaaaatatatatatttaataaaccaaatatgatctaaactaaatctaaaaggctccatccaaagtagatttgattttactatatatttaaaacatgtatggtaggaaaatttaaccgaaaccaaattaaacacattttagggtgaagaaaatcacccaaaaaaaaaaggtgacttttttttgtaacaaaacaaaagacctaaagtttagagacaaaataaaatgttagggtgattcaatgcatcacataatacagtattgttaataattaatggctaataataatgtgtgtttggaagtttttactaatctcttctttacaacaacaagtggagtggaagagagagatacacacaaggtttaatgggtcccacattcttttacttctcaaaatttaattactaattttatctaattttggtgctctttttcctcatctacataattgcctttaattatctcacaccatttaactaatcactgattctcttcttccttacgcgtttgtacttaacccccttttatcatcatttcgcaggcttgcgtctgtctctctctctctctccaccattgactctctctctctctctcgctctggaatcatcctttatttctgtgactgtgtgcactttcagagaggagagagaggcccaaaaccaaaagaaaagaaaaggttgtggcttgcagctgaatcaataccatctccatatatacaatacaccttcactattcccccttttgtatttttattatatttttcccatcaaagtctgtttttttagactccggtttgccgctttgtgtgtgtgtgagagagagaaagagagctatctatcctctgatttatggtctctggatctctgacaatcgagttgagttaattacaacacattcctctctttctcaatcgatctgtgaaatccaagattgttagctgtgtctgttttcagacaaat

SEQ ID NO: 2579 - DNA, 3000 bp, Unknown
  misc_feature (1)..( 3000): cDNA_ID_2163488_gDNA_ID_1620560_Annot_ID_160585 3000 nt of promoter + ATG
tatgaatttagagcatagactttggacttggatgtatactgttttgtcaattttttaaaaatttcttaaatttgcctcatatatataataatttggatgtagcaaataaattttaacgagtgaaatataaaattgtgaaccatatttcattcacgtggaatagtaatatcaataaaaaaaatagttaattttggatgattgattttaaataaatggaaaaagaaagtagaccaactcttgtcggaaattataggtgaagaaattgagttatagtaatgaatggctaattgggaaacacatgacacaacaaactttacgtcctttttgccatatttaagcactctctataacaatgtccccgacccctactccaataatctacttcccctattctactattgtggtccagtttataccattatttataatccaaattttagtttatgatcaaactttcacgttatcaacgagaatcgcattcatgatttggctaagtaagattttctaagcctaatatttgtattcaaatcctgtaaagctgagatatcctctcttacaataagtcatgaacgcacaaccccaataatgaatgaagagtactcatgaatgaaaatggttccaaaaacatgacacaacaaacttgacgatatcatctcttacaagtctcgatacgaagttagtaatatatctcttcgtccacaattgactacataaatatttttatgtatgtagaacaatattgaatgtaaactaggttattaattacgaatccattatttgacttgcgtattaatcatttgttttcaatgttctgataaatcatattcctttgaaggaccacaactccatctccatgatcaaaggaccactcgattttcaataatctccttgagttttatcccactagtctatatgagatagacaacattatagtgaatatggttatagaatctggatggtttatatcaatttagacatcatgtagaagtacatctaaactgttggtttaaggtcggctggtagtgtgcacccatgatttggcaacatctaaactggtttggttaatagatcatggcaagttattactcccctaacctcatttcctcttcctgtaatatatattgatcttgtatttaaaaacatagaaagaagttagattttgacagtttgaaaactgaggaaagtgttgagaaagagaagaaaaacgtttttcaagagatagtttcaagaaatcaactacaaacaggcatttatcaaaggtgacaagtcattgatcttcgttcgtgatttcatccgaccttttgattaccaaagttcctgaatttttttattactaaactgggttaaggtatgtgtttcggtttaaatttcttacatatacaaatgtgaaattaagtttgtaaccgaaattctgtttctcattcaaaagacgtgattgcataaattatcatcatttatttgctttgcaaacaagaaatattaattttgtggggatagattcatgttaatgtgggaagacagagaaatatcgacgtcaaatccttagacccatatgtctcaataacttccaaaacgttattcaattccgatataaaattgggaccataaactgatcatagaatcattcatctctatatataaacacaaaaaggttcaacaaaagataattctatataaccaaagaaaaaaaactctcttccaaaaatggcaattagggtttcccacaagtctttcctcgtcgcacttcttctcatactcttcatttcctctcctactcaaggtaaatttatagctaatatatatatacacacaagcgcgctcacctcacgagtttctagctatatcaagtataatttgaatgaatcttcttcttgttttttggttgaatatcaaaatatattacccaataatgagttcttgatatataaacattttgattttttagcacgaagcttacgagaagtagtaaggaatagaacgctattggttgtggagaagagtcaagagagtcggaaaataaggcacgaaggtggaggaagtgatgttgatggattgatggatatggattataattctgcgaacaagaaaagaccgatacacaatcgctaataaacacacatgaacttatcgaattcttgtgagatatcctgagatccaaagatatcccgagattttatcttttactaaacataaattataagaagtgagaatgtattttatataagaaaagaagtgagaatgtaaactattattatttataggaacatataaatataaacgactttgtatgcatgtgtacagtattatctcgagggaaaacagttctatacaataatcatagcttgtgtgtgctagctttatgtatggattgcatcatggttttctgtttgtgaaataaaactctataatatattatgtgtatatagaaacccacaaatatcttctttaactctgttgtagtattagttccaataaaataaaattacacctcaaaagagtatttgctgattttatatatcgaattcaaacctacggaagctcccatcccatgaaggtgttgtggatatttgatatcaaaatatgcatataccaaaatacaatcaaatagattataatttaaagtaataggactttggaaaaactaggcaacataccaaataatatatgggatcaaagttttcgacaaatatcgattggttttcagtctccaaacttctttcatttagaaggatagaacttaaattcattagtgtcttaattttgtagttccacaaacaataatccttgtcttaacatataaattagtcttataagtcagtaaaatcatggtgaaatttctctactgcaagtggaaggattcaaaagaaagaaaaataaatccgagcaattgatggattttctgttactgttagagagttgccgaggctcgagcgataatgggccttaaaaaacttactcaaatgggccatatggaccttagattttcatttattacaaatg

SEQ ID NO: 2580 - DNA, 3000 bp, Unknown
  misc_feature (1)..( 3000): cDNA_ID_2163683_gDNA_ID_1620561_Annot_ID_160594 3000 nt of promoter + ATG
cacggatatggtcacaagctgagctagctgcagaaagtgcactagacagcttcctggccttgataatggcagcaccacgttgttgaacggtagagatgaactctccattcaacctacaacattagttgctaacatacatgagcatcacattcacgaaactagattgagatattaaaagggtgttttagagatttttaccactcgtcattcttgactagctcacgcactggcttctctccaacggaagtcttaacggtagcgtggttgacatctgggtattgggttgatgagtggtttccccagataatcacgttcttcacatcagacactggtacgcttaacctctcagacacttgtcccaatgccctgttgtggtcaagcctggtcaagcaagtaatgttcttctctgggatcgatggtgcaaattccttcaggatcaatgcattggtgtttgcagggtttgcaacaaccagaacctacaaaacgaagagatagcaaatatgaaatatctcatacaacaaaataagagattaacttgcttaatttctgcataatgatcataagaacgattcgaaaagacttatcaccttgcagtttggtgcagcatgcttctccaaggcagaagcttgagacttgtaaatggaaacgttcttggacataacatccttcctctccattccttccttcctcgggaaaccaccaaccatgacagcaacattaacaccggtacacgcttcaacagcatcagttgtagccaccacaccttccacagaaaaaacaccaacatcacatttcagcctcaagcaacataccatattccaatacgagcacagtaaaaatatatactagaataaaaacttaccctttagaagagggaaagcagcatcgaccaattccatcttcacaccgttcaaagcttctgctgcaaaagggatgtcaagcatgtggaggatcacaggctgatcagcaccaagcattatcccccttgcaatcataggaacaagagcatatccgatttgtcctgcacaataacagaaacacacttaaacatgatctacacacaaaattacaaatcaatcgccaaataaagcttacaaaatcagaacaaatcatgataaaatcaaataactgatccaaaatgacaattacatctcaaaatgtaacaggattcaccaaatgatccaatcaatttctctcttcagatctcactataggaatcgaaaatatgattcaatgatcgtttacatttttggattatgaaaaattggtgttacataaagatctgacgatacgaatcaataacgagagatggaagaaacaagatcggagaaataagaattttacctgcagctccggtaacaagaacacgaactggttccttcgccatcttataatcgagatcggaaaattatcgccggtgaaaaaaagagagagattgtgaatgatcagtgagagagcgtgaaggtatgaaagcagacctgtgtgtttatttattggtgatggtgaaagctgagatgatccatggattgatgcccacgttatcgaatcatctcgaaccaatatcattttgggaagttataatgggccaatttagtgttaaaataagcccaactaattaagcccatttaatgtttagacgagtttatcgtaccgactaatttggtaaagccctaattaaatggggatgttcaatgtttacttttttcatgtttaattaatattttcttcttttgtaagtggtgtctgaatatataaaactaaagttctagctgtctttgtagaaaatgcatgtcattatatgtttgacactgttattgaagaaatggtctaaacaaaaaaagaagataatataatatcaatcgaaattcgattctattatattactttattctacataataaaatattttatatcagggtttatcgagttagtaataatttttcttattaccaataaaaattaaaaagcaaatttaacaatcaagtgattatatagtattttataaatagtaccaattttttttttatggtgtatctgatagtttcgagacaaattttgttttgtttacttttaaaaatatattatcaaatactcattttttggtagaatattatgtttttttatgatattttttatgtaatagtttcaaatcaaatatcaatattgcttgaggcctaccaaaaaataatcaatattgcttgagcggaagaaaataaagatgctagaaaatattaaaatccaactaattttatgtcattaattatcatctttttcatatagtgacgttactgtttacagttaatgaagaataaatcaaatttggagaaaaagaaaacaaattagttaagcaaaaaaataaaaagttgtaaaaaattagggataaggaaagaaaatctcaaaatctcttcttcaaggccgtctcgtcagatttctttttcatttttcttttaacgtttggtttcgtctctaatccattatcttccttaagaaaaaaaaaattcagcaaaaaaaaaagagaaaaaaatagtgaatcaagctgtctcgtagcagtctttatagatcaaacgataatcgaatccaacgacccattttttttttttttgggtctgatttcgtctctctttgttcttttcaccttttttttttgttttggttttgtctcttccgtttcattttgtgtttcttcaatctgatctaaagcttttgtctgaaaaaaagtgtcagactttctatgaagatgttgttggtcaatgggtgatttttagtttgtgttaaagcagaagcataagattacttggtgaatcgattacaattttgatttgattcagatatttgaagggttcttactagaatttgaattggggatctttgaatttcgatcaggcttttagagaggtagggaacattgaattgagatctgggtcaacttttggttttgttggggattagttgttttaagagatcgaagaaaggaggaagctttttgatttggtaacgatg

SEQ ID NO: 2581 - DNA, 3000 bp, Unknown
  misc_feature (1)..( 3000): cDNA_ID_3068725_gDNA_ID_1620561_Annot_ID_160618 3000 nt of promoter + ATG
tcagtatttggcaatgagaccccatcctgcaaaccaaatcaaatgaacatatataaaacagttataataacaaaatgataatttctcgtattctgataatacctcgacacaaactactgtacttgtctgggctcctatattcacaatacaagctgttgtcaaaccattcccaaaaacggccgatagaccttcttggtggacaactgctgagttaaagtatagctctcccaacacaatagttagcatttcctttatttctgataatatcatgaagccaaaatcagaatacgagttcacatcgatcaagaatatatttagattgaactgtgaaaaagggctggaatacgcataacaagcttaccgcgggtgtcaaatgtttctgggacaacaataacagcatgaaaagagaatctctccttgtgagttatatgaagtttctctaataaaatccagtccaagatagcagttaagtcctcacaaacctgaacaaaaaaaaagaagtatcaactcagtagccagaaaatcccttctacaaagacaggttggaagaaatattggagctatacatacccgttgcgctgaataatgtggcgaaacattgaagtgacctctccgaataggatggtataaacaatatggctcttttggcgatattttcaaagcttcttcaccaaaaatcattttcctatacttgcgtttactctcactagtatctttagagtcagtaacatcaggaacagcttcagatgcactagcatcacctttatcaggagaagtttctgcacaattgatatataacaagtataaacattgaaacccagcataaacatgtataaaaattggggaggatccaaataaaaaccattccagtaaattttactcaactatacgtaacaaatacaaatcctactacgacagggagggaagttgaagcacaagaataatgaattagaatgacacctgctggtgaggcaagagaaattttctcatcctcatacacatcagtccaagtaaagactgaatctttctttatcgtactcgcttgattgtatccgtcgatcctccccatctgcataaactttcagaggtttgtaagcaaagaaaaaaacaagaacaatcagttttcacgcattactcaaattgataaatcaaaaccatactatctgtaacaacatttaagcaaaaacagttagcatcaacaaactattctacttaccttgcgagatgcagagccagaagaagaactttcatccaggaacagtatcttcaacagcgatgccgcctttcagtataaacaaacacaagtaaaagaaatcagtcaacaccaagaagtagattcaattgaaagaagcagcaaagtgaaacacttacagaattataagctctctcacggtcaacatgttgattagtagtgacctcagtgttaagcatctagaatatacaaagaacacacctttacaattcattcaaaagaaaacaaagtaaatcaaaacaaaaattggacaaaacctgatcaacaacagttggtttcccagattgtgtaatgtatcttgcaatacaattaggaacattgaaaggtttctcatccatagccaatcctactcttacattagcagaccctaaaattaaacccaacagcaatcagattccataaaccctaaagcttaaaacccttaattcgaattgaaatttcgaattgagagagaggaatcacctaagttgatgacaacgagattagctcctcgttcagacaaaatctgagtgggggcaacagttttcaagtaatcctgccacgagagatgagaattggattttggttttgccatgaaaatggtgagtgaacctggaaaaaaagagaaaaagattataccattggaagcacaattccttcgctaagttcttcgctggagcaatttgtagaattagggttttgttgtgatacataaaagcttggatcaaagagatagcaaacctaataatctaaaatagataaagtggatttcagattttgtggactgaagattgattggagcaagaagagagagcgggtaactcaaaggtttgaactgagaaagcccaaataacccgcgcgcggcccgtcgtagccttggaaatttcgtcggaggtccgctttccgcttccagaagttttcttaaaagttttcgtaagcccgctgcaatggcgcttatgaaaactttactttgttagaatcttaagtttatgattatgttcgtttgcctatcgctggcaactgaaaccagcgaaagcgatatgtttcgcaaagttgtgattccgttttaaagtatagtggaaaaagtaggatatataagataaaattgctttcaagatcttcttctataatgagactcaaaactaatgtagtgattttggtatttgtgttgatactaacgattcctgatttgaaaagtgcggtgagaacaaataaacagataagataaaatttcttccgagatttttttctataaaaaacttcaaaagtaatgtagtgatttggtatatatgtggatacttatcttcgtattttatatttaacgattcttgatttcaaatgtgcgatgagataaataaaccgataaggattcctgtatggtgagttattctctgatccaattctctgtctggtgaatgaggagtgtagttgccatattaaccatcgtatgatatatggtttggtacttagaagcatctaatagtttcatccaatcatgatatgttttcttaccttaaaagattttttaaatttatgggtatctgagtggtgtggtagtttgttggtttggagtaatgatgcaagatccgtatttcttggttttggtctgaaatgttaacaatgtagtttattaactgtttgttgtaacattagtctttaattctttcgcagaaaatggaaccacgccacacaagttacagaagctgagtgcttgtgtaccatctgtggaaaatggaataacattaggtgcaccccgaactcctccaatg

SEQ ID NO: 2582 - DNA, 3000 bp, Unknown
  misc_feature (1)..( 3000): cDNA_ID_2163768_gDNA_ID_1620561_Annot_ID_160619 3000 nt of promoter + ATG
cgttaacacttcagagactatattttcaagagaggaacacaaaaccttgcactgttgaaaactatttagaggattgataaagctgtaaccaaattctcatcaggattccacgagcatatatatatatatgtacagagtaacaaatatatcattttgagagaaacacacacgaagacaccttaactcactgtaagtcctctaataatagttaacacatgcctaagtattacaaaaccacagaaactgtctactatagtaagcagggcaggacagtaacagattgatcagttaataagcaatatattattgtaacatgaccatatactgatgaatacacacgaatctaaagagaataaaggtttaccgtttcagtcgcaggaggtagccattgagagaggagacagcaacaacaagcttatcaaaagacaagaccaccacttcactgtgtattatagaattcagtatcaagaccacaaggcttctttgcttgatatcttgttctatcattaaagggtaattctcatcagtaaaaaagcacttagtgaaagtaatttcccaaaagtctctcctacgcatttcatcgtacaccttcgctgcattgatcattagagtaaccaaaaccaaaattgctctctcccatttagtgtgaaaaccaatctctcttcaccaaatttgcttctgagtgaggaattcgatcatttgactaagatcattgaacctaactgaagttggtataatacacccgtaaacaagaagttacaagatgtccggaaacgattcaagtccatggtttgaaacttgaagtaagagaccgatcttttaagtcaaatttatgaaagatttaacctttaggatagaaatgattgtatttactaaaattatacacaacattattaggcatggagctaggattggctagtgatcattggtttattcaggatttggtacaatagtattcctgagaaactcgagactatatactctatggttataacggaaagattaaagatctgtgatgctaactttcttccgtctccacgcccagtaacacacaaagagccctactctttctttttccattctctgtaatatacaaactttatccactaatgttgatgatgcaagcagggaatcaaaattgcgtgcagaacaaaatgccacacatatccttgtccttataacacaacatggtgtcaaacaacaatcaacttctctataaacttactctacttacatcttcctcattcattcttttcccccacccatgcagagctttgtgggtgttcatattatgggcgtgtataacatatttgatccctgctcataaactttggggagccatggactgctgtgtcggtcttctgctgcaaagtggcgttgtgcgagggatagttcttctcctcagggattgtagcgtaggaatatagtcatagctaaaatggaactacataaggaagagctgtgatatccgcagactctattctgaaagcttggttccagacctgcaaggattcgccagaatctggaggatctgttctcgccttttttaatttgatacccgactgaccaagtagccattcttggtcatcatcaatctctggcaacagctcccttgtaggtacatggagtatctgattgagatactttaggtcaggatgaggcggctttgcggatggttcaccattttccttgactttcactttcattgttgcagccaaagggcttggtggacagactttatgcttttttccagagacagtaaaaccattaattctaacttctttaacttgtggcttgcaagttgttccttgcacctcagaagcaggcattggaggagttcggggtgcacctaatgttattccattttccacagatggtacacaagcactcagcttctgtaacttgtgtggcgtggttccattttctgcgaaagaattaaagactaatgttacaacaaacagttaataaactacattgttaacatttcagaccaaaaccaagaaatacggatcttgcatcattactccaaaccaacaaactaccacaccactcagatacccataaatttaaaaaatcttttaaggtaagaaaacatatcatgattggatgaaactattagatgcttctaagtaccaaaccatatatcatacgatggttaatatggcaactacactcctcattcaccagacagagaattggatcagagaataactcaccatacaggaatccttatcggtttatttatctcatcgcacatttgaaatcaagaatcgttaaatataaaatacgaagataagtatccacatatataccaaatcactacattacttttgaagttttttatagaaaaaaatctcggaagaaattttatcttatctgtttatttgttctcaccgcacttttcaaatcaggaatcgttagtatcaacacaaataccaaaatcactacattagttttgagtctcattatagaagaagatcttgaaagcaattttatcttatatatcctactttttccactatactttaaaacggaatcacaactttgcgaaacatatcgctttcgctggtttcagttgccagcgataggcaaacgaacataatcataaacttaagattctaacaaagtaaagttttcataagcgccattgcagcgggcttacgaaaacttttaagaaaacttctggaagcggaaagcggacctccgacgaaatttccaaggctacgacgggccgcgcgcgggttatttgggctttctcagttcaaacctttgagttacccgctctctcttcttgctccaatcaatcttcagtccacaaaatctgaaatccactttatctattttagattattaggtttgctatctctttgatccaagcttttatgtatcacaacaaaaccctaattctacaaattgctccagcgaagaacttagcgaaggaattgtgcttccaatggtataatctttttctctttttttccaggttcactcaccattttc

SEQ ID NO: 2583 - DNA, 3000 bp, Unknown
  misc_feature (1)..( 3000): cDNA_ID_2163750_gDNA_ID_1620561_Annot_ID_160615 3000 nt of promoter + ATG
caatatttccatgcgtgattttgtattttatgtgataacattcttgctagccgatttggctagcttttggactaatgtcattgtctacttctgactcttacggctcaaaaactaagcttttgtagtttgaaaaagataacttatagtttgacttgttagctacaagcctagaatgctgttttaagcatgaagtagaaaacattttttcttattggtacaatggttgaggaactctatagcgggtacaaagaaaatgtagcgtaacatatgcaaaacgcacaaatatatattttgcactcggacaagtattttcttcatatcatgtaattagtcaaatacgacttttcatcaaaaatgctcgcaagaaatcctgcagtgtactctggtatggtgatatctttgtacttagcagggttttcatcagacaaaagatctttaatcggtccataaaccgtggaatttggagaaagactcgagctaaagaagcacgcaactgaaatccgcggtctatctttgttcggtcgtaccctatgctccacgctcaagaacttatcgttcgttatcagctgcaaaacaaaatgtctcaaattaattggtaaagaatctgtttttttagttaaaagaatgcatcaactggacttgcctgcatgaaatcaccaatgttgacaacaagagctccaggtacaggagggacatcgacccaataatcttcatgaagaacttgaagaccaccgatttggtcttgaagaagaagcgtgaggaaagagttgtcggtgtgtttacttatacctaaagttaggtcaggttgtgggcaaggtggatagtaatggcagagcataaacaaacccttaagacaatcaatcctcttaagtgtctcagagtctaaacctaaagcttctgagagaagttggaagagcacagctcctaattccattacatgcttcgtgtattcgatcaccgcactcctaaaatcatcatattaagaattaaaacactagaaaaggaaattgtttacttgaattaaaattgagataataaaatcgtggaatcatttgaactaagtaaatttatgttaaacaatcacataatgctaaaaagttttttttttggttatatatgaaaccaaattgtttagaaatagcataaacacaacaaatagtataatactattaatcactatatataacatgtacctgcaagctagtgggatttcctctggattcggaggatctggagcaatataacaagtgaaagagtctctccaattcaaaggagaagaatgatagagatcgaaatcattgttataaacaaatctcttgttgttatcggtaggaagatattggttcttgacaactggatcttgttcatgaaaccttcgaacactctctttgatctcttcaagaacagttaaaggaacatcatgattgatcacttggaaaaatccccaattctcagctgcgtctttgatcttcgaaatgacaacgtttcttgaagatgtgttacgatctccgaggtcgatgattgggacggtgaggtttaagccggagatatcagaaggtctgttgtttgataaaatagaagaagggacatgaaacatgctaggaacttcggttatttcggcatcgacgagtcctttcactcctgtcttcgtcgagataaaagtcgtgagatcgtttaaacgatcgattttttcagaattctctgtcatgtttttttctttttttctttctttcaagattctgttttttgttgttgttctgaagactcaagaagaagaggaagattcaatttaagacggaactaaagataagtgtcgaagtttgtggtgtctgtgattgagagcgacgtgttgtgttgtgcaaggaattcaaagtattaaaattgacttttaagatattccgacagaaacaaaaacagaattgataagagggagattcagtttaagacagaactaaagataagtgtccaagtttgtggtgtctgtgattgatagcgacgtgttgtgttgtgcaaggaattcaaagtatcaaaattgagtgttgtgcaaggaatttaaagtatttaaattgacttttaagagattccgacagaaacaaaaacagaattgaagactagaagattgaaaataaattaaaagaaaaagaaccttaaaaagaaaacaataaaagtggagatgcggggtatcgatccccgtgcctctcgcatgctaagcgagcgctctaccatctgagctacatccccatgaattgaacgagtagcaattatataatatctaacgcgttttgtaaagtatagtagatcaatttttcatgtatcttatattcttattcagtaccgcctttgccttgttggttgtaccaagtaaccaacatttgtatggatctttaaatacttaatgattaaaagatgtttaattattattattttgttatatagcttagtgctctaaaatgttcatgaaaaccaacttgaaaaatattatgatagctagtttgtattcaatttaatttgtgtttgtaaattatttttcattttctttactattaattttgttttatttaccattttattttacgggaccaaatccgactacctacgaatgttagtaaatccggttccgacaaaattacacatatataaactttttttttctgaaatatggttctcatatttaaaccaagattctcaagttaaaaatattgtcctaatatttaatccaagattcccaagctaaaaatatggttcttttgtcgaaagtaaaaaagtacatattcttctcggagaaatgaatcgatcgtgtaaaatatagtttctcgttgggagttaaaatttaataaatttgataatgtttttttttcttttttttgaaatgttaataaataaacctaaaccaatagaaccgcagtttttcctcctcgccgaaacgaagaagattctccttctctccgtcagacaaatctacgaacaagcgagcctgagcttaagaccaaactcatagag

SEQ ID NO: 2584 - DNA, 3000 bp, Unknown
  misc_feature (1)..( 3000): cDNA_ID_2163695_gDNA_ID_1620561_Annot_ID_160597 3000 nt of promoter + ATG
gactatattctgatcatcttttgcgggtcttgaagattcctacaattaatgatgcctaagttatcaagactcaagacacatcacaactttcctagtatggccgattctctcattcaattttcaacggccatattttcatttattgttgcgatttctttctttattttagcatatagacgttgcacttgaacccctatataacatagtcagacgtttcgggttcctatatgcgagccgcaagagatgaccaagacggacgaaggatacccacatggctttggagtcaagaactcactggtcatgcttggtgtcattaactttgtcggtattctcttcaccttccttgttccttagcccaagggcagagccggccatgagcacaagcgggccaagcccatgcttgcagccgattattcaataattacattttcggcctccaaatactgaagttgttctatggtccaatgttcgcgtcagggaaaacttggtccttgttttgtttaacttcttaagttcgaatctcccaaatgccgatattattacagtttttcttcttccgtttttgtcaaaaaaaaattagttactaaattataaataattaacctcaattgcaattaatcttttggttccttttcttcctctagcattgtgtggtttattggtccttaaactgtcagctttttagttcaaatccatccattttgtctattttgtctctgtatctcatacttattctataattcattagtggtttaactgtaacaaattcatgttttattctgataagttttttttctttacttcttaatcattgtttcttcataaaaacaacatatgaaggatatgatagaaatttgactaaaaaaaacttgatggatgagtctacgtacatatataaatgcaaggaatatcatatataaaaattgcattgatctttgatgctttaatacttttagtgctttttttaaacataaccaattttatattttgtttgatcacacttttttatactatgaacatgtgtaaagaggctttttttatattatgaacatgtgtaaaatatcctctcttttttttttactataagcatgtgttaagtggccttttctttttctttgcttgtagccttgtaaataataggaatgcccaagggcaagtcccttgaagagctctccggtgaggctgaggttgagaaatgattacgccataatattttcaaattcttaattggttcgatgaattacatcttctattacgatttactttatttttgcgatgcgtaatgtgatatttcatgttcgtaatggtggatctctacatttatttttttgtgtgacaaaatgtaatcaatcgatatttagtggtcatttatgatatttatttgactgcttatctctactacacagctactatcaaattcctaatctttgttgttattatggttatatttaatttatgcatgtaatacctctcgtataacaacaaaacattcaaaccatttaaaacattaacgtgtacatatcgaagtccagaaaacccgtcatttaaaacaaatacaatcctcacatttatatatatatatggtctgagctggattggttgatattaaatccttatttatgtatatgtaatggcaactaagtccactaaggcatgaattatctgttaaaatgaatttatatgcttatgttctcgcgaatatcctatgtttttcgaatatgcttttttaaaataatgattttgactttgctaaatgataattaatcttcatgactatatgtatcctgattgtcactcctcaaatgtcaactattagagttgaataactcgactgcaaaaaacaaaacaaagaaaacgaggaagatggagaaatttaaaacctttcgacttatattggctctaaaataacttgtagttcagatttacacgaaacaataaataaatgattagagcttgcaactctccttatttaattttagaaatgcattttatattgcgaataatataattgcaaagttggaatcaaacataaatatatataactggtcaacgattacaagtaatgccaacaagattaactacaaactgaattcgtgtctacactacttctttttgattttattttattctttttttgtgtgtgtacaacgtctaaattagctacttctatttatagaaatttacatggaatgcatatctatagtaatgctcatatatcaatctgtctccatatagtaattgagatggttaaacagaaatttttgctaaaacttcgtttcctgcttcaaaataataatcagaatccgtaactatcatacaataaaaaaatcatcccatctcacgtatcctagagagatttattgtataaggtgttcatattctggaaggcgtatcgtccagcttagatgatgttttatacttttcaatataaaatagactgtaaataatattttacttcagaaacaaatggtgttcaaaaatcttaaacatcaactataaacatacggagggagtattgatgactaaaattctaaaatccaaaatgaaattacaaaataaataataactatgaagaaagaggcgatcacgttgcttacatatctttccttttcaaaaagcatttttttattacatttaacgtgcttctctttcttcttctctataaatggccagcataattgttcatttctaatgaccacatatagtctctcctcaactctccagagaagttcttaatttctcctgccaagctgattaaggtaatattactttcctttgtcgtctatatttaatttgtgtatataccatttcaagttgagttttcttgttcataattccaaagatatcaagttttgtttcaaaattttggccattgagaggtcaaatgctctgttccatgatattttttaagtctccaaatgaaaatatttcataagcgagaaataatgacatgaaatcttggattctttgcgttgtatgattatagagctctaggaaatg

SEQ ID NO: 2585 - DNA, 3000 bp, Unknown
  misc_feature (1)..( 3000): cDNA_ID_3068745_gDNA_ID_1620561_Annot_ID_160610 3000 nt of promoter + ATG
cccttggaccagaataattattttcttgtaaatgtgtttcgtaaattgaactttttaaactttagttgtggaaacaggtgaaacactaaaacacatcattaaaggtaaaaacaaacactataacaccataacgtgtaagaggcatattactcgtaccttagcaaaaagtttttttgccttttattggctgcttcggcgtccgagtcgtggatcgggatgtcttgtccgtacatatgcaacatgtttctttccttttgtttggtcgaaataagaaaacaaatctttgagttcctttccttttcattacaatacaatgattataagtgtttgtttgtaatcgaaaactttcatgccaaaaccaaaataatctcaaagatttaaatttaaaagataccaattcttacaaaaattttggtttcaagttaaacccaagtagtgttcgtctactagttgaaaatttattataacagaggataaattattatgatttcgaaattctgattatgatagtaaaatcagtaatgcccacctaaatacgtgagtatacgatattaatgtaaattttattgatgatatttaaattttaaatagtttagtcatccacacattattttggaattaatttagtaatttttgttttaaattaaataatttttgttaataaacatcaaaatggcaaaaactttttctctatttactgcttgataccatcttagtataaaaatgtaagatcgatagatctgacatgtatcacaataatgtgagttactaactgtgaaaaaatactttatataataagattaagaaatcatatgctataactaatttgggagactgcttcatatattcaaaaaccaatgcaatggaatggttacgtaatattttgattgatttgaccaattaaatgattaatgtaactgattatattaattaattttaatatgaaatattttatttttccagaaaaaatattggaataagtattaatttgcatattcatattttatttaatttaagtatttatttattagatcatataatacatacaaacaaaagaaacatataattctttatattttgttaaacgtaataaaaaatgtcatatgtaaggaattatttatatttacagtaatatgatccaaaatagttagtaataaaaaataaaataaaaagttagtttgattatcaacatgagtggtggcagagctgaataacaattgtggtgatatccctttattattaaaagggaagtacaaattgaaattttgtctaatttggcctcaattttgatttcaattttggattttgttctttgctattcaaaatcattaatggtaatttggtcttaacaatctcctaaactttatatgatccgattcaatctaaaccgttcaataaaattaattcccttcaatctaaaccgttcaacgaaaataaggaatctatgttgtttttgaaatcaaaatatgatcacattccatccctaaaaacactatattcaatcacgaaatcaataatcaataatatccaaatcatatattacgattcttcactaatcattagaaatttatatttataagtttaggatatcaaatttattcaaatatttagtataagaaccaaataaaccgattgctcgcggtttagttaaatcctagtgtaaacatatttacaatgtcagaggatctaataatatttattgaactaacataaaggtaatactagtagtcgtactttagaattattttgatcatataatgaaatgacagaatgccgtttctcatgcatcataaggggagatgaatctacaaaaccaaaagaaaataataaaactcatattaaaacattcatttgtatggaaatgaaaaataaaaccattatgtggatgagagtgaatatgaatcagaatctcttttgatgagtgtgtgtgtgagagtgagtatgagtgctatcttgagattggggtcaccaaaacatacactgcaactcttatagcagtcttcattcacgaaccgaaacaaatataataacaaacagaatttgcaaatgtatagccgtcttgggtcccgcataggtcgactggtgattttatgaaattaaaatcatatctaaccctttaaatacgtggttgccgcctaaacactttagaaatttctacgttcacttttttcattattgaaaaactattaaaacgtaagttaaatggtaaaagatttcacgtgttctaaaagagttcttttatgtaaagcatcaaatttgtacatttatatatttctaccaccaaaaacatttattttcaatggtccgataagccgtctagcttaatttacactaattatattgtaaaatcagtttcttttcaccatttaaaacatctacaatctgaaaagaaacgataatagttataattgtagaaaaaacacaaaatacacaattgttcaaactaattaaaaataatttgtaaacgtaataacaattagtgtcatatttggatttatgcgattctaagaactctttttgtgcacccaatttttttttgttattctctttcactgtaaaaaaaaaacttctcttaactctatagaaccaaacctaagagtttacaaaaagaagacatagcaactaaaaatttggtagctcccaggcacgacactcgatgcaggccgttagaagaaaagaattttcaaaaaaccggatcttacctaccattacatcctaaaaacagtaagaactaacgatttttacccaataatggtacgaaccaacggtccgacgcctctctccggtgactttccttccttttcaccggccaaatcctccctgaagagctgctctgtaaccacacttcttccttccggtagtctctctactccctctctgtaacttgctttgtaacccttttcaaatttggtaaacctgtgtaaccctttgaaactttaaccaaagactggaaaccctaacctgcaacccaaccccttaaccccttactactgttgcacc

SEQ ID NO: 2586 - DNA, 3000 bp, Unknown
  misc_feature (1)..( 3000): cDNA_ID_2163704_gDNA_ID_1620561_Annot_ID_160601 3000 nt of promoter + ATG
ctccttgtaaatcattttatgccaattacttatgctttaaaaacgattgtaaatcatgttttacccttttataagcttttaaaatcccttgtaaatcattcattgccacttacttatgcttaaaaaacgattgtaaaccatgctaaccctttttaaatcccttgtaaatcattgtatgtcacttacttatgctttaaaaacgattgtaaatcatgttttacctttttataagtttttaaaatcccttgtaaatcatttaatgccacttacttatgcttaaaaaacgattgtaaatcttgtaaaactattataaaaagctttaaaaagatttacaaaggttttaaaaggggttttaaagtatttacctatgtttttaaagactttataaaaattttaagagtttttaaaatgatttacaatggtttttagcaactaccaaaacttttaaaaaatttacaaagatttttaaaagcatttttttggctgggaaaaaaattttacgagaaaacatttttggcgggaaattttttttttggcgggaaaaaaagtttggcggaaattttttgtttggcgggaaaaataaattttggtacatgttattattaaatgagggtaatttggtcattctgttcaatagaagggatatttttaaaaataaacaatataaaatggtattgttacaaaagggtagtaaaaaaagggtagttttgcaaatctccctcgagaatttgcaatttctctctcatagcataacatgtcttttttttagtaaatttcaagatgacaaaaagaaaaaaaaaacataaagaaacaaattgaaagcaacatctatttttctgacttgtaaaaatgtggtgttactagcaaatatcaaatttttgtatctataaactagattttaacccgcggtatactaggagaacgatttattttttaaagttaatatatatacaagtttacaaattgaatatatttataaaaaaaataaattttttagtttacaattattattaggtaacatcccgccaaatctgttccatcaaaaagcttattaattttattaatgttaaccttagttatgatatgattctaaatcattgtctagatattttagccaatgttaggacgttgaacccacatagttttcgtcaattgaataatatatgttcgttttataaatttcgaatcacaatttatgcagaaaatgttttgaaatttttcttaactttacatattatacaataaaaaatcaaacaaagatgataggaaattcatagttttaaatcttaatcaaatcttctaaatatcaatattgttaaatatagaagtaatgagtataagagttgggttttatttgaaccaacccaactaagatttaatgaacatcataaactaatgggtctggtatcaaatgtaatcagatgcattttaacccacaatcaaaaggtgactgcaaaaatactatataagattcatagaagtagatcgtctatataggcctgaaaaatatcagttttaaattaaattatttagagatcttattttgttgggcttaaatactggagaataagactactttagtaatcaaaatatttgggccatgtaactaatgcaaaccaaaatcattattgacaaaagtcattgcatcaaatgattttcttaccaaaatgtctttaaaatatatatatatatatatatatatatatgtaccttcgtacggtacggttgcttttatataaaaaggtgttgtacggttgcattgacttttgatcgtaaatactatatagtccggagactcaaatgcaaaccactttctctatttttttggacggaagttatgttaacctaaattatctaaaatattacacaaataatttttaaacagtttaaaatggcatataattatgttaatagaaatttgacttttagtacggagatacattagctgagaagtttgacctcaccttatttagtgggaaccttgttacttttgaattagtttgaacaatatatctctaattcatataaagtattttgaaatataaagctttataaatataacatattttttggtgggtaatgcttctttttttctgtggcttataactacgtggagatcttatcttctgtccgcttatattagtatttcaccatagtgattttaataaaaatcagattaaacaatatataacagctattttagtttacaggtttaaacttttattttagttctttgattttttttttctttcagaaaatggtggacatcttctaaagtttgttttattaatctaggtagaaactttcaaacaaaagacgaaaacagaaaagttgactttagtacggaaatacatgatatgagataactgataagataacttgttagatggtttccactctcataaacaatataaaaaaattattaacgatagtgaactcgatttttagtaactctatgaaaatcttcttgtgagatcataacattttagaagactaggcttttcgtgtaatatgatctgtagaccattccaatgttatcatatgcagaacagcaacacaatgaaataaattaagagatggaaaataaattaagatcaaataaaatgtggatatacccttaagattccggagacaatacttctccagttctcctctcgtctataaatttctgccgtctcagccaacataatcacaaccaccacctctctcaataattctctctcttgtccttcacaacctgttactacttaggtgaatatcatctacatgtttattttgtcttaatccaaattcacatttaattttgttttcactctttttatcatgtatacttttttaattagctagccgagattatatatgttaaaactacctctatttctaacacacccaagcaatatatcatctttccaatatttacgaaagaagaaatttctatacaaatattaacctttactttgtgcaaaataggagagaagaaaaacaaaaagactgactgag

SEQ ID NO: 2587 - DNA, 3000 bp, Unknown
  misc_feature (1)..( 3000): cDNA_ID_2163821_gDNA_ID_1620562_Annot_ID_160628 3000 nt of promoter + ATG
caaaatcaaacctcatagagttcatcagagatgagtcccatgccatgagtgaagggaacaagagcattaccatcaaacacctcatcggtaacaccattacccaccaaatatccctataccacatataagtccaattttaacattcaagtataggaagaaggtttctctttctctcacatatacaaagagacaattaggtaactacattagtacccttagtcttaatggtatttatttaacaccaaaaccataagactttgaatccgaaacatagcctcaaacattagtcgtaccttgaagttgataaccggctttgtcacattcttgcttgttttgtttgttctcattgcatttttatttcctacaacataacaagaaaacgatgagaaaaattggagataacgttattttctaattctgccaatatatgaaaaggagctaaagatgatgttgagagagataatactgacctttgacaacctcggccgcaagagttggcacatagataccagcatatgattctcctgatataaagaacggatttgactgaaactccggaaacattttaaaccactgatgtggatgtaatagttagtgtcttgaatcacacacaacacaaggaaatcttttttaaaaacttttacattcttatttcacctcgagaaggaatgtgtgagtatcagacgcggtttttgtatcatcagttgtataatcggcgttgtcatttgagtaagagaatcccacaccaactggagagtcaaggtatatgatgttggacacctgaaaacaaaacacattcttaaaagttatagatcaatttcttttgaagaaaatgtttgaaaataagtcaatgttgtttttcttttcaaccttggaccaactataaggattgagatgcaaaagatgtgagttcttcttttttggttcgaaattgaatggacctgcaacagtattgaacagtatcatatgtttagattatctttgcttatatacaattgccaacataaaagagcattgtatgagaccctatttcgagttatatatgaatccttttctcgacacaagaaaaggtatataaagcttaccgtgctcgtagacaaatccatccatgctagagcaacctggaccaccattaagccaaagcacaactggatctaccgaagcatttctctcagattccacaaagtaataccatagattcttattacgatgtttatctattgccacataccttagatcacacaccaaattacataagaaaaagagagattaaaaaatattttgaagaaagtctataataaaactttatgatagatgagaatttcacaaaaaaatgtaaaacacatatgaaatttacccggcatagtgtttagatggaaaagtgccgttgaaaccaggaagattggtaatgagagcagattttggagctgactttgttattgtaaaacacaaagacaataatatcgaagcaatgatagcttctactaaccgacccattttgatgaagaacgttgagctacaattactagcaaactcttattattataagaattttggtaatgtttaacaaaaatagatacggaaacaaatcttgggaatctattgaaatttgtatggtaaaatccaatctagacttaaaatgaaaatcatacttaaaaagaaacatggaaagaataaatttttattcttactactataatagagaaaatgttattacctgtaaagaatatgatccagttgtatatacattattttgaatgacataatacatttaaagatcttaaatttgcattgttaaattaaaataaaatgattataaatacaaaaaaattactatgttatcttttcaaatataaaaatatttctataatattattgtaagacatttcatatttttctacattatatttttaagtaaaattatattgtacattttaacatatagatatttaatttatacaatatattatattcagaattacatatatcgaatgtagttaagatttatttgcaaaacttgggtagaataatatctttgttagataggtttcataaagattgaaactgtaattaaaaaatagattaaggatttttggctaaaacgctaacaaaaatgtatatataaatgccaacatgtaaaaaatgagatattcttcataaatgaccatgaagaggcgcaaagagtaattttaaaggcagtagaagatgttaagaagtggcaagatactttccgggccaatttttttttttgtaagtatgttgttaattagctcatatactctctttttctaactatgttgttaaaaggacccaaagttttatattatatatatatgtaggtatatgattttgtaaaaaaagacaattagtataaaagagtccatttttaaatatatgtattgggactccggatccattgaactagcactgtgtgcagatgctattgcaaaaatttgtctcctcttgtggtttgtactttgcttgattagaatgttggtcatcacctttgttaagaccattggtggatgcttagaaaccatgtattggttttttaagtattaatataaggatgctaaagtaagtatgtttgacggggaaaaaaaagatgccaacatgtaccaaacaaaacaacaatctttcacccaaattcatccaaattcactcacacaaaactaaggcctacacaaaaccaacaatgctagaaagagtcatcgacgatcacgtcgccaaccaatctcagccgttcaattttcttgcacatcacttgtcaatcatgcctaaacaaaccttaacaaatctttcccctttatatatttccaaattccaattttctatattatcgcttcttcctcctcctgcttcttcaactccaaacctcaccctctcaatttccctccttcgccggtccacggcgtcatttcacggtggcgcttcacctctctccgtcacctactctcctaaaaatccaatctttacaaaatccagaccaatatagaaatg

SEQ ID NO: 2588 - DNA, 3000 bp, Unknown
  misc_feature (1)..( 3000): cDNA_ID_3068804_gDNA_ID_1620562_Annot_ID_160635 3000 nt of promoter + ATG
ataccccggcttatttcgttagacccatttagatttgaaattggaatttttccccctaatttgaaaactttagtctgtttaaacaaaaattcaaattacaagttacatattgcgttcgaatcacatgggtaaaaatgatctatttgtttaattaatatgactcttattattagtcaattaccctgtttagtgtgatttccggtttgttttgtaaaccggtgtgttgttaatcctccaattattggctaccgtaattttaattcactcccttaaatttcttgtattctgtcagcaccaatttttttttttattgtattctgtttttaacactctgtttctatccagaatcaataggaactttcctaatatgaataattgtagtgttttattgatttgcatatgaactagtactacgtacaagtgctaaattagagagaacttgacttaatctctaaaaaagaacatatgattgtagatatgtctattgaataaacaaattgctatatgaggggaatagtgtggtcttatttaaaagattgatacaatatacataggaaacaaactttgtaaataattagttctacgaagaagaaagaccagacgttatttaaaccaattatattcctcgtggttcatagtttctcactaactaaatgccatctattttggcaatccatatgggtgtctgattacatcaaattctcatagctcctctgtatactctccgtaaatgatgaaaatactctttctgaccatgcctcaagtgaccaagtccaatcaacaatcacagaagaaagcaacagtcagaggttttcggaatcgatggaaacgtttctgaaaagagctgaggaagagatcatcagagtacaagctcaagagagcgtagcgttatcacttgtaaaagaaatcacagagtatttccatggaaactcggctaaagaagaagcgcatccgtttagaatattcttggtggttagagacttccttggagtagtagacagagtctgcaaagaagtagggatgataaacgaaagaacaatggttagttctgctcataagtttcctgttccagtgaatccaatgatgccacaacctcttcctggactcgttggacgaaaacaatcttcttcttcgtctttatcagcggccagcttcaatgtcaaaccttgctacattcttgttgttgtcataaccacggctactggtatggccttgtgctgacacgatgttactaccaagcaagtgtacattctcttcaggatactgatccaaccaattatgtttggtcgttttggctctcaacgtttctagctctgcagctacttctatcatccttggcctttcctctccctttagtcttgtacattcaacagcaactcttgcagcttcatggatttccctctggttttcctcgttcaacacttggtcgtcaataatctcatgcaacctattctctttcgtggccaaaacaaagtaactcaccaaatgttttgaagtctctggcctttcaaagcacaatgccttttgacctgatatcagttccatgaggactaccccaaagctataaacatcgctcttttcgttcagaagccatgtggtatagtattctgggtctaaatatccgagagtgccttgcaccatagtggtgagctgttctttatccattggcttcaactttgaagcgccaaagtcagctacttttgcagttaagttttcatccaagagaatattttcagttttgatatcgcgatggatgattggaatagaagcaccggagtgaagatacgctatagctccagcaacttctattgctatctccaggcggtgttcccatgtaagagaagaaacaaacatggaaccgtgcaagtgatcgaaaagggagccaccggtaatgaattcatagaccaacaagggaacttcagtctctagacagcaacccaagagcttgacaacgttcctgtggttaatttgtgaaagcacgagcacttcgttgatgaactgctctacttggttgttgtctcctagccgagttttctttatagcaacgatggagttgtcaggcaatatccctttgtagactgtccattggcctccttgacccaagattctgctcacatcataaccattagttgcttccttcatgtcttcctccgtaaagattttgaaatcaatgtttgatgaccctgcccccgagagtcgctctatcaacatgccaccgccatttttctcaaagaataattgtcgttggatcttggtgtccttctggtgcttccttatattttttatatagctaatgctacgcacgaggctcaaaatgttggtggtgtttgctgatcacatgatagacaaaaaaagatcataagacccgtagtagttctgcaaaacaaattaatcaaaaacgagtgtagagagcttaccaagaataatcataatccagactaagtacttattctcttctatacatgcaatcacgaaaatagccaccacgaagaaaatagccaccaggtacacaacgtgctgcaacttcatcttcttctacctttctcctctctaaatgtgtttcatctcatcgcttattcgcttcttatagtttgaatacaaacttctgttttgacatgttctcttgactcgtttttgctgacctgttgaattatctgccatactaaaattcaatcaagaccatgtcaatgtaatgcaaggagatcatgtttaagtataccactccatattcccatgttatatatcctaacatcgtttaagcctgcttccattttgccgccgcggtgacttttatttttgcaggactttaaagaccgaccacacgacgatttgtgcttacaaggaatcttcaaatgtgatgaaacgtaaagattcagactactacacgttagataaatttaattatgtcaactacacgttagaaattttcatgcaaatccaccactttcaccaaaaaaaaaaaaaaaaaaaaaaccgtgagaaaaaaaaaaactgaaaatg

SEQ ID NO: 2589 - DNA, 3000 bp, Unknown
  misc_feature (1)..( 3000): cDNA_ID_2163857_gDNA_ID_1620562_Annot_ID_160637 3000 nt of promoter + ATG
tccaacgacaattattctttgagaaaaatggcggtggcatgttgatagagcgactctcgggggcagggtcatcaaacattgatttcaaaatctttacggaggaagacatgaaggaagcaactaatggttatgatgtgagcagaatcttgggtcaaggaggccaatggacagtctacaaagggatattgcctgacaactccatcgttgctataaagaaaactcggctaggagacaacaaccaagtagagcagttcatcaacgaagtgctcgtgctttcacaaattaaccacaggaacgttgtcaagctcttgggttgctgtctagagactgaagttcccttgttggtctatgaattcattaccggtggctcccttttcgatcacttgcacggttccatgtttgtttcttctcttacatgggaacaccgcctggagatagcaatagaagttgctggagctatagcgtatcttcactccggtgcttctattccaatcatccatcgcgatatcaaaactgaaaatattctcttggatgaaaacttaactgcaaaagtagctgactttggcgcttcaaagttgaagccaatggataaagaacagctcaccactatggtgcaaggcactctcggatatttagacccagaatactataccacatggcttctgaacgaaaagagcgatgtttatagctttggggtagtcctcatggaactgatatcaggtcaaaaggcattgtgctttgaaaggccagagacttcaaaacatttggtgagttactttgttttggccacgaaagagaataggttgcatgagattattgacgaccaagtgttgaacgaggaaaaccagagggaaatccatgaagctgcaagagttgctgttgaatgtacaagactaaagggagaggaaaggccaaggatgatagaagtagctgcagagctagaaacgttgagagccaaaacgaccaaacataattggttggatcagtatcctgaagagaatgtacacttgcttggtagtaacatcgtgtcagcacaaggccataccagtagccgtggttatgacaacaacaagaatgtagcaaggtttgacattgaagctggccgctgataaagacgaagaagaagattgttttcgtccaacgagtccaggaagaggttgtggcatcattggattcactggaacaggaaacttatgagcagaactaaccattgttctttcgtttatcatccctacttctttgcagactctgtctactactccaaggaagtctctaaccaccaagaatattctaaacggatgcgcttcttctttagccgagtttccatggaaatactctgtgatttcttttacaagtgataacgctacgctctcttgagcttgtactctgatgatctcttcctcagctcttttcagaaacgtttccatcgattccgaaaacctctgactgttgctttcttctgtgattgttgattggacttggtcacttgaggcatggtcagaaagagtattttcatcatttacggagagtatacagaggagctatgagaatttgatgtaatcagacacccatatggattgccaaaatagatggcatttagttagtgagaaactatgaaccacgaggaatataattggtttaaataacgtctggtctttcttcttcgtagaactaattatttacaaagtttgtttcctatgtatattgtatcaatcttttaaataagaccacactattcccctcatatagcaatttgtttattcaatagacatatctacaatcatatgttcttttttagagattaagtcaagttctctctaatttagcacttgtacgtagtactagttcatatgcaaatcaataaaacactacaattattcatattaggaaagttcctattgattctggatagaaacagagtgttaaaaacagaatacaataaaaaaaaaaattggtgctgacagaatacaagaaatttaagggagtgaattaaaattacggtagccaataattggaggattaacaacacaccggtttacaaaacaaaccggaaatcacactaaacagggtaattgactaataataagagtcatattaattaaacaaatagatcatttttacccatgtgattcgaacgcaatatgtaacttgtaatttgaatttttgtttaaacagactaaagttttcaaattagggggaaaaattccaatttcaaatctaaatgggtctaacgaaataagccggggtatttgagtattttcgtatcaactagccttaaccactaaactacaaatagaatttttctggtttcattcatttcataaccgactcaaaaaaacacttcgtctctacgattcaaatgatcaaattcaacagaatcaacctgtttcggctctaaacggtgatgaatttggcgatgagaacacaattggggaggaaatccttgtcaccgccgtcaaaagaagcatgtgattgaatcgggaaaaaacctccgattacgcaaacaatcaggaatgtaataaacccaggtctgatcgatttcaagtttgtttttgattcatcgattgttgcctttacttcataattctcttccgatttttcagaacagaatcgtgtaattgaatcttgattacaaatccttgtaattacgcaaaataaggttaggaatcacaaacccctttctgtgtatttctttgttgctccgtttatagtaatcaatctcttattgatttagaagaatcagtgaacttcgtagtagtgtgatgatgctgatgatgatcatcttcattttgtgtccgttgattgctagtttttctctggtttcaattcaatcatgtaggttattgaaaaacgttggttacacgtgttttgattaagaaaatctatccatttagaacttcttgtgatgatttttctctgtttagtgattcatttctttggctctagtgttttagttacatgactcttaaagttctttcatcatttgataggttgatagtc

SEQ ID NO: 2590 - DNA, 3000 bp, Unknown
  misc_feature (1)..( 3000): cDNA_ID_3068796_gDNA_ID_1620562_Annot_ID_160641 3000 nt of promoter + ATG
attttctttctctttcgtgaagagatcaatttgaattttttatttctttgtaaaaatatgttgattccagcaggcactgcccatcaataaagcaggtgaagcatttgctttaggccacgcagtataaaaataatctgaaggccacatttcagacttatatgttggtttgttggtttagttgtccattactaagacagttagacagatgtgttgagtaatgcctttcttcagcgatgatggtaatacaataatgcaaactaataatataatattcatgtctctaataagtactatattacaaattaagatcaatttgtcttctcattattcttctctgtatatctagaaatcaccgttgttttattaaaaaaaaaatctacgttaacactaaaattgaacaagaagtatatataatttgagaccgtcctcatcattgtacttgtaagtttacgattatgatataattagtcattagagaacatgaatatgctgaagaactatattagattatttaactttatgtatatagtagaaatatgatatctcatcgtaccaaaaatattcgagaaacaatcaaaacccaaaatccctcttatttcaaacacgtggcgaaatcctgttcgttcataactggcagttagagatgcaaacagaatcaaactgtagggagtaaactgtaaatacttccttttcaaagtaagtgtatttgatgataatggttctctgattagaaaaggctccggctttatcattctcagaccatcatcactaagcagtaagtaagcactataatcgcagaagatagataaaatggaagtagggtttctgggtttgggaatcatgggaaaagccatgtcaatgaatctattgaagaatggattcaaagtcactgtatggaacagaacactctccaaggtaattttttttttttttttgtctttgattgtgttttggtattatggttttctgatttagttttagttgttcagatctgataaagtcggaaactttttgagtaatttaatgcaattttgggaatttttgatgattgtgacagtgtgatgagcttgtggagcatggtgcatcagtatgtgagagtccagctgaagtaatcaagaaatgcaaatacactattgctatgctctctgatccttgtgctgctctttcggtatttgaaatccttttttgcttcttttgtgtgtgttttagcattggtgatgaatgatatgaagtagttgtttgattaggttgttttcgataaaggcggtgttttggagcagatatgtgaaggaaaaggttatatcgatatgtcgactgttgatgcagagacttctttgaagatcaatgaggttgaatcttttgtactttagatgctgatgataagattagaagaaggttgattagtttgattgagctgtgttgcgcattggtaggcaatcaccgggaagggtggtcggttcgtagaaggtccggtttcaggtagcaaaaagccagctgaagatggccaactcattatccttgctgctggtgacaaggtacaactcaaaactgtacttatggattgattgatagatctcaagaactgttttagttggacttagtaggaaggagctctcgatgtgcggctataatccgtttgtgttttaatccttttttgtaaggcactctttgaggaatcaatcccagcttttgatgtcttggggaagagatcgttttacttgggacaagttggaaacggagctaaaatgaagctaatagtgaacatgataatgggaaggtgaatgtcccgtctcttttacaattactaccattagtagtaggaatggaacatggcttcatgatcttattgtttttcgtctgatacagcatgatgaatgcattctctgaggggcttgtattggctgacaagagtggacttagctctgacactcttttggatattctggtgaggtgatcaaacttttgcaagctctgaaataatggtgttggtttgaatcggtttctgctatgggcaggatctgggagcaatgactaacccgatgttcaaggggaaaggaccttcaatgaacaagagtagttacccaccagcatttccattgaaacatcagcagaaagacatgaggctagctcttgctcttggcgatgaaaacgcggtttccatgcctgtagccgcggctgcaaacgaggtcagttagttagttagttactcagagacaataacatattggctctccctcctctagattggtttcttagcttgaatcttaaaatatatgtttcggttctcgacaggcttttaagaaggcgagaagcttgggactaggagatctcgacttctctgctgtgattgaagctgtgaaattctcccgcgaatagcaaactgtttcaaaacatccactcatttggattggctgagatactgaaatcattgttatcttcccaaatagagatttactcatttggccaaacacacattttactccttcaccaaataaaaagtcttaaccacatatccagaaacgttcatagagttgcaaccttacgtttcaactactttatggctagttcactcgatattggtccagaggtagatcaaattgattgaaacagaaccaataaaatagagcaaagtttatttgaagttggtcactgttaaggttatatgaaacaaaggaagcaaaaaagaacccgtagatgagaagatcaaagaaataacattgcatcaagatggtcaagagaaatgttcctatggattatagacaaacgaggagaggaggagaccatttcagtagaaaattggatttcgttggagtgtgaatgtaaaagcccataggcccattaataatataactagtaaagcccattaacatttttcagcccacgaggagttttctagggttttgtcttataagatgtcgcatttaggtcattccgcctcttgcttctcttcactcacaatctcacagcaaagcctctcgttgctagaggaatcaaacaatg

SEQ ID NO: 2591 - DNA, 3000 bp, Unknown
  misc_feature (1)..( 3000): cDNA_ID_2105795_gDNA_ID_1620562_Annot_ID_160643 3000 nt of promoter + ATG
cgagtgaactagccataaagtagttgaaacgtaaggttgcaactctatgaacgtttctggatatgtggttaagactttttatttggtgaaggagtaaaatgtgtgtttggccaaatgagtaaatctctatttgggaagataacaatgatttcagtatctcagccaatccaaatgagtggatgttttgaaacagtttgctattcgcgggagaatttcacagcttcaatcacagcagagaagtcgagatctcctagtcccaagcttctcgccttcttaaaagcctgtcgagaaccgaaacatatattttaagattcaagctaagaaaccaatctagaggagggagagccaatatgttattgtctctgagtaactaactaactaactgacctcgtttgcagccgcggctacaggcatggaaaccgcgttttcatcgccaagagcaagagctagcctcatgtctttctgctgatgtttcaatggaaatgctggtgggtaactactcttgttcattgaaggtcctttccccttgaacatcgggttagtcattgctcccagatcctgcccatagcagaaaccgattcaaaccaacaccattatttcagagcttgcaaaagtttgatcacctcaccagaatatccaaaagagtgtcagagctaagtccactcttgtcagccaatacaagcccctcagagaatgcattcatcatgctgtatcagacgaaaaacaataagatcatgaagccatgttccattcctactactaatggtagtaattgtaaaagagacgggacattcaccttcccattatcatgttcactattagcttcattttagctccgtttccaacttgtcccaagtaaaacgatctcttccccaagacatcaaaagctgggattgattcctcaaagagtgccttacaaaaaaggattaaaacacaaacggattatagccgcacatcgagagctccttcctactaagtccaactaaaacagttcttgagatctatcaatcaatccataagtacagttttgagttgtaccttgtcaccagcagcaaggataatgagttggccatcttcagctggctttttgctacctgaaaccggaccttctacgaaccgaccacccttcccggtgattgcctaccaatgcgcaacacagctcaatcaaactaatcaaccttcttctaatcttatcatcagcatctaaagtacaaaagattcaacctcattgatcttcaaagaagtctctgcatcaacagtcgacatatcgatataaccttttccttcacatatctgctccaaaacaccgcctttatcgaaaacaacctaatcaaacaactacttcatatcattcatcaccaatgctaaaacacacacaaaagaagcaaaaaaggatttcaaataccgaaagagcagcacaaggatcagagagcatagcaatagtgtatttgcatttcttgattacttcagctggactctcacatactgatgcaccatgctccacaagctcatcacactgtcacaatcatcaaaaattcccaaaattgcattaaattactcaaaaagtttccgactttatcagatctgaacaactaaaactaaatcagaaaaccataataccaaaacacaatcaaagacaaaaaaaaaaaaaaaattaccttggagagtgttctgttccatacagtgactttgaatccattcttcaatagattcattgacatggcttttcccatgattcccaaacccagaaaccctacttccattttatctatcttctgcgattatagtgcttacttactgcttagtgatgatggtctgagaatgataaagccggagccttttctaatcagagaaccattatcatcaaatacacttactttgaaaaggaagtatttacagtttactccctacagtttgattctgtttgcatctctaactgccagttatgaacgaacaggatttcgccacgtgtttgaaataagagggattttgggttttgattgtttctcgaatatttttggtacgatgagatatcatatttctactatatacataaagttaaataatctaatatagttcttcagcatattcatgttctctaatgactaattatatcataatcgtaaacttacaagtacaatgatgaggacggtctcaaattatatatacttcttgttcaattttagtgttaacgtagattttttttttaataaaacaacggtgatttctagatatacagagaagaataatgagaagacaaattgatcttaatttgtaatatagtacttattagagacatgaatattatattattagtttgcattattgtattaccatcatcgctgaagaaaggcattactcaacacatctgtctaactgtcttagtaatggacaactaaaccaacaaaccaacatataagtctgaaatgtggccttcagattatttttatactgcgtggcctaaagcaaatgcttcacctgctttattgatgggcagtgcctgctggaatcaacatatttttacaaagaaataaaaaattcaaattgatctcttcacgaaagagaaagaaaataaataatttgaaaatttgaaaaagaaaataaagcttttagaaaaagaaaaaaaatagtaatagtttttaaaatgctatgaattaaataatataaaagatatggatagtataatttcattactttcaagaaaataattgaaacgcagagaaaaaaaaaaaaaaacaagagcccatcgagaatggatcagtaaaaaacctaaggcctatctccagcaagtgcaacttacatacattctcgaataaattctgatccgatcaagaactcataattattgtaacagataaaatcaaatttgagagatctactactaaatctaacttaaagcattgtactttcttttatctcattctcctttgctctgctttcttctggtcaacccccacgagattccttcttatgtgattgtaaagagaagatttttcagag

SEQ ID NO: 2592 - DNA, 3000 bp, Unknown
  misc_feature (1)..( 3000): cDNA_ID_2163880_gDNA_ID_1620562_Annot_ID_160645 3000 nt of promoter + ATG
ttatcagtgggagatctgctaattaatcccacttttgtttttctttttctctttttctttttatacgtgaattctgttttttcttttgattgtgctaaatgaaaccataaagaattcatctaaattggatagaaaattaggacacacataagatgtacatgacacagtcaataacatgatttttatactattaaccatttacattgtaagattttgatgtggctatatatgttcataactagagatgtgcaatctgattttgatgtagagttttttttttccggttgctatcattcttatgcatatatttgatgcttataagtccatttcatatttcctttaatttgtttttatagaggaaaatttcattaatgatttatttcatggactaatacagttttattcgaaagacgagcagataattataacaaaataatcaacgaatcataattaatatcagtcagtcactattattttttaactgtcagagatttcaaacaaaactaatatcaagtacaatcaatcttgatatctcattattatgcatacaaagttacaatgcggttgcaaattcatgagacgtggtcaaagaaaacgatgatgatgaagaagaaataagcaatttgttatgttaatacttagtatcacacgtgtatccatgcacacgacatacaaatcatgacattatcccgaaaaaaaccaaaataaaattgtagtatatgaaataaatgataatgcactaagaaattagagtaatgatgaaagatagaggagaacagcttttgctttataaagcagtttgcttttgtggtttaaaaagtggcttgtctgttgactaatcactgcgtagacaaagatttgatttttgtgtttgtatataagcttagcagttgctcgatccaataatttcttcatcaatcattttttcattgtgcagtagtaaagtaatgaagtactagactcatgtaaaataataatatacgcacatccgattgggaacaacatggtagaaaaaaatatcaaatttccatatatgttaatcgaaagacaaaatgggggaaaatcactattttataacattaagtcgcatcattattaatttcttgatcaacttaactataactattatgtactacatttggtaagttcttttcaaacttttgttttctctaacaattttcttttattttagaccaaatgttaagctctcaatcattatttcttcttttggaatttcgagttttgtagttttctcattttaacttcatttcgatcatatgttttccgtcttatcaagttctaattctaccctctaaagtaccatctaatattccaccgcttaaaatatccaattgacattgtcacattcggaagaaaagaaaaccatccatttggcgaaagcacatgttatattatcaacaaacaacattgataaacgatatttaatttcaaatggttgacaaaacatattttagcacgaatttagagcatagatagaaaaaggatcaaatatcttaatataattaatgaatagttatgaagatattaacatatattaactgtgatgagtgggaataaaaacagagttaaagggagtcattaaaaaagaaaaagaaaagttctaagtcacagactcacagtatatctcatcgacacaacgagtgtcccactattataattttataattcacagtttatttaactttgcgttacatcacaataattttcacactttatcacttcgaggccacttggttattcttcccggaatataaatgctttattaataacagattaatggtgcttagtgcttaccatataaattcacttttcacctgctctaattgattaatagtatgatgtatttttttttatgaaggcttatcttaggtctaattgattatcgtttgttgctttcctacatccgagaacaggttgagtctattaatcctctagacttagaacacaaccaggtcttcgaatccaaatacattacttcaaaaaaaagtctaaagagtaagtaacatatctattgattttataacccaaaaaacatattaattgattttttgtttttagtacatattcgatttggtagcatcatccctttttaaagagcaaggctggtaaatccactagctcacaccattgtccatgtaccagtataactatgcaacattcaatacaacatttcacataattatttattttcaatattaaatcttaagtttttctaaaacagttgattgtctagaaaaatacattttcttcaaagcaaatatacataattgaaattgaaaacagtcgattgccaatgagttgatttaaaagaaaacaaaattatttattaaaccaaaaaaatcgtacatatgtaatatttcatcattgttaaactcatttgtatattttttatgatatagatatattttgttttgtgtctttttttttttcaccaattttgttttgtgtctacgattgtatagtaaaccatctttgcatttttgtaattttaagcactacaatatagttttttttcaataatttattctcatatatgtaaaaaacgaagtcgaattctggtaagagagacgaaattaaataaatggacccatatttgtagataacttaatataaatcaagtttttttttttgtgtgcgcgaagtatataaaccataaaaatcttatagaattctgtttttttatcacatgattgaaaactaaacatttcccgattttgtctctggccttttccagtttacagtctagaggaccattagataaataattggcagacaaatctttctctttctctttccctctttaactctcactcacaaatacttccaaatcaaaatcctctgttccatctttttcttaaaaacctccaaacaaagaatcgaaaaaaagaatatttcttatacaaaagaaataaacctcaaactctgcaccttagagattaatactctcaagaaaaacaagttttgattcggacaaagatg

SEQ ID NO: 2593 - DNA, 3000 bp, Unknown
  misc_feature (1)..( 3000): cDNA_ID_3068788_gDNA_ID_1620562_Annot_ID_160644 3000 nt of promoter + ATG
atctaacttaaagcattgtactttcttttatctcattctcctttgctctgctttcttctggtcaacccccacgagattccttcttatgtgattgtaaagagaagatttttcagagatgggtctcttcgaatcggtgaaatcaatcgattgggaacaagaatcgttcccaacttatcaagatttagggtttttgcctctctttgcagtgttcttccctacaattcgatttctacttgacagattcgtcttcgaggtaatttacttattcatgggattttagatttgttgtttcttcaatcgcatttattgttgtttcaccaaccaacccaaaaaaaaaatattactttcggatttctactttttagttatgagttatgacccttgagagaccaatcattagtcttgtctctctgtatgattctgctgatgtttagattttgtctgaaaataaatgcaatgtatatgaagatattgtttggtaggtgaaagcttacatatttgtttttattggtgtttgtagaaattggcaagtcttgtgatctatggaaggatgagtacgaataagagtgacaacataaaagacaggaagaaaaatagtccaaaagttcgaaaatttaaagaatcagcttggaagtgtatttactatctatcagctgagctacttgctttatctgtcacatataatgaaccttggttttcaaatactctctacttttggattggtcctggagatcagatttggcctgatcaaccaatgaagtaagttgtttcgttatggtcatcgatatcttttgtgatggtcatttgctaaaatatgatactgctatgtgtgcaggatgaagttgaagtttttatatatgtttgctgctggattctacacgtactctatattcgcgttggtgttttgggaaacaagacggtctgatttcggagtttccatgggtcatcatatcacaacgcttgttctcattgtcctctcctatatctgcaggtacgtatattatacacttgtgttgtggaggaaaggatacactgactcttgttttgtttttggatgttgatgatatagattaactcgtgctggttctgttattcttgcacttcatgatgcgagcgatgtgttccttgaaattgggaaaatgtctaaatattgcggagcggaaagtctcgcgagcatttcgtttgttcttttcgcgctgtcttgggtcgttctacgtctcatttactatcctttttggatcctgtggagcacgaggtttgtttaatatccactttagcgtttgttcttgaatgttttttccttgatgtatatatattgtggggttttgatttgcagctatcaaatcattatgactgtggacaaagaaaagcatcctaatggaccaatcttgtactatatgttcaacacacttttgtatttcttgcttgttcttcacatattctggtgggttttgatttaccggatgcttgtgaaacaagtgcaagatcgaggcaagcttagcgaagatgttagatccggtacgcaataaaaactcttattacaatattttgagacaaaaacactctattaataatgttcatgtctttttgcagattctgaaagcgatgatgaacacgaggattaatcgcatgttgggaatattagtagtgcacacgctctatatctcatgaatctgaaccacacggagactaggaatttcaacatcaagtaggatgcattgcagtatttgaacagttggttcatcatcttccagaggatcgtaaccggatcaaaccgttttgaatgaatcggtttctcaatctgaatttttgagtttattgttttctctaaagtttgagcaaattcaagattttgatcaaactgctccacgttctattgttttttcttctataatttttaatttacgcttttgcaataacacaattccttgtatcattatactaatgtcatctcaaaattagctcccttcaacatctatgcaacagactaacaactaaatgaattttcttggggttttttttggttcattgcataatttgataaaatccaataaaatacttggaaaggataaaagaagaataatttttcataaatgaatgaaaaaaaaatcagcatctttaggcgcacaatagtatcgcacgatagcgacgcacaatagtagcgcacgatagcggcacataatagcgacacgcctatgggatttgtttgaggttttagctttctcgctgtcttggccgagaagactgaaaccaattgcaacaaaaagaaagataaaaaaaaacaaaaaatctcttctttgttcatcatcatcgatcgattctactgcaacaaggtacgtctttttcacttccttctctgaacaaaactctaaattttgttgcttttttttttcctgtgtcgtctcgcgctgcgattcttatacatcttggcttcaagtgatactttgcttcccaactcttgaaatgtataaattttgagactttactggagattttgagttgggattgttttcatgttcttaaagattcgagtttcgatctctatatgattcagtagattgtaattttgaatcggatgtctggaaaagaattgattttatagtctcttaggttactttaagtagtactttgcataagatctgtgatttgatgattgttatcttttgttacattgctggtggagtataataagatgagcaagaaccaacagaagtttgcgtttgatttaggttatttagcaactagtcctgttttggtgtgtttctaatctcactcactgggtctctcttatgtggaatataagatatttgatcctacgactgttagtgctttcatgctgggtttataatatggatacaactgaattcctggcattacattttttgttcagaaccaatgaactgtttgtttaggtgtcattgttatctaagtgcttgcatccttcttctgatgtgtgtgtgtcttgatacaggtctgtgagattttgataaaagctaagat

SEQ ID NO: 2594 - DNA, 3000 bp, Unknown
  misc_feature (1)..( 3000): cDNA_ID_3068774_gDNA_ID_1620562_Annot_ID_160651 3000 nt of promoter + ATG
tgagaaagatttcttctccgttgttaaatctagtgaacgcgtcgtttgtcacttctaccgtgagaattggccctgtaaagtaagtttgtggattcttcgtccatgtgatctttgagtttctttagagcttgtgagggattagtaagtaacaatgcttgagttttttgctgctgggcttcgaaaagtttgtcacttgttggtttgatccacaaggtcttcttctccatagctactagacatgttttagcttaagattcaagtttatatatgccttgtggattaatcattgcctgattcttccgtgtcatctctgagtttatttagagcttggaagtggtgtagtaataactaacaatactcttgataagttgtagcaatgctcttgattagtggatgtaatatgatgttgataagatatatgaggcacagaaccaaaagtggtgcttccactagacccgtttttagcctaaggttcaagtttataccttgtagatgtttctgtattgtctgattcttccctgtgatatttgaatttcttagagctttggaagtgatataggaacaatgctcttgtgtgtttgtctctatgaagattatcgctgtcgtgtttcatccgagtgtgcgggattttttgctgctgggtttagcctttcttcaaaaagttattacttgttagttttattgttttggtcttgataagagatgttaggacagacatggtgcttcttgtctatagccactagacctattttagcataaggttaacgaaattctctctacataccttgtggatttgtttacattgcctgatctttcctgtgatcgctgtcatgtttctttggaatgattgatgtttataaatggaaaaatctttgtgcaggtgatggataaacacatgagcatattggcaaagcaacacattgagacacgtttcgtgaagatccaagctgagaaaagtccattcttggctgagaggcttaagattgttgttcttcccactcttgccctcattaagaacactaaagtcgatgattatgtggtatataataataatgcttaatctaatctcttagaatatgatttatatggatgatacaatgttgttgttgttgataggttgggttcaatgaactgggagggaaagatgattttagcacagaagatcttgaagagagaatagccagagcgcaagtgatccattacgagggagaatcatctcttaaacaaaagtctacaacacaagtcagaaggaacgtgaggcagagtgctcgttcagattctgactccgaataaatcccttttcttatcaaaggtttgttcgtttgtatcctcttgttagttgtaatacttgcaattcatcgttttgatgatcaaaatcaatgttgatcgttagattgatgaacatgcaatatctagaatactacattgatgttttatatgttacctagtgagagtgttggaatgaccaaagtctttttgagtttgttctttaacttttgaaaaccttctgtctcataccatgtcttctcgattcctccttaagtctgaaacctagacaagtcaacaatcgaacaacactttccctaatttttttaatttattagtaattgatagtggagtacatgaaatgttttatttaaaggacgaatcacgttacctaaactctcatagaataaagtcattaatggttgcattagatctcttaaacttgggaaaacaattatataggacacgtgatcattttactcaacttggttaaacaacaatactattaaactaataccccaacaacaaattttaattaatatttcttatcgatgcaagctacttctactactactactaaattattcgacaagaatccaaattaatgatggcgaaacttcttggtttcatcgatatttaacatatatcccgatttcgatcaaattgcaataatgtcacaaatccatacgaattccacatactaataataaaactaaaatacaagtcatggatgggtcatggtcatgtatacaatactagaaaaagtataacttgtggacatcataaaagatagcaactttgattttgtctacaaatataaaatgtagatgccatattccttgaataaaaaatgaggccaaaaacataaaataaacagaagaaaaagaagaatatgattcttttagaaaagttaaactatagtagaacagtctgtctctctttgtttgttgtatttatatatagtaataaaaagatttgaataggcaatattagttttatattataataatcactttcaaagtaaattactaattatttcgttttttttaactatttgttttgtaaattactaattaatttgtttttttttaactatttgttttgtaaaacacaaaatttgattttttttgtattttacactgaaaaatgggaaacaataaaatagaagatcgttacagatacgcaaagcactccattccactctcgtcccgcttcgcctcttttagggcgcaaccaagagacagagaagaagagagagactcgtaagcaacaataaccaatagctctctctctctctctctctctctcctctgctgattcttcgctgactcttgcctcctcgacgtcgtcttcggctttgtagcatctcgccgaagcgtcgtaagttctcttcttctctaacctctttgcccttgagaatcttagatcgaatctgctcctcctttactggaatctaacatctttaaaaagtcgagtttcgttatactcctccaatcgcttctccaagttcgtgtatgttgttgaatttgaaggaattttttttttttgtaaaaaataaaagtcttgtctttttcagatgggtcatgtcgatttcgtgtttattgctttagggtatttgaaaagtcgtcgtctttgaacaaaagattgaacctttaatgacattcttggtctgtttgttgtttttgatctttgaacaggttgatttgagagagacccaatttggattgttagaaa

SEQ ID NO: 2595 - DNA, 3000 bp, Unknown
  misc_feature (1)..( 3000): cDNA_ID_3068792_gDNA_ID_1620562_Annot_ID_160642 3000 nt of promoter + ATG
agaacgtggagcagtttgatcaaaatcttgaatttgctcaaactttagagaaaacaataaactcaaaaattcagattgagaaaccgattcattcaaaacggtttgatccggttacgatcctctggaagatgatgaaccaactgttcaaatactgcaatgcatcctacttgatgttgaaattcctagtctccgtgtggttcagattcatgagatatagagcgtgtgcactactaatattcccaacatgcgattaatcctcgtgttcatcatcgctttcagaatctgcaaaaagacatgaacattattaatagagtgtttttgtctcaaaatattgtaataagagtttttattgcgtaccggatctaacatcttcgctaagcttgcctcgatcttgcacttgtttcacaagcatccggtaaatcaaaacccaccagaatatgtgaagaacaagcaagaaatacaaaagtgtgttgaacatatagtacaagattggtccattaggatgcttttctttgtccacagtcataatgatttgatagctgcaaatcaaaaccccacaatatatatacatcaaggaaaaaacattcaagaacaaacgctaaagtggatattaaacaaacctcgtgctccacaggatccaaaaaggatagtaaatgagacgtagaacgacccaagacagcgcgaaaagaacaaacgaaatgctcgcgagactttccgctccgcaatatttagacattttcccaatttcaaggaacacatcgctcgcatcatgaagtgcaagaataacagaaccagcacgagttaatctatatcatcaacatccaaaaacaaaacaagagtcagtgtatcctttcctccacaacacaagtgtataatatacgtacctgcagatataggagaggacaatgagaacaagcgttgtgatatgatgacccatggaaactccgaaatcagaccgtcttgtttcccaaaacaccaacgcgaatatagagtacgtgtagaatccagcagcaaacatatataaaaacttcaacttcatcctgcacacatagcagtatcatattttagcaaatgaccatcacaaaagatatcgatgaccataacgaaacaacttacttcattggttgatcaggccaaatctgatctccaggaccaatccaaaagtagagagtatttgaaaaccaaggttcattatatgtgacagataaagcaagtagctcagctgatagatagtaaatacacttccaagctgattctttaaattttcgaacttttggactatttttcttcctgtcttttatgttgtcactcttattcgtactcatccttccatagatcacaagacttgccaatttctacaaacaccaataaaaacaaatatgtaagctttcacctaccaaacaatatcttcatatacattgcatttattttcagacaaaatctaaacatcagcagaatcatacagagagacaagactaatgattggtctctcaagggtcataactcataactaaaaagtagaaatccgaaagtaatattttttttttgggttggttggtgaaacaacaataaatgcgattgaagaaacaacaaatctaaaatcccatgaataagtaaattacctcgaagacgaatctgtcaagtagaaatcgaattgtagggaagaacactgcaaagagaggcaaaaaccctaaatcttgataagttgggaacgattcttgttcccaatcgattgatttcaccgattcgaagagacccatctctgaaaaatcttctctttacaatcacataagaaggaatctcgtgggggttgaccagaagaaagcagagcaaaggagaatgagataaaagaaagtacaatgctttaagttagatttagtagtagatctctcaaatttgattttatctgttacaataattatgagttcttgatcggatcagaatttattcgagaatgtatgtaagttgcacttgctggagataggccttaggttttttactgatccattctcgatgggctcttgtttttttttttttttctctgcgtttcaattattttcttgaaagtaatgaaattatactatccatatcttttatattatttaattcatagcattttaaaaactattactattttttttctttttctaaaagctttattttctttttcaaattttcaaattatttattttctttctctttcgtgaagagatcaatttgaattttttatttctttgtaaaaatatgttgattccagcaggcactgcccatcaataaagcaggtgaagcatttgctttaggccacgcagtataaaaataatctgaaggccacatttcagacttatatgttggtttgttggtttagttgtccattactaagacagttagacagatgtgttgagtaatgcctttcttcagcgatgatggtaatacaataatgcaaactaataatataatattcatgtctctaataagtactatattacaaattaagatcaatttgtcttctcattattcttctctgtatatctagaaatcaccgttgttttattaaaaaaaaaatctacgttaacactaaaattgaacaagaagtatatataatttgagaccgtcctcatcattgtacttgtaagtttacgattatgatataattagtcattagagaacatgaatatgctgaagaactatattagattatttaactttatgtatatagtagaaatatgatatctcatcgtaccaaaaatattcgagaaacaatcaaaacccaaaatccctcttatttcaaacacgtggcgaaatcctgttcgttcataactggcagttagagatgcaaacagaatcaaactgtagggagtaaactgtaaatacttccttttcaaagtaagtgtatttgatgataatggttctctgattagaaaaggctccggctttatcattctcagaccatcatcactaagcagtaagtaagcactataatcgcagaagatagataaaatg

SEQ ID NO: 2596 - DNA, 3000 bp, Unknown
  misc_feature (1)..( 3000): cDNA_ID_3068800_gDNA_ID_1620562_Annot_ID_160638 3000 nt of promoter + ATG
aataaagaaaacaaatcagcctacacattattgttcaataatactcatatatgtataccacactacattgcatataaatattgcattaacataagcttatctctcatgcattgtagaattcatccaatgttgaagttaaaggtggccacatgctaaaatatgcatagtttttattttcaatccaaacataatgatggcaccacttacgagatctccgcaaagggtcaaacttgcagttcattaatgtttgctaaaccattatattaatgagaaaaaggtccatcattatgttttatggcatctgatttgagaacgttcacgttgttgattttgttgtttccttctaataaataccctaatacttgtattaagtcagagtatttgtaacgacagtgtagatgcttcttttctttctattattaatcttattaagttattatataacgatgagtactcgcattacgtgcggactttcactttatatcttgtaatttaaaagtatttaaatgtaaaatttagattagttttttaatagacaagaagacaaaattcctatttgatactaagctccataaatcaacattgtttttttgcattttgcatttaaattcctaacaaaatctattctcagtaaacattattttcagaatttctttcatttgtgtcaaccttaaaccaaaaaaataagacaaaaggcaaaaaagattggagtacccgctctgaaatccatggtggtagtatttaagtacaaaaattaagcattgataatcgggttgtctgttcgtttaaataaaaagatgttattaagttatactaaatagacaaatagaaccaaaccttgataagccttattgatttgttgaaacataaatgtaaaataattttctttttttaattttcatagttgccacttttacaaaaaaaataaaaaaaaatacgaactccataaccgaaaaactctatcactgaggatttgagtccaagaatttgatgctagagttctcatgtatcaccatttttaatatattatatagaaaaagaacaacttacgaaaactattagctaatccactataaaattatttaatcatattttgacttaaaattataaaatttagggaaaaatatccaagagtataagaaaatcaattaaataatttaatttaagaaaaagacatacaaaataaaagaaaattattattgatacaattaattatgtaaaagtttataatatatacaattaaataataaattaccataaaccattaacttacattaattattaagtggacatgtggcaaaagctaagtgatgatgtgtcattcatatgaaaagagttgaccaactttcatatatatgattataccacatatagataaattataaatttatgatctttatatatacaatgtttataaaattacctacgtatttgttattgttagttaatttgttattctagatgaacactcatgctacgcatgggtttttatttctaaaattgtcggaatatatgattatggtcttttgttgattttgatgttcagttttgcgtgtgtttaatgtgtaattaataaatttatatctattttatatagttataattttttttgattaaatttatctataattcgaaatatcaattttactataatatgaatatttatatacctattattcaactatttcactatcatgaaaacatacaacatcattttatgatatattaatatgtaattatattacttatgtattttgaaacttgtttaacttaattttaacaaacaattctttattccatatattctttcgtcatctagtacaccaaccacatcatgatatgctagcaatttaagtcaacactttaattctgttcctttgcatatagccgttcctttgcatatagccatatagattctcatatttctgtgtggatatgtctaatgcctcggatgaccattacgtgaaaacattgtatatcaatgttatcaagttatcagaccgcacaaaaataaacataaagaaggtcatatgataaataagattcacataaaacgtaataataagaaaatatccaactaaaattactaaattaatatgaggttagatagcaaacatctaaactacaacacacgtaaatgttagccattatggattaataactattgataaattttttttaaaaaataagtaaaatagaatgaaagtagtacttgatacattattatgattttttatttattgaatgtttttagaaaattcactttaagagtgagattaatagaaaatgtaacacaacaaaaaacttttaatttttcctcaattaattttactaatttgtttatttaattaatgtagaatgacacatgtcattttcttgtatgatcactcatatgaagagagttgaccaactttcatatatatgattcatcactcttacaatttcaactaaatatttagggcattttcatccacgagaaatccataaagtttctcaaacaaaaaaatattaatattatattataatttgattatttgattaaaaaaatatttttgttaaaaaattaaaccaatagtaaaaagaaaattgtcatgatggatcgtaaaaagtatctcaaagtttctgaagcgagaaactttctacaatctctcttttacttttattatttttatttttttaactatgaaaaattcttatgagatactaccaatggagatagttttagaggttcttctataaccatccgctatggtgtaaaataaaaactcatccacaaacgtaaaacaactactcatccatccgcaatgattttcttttttttgaaacactatataaattttaaaaataaaacgatgagactacttataaggtatttttgcatataaaagtataaagttcaattttgtgtgtcggtggtttcctgatactcttgtactcttacattttcagtagctttcccacgtgaccaattattttactccctttcttagtccaattatg

SEQ ID NO: 2597 - DNA, 3000 bp, Unknown
  misc_feature (1)..( 3000): cDNA_ID_2163853_gDNA_ID_1620562_Annot_ID_160636 3000 nt of promoter + ATG
accattgaacggaatcaaacgccttggagatatcgatctttatggcgcaacgatctgatactgactctttatggtagtctttaacaatttcagtcgctagtaataagttctggattagaagacgatccttgacgaaagctgattggttccccgcaataaactgtggaagaatttctttcaacctctttgcaatcaactttgatatgactttgtagatgacattgcagcaagatataggtctataatctttcatttccttggtctcgaacttcttagggatgagagcaagtatggtagagtttaccccttttggtaagaatcctttttcaaaaaaagacttcaccgccactataaattcagcacctataatctcccaagtagctttatagaactcagttgtaaaaccatccgggcctggggacttatcactcgacataaaaaacagaacagtcttaatctcttcccctgtgactggttccatcagtctacttcgatcctctgctgtacacctaaatggtaacaaaacttgaagttcctccaatgtagctccctcaaagtcatttggaaccaactgcaaaaactcacggaaaaaagttctgcttcttcttttatttcttctcctttttttgttacactgccatcttgcctttgaatctcacgaattgagttatgcgctactctcgccattaccgctcgatggaatgttttgttattcttgtcaccgacttgcatccaatggagctttgacttctgtttcaaatatttttcttctatttccgccaacagttcccatttctcatgcgcttcagtttcctcgatcatggcctgtggagaaggactcttcaaattttcctcttgcttttgacatagggtatcatgcgcttcctttgttctctttaccaaattacccatcttttctttagccagttgacggatttttggtttaagtgccttcagctttttggtgaatctaaacatggtagaagttgacatataaacaggctctgttgttttccagtaagcttctaccataggacgaaattcctgcatttccgctatagcattgataaacttgaatggtttcttccccttcactctttcaccaacatcaatattgagatttatcctacaacgtaaatgatctgagcaccctcctgcctcaaatacattgtacgattgcgggaaactcatcttccatttattattcaccagaacccgatccaactttttcagtattaaatcattctcctgtctattactccaagtgtagagcgaaccatgtgaagataggtcagtgaaagcacaataattcaccatctcttgaaactcacgcatcccataagttactcttgtgtcatcccctttagaatgctctgccatattcagaatttcgttgaaatctccaaaaattatccaaggcttatttcgaatgattggagaatcacaatgatctcttagatcattccataagtctttcctttccgaagcaaaatttgagacgtaaagaaatgaacaaaagaattcatcttcttggccctccaatttcactgagcacgttatgagttggccacttttatatatcggactgagcctagtgttattgcgccacacaacccaaatcctgccacgcctgttgtgctcataatttgtcaaaatagaccagtctttaaaaatttgatttcccactgtctgcatcttgctctcctgaactcttgtctctagaatacatccaaactgaaaattttgttcctccacccatttctttataacggaatgtttagtagatttgtttagaccgcgaacattccaaaagaaacacgacattaatgagattttttgttgtttctcttactctgatcattaggaatattcctggccgattgagtagtagaaaccgttttatgagctgttttggatccccttggtaagtactgtctcgagggcggatcttttgttcccctagactcatcaaccactgttgtagtgcatgctgtcaccggagggtcttgtgggagtataatctctttctccaccccctcttttccaatagttggttcatccactacttcatctacttcacttaaagctgagtagggattagacagaattgttaccgccccatatttaggcccctctgttgctttccgcggacttctacttgtttttggtggtgtaatccatctctgaccatcctcacccagatttccaataacgatttgtgtaggtgttacctctttctctttaacctccactaaataaattgataaaaataaattggattttttagttagaaaggtttggcaggacgttatttactaaaaaataaatgagttttttaggatgaaaggtttgactagaactgaagatttatgtttattatactataaagtaaaagatcaatcttgtaactcatttttattttacttcatatagttaattagataacttttagtaaattgacctctacaatacttttaaaatctctatatctggtatgtcaaagattattttaatcatcatcaaacagtgcattttcagtttttttttttctcacggttttttttttttttttttttttggtgaaagtggtggatttgcatgaaaatttctaacgtgtagttgacataattaaatttatctaacgtgtagtagtctgaatctttacgtttcatcacatttgaagattccttgtaagcacaaatcgtcgtgtggtcggtctttaaagtcctgcaaaaataaaagtcaccgcggcggcaaaatggaagcaggcttaaacgatgttaggatatataacatgggaatatggagtggtatacttaaacatgatctccttgcattacattgacatggtcttgattgaattttagtatggcagataattcaacaggtcagcaaaaacgagtcaagagaacatgtcaaaacagaagtttgtattcaaactataagaagcgaataagcgatgagatgaaacacatttagagaggagaaaggtagaagaag

SEQ ID NO: 2598 - DNA, 3000 bp, Unknown
  misc_feature (1)..( 3000): cDNA_ID_2163833_gDNA_ID_1620562_Annot_ID_160631 3000 nt of promoter + ATG
ggcagagtcagttaaacaccgtcggcgagaagaaatggggtttctgacggcggcgattagggtttcgacatcagcagcctcaatgcttctacgccgtaaatctcggcagctagggttcctagcctcctcctcgccgcttttttccagctttaattccatgaatcgcactatcaggtactactactcatccatcaaatcattcaaagctcgagcttttgattttgttgatttgattagattgagattagatgcacagagattaacttataatgaagtagctcgtgtaatattgtgtgcaaggttttgcataaggaatctcttactagaccaatgtggaacgttagcttcttaagatcctcttcgtttcattcaactccagctcgtgagaccggtgatgatgacattagcaaatctgagaacagttcgagtcaagatggagacagttgtactaaattaaagaggaagaagctgaaaggtaagcgtgcggttgtgcggtggctaaagtttttccggtggaagaaaaagaaagaatttgaaagaatgacttctgaagaaaagatacttaacaaactaagaaaggttagattgttagtgatgtagaccagcaaaattctattatgttcgtgtttatatcggttattttcgcaggctcgaaagaaagaggaacggcttatggagacgatgaagaagctggaaccttcagagtcagcagaaacgacacatgaccctgagatattgactccagaagaacatttttattatctgaaaatgggtttgaagtgcaagaattatgttcctgtagggagacgtgggatttaccaaggagtgattctgaacatgcatcttcactggaagaagcatcagacgctacaggttgtgatcaaaacgtttacacctgatgaagtgaaggagattgctgttgagttagcgaggttgactggagggattgtgcttgatgtacatgaaggtaacacgataattatgtacagagggaagaactatgtgcaacctcctactgaaatcatgtcgccgaggattactcttccgaggaaaaaggctttggataagtctaaatgtagggatgcgcttcgtgcggttaggaagtatattccgaggcttgaacaggagctccagttgcttcaagcacaagctgaaacgaagcgggattacacgaatgtgaaggttgatgataatcaagagaggtcagaagagttgaagaagattatagaaagaagcgaagagtgtttggaggatgagcaagaagaagatgaagcaggattagaactagcgacggattcagatctttcggatatttttgagactgattcggaattagaagatgcgaaaacagagcgaccactttttcttgaggagtttgagaaattcccagctataaacaacagagaagacgaagactttggggatctcgggaaggctaaatcagaaggtgaggagaatgatgatgataagtcaccaaactttgatgaagtagataagatgtttcttcgggctgcttttcttttaaagaagaaaagacgatgaataatcaatcatcagagattccatcacaatgggtacaagtaatggttttgtttagcaaagtcacaagtattatcttctttcttaacatgctcaaagctttaattctgtgatatttataaaatgtgtttaggagaagtagcttcaacttcaaaattttggtgtgaacgtaaagctcctaagtaagcttatgcttgtcaattcgttgaaaatcatgtttttgatatagcaatccagtggttaaaccaattttagacaaaactctaattctaggacaatttaaaaaatagtatcaaacaacctattaagtattaagcaagtaagtgtttaagattgaactgtaagattaatggagcaaacttcagaagaagttactcctccaaaaataggtgtatgccgtttgaagtggagagcacacggtattctttagtaaaaggcgaaagaatagttcgctttgtgctcaccacacggctccaagggttaagaaaggtaatcaccagatgctttatatatatgatgctttcgacttctagtttcggttttgctcgatgtgggacaaaacaaaatttgtttgttctttgctttgccaaactatctcaagtactgggccgttcccgtgggctgtttgtgtatttaatacatgtaattctataaatattcatttttctgattatctttttttttttttatcttcttttagcatttcatttcagaaaccactttttgatcagcttcatttaaagaagtatggcaaatgaagaacatagagaaggaatatattcttcctcttgataacaaacttgtgtacaaagtatatatagacgagaatgtgcagctaaacctaaccgactacacacgttaaacatacaaagcccatctaatttcaggaagttcgtgatcagatcatggtatcgagttctatggactacatgaaaggagattactttacgtgttttgatccttaatccagaaaaacaaaactacttgttaatgggccttcagccttctaactccttggttgaaaatataatcaagtaagaagaatgttcttgagatagaggcttcattccacaactgttagaagaatattaatcaaagttcttaacttttttcaaatgtcaggaaacctatgttggagtaagcttgaaataacttaataaataagttattaaatattacaaaggattatgttaaatctctaggagttatctagatatttaaattaggagttatctaatgttaatcctagtatgattaggtctaattattctctatatatatgagtcccaaggtgtggttgaccatatgagttttaaagagattaagatttagagattgtttaggttttgagttattttcctaaactataaagagagttattcttaaatctttgagttcttaatcttctttgaaaactagatttggtatcagagcatctaggtttgatattgaaacacaaac

SEQ ID NO: 2599 - DNA, 3000 bp, Unknown
  misc_feature (1)..( 3000): cDNA_ID_2163825_gDNA_ID_1620562_Annot_ID_160629 3000 nt of promoter + ATG
ccaataaattttctaagttctatggattaagaaaaatgttgaagagatacaaaaagaacatggatgttggagttaccgtaagcctgggatcttagagaaccaatatcctaaggcaaatgctacggcatggaatgtaacaattggaacaatcaatccaagaccttcagctgacagaatctgactgcgattaatcgaaagtgggcttccaatgcacaacgaagtgcataccatagcaacaaacggcatcacaggttgaagaagagtgaccacaggcttcgcataagtatttaacacaaggccaagagtgattggaacaagtaccacctacagatagtaaatcattggacgtcaagaacgatgaatcaacaggaactaccgatcctatgctaaatcttgttacctgaagtatagacttcgacatggcaactgcatcaacaggaactactgatccaattagaagaccactaagcaaaggtgtaaagattacagaagcaatagttgtagaactagtgagaagaatgctcatggccacatcagctttactcagagaactcgcgtaactagacaactgagccccagccacacaacacgtgagtataaaaccagcgtagaaggtcctcggcatcccaaatgcattagcaactaaaaccccgagaagcggtttcaaaacgtactgagcaacaaacccaacagataacggcactggtctgcaaccaaacaatgttctcacaaacgttagaaaaccagcttaactaaactgatcataaaacttataagagaatgctccaagtaccttttgaatgcaagagcaaaatcgtcaactgaaagctgaattccaatagataacataatccctccaagagcaggagcatagaggtctttagataccctgaaaacatttcatctgataatcatcttaaaaccccattcaaaatcttagtttctctaaacagaagatgacaaaacagagtcaactaagtaaaagccatagactttatcgttgattctcctgataagattcatatatatacaccaattttgtaaagatataaactttggcattacagagatagatagagagagtttgtgtgcaaaccaagtgaaactaggtgggtaagagagagcagcaacggcagtgagagcaacaacaaatggaagcaaagcagaccaaaactgagacgaatcagctttctctgtaacatcagttccaccacaaaacgataacagagacatattcccatctctccaatgtaatccaactctgcccataaacggcgtcgttgaacacgccaccactggaaccaatccgctgtttctccgccttagtctaaaatctagaaagttactaagcgatgaagaatggagagaagataaaggtgaactagaagaccggaattgacaattgaaggattgagatttagcgggaagattatgaaattcagaaagtgattgtctttgtatagctggtggtgggagagacagagaagcgattaaagtcatttctatattggtctggattttgtaaagattggatttttaggagagtaggtgacggagagaggtgaagcgccaccgtgaaatgacgccgtggaccggcgaaggagggaaattgagagggtgaggtttggagttgaagaagcaggaggaggaagaagcgataatatagaaaattggaatttggaaatatataaaggggaaagatttgttaaggtttgtttaggcatgattgacaagtgatgtgcaagaaaattgaacggctgagattggttggcgacgtgatcgtcgatgactctttctagcattgttggttttgtgtaggccttagttttgtgtgagtgaatttggatgaatttgggtgaaagattgttgttttgtttggtacatgttggcatcttttttttccccgtcaaacatacttactttagcatccttatattaatacttaaaaaaccaatacatggtttctaagcatccaccaatggtcttaacaaaggtgatgaccaacattctaatcaagcaaagtacaaaccacaagaggagacaaatttttgcaatagcatctgcacacagtgctagttcaatggatccggagtcccaatacatatatttaaaaatggactcttttatactaattgtctttttttacaaaatcatatacctacatatatatataatataaaactttgggtccttttaacaacatagttagaaaaagagagtatatgagctaattaacaacatacttacaaaaaaaaaaattggcccggaaagtatcttgccacttcttaacatcttctactgcctttaaaattactctttgcgcctcttcatggtcatttatgaagaatatctcattttttacatgttggcatttatatatacatttttgttagcgttttagccaaaaatccttaatctattttttaattacagtttcaatctttatgaaacctatctaacaaagatattattctacccaagttttgcaaataaatcttaactacattcgatatatgtaattctgaatataatatattgtataaattaaatatctatatgttaaaatgtacaatataattttacttaaaaatataatgtagaaaaatatgaaatgtcttacaataatattatagaaatatttttatatttgaaaagataacatagtaatttttttgtatttataatcattttattttaatttaacaatgcaaatttaagatctttaaatgtattatgtcattcaaaataatgtatatacaactggatcatattctttacaggtaataacattttctctattatagtagtaagaataaaaatttattctttccatgtttctttttaagtatgattttcattttaagtctagattggattttaccatacaaatttcaatagattcccaagatttgtttccgtatctatttttgttaaacattaccaaaattcttataataataagagtttgctagtaattgtagctcaacgttcttcatcaaa

SEQ ID NO: 2600 - DNA, 3000 bp, Unknown
  misc_feature (1)..( 3000): cDNA_ID_2163829_gDNA_ID_1620562_Annot_ID_160630 3000 nt of promoter + ATG
ccaggttgctctagcatggatggatttgtctacgagcacggtaagctttatataccttttcttgtgtcgagaaaaggattcatatataactcgaaatagggtctcatacaatgctcttttatgttggcaattgtatataagcaaagataatctaaacatatgatactgttcaatactgttgcaggtccattcaatttcgaaccaaaaaagaagaactcacatcttttgcatctcaatccttatagttggtccaaggttgaaaagaaaaacaacattgacttattttcaaacattttcttcaaaagaaattgatctataacttttaagaatgtgttttgttttcaggtgtccaacatcatataccttgactctccagttggtgtgggattctcttactcaaatgacaacgccgattatacaactgatgatacaaaaaccgcgtctgatactcacacattccttctcgaggtgaaataagaatgtaaaagtttttaaaaaagatttccttgtgttgtgtgtgattcaagacactaactattacatccacatcagtggtttaaaatgtttccggagtttcagtcaaatccgttctttatatcaggagaatcatatgctggtatctatgtgccaactcttgcggccgaggttgtcaaaggtcagtattatctctctcaacatcatctttagctccttttcatatattggcagaattagaaaataacgttatctccaatttttctcatcgttttcttgttatgttgtaggaaataaaaatgcaatgagaacaaacaaaacaagcaagaatgtgacaaagccggttatcaacttcaaggtacgactaatgtttgaggctatgtttcggattcaaagtcttatggttttggtgttaaataaataccattaagactaagggtactaatgtagttacctaattgtctctttgtatatgtgagagaaagagaaaccttcttcctatacttgaatgttaaaattggacttatatgtggtatagggatatttggtgggtaatggtgttaccgatgaggtgtttgatggtaatgctcttgttcccttcactcatggcatgggactcatctctgatgaactctatgaggtttgattttgttggtgaatttttcataattcttgctttattcctcaatttttattttttctaatgtgtaacaaaatatggcaggaaactaaattagtgtgcaacggaacatactataccggcggccagtcaggagtgagtaaagaatgtgctggcaaacttaaaacagtgtcagatactgtgaacttattgaacttatataacattctagaaccgtgctaccacggaacatctctatccgccttagatatcgagtttctgcctaagagtctccttactctaggcaaaacagaaaagccaatggcggtgagaaagagaatgtttggtcgtgcatggcctctaggtgccgttgtgcgtccaggcattgtacctagttggtctcaactcctcgctggctttggtgttccttgcattgtaagtagtaaaccacatcatgcatctttcctcttatagtatttgctaagtattaccgtgcatgattgccactttgaaaactaattatcactaggttacactcgaatttacatatctacatttggatacattgtatattaggatcatatatatacataaatagtttaaaaagttgtaagaacaagggtatttaattttcatcattagacacaaatagttcatttgatcaaattaaatgtatagtaccaattgtaatacatttgatgattctccacaattttagaaactgaaaacttgtaatggatgcaggacgatacagttgcgaccaaatggctaaacgatccagctgtaaggaaagcggttcatgctaaagaggtctctattcaattcatcatatttctctcaatcagtatttgtaataagttgatgatggacattggacaccattttaacatcttggaccttttttcgaaacgtcgatataggaaaaagcgattggaaattgggagttatgttcaagcaacctcgaatataggcacgacaccggtagcatgatcgaataccatagaaacctcactcttagtggctttcgagctctcattttcaggtgcacatatatagaaataaatcaaaggtaactaaaagtaaaacgaatgaaaatataaaatataacaaaagttaaattttttgcagtggagatcatgatatgtgtgtaccatatactggctctgaagcatggactaaggcaatgggatacaaagtggttgatgaatggaggccatggatgtcaaataaccaagtcgccgggtaatttttttgttataactatctttcggtcagtttttttcccaactcattgtttctacaattttgtgttgtaggtttacacaagggtatgccaataatctcacatttctaaccatcaaggtacaaacatcacacattttcttcatattctatttctacaaatgaaaacgatttgtgttttagtttaagtttgaatgtttttttttgcatgcagggtgcaggacataccgttccagaatacaaaccgcgtgaatctttggacttctatagtcgtttcctagcaggagaaaagatatagaattctcaagttccatgcatgttcattaataaaaatatttataacaataaaattccattttttcttcaataaaaacttcaaattttgtaatgtaatttacaaaaatgtgaaggattctatttcgtgtactaaaacaagtttttctccacacaaaaaaaaacatatactgttctgtattttttcaagggaaatttaaattgaaaagttaatactgtatatatttgactataattcaaaccaaaccaattaaaccaaaaatttagaaaaccaaaaaagttgaaccggaattgaaccgatatctagattgaaaccacgggatttattgaaatcgtcttccttctcactattccggtgtagctgctcaaaa

SEQ ID NO: 2601 - DNA, 3 bp, Unknown
  misc_feature (1)..( 3): cDNA_ID_2163635_gDNA_ID_1620563_Annot_ID_160660 3000 nt of promoter + ATG
ctg

SEQ ID NO: 2602 - DNA, 3000 bp, Unknown
  misc_feature (1)..( 3000): cDNA_ID_2163658_gDNA_ID_1620563_Annot_ID_160666 3000 nt of promoter + ATG
ttcttttatcatcgactaatcacaattaggctctagtacaaaatttgattatttacaacaaccgttcaaactccaaagattgagccttttgagatgtggacgtaacccttagttttaaaggtggaaacctttcgagatattttagagcatctttctatatgcagatccccaattgcaaaaacattaacttcatggaaacagtagttacaagcaagagacacaatacaagttaaatgtttgtgttttgagaagatgtcttggtaaaggaacaaaatttcatccagatatgaatcatttacagttaaaaccaaaagatggaacctttccgacatttgagcttccatatgctcaagcaagtctctgttctcgactcctgatagcgtcttcactctgtttttaagttagtgagaatgagttccgctaatatatcgacccatgtgtcaggaacaccgggtaggcaccaatgcatacagtcttgtccccatattgccaccgcgtcctgcttccctaaccagatcgctgggtgggcatctgctctgaattcgcttagatgggtcagatcaagtaacttgatctttgtcgtttgcaactcattcttgatgatttggttaatctttcttgcttctttgttcactccattgttcctgggatcaaaccacaagtcaagctgtctaggtcttagcatcaacatcatttatcagaatgcaataggattaaatcgaaagcgaatatctttgccacccatctctgaggaaagcctagagaaagaccagacttgcttagtaaagctcgttaccatacctggttttcttcgagtggcttatcgagcaaacaacttccattctggttccaatcaccaccatagaaatgccttggtgattgcaaacgccagaacttaagggtcttcgcagggacttctctttggatataagaaaccatattttgaagaactagttcaaatcctggtaatatatcaagaggaggatttatcggctttccctttcggtagaagacaagaggtgtctctttaggaaacttatcgtaaccccacctaaacccaaaaaccagacccaaatactcatgaataatttcttcacaaagttgtaagcataaagaaaaaaaaaagaaaatccaaggatataattattaccaatggccagagttaaatatgagaacatcatagaagctagtgacgttgatccactcatttgcaggaacatcaacatcaactcgataagttcctttcactccgtcttgattagcttcagcagaagatctcgcctgccaccttttaacatgtcagtttagaaaaaacaaggctggaaaaaactcaacatatacacaaaaacattattctttcagtttcaactcttaacataaactggagaaaggagttgatgttccttatacgattctaaaaccacctaacaagcctataacccaaaatcctaagattcatcaaaagtttgatccttgaagagctaattacaagattttaaactatggaagtaagcaatcttactgatatttagcgagaagaacagctctgtgataagcaacagtgacattgaacttagggaagtaagctccacgccaagcttttttcttcttccacttaatagcacttggatcagccactctaagtatacacaagaacgaaaccaagaaattctcattcagagaatccccaacaaacccaacattcttgttcctcatcatccctagaaaccgggtcgggtcaattcgactcaatccacatccattgggctcccatctccatgaattgataacatccatattatctcgcttgttccgtaagcaattccaagcgtttctgtggaaaggacaagtctcgtcgtacaacggtttcggagtttctggattgaaaacccatctgccggagaagagatcgcacggcggaggagaggcaatgtttgaagtaatcggacggcggagaattaaggaatagaaaaggagtaataagagagaaaggagcagaatacgtggaagaagtgaagaagaagatcggagcttcgacggcatcgtcgtgtagattcgtctggatcccaactccatcgattcgtctgaaactggagagaatgacactataatctcgcggttgagccggtaatttattccggttcggtttaattttatacggtttaaattctatagtattcggtttaaatcgattttgatttagaagataattcatttggttatctactgcaaacctcagagtctgatatacttaaactgaaaaagaaaataaaatggataaagataaggataataatattggatggttcaaaatgtaaaacacaattttggtttctttagagttatggttttggcttggttcgtacgagcggacccaaatggttcgtatacgtggttagtattattgacggctctcaccattttattatttttgtagaaagctttttaaaaaaatcgttttcattggtccactgcatggataattaatttataaaagtaattaaaaagaaaaacaaagcctaatcatccaactaatctaatcactttctgcttcttcgcctacttcattcacatcttctttcctcttcctcctttgggttacttcttcgaatctcctgtgtaaggttaaaccaatgtgtatatatattatatttacgtttttattgtattcatctacgtgaatgattagctctgtgaaacagtgaaagtatcattttaatctctacattttgttttttgtgtaatagtgaaaccattggcttttgattttgagcgattcttctgaattcgattggtgtatgtatttcccttctttttaattcgatcttggtgtcctgatttatatgtctccgattcggattttgtcttaaaaaacgaaactttagtttttgttacagtgtgcaatttgcttgtgagtttttttagctgctatcaattttttttgcatctatttatcatatcctagttgatggtttttttaaatcagtgtttgcagaaatg

SEQ ID NO: 2603 - DNA, 3000 bp, Unknown
  misc_feature (1)..( 3000): cDNA_ID_2163655_gDNA_ID_1620563_Annot_ID_160665 3000 nt of promoter + ATG
caaacaatcacggttgcaaagtaatctgaacatttcagtacttctctctcaatctacggatacaatgtttcagctacaatctctctctattgttttcatttcaggtggtggagatagtggttcctgaactggaagagatgcgtgcagcccatgttatttcgattgggtctccaacactgtcttctcttactccctactgtgaagctgggtatgtctctagctctatcatctatgaaccaaattagaactttggtttaagaactcccacatttgtcttgtatttcaggaaaaattcaaaactaagttatgacactcgtaccagctttgcaattttccgttcattctctgcttcagactatatcgctgctcaatgtcttaggtaagcggcaatagaataatgcactgtatgcgcagctttcacttttgcttctaaagtcacaagagtaaaccaatattgatagaatttttgttgcaggcgaagattgatggagtatcacttgaatatcttcaaagacgttgatgtcattgtgacccctacaactgggtacgtaatataatttcataccttatcaaaccatctagcaaattgaagatccctatattacttgcaatgtcttcggatatagttacttgtatattacttactgcttaaactcctctcactttacaaacagaatgacagctccagtgatacctcctgatgctctcaaaaatggagaaaccaatattcaagtgacaagtttgtcaagcaaaactctaacttcttacttttggtgcaatctaatacatagcacatttacatcagagttctgatattcaaattgcttcttttctagctgatttaatgcgcttcgttctagctgcaaatctcctcggcttccctgccatatcagtcccggtaagacattttttttatcagtctctaaccaaggcttagacaatcatgttacttatttcattcttgcaatataatcgtatcttctttctgattaatcactctctttttctaacttattggcaaacaaaaatcaacgcaggttggttatgataaagaggggcttcctataggattacaaataatgggaagaccttgggccgaagctaccgtccttggtttagctgccgcagtcgaggtactctctctttttctctctctgatacgttttcaaaagatcaagtagaaactagtgcggtaagaggcggtaaatagtaagagcggactctgtaacttgaatcgattttggtatttcaggaactggctccagttaccaagaaacctgcaatcttttatgatattctcaatacaaactgaattcataaggatcttccacagaactgaaaaggcaaggattgtctctggctgcggaatattatttatgtttacattatataaggttaatatgtcaattgatctacaaatcgacgattattgtgctataaaccgtgttggaatttcttacgtcgactatgattaattttaaaagatgtgaattagtcttgagcatacttgtaaacttttaaaatgcattttgaaaaaaagtttagaaacctgaatgctaagtaaatctacataacaatgcaaaaacgagttgaatttgtggaatcactaatgacaaatgctagatccaaaatccggttagtttcacatcgtcttgcaaatttatttatccaaatttctattatttaaaaagctttaaaacattgttttaaattccatagaaaaaaataaaaatcttatataaaatcattagaagcttgaatgttaaatctacataacgatgcgaaaacaagttgaatttgtggaatcgctaacgacaaatgctggatccaaaatccggttagtttcacatcgtcttgtaaatttattatccaaatttctattatttaaaaaacttttaaaaaattgttttattgaaaaaccttcaaagttttaatagtaatataaaaatataagtttaaaaatattatttaataaatgaaaaataagtgttaaaaatctaaattaagtgtaaaccatattgaatctagagtacctcttaggggtttggatgatgtatccaattagtttacacaaaacagaaaaatttaacaattaataaaaaaccttaaaattttaactataatataaaatatacatttaaaaacattttttaataagaaacaagtcgaaaactaaaattttattatagaaaagtttaaaaatctgtaagaagttttactaaaatccgtaaactttaaaactttagcgaataagaagttttagttttatcattaaaagaaaattaaagagaagggatgaaattgaccttggttttatgggccgaaattgtttcttgtttgggctttgcacaaagatctctagttttgacaaccgtcaacggctaactaatcccgatctatccaccttctcaagcttgcttctctttgatcatctccgtcgacgatgtagcccccaccgcgtcagaattctccgtagaagagagatcgcacacacatacatatgatctcgcttctagttattgtaaacaaagggctcatcttccatcacgctctcgtttcttgttggcgaaaagcaacggcaacaaatcaaaagatataaaatagaagaagtaaaggaagcaggaatcgaagaagatcatgctataaaatcagactttgtatttgcaattctcgctctataactctgtctttctctgatttgtgaattgtgatgatgagactatattttgtagacccatcttctgtgtaatttcctttctttcaactcaagtttccttttctcttgttactcttctgttgtttccttttttaccctttcgtttggaaaattccggagtaaaaggttcggtgaataaggacgaatgggcctaattaatatctgcaaggcccagcccaataagatatactatctaagaacagatttaaacccctaataaataaagttttcacgcgtgatctgtacgtctttaatttacttgtcctaacgcgtgatcggaaacc

SEQ ID NO: 2604 - DNA, 3000 bp, Unknown
  misc_feature (1)..( 3000): cDNA_ID_2163645_gDNA_ID_1620563_Annot_ID_160662 3000 nt of promoter + ATG
atccacctccggtttctattaaaccgtcttcgttactcttccttctgtatacagcttcctgttgttgttgttgttcttgatccctaatatgcatcctctgaaattcctgcatttgtctttgaatttccatcggatttacgacgtgatccggttgaatcacacgcggatcgttaaacaaaggcggttctaacgccacaggaaccggtaatttcacctcagccggtggtggcggcggcggagctgcaactttctccgatccaaacaaaaaatccgcattattcggaggagcagttacggatttctccgattcagatagcctaggaacagtgttcaacgcctcgacgaagcgatctcgatccgattgagtcgaactttgagaaccaaatccagaagaagccgggaagagaaacaaacgcatcctcgctggcttagacgacaaacgaagcaagcgatcgtactcgtgcatcatatgctccagatcatcatcgttcgtaaccgagatcaaagcgtctaagtcttctcccggaagctgatacttaaacgtaacttctcctccgccgccatcaccgccgccgcatacggtggagagtttggaagctaaaacagggaatctaatcccgcgatcaacggaaagaatcttcgtttctccgtttacgtaagtgagctgattatcgtgaggccgtggctgaatcttgccgccatagctgcacataaacttcaccttgtagctatgttgctgctggttctggttctgatcatcccatggaggcggcgggttatcgaattcgatctcacgagatctcggtgacgagtcggttgaatctggataagagttgtacgagaatttctccatctctccgcgaaaattaaatgattttttttgttggtttggcttaattcatgaagagaagaaattagaaagaaatgaagaagactgttgtgatgaaatggtttttattatgtatcggtgatggtggtgttggaaaatgagtacgtgaacttattgctcatttacacgtggcctgtcagattttatgagttttaaggcggtgatgagattatgtgacggttctgtgacgttagctgaatctctccatggattaatatgacttttggggacactgtgaatgggcccaacactagtgttttgatacttcgacgttgaaagaggccagcttttagccttttacatgttttttcttaatattttgttaaatcaacattagtgaagcaatatttttaaggttaagtgataaataaatagttaagaaaaagggaaaaacaaaagtcgttgtcgtcgatctttcgcctgatcaggcttagatatgttttatgattgtgttattggatttcttttgtgtataacaaatatttgaatgtttgaatcatcatcattcatcaactgtattacacatccgaatagtctttgggttagttctagaagatagatgttttttagtctgtcaacatgcagaagaaaactgtaaaagggtcaacaaaaaaaaattgttatgttaaattaacatcaagaatataagataatttaaatttgacaccggtgagtgtatactcactttctcgattgtttgctattattatataccttagattattgccaacttgcaccttattataaacggtgaaattgttgtaattattcaaacttataatagacgtatttcactagcatgccgaaggtgcaatcatggtcgtacaagaacaatatttatattgtcaaattcacgtaacaatttttgttgttttccttgtttgtcgaagacatgtgcattgattagtatttcttccaatattattttgtgttagaacttagaaatgttcattattttctcatcctcttaaataatccatatatatatggactaatcggcccgccgtcccggtacgatgttgctcgatcagtcataaatcaagtcgtgtctcgtggttgtttgtacttggcagagcaagtcaatcaaccgaattttggtaaagatgcatcttagccaaaacttttgatttcactagatatactagaatttagcattatacgaatgtcgaccatactttttgattacttaagagcctcttatatagttagtcctattattgatagttttcttgtagtaatatttgaatattataacgaatcaaatttttcgaatctaataagcacaaaagaaaaatggaatcgaatattattttaaatgaaactatgtactaacataaatccaattatgttcaaatgaaaccaaatcaaataaatgaagtattcctagctttgaattagtaagtatcatatgaaatggctccatatggaaaccaaaaaatccaactgaatgcaaatgaaagtgttttcactacttcatcgtaaatataaagaaattgttaggtgtgataatgaaaaacattagttaacgggccaaaattatatatttacataataaaggggtagtttcataaatttgagaacatggttggaacatttcaacaaatgagacgagttcaatgtacacttgaattatgtacaaatcagtacaagaagcttaagatttgaagctaacatataacattcaagttcccaacaacttcaccgctcatctccgcacggctttcttcatttagtaatccttcgccggatcggatcatcgtttctcagattcctctttttaagtttcttctttcaggttcgcaatccgaatcttccacaaccattgttcgtttcgcctgtgattctggtttctgaaatttctgccttggcgtggtttccttgaatctgattacttggattctccgattctcatagttcttaccagtttttgttttttatttcacttaatttgttctgattctggataacagattcttatgataaggtgaaagatactagagattcatcggttttgttttgttttggcaattttctcaagtgtttgacttatagaacagtgacgtgtgtgatctatgatatcaattccaaacttaatgatgttttgtttgtag

SEQ ID NO: 2605 - DNA, 3000 bp, Unknown
  misc_feature (1)..( 3000): cDNA_ID_3068834_gDNA_ID_1620564_Annot_ID_160674 3000 nt of promoter + ATG
taatttgcctcatcaggccaaacaaatattcaatatatagtggatcatgctcattatttcagtgtgtatttatgacgatcatacatatatgttccgagaatgagtacgacttcaaatattcatcacataagtaaaatgaaagatgattttttttttaatccaaaactgattatgtaaacttagtattaagatgatttgatgtcaaaatctttatcacatgatgtaacttatcaaagattgaatagctaagctagtccttgcttatcaagaatcaatactataatgaaaattcatgtatgcaaacagggcaatagaaaaatcaccagcttaaattcgacaaaagcaatgcgggtttggtggtaaaagtctccaagcaacctcagatggtgaacctaaaacgaaatgaaaagatggtgtaaaatgagaaaacacaacatctttataagtgtataaacaatcagcgacagtcaaaaaccaaatctatacctccccacaaactgttttaaagaaattttccaactccatcttagtgacctgcaattaaaaaccaaaaaataaaattggtaaaatttaaatttcaccaatgtctaacaaatgacataataaagctacctccttgtcaatgttggtacaataaacagtctttccacacttctctagctcgtccttggactgaaggaagaaaacaacgttatgcatataccacattattgataagaacaagattgattcaaaattatctagtcaagcctagctaagattggtttagacatgattatctcaacttacttgtggaaggaaagacgggttaacaggcgcaatagctgttttggacataaaaaccctaataggatgagaaccaaacatagtaccggattttcgtaaagcagacctagctccctctgagacatcacttcactgattaataaaaaaacagcaagaacatctcaactcataagaaaattggcgcataattgagtacctgcatcggtgaactcaatgaaggcgaaacgaagaatggacttatagtcaccgcacatacggcaatcaacaacctttaacccaaaaaaaaatggcaagaaaacttatgagaaatgagtttgcataaaatcaaaacgaagatcattaagtaagtacctggccacaagaaagaaagagacttgcaagctgctcctcagtaacctacaaaaagaacaagagggtttttgttatgtatatatgattagattctttatgaaaacgtgttttcttgagacaatatttctctgttttgtacttggttatcgatgtctgagacatatacagttctcttgatcatatcttcattctgaaccaagtttgtttttttggttatccatggcctccctttgccaaagttccttctctgtgttaattgacaagacttagagagcaagcacaaagaagaattacaatcatatttttcaataagcaaattgaaaagctgatcctaacatgacaatctatcaccatctaaacctcgaaatggcgaaaaatgtgtgttatgttaacaaattgattaaattcctcaacaccaagacatctaaaatgaaaaatatatgcaaaaagagtcataaccatttagagcagatatttcatgaacacataacatagttcacagaaaatagtatagatgaaatatataccattgtagcaaactggccaataagaaaaatagtttgctttggaaaatggttagtaaaccagaatctatttccccaaaactcagagtggtgggtttgagccagaaaagaagggacaaattccttagccatcggattcaaatgacttatctcactcttgagattcacttcactggttctttggatcaattcgtttgttagaacagaggatttggatttaggtgtctgatcatcagaacatgatggttttgtctctactaatgaagtagtgttgttgtctatattctgattattagaagagtccaccttcacaccaacattttccgcgacagccatgatcaaaccaaaagatcaatgaatctttagatgttggtaataaaatataaaaaaacaactcatgcactggagaaaggttagaggatttaaggagatgattaaaatagaggaaaaattattatgctctttatagctaaaacaattagattttctagtcaagatttttatttcatttttttttgacattagtcaagaaaataagcaaatacaataaattataattatttaaattttctttgtgtcagcacaatttctgcatttttttcttactacatataaagttattattacattaataggattctgtttatttttttaattatctctatcttatttatctagttttggtaagagagaaaaaaaaaatcgaaccggttaatcaattcaataccggtcggccaagtgtctctcagaatttgaccccaattcgatccgatattctgaaaacgacaacgttagcatttcgccatttagaacaggaaatagtttccgtgcaaaagcttcggtggctcttctcccaccgccgtatgttcttccagcgctccggaccgccgtctggtctgactttaatttgagatctattccgatccctaacagctacttctggtatactatcgttctctctctctaacacctctgcgtatttggatcgtattgactagagtcttcccattatacttgcatcgttctctcttccatggtttcgaacttgtttaagcttatagtcttcaataccttctaactatctaaaaggtttcgtgtttcaatttgcttctggtgcgatttgctcagtgttttctttctctaccggaatcagctctagacaaattgtttgctatgttattgtattcactgggattttggatagtcccagtgaaaatctttcaatcttgttcgtgttacattttctgatttatgagaggaataaaagtctaccactttaggtaataacttatctcttttgattcttgtatcacagcaagtttcaacttggaaagaaaca

SEQ ID NO: 2606 - DNA, 3000 bp, Unknown
  misc_feature (1)..( 3000): cDNA_ID_3068830_gDNA_ID_1620564_Annot_ID_160676 3000 nt of promoter + ATG
ttaatttgaagtttttttatccaccatgatatcaatatcggcctatctcaagatttacatataatctttaattagattaacggattggttagattatctaacgtagataatgtttgattgtatggatgttttgaagaccattaatgccaactagcttaagttttttgggaaaatggataagccattagcctttttgtttgtttgttcatagagcagaccattagccatttatgatattataagatggaaatatctcaagtggcctaaaaatgaagaaaaacatcatacacatactgtaaagaacaaaaaaaaaaggaaatatcaaagttggccacacaaaaagagaggccatggaaatatcacacagacaaaaaatatctgtttgaaaaaagatggagcatgttcagtgtaagttaggccaaaatatctttagattttattcctcaagccaaaagtcattgatccactacacttcaacaccggtgcgtagagcatcatccaaccaattaatcaaacattttctttttcttatatatcgttgagttattagtcaattgtggttattacgctcgtctgtatatcataggttcgagttcaagtaatttaaagtttgggcgacaaaacaaaaatagtaaaaaatttgtttcaaagtatcatgttgtgtagttgaattttaattttgccccacatattatctttttgattaataaaataaatatactttcaaatagttgtaatttatcaaataagtattgatcatagaacagtgattacttttaaaaacagttgctaatgttttaaaaatgtaattctttctcgaatttcgtactttctattacatattataaaaaaataacttattatttagataccacagtaaagttgttatccgtaaaaattatttgacattatatatcgttatcatcattatacaaattttttttgataattcagatgattttaatggttttttatgtccaaagagtaatcttcaagcccgaaaaaactatgttaaaattcgaacttcggtgaccaatattactgaaatccaaatgacgaataattattttctggtttattattggacgaatgcgacttaattattttgtctattttatatcatttctattagcaacatcataataaaatttctaatatatgctgtcaattatgtgaccagcaacaatatagtaaaacaatgttaattaaacccatctaacaacaataaaaatttgtcactgacatagttttcctatatagcacttatttttcttttgtcaataaaacacgccggcctaaacctatttctcagtttaacgcatgaagtgctagtacaaggaactaaaccacctggcttattattaaccattttcttcatttgtttgattgatcattacactaattgtccttttttattacctagtagtttactaagtttgattaagagaagaaaaccatagggtccagtcaataaaaaagaaagtcatagcgtaggacaagactcttgttacaagagagcgagtaggagagatatattacactcgcgggcgcgtaaagagacaaggaaaaaagaagatatttagtctctgacagtgacagctaccatttaaaggtgaaagactgtgtcagataataaccatacacgtgtcatattcctatccaccaaagaaccacgaggtttttaaacaagtgtctctaatctaatcccacccaacaacaaaatatctagccgcggaaaattactttaaaattcatcaccctttgtccctactcttgactcgtgcatgttccatttgatttattccaccacgcaaccaaaatagtagcaatagaaaaaaccaaaatgttgataaaaatttggtaaactatgaatctctatgatcgatattcatttgtttgattgttccatttcttttctaatgcaaatcaatattaaagtgttcttatttcgtgactaaaatatatggctggccgaaaaaatataaaataatatatgacatttgctattagttagcaccagtgatcatttggtgtaagcaaatgttttttgtgccaaaaaataatattgaaatatatgtataattaattcattaacaaaaagttcttatttgttatttcagaaaataaattataccatgtgtccttgattttcttatgtgaaaaaaaattgaaatatccttattgtttttaaaataaacaaattgcaaacctatgtaccaaacagaaaataatacaattgtttttggataaatttgtatagatactttttcccactagcattagatattttttgggtttggtattatcccaaaagtcacgagtgggatttttataggtactcaaaagctaaaatgtctgaacaataatataaaatacattttaaaataaaagtaaaatttagaagcatcaaataagtaatagtttcaatgtttagtgttgatctcttattaaaagaaaaataaacaagaaattcactaaatatttctccatcacaaatacataaacatcaattgcaataaatattttggtaaagtataataaaaaattaaatccaactttaaatatgaaccacatagaaaaaccaaaggctagccaccacaccaattttttcttaaaagaaggttatttggcgtattggatctcttttgtctcgtatacagtattttgctgatgtggcaaacgtggccacgtcagccaattctactagatattttttcaaatccaaatactctttccacaaccgttagatcatggtcggttcgccacccactttcaatcataaccgttaaaacattcgctagattttttctagatattttcttttctccacactattatagaaagaataaagttcttttttttgctctcttctcatttatctctccactcacaaatattttgatttgttttgtaactgtttctctttctctggagctttcttcttcttcttcaataatcgatttaggtttttcaaagctaagtgtttgtgttgtgataatg

SEQ ID NO: 2607 - DNA, 3000 bp, Unknown
  misc_feature (1)..( 3000): cDNA_ID_3068855_gDNA_ID_1620565_Annot_ID_160682 3000 nt of promoter + ATG
tggacaacgcaacactttggattctacttcctgtgtgctattcaagtccactttcaacttttcctgtgaaggtttgagacatatagattgagcagagaatcttgcagctgaatctgaactgccaaaaattccagttgctgccttgcagttgacaccgggaaacttttcagcaacttggggtttcttgaaggtagggatcaaagaaaaatgagcggctgaacaaacatcagatctgggaagctgactgtgtttgtctcccgcactctgcgacggttgagagtcagactgcaaaaatatgaagtatgttagagttacaagaacaaaaccatagttatctcacgatagaattcagtatatttcaataatatacctgactgaaatagccaattgaaggttttggcgctcttaagcctgatggctttcccagtcgtgaaactgcggactgcgtgcttccagctttattgcaagaactttgagctaacgaggtgcccagagtaattacattagagtctggaataactgatgcatgaccaagcatagccacatctgatgcagtcatagggccaacgttggattttgcaacaacagaatgctgtgagtatgatactgtcggaatttctgaagatttgctgatctagagttcaagaaaatgcaataggttactcttaataggaagaatattggaaacaaagcatttgctgcaaatttttagtgcataaactatttgctatattggtttgcagagggcagcatagctttaccacatttcttctagcttgcttaagagagggcttaggaattgaagatttactcgccagactggattttgttttactcttggtgcttgaagtgtttttagagaagctttcagatcctaagctcctctgagaattctctgtcatatcagacaaaaaaccatgtagcaatatataaacaggatgaaaagtaacagaactaaaaaggatatgagatgaatagtttttatttgctaactgaagtgaacatacttaattgagtaggttgactgtttttcgctttgattggactttgagtagtccttttcatgttgtttccaactgtaactgggtcagatttggtagtaggaactttagatatgctcagctccctgcaacgtgatgttgttgtatgcacatttgcaggtcttttcagggtgcaagatggttaaggtaaacaagcaaaaagaacacaaacaagacctgcaaaggatatcaagattgcctatacactcagtactcaaagtaagaaaaggatatgaagatgaaggaggaggccggggacagccactgcgcttggaaccactccttaaatcctgagctgagataacttttttctgggcctataatgcagatattcgacatttagatagactgcgcctcaaaatatatatatttacgcaaggaaagaaacgacttatgaccctcattagctccacaatatttaggtccagtaaactcaccgaggaagattgggatttagatggtgatccgtacttgggcattatgccactgacaagcttcttctctctgtttttactattcacaggcaagtcgttaaataagttttcttcaagtgcttgtagtcctggtgaaacattacatttggaagctgacattgactctctgtactcttcctgaatggcagctaaccgatctccaccaagatggcaagcagttccagttattttagataactcagatgaatccaaaacacctggttcatgaccatatcacacatcttaagattcttagtaacatagaccaaatctttgacctttactactaacaggaaattggtaaaaaaaagtcaccttcttccgttgaaaaagctctatcccatgctaaactcttgcgcaaattaaaccctgcattctttttcttcttcttcatctgttgtcgctccacactcaatttgggcaattcaactttagcattctcctttcctacactatctgtatcaactgaagcgcatggctgctccctgttgttgctggtgcctgttactcttcctgcaaaaagtattaaccttcatatatccgcagaatacacaacatttatactaatttgctattttatcaaattaagatttaaacaatgctaattcagatgcttaaacactctaacaaagggagagagaaattatcagaacgaagctcggatcgagaacgagaaattgaagcgcttaccaattggggaaaaaggaggccgagtaggaacgatacgactagatctagggatttggagaggtgagcatttcaaataactctttcctcggctcgaattagttttcttcggcgtattcttcagaagccaattatcttcgtcgtcttctccagagatatctaagagatccttatccatttctagcttctctttcgagcccaagatctgacgattaggaaatccggaatcctatagctaggttttttcaaacttacactgagaaaatctcttcggaagttgtaggcgaaaatcctagtcggtaaatcggaaattgttcggccgatggaagagacgactgttgatagaatatcccggcctcgtaagcgggaagaggttgaaaaacttgaaattgaaagaagatcggaccaacgttctctataatctcaggttattattgtcatttaaagcaaatcgattgggccggactttaaagcccatttatttgaattttaaattctcgttcaccctttattggtttggtttggttaggataatattttttcggtttgattaaaatcatatcggttcggttcatggagcattgaagtaaaagtagttagcacatgttttatttttccatttgtagcaataagcctagaagacaatacagtctctgtgttatgctacaaaaggcaaaatctctaaagcaaaccaaaagatcggagatctattaacaaagctcttttacttttctattttcaagaaccattttcaccttcactttcactaaaagagttagggtttcaaagaggtgaagatg

SEQ ID NO: 2608 - DNA, 3000 bp, Unknown
  misc_feature (1)..( 3000): cDNA_ID_3068848_gDNA_ID_1620565_Annot_ID_160696 3000 nt of promoter + ATG
tccaaaaggctagggattctaaagggtatagcttcagctcttaaatacttacacacagaagctacacaagttgttctacacagagatatcaaagcttctaatgtaatgttagacacagacttcacaggaaagttaggagattttggtatggctaggtttcatgaccatggagcaaatccaacaacaacaggagctgttggaacagtaggatacatgggacctgagctaacatcaatgggagcttcaactaaaaccgatgtatacgcatttggtgcattgatccttgaagtaacttgtgggagaagacctgtagaacctaatctgccgattgagaaacagcttctggtgaaatgggtttgtgattgctggaaaaggaaagatttaatcagtgctcgagatcccaaactgagtggagaattgatacctcaaatcgagatggtattgaaattagggttgctttgcacgaatcttgtgccggaatcgagacctgacatggtaaaagttgtgcagtaccttgacagacaggtttcgttgccggatttctcaccagattcaccgggaattgggattgttactccggttttggtcggaggaagctccaccgtgatctctaacatttcttctccggtgactgagtttattactcactcgattcaatacggaattggacgatgagatgtaaaatttgaagcttgaagatgaacgttgttaacaaaaagttgatatggccgagttggtccaaggcgccagattaaggttctggtccgaaagggcgtgggttcaaatcccactgtcaacattctctctttttttttttttaaacgtttgcaatattttactaatgtatatattaatttatgaacatacccctttgtgtaattaatttataactatacccttgttaattctctgatttacaatattgaaagtcttctgggaattttgggagacaacatactccaatttcagtttcttctggaagaaaatcttaattttgctacaatggtgaaccatggaaagaaggaagcctggattatggctctggacaaggtgaatttcctttctctgcttctgggtattgatcatcaaacatgagttctggaatttaaaggttttgagcgattctttagctacgaaatgtgtgaagaaggaataacttcagttcagaacaaccaaccaggctctatgtttcaattagatacagctcaaaggttttcatctaatctggatgttctcatgtggtcttctaaagtcaacaagaagctctgggtttatggctttggccaagcttcctttctaatggattgttttagctgatctatagttcggggatgcaaatgggttacggtttctttctaaggacatgtcttcttattctgcttatcttactggtaattatagcgctcatggttcttggagtaggatatctattcagaaaaaagacaagacatatgtagatgtaatagaggctttcatgcaaaaaagaagtagtagaggcatgagaggaggttcttcctggtggtaaagacacgtgtttctaaatggaattgctttagctcttaggtagttatacactgaaatatcaaggcttctcatgttttgtaaaatgctgagttaaaggcaaagtgagtaggttttgtgtgaccatgggtccaacctagataccgttgtctctgtgcgaactttaggtcaaatcgcatggagcttgcaacaatggctgtttgcacagtaactgacatgtatgcctgtatgcttgagcaaacttttggaaaggaaactgtgtaagctgggatgctagctgatagactgtttgaaaatgttggaaacagataagatctgagttcagcttagaaaatagggtcgctttgctcaaatcaaatggtgtgccagaactgaaagcctccatggaagaagtggtgcaatatcttgaagttggaacctggtcctattctctgctgattgttggaatcttccttcattagcagttatccagaaaatgttcaaagctaccacaaggagcaggtatctgaccattaatctcttatctgatttatcactatacagtaatggattttcaccaagttaaaatttcctgctgccacaaaaaactgcctagctacctctgcggaatttaggttgtctaagcaaactaaactttcttctatctaattttgtcccgctggtggtgaggctactatgacataaccaaacaatgaaagaatatgctctatgcgattccctctgtctattatcttctctccaatcttagtttcagtgatttgaattgttgttcatgtgacgatgtattctcctgcacctgtagagctgaattagcaagtcctaaagggttaggttagtaactatatatttttgtcaattttcatattcaccatttaaagaaaattcgtagttttcatgaatatgacaggctttcctaggccttttccctttggtcgggctcataattgtgttgatattattacaaaacttggattttttattcattctacgtctgaagggtcaagggcatgtttaaaatatgtttaaaataatatttatttgtctgcgtccttctaaagatggcttcaaaattcaaatagaagaaaaatccaatgcaagtaggtgtgctatctagtcctacacacattttaaggaatttataaatgttagtcatacgcattattattgttccagggtacctccatgcaacagttgcgttgtctatctaataaattgagatcatataagttaaaatattgtgtcagaatattttgaaaatcacgttgaagctttatggttatctttttaatataatcgtgttagtggagtacagtttgtaaagcaaaggtgattctcttgattaaataaacatctattagaaagtttgataggcttgaatcactgatacagaagcttacatcctctttttgtccattttttctccagcttgcgaggttatgattcatcatcagatccagactctctgattcatcatctgca

SEQ ID NO: 2609 - DNA, 3000 bp, Unknown
  misc_feature (1)..( 3000): cDNA_ID_2167124_gDNA_ID_1620565_Annot_ID_160695 3000 nt of promoter + ATG
tttagacaggtgttggaagtcttattaagggaaaagtaatataccataaagataccaaagcagtcgtaatatttgactttgaagtcgtattcaatgggtctacagccagagagaaagagataattgtgaagcattgagagcaaatagagtatacaaaaacaaaagcgaaacgataactctctatttgtttcattaccaatgattcgaggattgcttttgggaatcatctggatgatattttgtgtttgttcatcatttcagcaagagacgccgtttgtttacaacaactttggtcacgtagatcatcttcaccttgacggtagtgcaagaatcattcccagtggtggtatcctgcaactgacaaatgcaaccaatagccaaataggtcatgttttctacgagaagccgattgagttcaaatcatctgaatcagtctcgttctcgacatattttgtgtgtgcactgctccctgctggtgatccgagtggccatggcatgaccttttttgtgtctcattccactgatttcaaaggcgcagaagcaactcgatacttcgggattttcaacagaaatggttctacttccacacgtgtgttggctgtagagcttgacacttctctagcttcagatgtgaaagacatcagcgataatcatgttgggattgatgtgaacagcgcagagtctattacatctgccaatgcttcttatttttcagacaaagaagggaagaagattgacataaaactcttgagtggtgatcctatccaggtttgggtggactatgaaggaacaacgctcaacgtttcattggctcctcttagaaacaagaaaccaagccgacctcttttgtcatcaacatccatcaatctaactgatattttgcaaggtagaagaatgtttgttgggttttctggctcaaccggatcaagcatgagttaccagtacatactcgggtggagtttcagcaaaagcatggcgtctctgccgaacattgacatctcaaaacttcccaaagttcctcactctagcactaaaaagaagtctacatctcctgtgctcagtgttctgcttggtttaatagctttcatagttttggggattcttgttgtagcttatttgtataggagaaacttgtactctgaagtaagagaggaatgggaaaaagagtatggtccaattaggtattcctacaaatctctatacaaagcaaccaaaggattcaataggagtgaatttcttgggagaggaggttttggtgaagtctacaaaggaactctccctcggagcagagaactgagagaagtagcagtgaagcgagtatcacatgatggtgagcacggtatgaagcaatttgttgctgagatcgtgagcatgaggagtttaaaacaccggagcttggttccacttcttgggtattgcaggagaaaacatgagttattactggtgtctgagtacatgccaaatggtagtcttgaccattacttgtttaatcatgatagattgtctcttccctggtggagaagacttgcgatccttagggacatcgcatcagctcttagttacttacatacagaagctgaccaagttgttatacacagagacatcaaagctgcaaatgttatgttggatgcagagttcaatggaaggttgggagattttggtatgtccaggttatatgacagaggggctgatccaagcacaacagctgcagtgggaactgttggttacatggcacctgagcttacaacaatgggagcttctactggaactgatgtgtacgcgtttggtgttttcttgcttgaagtaacttgtgggaggagacctgtggaacccggcttacctgaagcaaaacgttttctgatcaaatgggttagtgaatgctggaaaaggtcttctttgattgatgctagagatccaaggttgacagaattctcatcccaggaagtcgagaaggttctgaaactcggtttgctatgtgcaaaccttgctccagattcaagaccggccatggaacaagtggtgcaatacttaaatggaaacctagctttacccgagttttggcccaattctccagggattggagttctgtctccaatggcgctttccccagcaccactcgtgatcccttcactatcattttcgtcttcctcctccaacaactctatgtttattactcactcagtcctctacgggagtgggcgatgaaagtttctaacaacttccctcttctttggcctcttaatattgactgattttcagccatttctattcagattttgtttcattaatgtatatggtagcaccatgtccattctccatgaagcttagcttgtagaacgatttttaaaaaactgatttttcaggtaaattcttgcaattacttagttcattatttgtaaagcaagttgttgtcaccatttgagtacagtgataaattgttatgtattgagaaagctgatatagttatggatttgtttcttttaatggttatgctattttggaaaactgatagatatcaaaagacacaacagtttagtctgtaactaaccttattcatgccagatctcaggtacctgcaatatattattgcaaatcacgtatcctaggagatgcatgtttctgcacatttgagtaggctcttggcttttaaagagttaaaatactcggagatagtgacaattcaacattttatttcgtttaagacaagtaggacttggtatgacaatcaatgagaagcttgcctttcaaaactgtgaaactacaaggaaattttattatgtggaacttctgaattcttttatcaaagaagactaaaatgtgacagctatcatattgttgaagtcaactcttaccaattctcttggaaaatgcagaatgttcttcttcttgtgaagtaataatccgaccttgtttcgcagatggagaggatagttatttgccataccattgactcagagacaggatttttctcagaacagcaaacactttgttgcattaaca

SEQ ID NO: 2610 - DNA, 3000 bp, Unknown
  misc_feature (1)..( 3000): cDNA_ID_2167087_gDNA_ID_1620565_Annot_ID_160685 3000 nt of promoter + ATG
atctagtcttcccgagaaaataaattctttagctgcaccagctagtatacttggctgagtgtcacatgcttgcagctcaaagtcgcatatctcctcaggtttacaacccagtgcgtttgcaatgatctaagaaattaaaaagaggactacttggttactaaaccagaacaagatctaaaattcaagctaaaaccataaagcttatatatttcaactggacctccattagaagcggatgatgctttgatttagaactagtttcagcacacttctttccttcgtcatgttcaccactttcagctggcgttttattgagctccgccttcaaatatatcacacaatataaataaattgcaaaggaagtaagaattcaagtctgctacaaacttgacaacaatggtttcgacttcatagataaatctgccaaaagttaaggggttcacagagatgggttctgatctcaaatagtgggtgacatgcaaacaaatactttagccatactagatgaaacaaaatttagcagagacgctggacaacatagcaagcatagaaaaagcaccttaatagctgttgccagtactggaacgaggtgtgtctgagtgtttggcttaaaaccttcagtgttcacattcctgtccgcaaggcaaaacgaaacgtacataaagttcaatattaatttctctacataaagtaactgagaaataaataatgtttttttttatcgcaaacacgacaaaaaaagagtctaagaagtattccaatacaaagcaatgatttaaaggtaacctgtccaagtgaatggccaaggtaggaatcctcatgataggatcctcaatcctgacaaggcgatgagaatacgagacagaacctgctttctcttctttaagaatcacacgtcctgcaacagtcaagtcacgatcaaaccaggtgtaccacagtccacctccatatgtttgaacaccaacctccaagcatccacctttagttatctgtcaacacaatcctcactttctagtcaaaaaagatttaagtaaaaccgctggagaaaatgtcaaaaagatcccaaaatccaaaatcaccttggatacaggtttcaatttgaggcacggactatcagtatgagctccaataatatggaacccgtttccagctacgtatctgttcaaagttttccaaaagattagctctaacattgtagcaatagatggaaccattggtttcagaagaagaaggaaaagatggttacttgtgaccaatggcaaaagcaacaatagtggagtaatttctggtgaagaagtattttttgccggcttcgagtttccaatcatctctctctgaaatctgttcatacccagccttcaaaagccgtctctttgactcgtctacacataataaatagtagatcaatcaatcaatactagaactgaatcaacaacggaaaatcaatagttctcaaaaggaaaagagatgggtgatgattgacgataccgacggcatgaaaagcggtgggagaagcattgagaaaggagaggaaatcagagacgagggagctcttatccatggctggatctcttaacttgagttcttcgggtttttgtgaggcagcactccaatggatgttcggtttccgatcgtccctgtgtaagtcttgccggaggttccgtttccattttagtaacccgagaagttttattggcccattacaaagcccaattggttttttaaataaatagttatttattcatgagtacataaaaaaaatgttatttattcatataaacgttttatacttttatgtaaaaactttcaataaattattatacaaaaatttgtttcatttgaaattttgaattaacgcactatttaaaaatttgttcattttaaaaactttcaaataaattttgtagtcatatactataaatacccttccttatatgtggttggataattttggtaataacataagaattcccaaaactagaagattttatgtggttgggtaatttcggtagtaacacattcaaacaccattaaaccaatcaaaaccgaaccggactaagtggtaataaaattagaaatcgaagggtaataaattctagaaacccttttttttttttttttaacaagacagcaacgtggatctggcagacaaaatcatatatataaataatattaagagggttaaaaaaggccatcgcctcaaaaatcacagccatccattttctctttctctctctctctgtagctctctctcgttcgagcttccatttttcctcatcgcaatcttcatcttcaatctccagctatctcaaatcgatccttctcgaatcgtatgttttcttatcacctcttattgaatctccttcgttctcgttgagtttgaatctgctgaatctcaaaaccctaattctgtttcctccgaggttttttttattggcatcatcggtttattagtttggatcgagaaattgagattgaagattgagatttttggattaatctacatgtgtttatatttcctgtgattgatttataatgatttgttttcacttttgtccgttgacgcgtctttaattgaaccgtcgcggcgcatgcatagatcgatactgtgaagttcttcattgtagattcattttgttgtttgtaattatattgttagtattcgatctgaaatgttgaatatttagagtaaatttaagattttttaagttggcctatgataacgttgatgagatgagtgaacatagatgatttctaggattggatttcgaatgttatcatttagtttcttctgataattaatgaagttgccagcaaaaaaaaaaaaagttttttcattgcgtttggtttttacatgtgttttatctgatagctcatgaaataaaatttactttcttagcctgtggccttagctttgatgattaatgtgtcttatattctttctcttagaccatcatgagtgaccatggtgagaagacttgtccactttgtgctgaagag

SEQ ID NO: 2611 - DNA, 3000 bp, Unknown
  misc_feature (1)..( 3000): cDNA_ID_2167104_gDNA_ID_1620565_Annot_ID_160691 3000 nt of promoter + ATG
atgaaaatagcggtgataaaggtgaatgacatcaatggacatgcacatgctgccccattatgacacgtgttaagtgacggttaactagatttttttttgttttttttagttactttgactgaataatctatatatatttatagttgcccaaagaaaaaataatctatataaatttaatgtcatataatctatatatacttaatagtctttcaataatttttctttgaaaatctagaattaagaaatattacaacggtgattaaatatttttaacacaattgtgtttttgaacaacatttgttaataacttttttaggcagatatgattttttacattacattaacaaatgtaaccgtaaaacgaaaacagatattttaagtttagcaggaccccatattatttttaacgttttttttttttctttcaccttgacaaaaaaaaaaaaaaaaaaaaaagtttttcccaaccgacgataccatcaagtctcctcaatccaacgggctccttctaaatttccgggaattgcattgcacttagtaacataaatggtgccttattaaaaaatggtaagtcataagtgaatgggcttggacgcttggtaaataaaatgaataagctaacttagggcccatttatgctagactattgatgatttacgttttactttggataataaaaagtaaatgttgattgtttgttgatgatacttgacagaaacaaaaggaacatgaagaatatcttatacttcgtgtctgaataaggttaagatcagatttttctttgtttggattttatttgaattcacactccataaaagttacagagtaaacgatgtagtcatacattttagctacgacgactagagaggcaaaataaaatagtcaataagcaattattgttgacaaatatgtgcatgagaaacgatttaattaaattatcaactaaacaactaaaattaaagaaatagtctataaagattccccgggtttggtttggacatgggaaatggtctaaaaccggaaatgaaaattcaaaaatcaaaaactatcatcaaaacgacaaaggagtacgctttgtcgtgctgcgttttggaataaccttttgttcccttgtctctctctctttcttgctcagactcactgcccaaagccacaacacacattacccacttttctcttctctctctcacacactgtttcctcttggaatctgcaaaatacctaaaaagaaaaagaaaacttaggttttgcttctctacccacattttctttaaacaaaaattgaatcttttcttcaacctcaaacccttctcgcagcgtaagtagctccttttattcctctgaatttggttctgatgattatattctcatgaaaacttttagttactctgtctcctgaaagttgcattagcttttcctggaaaatgtagtttcttttttgagataaagttgtgattttttccacccttttcgttgcctcttttgcatattctgcttcttcttcacatgttaagtttcagaaagctctggtcttttaggttcccttctcatttagcttaaatcataagtaaaattactaactttttactccatgtaaatgttgaaataactaggaacttgaccttttgctctgaagaaattggaccttgaaatataaaaatgtctcctttttgttcttcttttttagtttgtaattattatttcagctattagtttacttttaaagtagaatattgggatagttcttcatatgtggtttgattaaaaaaaggaactctttttttttctttgtttttagtaacttttaaggttaaatgttgaggcttttctttgctgcactgtgattgtttgctcatgcttgctttaattaacatgatcattgcactcaagtgattttactaattagatactcctttttcctggaaaactttatccatgaaaccaaatagatttctgattccctttgggtgggtatttatctgttgatttttcttatattgaaaaaatgtgtgaaactcattatgattcatgatagtagttctttaacgtctaagtcccctccttccacgccaataatggaggagaagatgaaacttggtctagaaaattgacagtttaaccctcttgtgtcccattttggagggtgaatctggtggggacattaaagtaaatctaccacattatgctgcttgtgtagttgtgtaggacccttggtaccagccttcatgatgataggttgtgaacattacattgtcaagaggcaaccaatgaagattcgttttatgttactttatagtcaaacaacttttatagttagctacaatggttacaatgacaagatatgaattgtttttttctttctttttttgggtttatattggataaatccagaacaaaacttaactatacagtctttgaaatcatattttggcaatatgcttctagttcacctgagatgtgactctgattgtgttgattgtatcagtccattttagaatattgaatcaagtgttgtattctctattgagtgaaatagtaaagaccaagtttttgtttggtgttctagagctatgtagatgtttgatcaagaatcataaacacgagggcatgcactcagatcttaatgcggttttatggtattaatgcacaatccaacgaatctcaatgtctgactctgacataagacactagttagaagagcaataaaagattttgtttcttctttgggatgttcatatttctggtagtggatttgattatagacgtaaagatatatttttttacgcttatcctttctctgtaataactcctatcatgttttctctctgccattggattcttaattatgtctccatctttctgcattaaatattcatgacctctctacaattcttggtgggtcaggctacattgaagaaacaaagaggaggctaaaaatatcttttgtataaacaaggttttgattcatcctgtgttttggagaagtaatattacagtatg

SEQ ID NO: 2612 - DNA, 3000 bp, Unknown
  misc_feature (1)..( 3000): cDNA_ID_2167120_gDNA_ID_1620565_Annot_ID_160694 3000 nt of promoter + ATG
gccaagagcttactgtctctttaccctaaatctggagttaggagatgtgttgaatgtcgtggcctcttctgtgtggactgtaaagttccgtggcatggaaatctgtcctgcactgagtataagaaattgcatcctgagcctccggcagatgatgtgaagctcaaatctcttgcaaataataagatgtggcgccagtgtggcaagtgccaacacatgattgaactttcacaaggatgcaatcacataacttgcaggtatctatctatttctctacacattgatcctcctataaaccttatcaaacaaggccatgtaagctaaagcacatgtgatggattgcaatctttttatctatgtttaactattctgacattccctttggtattctcattagatgcgggcatgagttttgctacaattgcggaggtggatggaacaagataatggggacttgtttaaatcgctgcccaacctggaacgaagaatacatcacacgacaagatccagcgcgtgccaatgtggcagctaacaactactttgatgatgaggatgatgatgatgttgatggtgattacgactatgatgacttcttccacccgcattttggacatgctatgaatgatcgtaatcctgaagagcccttcgaccccttcttcgacttgccagatggtaatgtgtccttccaaatctctctaaaactcttgaatcctatatatttcacaactgaaagcactctctgtttatctgtaggtgtgctctttaccccccagatgttgtcttccaagagtcgtcagcaattgtacttgccggattcagatgattcagatgataatgcgacaacacaaaatgctcctgctgcagatgagaattgcccatactttgggaagtatggaaagtacactataatgtacgactccgacggctatgaactcgaggatttcacgaaccctttccatcctgactatcctcacttctgaggtttggtttggaaccaaagttcgtatttttctttcttttttcaaggtccaaacccttttgctatatgctctttactctttaatcgttttttgaggttcatgtttctatgacgtattgttctatataagactgtttgggtaatctttgaatttgaagacacctcgggattaaagttttttttttttccaaaaggtgtctttgtatatataacatctaaacaacagcatcatccatcaatggagaatccatgttggagaggcaagtacaagatacaacaacaacatttacaaacaacgaaatacaagtaaagtacaacacattctgccacaaaagagaaagttgtcaaatggtagcttgttaagagcaacatcataactaatctcaataagaccaaacatcaaaactcaaaaggtttggagttgatcttatagcttccatcatatgcttgtagtatgattgctttgtgctcaccatcttaacatccgaacagggtgatatcttctactctgattataagaaaactaaacagataaaagcataaaactaaaacaatctagactagaagcttaaccatgattaaaaagccaaactaaaataaaaatcaaaagcgataagaaagagataaggatggcacaatcaaccaaggaaaaggtgagtcatcaaagtggccggagagataccggaccaacttctccggtaaactgaaaaagattacagaaccttcaaaaccaccatgcccaaactaattccaaggcagcaaaaacatccttaactgctaaaagaaacatcttcttctttattcaatatgtcacaaacgaagattgagatatggcttcaaaaaccttcgagaagaagcatcttacacaaaaaccggccatgacgtcgccgaatgagccaacacatgccggactcaaaccgtccatcgccataaaaaggaaacggtcgatgacgaaaatgatagccgacccaacacatcgaataataagccggtcgttgtcggactgaagccggttgcaacaactggacggccttgccggaattaaccggacggctttatcggaataatctgaacggcggaagaaatcaagtttttctctctagaagatttaagagagagaagagagaaaaactcatctccgttttccccgacgctcatgacttgggattaaagttagagcattgttttcgctatatttttcgtcgtttggttattggtttcggcttgctcatctttttatttcccttcaatgggattgatagcgaacaagtaaatatatttttgcattcctatataaacattcgtattaaacccattttatatagctcacccacccacttaccctttggcgaaatcaattctttgtttttttttgtctaactcaccgtctctgtctctgaattcccagctggagatatcagtcgccgtctttttgctcttggtgaagatagattcgagaatcccgaaggttctacgattaccacagagaaattcactatagtgagtaccccatctattggatttgcagcaatgcatacgtctcgcagtcaataagctgaggcggagtcacgtacatggactttttgcttgagctttctaccaaataacccacaggttcgtcatttcttagtatagtgtcatgttgaagaattttcggtcacatgaatgttcaagttaaatcgtatattgttctgtgatgagaaagattataatctgcttataaacactgttccttcatatacggttaataatctctaaacttttgttttaaaatgattatgttaaatcacatactcaacaacggaagatgaagaaatgtttggattcaactaagcattatattagttatgcgtaatctgtagctgtagagaacatgatcttattgaattttgtttcttttgttgatgttttaacttctaattaggaagattgtaatctggttatgatatttttccttaaattaagtgttttactcgtttcgagtttttgttttctgctgattatggccattacaagacgcaaca

SEQ ID NO: 2613 - DNA, 3000 bp, Unknown
  misc_feature (1)..( 3000): cDNA_ID_2167116_gDNA_ID_1620565_Annot_ID_160693 3000 nt of promoter + ATG
aatcttcgcttacgtagttactgataaaggctcaggccggtttgtgatgaaccgtcggtatcttgattattatctcaatgattattccggttggttaaaggaccgtgtcacagataatggatattggagagatatcggatcgtgtgttagagattctggagtttgtaagaagattggaagagatttaaatggtgttccagaaactgctcatatgttttacttcagaaatctttctcctgttgaggtattattattttttttgtttaaaagaacatactagtgtactcttaagaaactattatgtcacttgttcttggaatctaacacggtgtgaacgttatatgatatgtatttgttttcaatctgtagtccggatgttgcaagccgccaacagattgtggctatacgtacgtgaacgagacagtgtggattccgggaggagaaatggtgggaccgaacccggactgtatgttgtggaacaatgaccagagactactctgttaccaatgcagctcttgtaaagccggtgttcttggtagcttgaaaaagagttggagaaaagtctcggtgatcaacatcgtggttgtgatcatacttgttatcttctatgtcatcgcgtgtgcggcttaccagaatgttaagaggatgtataatgacgaaccggtcggtgaggctaggatgaccaatctcatcctagtcattttcaaatttaaggagattttggtacagtttttcttcggaattgtgtttttattactctttaatggtttaatggtctgttgttgtaatgataaatttgcttttagtgttttcttctttggatatgttacatatgcatgatgatgattgttcttgcagattagttgaaagaaatgctactcatctttatatagagtagaaattaatttaaagttgatatgaaaaattcaaaccagacatgagttaccgagaatggttcctcaaagagtgttcaaattactcacgttgggaacatgttgttttgaatttgtggattgatcttcacgactgagttctgggctccatctacttatcgtttgttcttccactgtgaagttctccaaacatacaagtagattcacatcctctcctttgaagttaccattaacgtagagagtcaacaacgttttcgcaacacttccgcttaacctaacagcacaatggatatctgaccacactcttaaccgatcactgtcaccagactgaactaaaaccgagtattcagagtggacaagagatggatggtgacggtatgccacaaaatccacaccgtattgcaaccctgatctcaaaacccagttcttcgatcgtaaatgtgaataagctttgaaaaacattggaaagtttggtctttttgatttcatgtagagccatgtgtctacttcattctccaagcaacgaccttgaagtgagattttgatgcatttgagattgtaatgcaaaaagaaagcttcttcaaaagataactgaatccatttcttgattttctctgccgatagaacgagtctgccaaaacaacaacggtcaagaagctcagcttgctctggctcaaccgctagaagcacattgcaacttgagagggttcccgaggactctgtttcggctagagagagctggagctctgagactgattttgaaataggttctgcaagagcttttgcttcagctcctttccatttccatctaggcgccatggaattgagctgcatatatagcactaaaaatcaaaccttttgaccaaaagatgtaaaagcttttcttagtctattaccaactacaactcttataatctaggaaatcagataaacattgtcactacgacatagttgttaacgtttaaggtatcttgaagaaccaagtaggaattggaatgagcaaaaccaagagcttttgattcttttcccacttttgtattcaaaaatcaatcgtctatgaagcggaaactgtgacattcaaattcacaacaaaggtattttgaaatagtaaacacattttaattgaagaagcaatcacattcagacttgtcctcacatgacagtaaccatgaagagaagagatttggttaaaaacgaaacctggcgtattgatttatgaagaaaaaacagaggatatgaaggactcgggaagcagggtctacaatggagagagctatgcttcgaggatccaatggagagctatgcggtagtgaaaaacgtaatctcgtaaaaattattgttgatttcgattgcacagtgaaaatagaaaagaaatagccacgaagattcttcgaaatcgagaggaagagatcgagaattgaaacgagattcggatctctctctccctggggaagacagtcgcgcgactcgagcagcagagattgtggtgcctactgagtacctcgtgtgaagtctaaaaacagcgtcgttttcagctaaataaaattctacaaaaatgacgtcgtttggaataattttgtttgggctgcctatttatacatgtctaggcccgcgaattttaagtctacagtatttatttaaacatcatacacaaaatccgaaacagataattttgattcaaattggtaactatcggaagtatcggatgagaaggaggaaaaaaatgctttgcttatttcattaattactaccttgatactatctttaataacagatttaatttgatattatagattccactttttacttaactgattgataagatggagataatagtttacctttttatttactggttaaaatcgagaatttatggtccattgacttcttttgaccaagtttaacgaagaagcgtctcatgtaagctattcacaaatgacgttggtaccccttcccacacacgtatgatgtgattgacggttctctgtatatatattaatttaaaggacgacgtaaagcaaaaaacctattcgtcgtcactcgtctgtcgtcaccattcatcaacagagcataacagttgctgatttaagctctgcggagagcaagt

SEQ ID NO: 2614 - DNA, 3000 bp, Unknown
  misc_feature (1)..( 3000): cDNA_ID_3054206_gDNA_ID_1620565_Annot_ID_160684 3000 nt of promoter + ATG
gcatccagtggtggaggtagcatgttccctgaatggtgctgcagaatatttgttgctccagtgatttgttgaactctactccttcaaaattactataagacttaactaatcatccaaaaatactagaccaactatcatattacattacctaaagatactggtaccatgaaacagaacaatcatgaaagcaagagggtattttaaaatttcagatgatacaaataccttgtataggctgatatgatctcatcttttgtgaagctatcatcttgagaaccaacctcgtgcaaatagagacaatcaggattgacgcatgcctggaataaaaacatgcagttcatcactccaaagacatcaacttcaacatgcatctgaagcgaggtaatcaaaaataacaacgcagaagaacaagaatctataggagacataccacatttctcagccatgcatgacaatacttggttgtcccaaaacatgccctgcaaatatagatagagagcgagaactttcatatgatcattaggtgaatataataacttataaatacaattctagtttttttagaaaaagcaagtcaaaacttacttcaatggtttaccatccaagataaacccatgaacagcttgaatgcagcgaacagcctcttcctcttttccataagtaatatatctgcgatgcaaaaaatcattatcagacaacttcactgaccaaatatatatatataaagagggaaattgtttgataagaagtatatacagaaacgcacacactgcatgtattgtttgggaattgttggatgacaccagatgctgttcgggacatggaaacctttagaacttttccatactgaccaaaatattctttatgttggagtagctgaaagaaaaatggcgcgctaatcagatagtaatctacaaaaagaatgattataaaggtttggatgtaagttgtcatacatcttcatcggctagattaagaggcaacccaacaatgtaaacaagattcctctggatcactcgcacactggtgagttgttgctttctcccttcagaagattttgattttgacttctggatcttcttgcgctccatattgccttcagaagccagactgggaacaggtaattatagagaaaagccatcagcaaaagaaacgaaaaaagactgtcccagactaaaattaaatgttattacaaacctgtcacaattaacagtcatccctacaatcttttctttgtcatatggagtgcgacaagctggacaacgcccttctatttgatctttctctgccatgtccactatgtgatgccagcaccaaacacaaatctgaatcacatacacaaaattattaacagataaaagagtgattatagcgatcatgaaaacagagaaagacgagagctattgaacattgcaataagcaaaactgttctcccaataactttcagtttcaagattaagccgtaacatatcaattgaaattaagagaaaatggaaggtagatgcaagacctgataaccacatttgcaaggcttcaattgttgatcagtcagatccatctcttcagcacaaagtggacaagtcttctcaccatggtcactcatgatggtctaagagaaagaatataagacacattaatcatcaaagctaaggccacaggctaagaaagtaaattttatttcatgagctatcagataaaacacatgtaaaaaccaaacgcaatgaaaaaactttttttttttttgctggcaacttcattaattatcagaagaaactaaatgataacattcgaaatccaatcctagaaatcatctatgttcactcatctcatcaacgttatcataggccaacttaaaaaatcttaaatttactctaaatattcaacatttcagatcgaatactaacaatataattacaaacaacaaaatgaatctacaatgaagaacttcacagtatcgatctatgcatgcgccgcgacggttcaattaaagacgcgtcaacggacaaaagtgaaaacaaatcattataaatcaatcacaggaaatataaacacatgtagattaatccaaaaatctcaatcttcaatctcaatttctcgatccaaactaataaaccgatgatgccaataaaaaaaacctcggaggaaacagaattagggttttgagattcagcagattcaaactcaacgagaacgaaggagattcaataagaggtgataagaaaacatacgattcgagaaggatcgatttgagatagctggagattgaagatgaagattgcgatgaggaaaaatggaagctcgaacgagagagagctacagagagagagagaaagagaaaatggatggctgtgatttttgaggcgatggccttttttaaccctcttaatattatttatatatatgattttgtctgccagatccacgttgctgtcttgttaaaaaaaaaaaaaaaagggtttctagaatttattacccttcgatttctaattttattaccacttagtccggttcggttttgattggtttaatggtgtttgaatgtgttactaccgaaattacccaaccacataaaatcttctagttttgggaattcttatgttattaccaaaattatccaaccacatataaggaagggtatttatagtatatgactacaaaatttatttgaaagtttttaaaatgaacaaatttttaaatagtgcgttaattcaaaatttcaaatgaaacaaatttttgtataataatttattgaaagtttttacataaaagtataaaacgtttatatgaataaataacattttttttatgtactcatgaataaataactatttatttaaaaaaccaattgggctttgtaatgggccaataaaacttctcgggttactaaaatggaaacggaacctccggcaagacttacacagggacgatcggaaaccgaacatccattggagtgctgcctcacaaaaacccgaagaactcaagttaagagatccagccatg

SEQ ID NO: 2615 - DNA, 2584 bp, Unknown
  misc_feature (1)..( 2584): cDNA_ID_2025601_gDNA_ID_1620566_Annot_ID_160701 3000 nt of promoter + ATG
gaattcatatacagcacagtgataaacataaacacacacacataaatatgcagaatcatgatttaattgattgtgcaaggaactattcacataggagtcggagttattgtgtcaatttaaaaataattggtgttttatcaggtgatagataaaacattttgagaagttaattatatgtaagttttttgcgtaaaggggctgttattggaggatttttcttaaagctattttaaatataagtttctcttacaaatttgtgactcttaaatgtggatgagattcgagaaaaagagagattattccacttacagaaatgaaatgaaaaacgttggtcacgacgagaccgtcaatcacgtcgacgccgtgaatccagccgagagacgcgtttcgttctttagcctttttctgtctttcttgttttggtaaataataagacgaaaaatatgaaaccaaaaaaatgaagaaatttatatgtctaacgactcttttctttgactataatcatcttttctttttaggtcccaaccatttcttcttgtattatctatcacatatcatcagatccaaaatcaacttgattaacttccttactgaattagatgtaatcaacgaacaacttggaattatcttaatcaattcgtgttgttagtttgcatttctctactaataattgtctacatagatactaacttaccaagtatcaaaggatcctaagaagtccaaaatgatatctcattagaagtcaattaatccatataattaagatttttagtaagaaatacatagatgaacaatgatgttaacatgtaaagttgcctcaaaaaacattctcctccaataccttatatgaaatcaaattaagaatcatttgagagcttggttacacaatttaagttttttctttactttgctttagaataaaaacagtctcatccagctcctgataagaggttttaatatgcctctatgttattaaccagcgtaagtccacaactgatttcagtggcttatcatgattcatggatagagtttgagggagattttgggacttaggagactgctatacgcataagttgtagcacatatggctcagtctctcatcatccgtgttgaaaacatacaatggtcagcacctattatggatcgggcctatatgaaaaaaaaaaaaaaaaaaaaaagcaacagttctggagagtttccatcattcaatgtgtaaactaattttcttaaacatcttgttaattttcctaagatctgaagcattaatgggatttcatataggcttcaaaggctatataaattttcctatagcccaactaaatatattatcatattgggctcacttacttggagtcttggacggtttaacaagtttgtactattgtttattattcacagcctattaacataatttaatcctaatgctatattaattaaatagattatattcaattaattagttatacagcaaacacaggagctttctgtccacatgcacgaccaccatgcatagtcccttctttacggtctatattcatttgacctcttcatctatataatttcatttattcccctaagattattataccaaagtgaatagaaaaaaaaagaaaccgtctatgcgtttagtttttccccaaattgctataacttaaatcatatagatttgtagagaaaatatcagaagaatacgaaaattaaaagtatgagtaatttttttattagctgaaaaacgagaatgcgagaatttttataaagacaactttttgtttcgaccttttttttcttcttccgcacgtgttccctaattcacctaactacaagtctacaaagtacaaaacccactcaccatccacacgttacgattttgtcgtaaagtatatacgattattcattttctttttctatttgtcaaacgtgaatattgtttttattgtattaaaaagaattatttagttttcaatttttggttgcttcaagaaaatactcactaacaataacataccaaaaatattatcttccaatatcgttttattagaaaagcgtcgaaattgataccttaattttgtatgatatcaagtagtgaatcacatttcttaatacacaaattagcataacgttgcaaaagaaaaaaaaaattaggaaggagaaaaagaaaatgtattcttacaaaaacattaacgttgttatactacaacaaagaaaataattatttttctagtttgaaatacttttgaaaatcaacgttgttattaacttttatatatttatttattattaattttcacaaaaagttgttattaaggagaaaagtgtgttgttgttttattttattttattttttaatccagggaataaataatttaactataaccactttaagaaaatgtgacagagccaccaaaaagagcataaaaagtaaaattaaaataataattatgattttgtattaaaagaaagaaagaaaaaaaaaggagaggagaagaagcagtggagagagagcatgtgaataaaaagcgtgaagctttttgatatctctttctcttcctcttcctttctcctccgatagatttcgccggcgatg

SEQ ID NO: 2616 - DNA, 3000 bp, Unknown
  misc_feature (1)..( 3000): cDNA_ID_3068877_gDNA_ID_1620566_Annot_ID_160706 3000 nt of promoter + ATG
atttttgtttctttggttgtttcatttttctttttcttttggagaaatccatctttcataacttcaatccttagatttacctaaattccaacaagtcaaaccaaaaccataaatcaaccaaatctttatttgatgttaccatgtaactaaattctaaaataccagtctttattaaagaaacgtataatccttcttcttcctaaaaggggttcattaatcatacaactccttcatgtttaatgcagaaaccactcaacactcattcatattacataacccaaagaaattcatcaacattgtcatagctaaagaaagaacacacattcaacactcctctgaacattccgctaacacccctacttgctttgtgtaccttattaattccaaaaacatgaagaagataatcaagagacaggtagaccatataagcttacagatatcgttgatgtgagttttatattacctagaagagaagagggtgatatattacttagatcccacgaatcatcactcatctgtgacagaaatacaggaacaaaaaaggaataagacattgtcatttggtcagatcatagatatatctactggaataacactttattcacaacacacatttcactgttcgaagatacacagagagggatcacttaaaatatcatgcagattatacattgctagtcgtgatgcagtatggtggagataacaaatgtaacctatagataatagcctttttaccttatcagtgtacattcagatctttttacaaattcactaggtagctccgatcttgtaacgtataccaaatgctccagaactaacaccagtgactatcttacagaagaagcaatctacgaaactcagtaactttatttgacaagttttcatctgaacttgtcataaaagtaagaaggtagtgcctacatctcagttagatttgatatctaaacattacccaagagtatagataaaaaaaattttggcatgttaaccagattcttcctacatattcccattctttcctaaattttcctctgttaacattgtaacctttcctagtctggaccaaagcaaacaacaacaaaaagtataattgaagcttcctttttagaactactgcactatttgattttcaatgtttcatacaacaacaagtatacagtcaccaacttacgaaatgaggggttatagaagacataatttcttatctgccttttcccaagtcaagaatcataatacttggatgctaatgatacttaatgttgcctcaaactaaaccgaacagaggaaaaataaatcaaacaaactcacttagaaaagtttatcttcaagggtcaaaagaaactttcctctggactagagtacttttaatctaaagtctaaacgcaatcaatgggtagtgtaaacaatgcaagaaatagaacgatgtcggcgcttctttgtcccatgtgtaggggaacaataatcttctaacatatattacagcaaattagccataaccaccaaaaattatgatatatactatacaactaacttcagtaaatagaaacagtttcggcagatgaagaagatatatacaaattcatagaacgaatacactaaagctaggaaatcatctatgtacatgaccatcatcctcaattttcgggtaagcaaggcaatgaacatggacagcatttctcactaaatcgacaaaatcatcttagttcagctataaaaggatctcattttcctgtgctaccatctatggcaatctttttcacaacatattcacgtgatcacaaaattcacaacactcactacactactgaatctaaatctgacacatcaacagaaacatccatgaaaaaaataacaacgaaagcagcttatctaatcaatcactgaatcacatagagatagagataattgatccctgacctttgatgtgttcatgatgagcagaagcagaagcagcaacaacatctccatcatcatctccaccagacttgacagtaacaataggcacaggtccatcacgatcatcaggatatctaaccacaacaacaggacaaacacagtgatgaacacagtaatcactaacagagccaagcttgccatcacttcctctttttttctcagcaccaaaacctctacttcccataatcacagcactaagaccaagcctctcaatctcaagacataatctctctctcatatcatgatctttcactatatggatcttataaggaaaccctaactccttcaacggtttagctagatccgcaacttttgttgaagtaaaagcatcaaaatcctcttgactaggttgaggttgagcgtttggatcttcaatttgagttttcagagggagaggtccccaatcggcaccgaagaggacggaggttggagaaacgtggagaagaacaacggcgtctccgggacggatgtagtgatctacagcccaacgaacggcgaaagagctttcttcggagagatcaactgcgactccgattttacgacgagctccggcggttggtgttggagttgcggcggaggagggagtagatgaggagtggtgatggtgagagtgacgtggagatggagggtgatggatcttgatgtttggaagctgtggatgatcggaatctgctggattcatgatttttttcagatgttgtttttgttcgtcggaaagtgggagtgagggaggtttctcttaacggagaagaaagaagcgttgtttttgtttttttaatagaacattagactgcatgccgttatttatatacaaagacgacaagcattctaatatagatgtagttaatagaaggagtgatccaacggtcaggatcaaatctgagcgccatagttttgaagaagacgattcactagatctccggcgtcggtgatttcctccacttccttttctggcagctagaagacgaaacctcactcaaattctgatctctttgtataattcgatcgagttattcgtatgattcgtatagatcggtgactcag

SEQ ID NO: 2617 - DNA, 511 bp, Unknown
  misc_feature (1)..( 511): cDNA_ID_2048793_gDNA_ID_1620566_Annot_ID_160719 3000 nt of promoter + ATG
tcctttaaagagaataatttaagttaaatcagggggtagaaaaaattaattcaaccatcaaatatattttattaactaaaataaagtgggagaattcaagaatactatatagtttgaatgtccttaaactattaaacctttttattcaagccagtacgggtattgaccaatatagaaaacaaaattatataaataccactttttgtaatgaaacgaactaaaataaaataaacgacattataaagtaaatcaaattaaacacgaatagtaagccgttcacttaaatcctggatttcaacatactgtgaaatgaccgttataccctttgatatcttcttcaccctcttcctctttccctctatatatatgaactcttcctcttccatttttcctcacacccttaaagcttcaacaaaaccagatcaagcttctttcaccattttcactcttctttaagctttctttcttaatttctctcatttcgaattttaaacacaaaacctaaacgatg

SEQ ID NO: 2618 - DNA, 3000 bp, Unknown
  misc_feature (1)..( 3000): cDNA_ID_2048860_gDNA_ID_1620566_Annot_ID_160702 3000 nt of promoter + ATG
catatttgtagattactgcataagctagtggtttttaatcggtttatttgttccggtttaggaggaacaagggccattacggtttaggatgagcaagggccagtttcaatgaatgtgaatggcggagaagtaaatatagtcgaggaagcagcggtaaaagtaagaatctagtttatttacctatctaagagtaataaagctgctgcatttcacgaacccttatgttctatgatctttaatggatgatatcatttttaatcttcgtcctgtaataattcaccttcaaaacgcggattatacatgtcgttttcctgacaaaagacaaaaattagtaaattactgaataggctctaacttactccatgctatttcaatggttaacgacccaaattgtctctcaaatttaaagattcaactagaaattgccgataatattggtccagttttgggctaataaattttgtttattgggccgactcgatgaccattttaaagaggactcaatagatttttattgatacgaaaatattattaaatcagaccgaattaaaatgccttgaactccggtttagccgacatgtttggcaccctaatgagaatagcttagttagttttgtgttagtctaaagattaaaagtaaaaagtttgattctgccgacaatttcttagatttggtgctatttaaaagatttccctcttcaattttatcgaattccaaccttcaaataggcttttccatacatttattgaagaatttatcattatcagtcacaattatgtgtcttcatctttatacgtacataattactagtaataattaaattctactactaatagaggacggccaaagtgtcagtaatgatgcatgaatggttagttgataaacatctctttcttatgaattcaatttttcaattttttttttttttttttatatttatttcgtatacttgtattttgttgaatattattaatacatagctacataaaatgtgataaaagattaggtaaagtaacaattggtaagaaaatatcacaaagaagcaaatgacaaggatagtctcataagtcataatcaatacagtttacctatgtcaaaaaaagagtctcatatacagtacctataatgttaaaaaattaaaatacttaaaccttttctctctttttttttggtcaacaaaaatagtaaaactttcatatgaacatttgtctgccaaattctattatctagttgaagtaaacatatccaaaatattaaactgagtaggcgcatcatattaacgtttgtaaaaaaaacaactatacatggtgtatctctaaattctaaaactacatatatgattggttatgttgacagtaaacatgtaatttgcttaccgacgagaaatcatgataatatataattgcacatgtacatctatatctctatatttaataattttgaaaaattggacgtacctcaccagatacatgtttaattgataataaataaaaatttgacatgtgtcttcccagatttttgaacatccaactaatagcacatgtgcatgtaaccttcatcacaaacgaaatcgtgataattaaattcagaattcgaattaaactatactaaaccatagttaattagtaaatacttcaattattacacgatattttcatatataactcttgacatttctccagtttatttatcagcgactagtcgattacatcattagaatgcaaacataaaagatagcttgacaaaacgaatttcgacatccaatttacagttacaaatgatgtactgtatgttaatttcttaagaaagcaaaaaaaaaaaaatgataataaattccatgtgcctaatcaagtgtaggagtcagattccgacctatatgaaagaccttagcatgtgctacttcattcactagcaccacaaattcaactctctctttttttatccctttctaataaaggagaatagttctagtattatagacatgaaagttcataaaagttaaatcacataattgaacttgtgtgatatatcaaggttttagtagtgacatataagtgaaaactctccattattgttagattatatatgtactgcacctagctataatttccactattggagaaaaatataaagatataaaaagtgtctacctgaattcagatatataaaccaatgaaacatttaagagttgaatgtctactcgaattatattagtataagttgttttcattgaaatcaggacatatatatatatatatataataggggtaaaagaacaataataattttgtaatatgaataaatatcaatattaacgaataagaatataaaataggtacatttaatgattaaaggagagatattaattgttgaaaatatgaatcctatgttttgttttctaaacgatattgttaaaaagtctaatcatcatgagtcatgattaagtgaaccaaaacaagtttaaaatcttctgaaaacgacaaaacaacacaaaggaaaaaaagaagagaaagttaatttcaagggacttttaatttcaacttctttatatagcaaatatgaaagagtgataactcaccaaacaaacaaatttaaattttatttcatctttacacgaaaaaaaaaaagagaaataaaaacatgaaagagtggtcactcaccaaacaaacaacctaaatttagataaaataccattaatgcttaaaaataataattaaattaggaacggttacacattcaaatatgtgttttgactgtagaatacaaaaacaaatacatacaaatatcattatctaatgttatgcatgagacactatatatgtatgctccacataagaatcatacaaagcttcactgtgattgctcaacggtctagattctgtcagagcctctctcttcttattctcatgttacattaatctttgaaccaaagtctttttgtaaccgtctctgtttcttcttcactctgctcgtaaaaaaacattgaaatcttcgcatca

SEQ ID NO: 2619 - DNA, 3000 bp, Unknown
  misc_feature (1)..( 3000): cDNA_ID_2048974_gDNA_ID_1620567_Annot_ID_160728 3000 nt of promoter + ATG
tacacttgatagaagcccgtcaacacccatttgtttcagataccggtcaccttcagagaacctctgagcattcaacagagcttgaactaacacaagataaccattgaatcctggcttaactccacggctgacaaaaccgtcaaatatcctacaagtctcaacaagatcatgcccttttaggagacaactcatcgcagcattgaatgttgagctatccggaatataacctctctcacctatcttcctcaagaattgaccagtctctttagccattgagttgtttgaaagacaatacaacacagcatcgtaaccaactctttgcaagtttgagtctttctccataaacccaaccaaaacctcaaacgctttacacggcggcaagcaacggaaaatcccgtgtacgaaagttctgattgtagcttcattaggattcaactttctcacccgcatcatctccaattgcttcaacgcctcatcaaccctccctgctatcaaaaacccgtcgatcaaaatcgtgtatgtgaacacattgggtctattcccttcctgttccatctgtttaaccaatcgaatagcttcatcaaccacacccttcttgcaaacaccatgtataagtatattataggtaaaccgatccggtttacagccatcactacgcatctgctgaaacttgaggtaagccaaatcaagtgaattagacttcaccaacgcatcaatcacagcattataaagccttgtacttggtttcattccaagaaaagatatctgagcaaaaacatcattacagtacttagctaaacctaatcttccccagcttccgatcaaaacacacatcaattcatcactaatccgataccctgaatctctaatctctttaagcaattccatagacaacaataaggggcctttacgaaaaagtgcgttccctagaacactcttcagagactgatccttagcgtaaaccgggtcgaagttggagacccagaggtaaaatcgcagggagtgtaatgggttgtcttgattctgcaaaacgctgatgacgaatcgagtgttgagaccaattcgatgagtggtgaattcttgattcagtatcaaaaaccaatcttttctctctatgacttgcgaaatgtaacgctggttcagaggattggtgggtttacctgaagagtttagggtttttgagagcttagggtttacggatgtggaagcgtttagtgatttggaagctgctgccgccgtcgctattctagatgctgaagaagcaaagcctctcatgtcgtgaccagaacggagctgagtgcaagtgaaacattgatttggtctctaacctcaagacgatgtttcctaaacgacgctgtttaatacaccaatatcaatatgtgttcgaatttaataattttttttttagtttcagaataaattaagaaaaagtcatgaccaaaaagatcatctcctttgaaacaaacaaaaacaaaagaattttggttgatcctaatgactcttccattgccaccatgaaaatgagggttttcattatagtttatccatctcttgattactatgaattttaattttcttgtaataattatatttctaagtgataattttctaatttctatcttaaattgtagcattgactaaatatttccatcttcatcttcaaaaatatattatgataatattaagttattgctaatgagagatgtaataaaaagagttgtgatgaagtcattattatgctatttatgtatgattaataatatgttataaaaattactattgcaatatatatagttttcttatatcattgcatttatttataagaataagatacaaatcaagtccaataacttagagaaaataaaggcaacgctagaatcatcaattttgagagaaaatggatttataagtttgtattacttttgacaacaacatttcactggacatggaatacaaggagaaccacactgtccacctttttgaaagccagctctaagacagtccttattacattcatcattccagtaatcttcggaacacctaatattgcagttgtcaaaagagaagccttcgatccttgcatctacacaagtccacatatatatcaaacatcatcaataccaacatgtgtaaattttatatcattccaataaaaaatagttatataacatgtccaaataaaagtttttaacgaaacttttgaattcatgtataatatatatataaacaaaaacgtgatcataacgaattccaaatatttagatatatagcctttgaaatgatcactactaaattgcaaaatagctaaaccaaactttgaaaatacctgaagccaaaacgttgttgttaggcaacgaaactgcaagtattattacaaggaaacatgtcaccaaagttttcgtactacccataataaatttttctatgaactcttttgaggtattcaaatgtttttattgtttaggatcttaaggattgactatttatatataacttttggtcttcagtttgttttattacaattaattgatgatccatttttgtttctcaaagttttttatttttggcaaaaaaaatcatttacatttatgaatatataattatttacaattaataatcctaaatgagaacttaaaaattgaaaaaagtgtgtgacacttgtgaatatggtcaaaggtaatttgttggatatgttgtcattatgttcaatcaatatctcaagttaaatgcgagattttaatttcataattcaatattggaaattttttttttataattaggtatattataaattttaactgatttcaaaattgatattgacaaaacaaattgaaaggaaaattaaatattatctgtaaagtcattattgtttttgttaataaatattttttagtttcataataaattaggaaaaagtcatgatgaccaaaaagatcaataagttgaaagttgataaatgtcttgttttttttttaatcatcttctttgaaacaaacaaca

SEQ ID NO: 2620 - DNA, 3000 bp, Unknown
  misc_feature (1)..( 3000): cDNA_ID_3068946_gDNA_ID_1620567_Annot_ID_160732 3000 nt of promoter + ATG
gacacgtggcgtcttctggtttttccggttagcggaccggaaattatctcaaattaatttgaaccgaacatttttgtgaggtcgtcgatgcaatttgaggatcatgctctgactgttactacaaatctacaatattgttcgactaaatgggaaagattacattttgtcattttctattcgattatttcaacatacccaaagaagaataaagagtagttcattttgttttgaaataaattttgttggccattataggaaaacaatggcaacagaatcacgttattcttgataatattgttagccattgaagaataacaatggcaacagtatcatgttttacacgtcattgataattaaagaatttcttgccaattttggcactacacaccaagaaaacattttttctataaccttatcccaatcacattattaaaatcacttaagatctctactagatttgacctgactagatctgaccgttcgtgagaaagctacttaaaataaaataaagaaagaatgacgtacgtagaccaaactactgttatttcttgaatccatttacatggcgtttctatacttctatcttatcgacctaacttaattgcttcgaatggtagtcacattcctttggccggccagttgctggagcctggaagtagctattcacagtattagcttgtttgtgttttttttttatcaaaccgataatctcattaactcaaattctatcaaaagaggaaggattacatccaaactagaagaaattacaaccaacataaaaacaattatacgaagtaattaagacaaccaaacgatgactaaactagagataaatagacgataacaatcataaacatagaccataaaaaattgcaagacaacaatctcaaaatcttttagatctttgtcttcttggtgtgcatgcaatatatatttatattttttgaaaagaaaatggtgtggaaaatattgcaatcgttcgtacgtatatttttacaaaatattaaaaccaagcccatgcaaaacacatatacaccaaagtcaactttctttttcaaaagtcaccgaaccagaggttataaaactttcactcaagaagaggaaccagaactcggaggagcagaggaggaagaagaaaaaggttcttgatctgcgcatgacagcttctcgtgaggaccagcttcttctcgtccaacacctatcagatcaagataatacaaataatgagaaacaatgttgttcatctcatcgttatcgaatccgctgttgcagatttgatcgccgtaaagaacgtttatggtggctccaaaccccggagttcgttttgcagcagtgtcattctttgttggcttccattttccgacgaaaacatcgtgcgccgacggtaaatgcttcttcggtggcgtcatccaccgccaaatcgccgcttgaaacgctaacgtagcattgttctcgagatactctggatgactcagtagatccactttcaaagcctccccggtttgaccataattgtaattcctaaaccagaccaatgataatgaaatttaaaccgagaaactttaaattagaattaaccggaactgtttaatctaaacaacgtaccagtaaaccggtaaagctcctcgaccgtggtacgagacaccaggagtacaaggatatgtcaatttgtagtaatcatcgcaataaagctgatcaggactcatctccttgttgtaacacaatccccaagctaatggtccgcctgttgcaaccccgtacccgcctttaaaccgaataatcgtaacggttattagtgatttcaattcccggttaataataaataaaccggtttggatcgctctaaaattaaacttacatgaggttttgctcccaacgtggccaagaaacgcagcgacttccttcatcccttgaagtttctcaccagcagtaccgaaaccaagaggctggtactcggcagccgcagtaatgaatgatcggtaatcccaaaagccgacggcgtgagccactggactgttacgcttagagaatagattctcgaattgatatgtctcaaaaaaatcggagattgtatggttgcaacaatactcggaccatcctttgcattcccatcctttgtcgcataattttttacctttcacaatcttcaccagaggctttctcgttgaactcgaaggctcggaatcttcagcgttgacaagggttccggtttgaaacacaaccaatgcaaccgtgagaagcaatagggagaatagcggtttcgaaaccatggttgatttttttttgtctttttcttcgtctatcaatgtgaccattgtatgtataactttatatacaaacatatatgtatagagtagtgtcgtgttcgttttaggaggaattaagttttcggaatttggtggtaggagaagagttgcttttcgtgagtttttttttgcttggttttgaagtttcttagagtggaagttacatgttaagaaaattggtcgaagcatgtacacgtagaactgtaaatgttttaaacttcatttttctaacaaaatggttaatctattttaccaaaataaaataaaaatggttaatctattgcaacacctttacaattagatttttttttggtttaggggacggattataactaatgattgggaaacaagtttgagatagaaattggaaatcgtttattggagcggttttgttgctgctagaatactttggaactaatttaaccatatattttttcttttccaggctatgaatgtcaatatatttagatattgaaaatgtttggccaatcttgaccttgacaaaaaggaataaaaacaaagaatcaaatatttgggacgtcacttcgaatgagttcatgttatccgcagttgcatcagattgctcaagtcatttcaataacttaaccattatttttatattttttgtcaaccaataatttaaacattaattaacccaaaaaataaatacttggaactaataagtggtaagtaa

SEQ ID NO: 2621 - DNA, 3000 bp, Unknown
  misc_feature (1)..( 3000): cDNA_ID_3068890_gDNA_ID_1620567_Annot_ID_160736 3000 nt of promoter + ATG
atttctgctctaaaaatggtgtagatcctcttgctcaagtagccaaagaagcatgataaagtcatttggtaaatggtaacatgtttatgatcattatgcttaaattctctgtgtttcaagaaaatgcaattgtgttaacttgattttttctatattaacttcggtatataccgaataaaaggctccaaaaaatcgattttaaagatcaaatgttttattttattttattaatttatttgttagataaataaaggtagctacacagagcagtaatgttaaaaaaaattcaaatattttgagaatcccaaggaggacaaagatcaaacattccagtctttttgttcagtttgcaaggtccttcttcacgtatcttccattcgcatcttttgcatccaaacattgcagattcttggtctctttcttgtatgtatatacggaaataacgaaacactagtctccaagcaaaagtgcaaatgaatttagtatctccagaaacactgggtgtaaattcaaatgatcacgatccaccagctagcatacgtcggagtccaaaatcaacgtcttttgatgcacaatggtatgccattggccaataacctgaaagagcgttatgtatcaccactgttgtatttgggttctcaacacttggtggtgaagccatggggttttgagcgagggacattgttacacttgcacacataacgataatgagagctacaagttctgctagagcacccatgttgtttttgttttttgttttccttgcaatatgaaagtatattgaatatggactctttccacttagtactttattgtatttataataccaaactttattgattatgtttccctaacaagcttctttgttttgttgactcagttacataggttatatgttttgaataatatgagtcaaagtaaaacttaattaggtataaaaggaaatctcatcttggtaaaaagacagctatatcttattatataaagtatggatttcaaagttgctaactcatataattgttacacatgtcaagtcaaacgatcagatgtttacatgtgtcattcaaaatttaacttttttattctctaaaaaaaattgaaaattttaaaaagtaaacaaatttacatatactaatttatacgtctatatatttataaacaattaacatttattcaacaaaaggaaaattaacaaatttgtctttaactcatctaatcataagtgaaaaatataacattttgagaaaaatagcttagcttataggatttaacttttcaattattttcatttattaattttaactcatttaatattaatttgcatgatgtaaaattaacttacgagattacggcatatacaaaaaatatattttcaacaatgtttggtttctaaatatttttgtggattgttttttttaattaattattagccctatgcgtttgggtattcgggtcgggtatttcgggttcgggttttcgggtttagaagtttaggacccgttcgggtaatttaagattttgggtcgggttcggtttgggttcgggtttgggttcgagtttatttatatattgaaatatgaaattttgtgtgcaaatttattaaattacttgaaaatttcaaaaattcccaaaacaacacgagtagttttgcttgaatatatctaaaaatacacaaaaatcactaaaatatccaaaaaaatcctaatattttttatatataagtataaatataactaatatatacttatatttgagatatgtttggatacctattcgggttcgggttcaaatttttcgggttttgaagtttagacccgttcgagtatttgaaaatttcgggtacacccgcctaaataggcgggcctagtaatatatgtagtcaataatctatttataacttaggtatataaggaaagctatatatttctcaccattaaagtcacatattaattttggtaaatataaagctatatatagtcaataaaaattatatattgaaggaaatctcatcacgattatataattggtcttgagtcagttaaataaccgtacctcttaactaacagtattttcatctaaacatgaaatactaatttttatttttattagaaaaatagaagtagacatacatgctaattatttttaaagcgattgagaattccaaggaagacaaacatcaaacatattactgttcttgttcaatttgcaaggtccatctttgcgtatcttccattcgcatcttctacatccaaactcggcgaattctctgtctctactctgtttgtagatatcgaaccaatgcaactccttatcccatataaaaccgcaaaaaaacaaagttcctccaaaaacactcggtctaaattcaaatgaccaagttccatttaccgccatattccggtctccaagatcatcattttttgatttacaatggtatctcaatggcagatgacccccaagatcattgtatatcaccactgttgttcttgggttgtcgaaaccggatgttggagttggagggatgctatccttttggcctcgagatattgttacactaacacacatagtcactaagaaagccacaagttctactagagatcccatttttttttttttgttgcaatatgaaattattgtatatggatgaatgactctttcactcgatatatactgtgttaccagtttattacatttccgtaacatgttttttgttcttcatatgtggtcaaataaaaacttaaatgtcatggttgatgtatatgtagtcaactatggtgttaagcccaataagctttataaaagcccaataacattttcaaaagcccgagaaaacccgtgaaactacgtccgatccgaagatcgatcacgcgactctgttatttagaacgacgatcgcattatttttctcctaataaacaaaacgagcccgccagatttctctgagacagtgattcagttttggttttggaacctaattctctctcaagagattcagctaag

SEQ ID NO: 2622 - DNA, 3000 bp, Unknown
  misc_feature (1)..( 3000): cDNA_ID_2048928_gDNA_ID_1620567_Annot_ID_160740 3000 nt of promoter + ATG
taaacaatcttactaccaatcttggtaaaagtaacttactattcacattcctagttgcaaacacattcaagaaacttcaaatactaatacagtgattatttttatcagatcaaaaccttttggaagtaatgcctagtataactccaagtgttgtgattttatagtaaaattgtagaaatatgcgtaaagtaccccataacaaaagtatatgttttgagaaattgagtggttaccatgacttaacttctaaagtaatatttcatgttcccctctttgtttgagagcagaattgaatctataggtcctctggaatctgaactcacgtttagtactgcacgtagaaggcaaatttcacttgtagatggtgatggcgataggttaaaatttatcttgtggggagagcaagtcattgtggcaaaccttctgaggtaagctcctggctgggtgcttctacctttaaatttttcgaccaaccccttcttatagattcattttcagtgtgggaagtgtgcttgggattgagaggccttatatttctagtctcgaagagagtgcaatggaaggaaattatgagttctgccttgaatacggtagcgcaacacatctctatctagtgccatcaaccttacaagaggaacgggtaaatgaagttttttttatgttgcttcctttttctgttcagatttttgcattgatttgttttttttttcttcaggtttgtgtagcgttgtcacaacatcagtgtcaaggatctaaactgcttggttcagtcggagtttcacaggtgacattgcctcgtgatgccgatgggtctgtagacttcagtaattatccttttcgggtgagtagaagttaagataccatttattcaagcatgatgttaattgatggttatggtaattgatatttgtaaagttcacactgaatctaggttcataggttcttaatcaattccgtgtttagaaatcaggcaatagggaggttcttcatcacttccgtgttaataggttcacactgaatctaggttcatatcgctacagatcctattcatatgcataccatttattggtttttcttatcatagcaccaaaatgcattcataagtcttacagttttgcttttatatggcgcacaatatcatctctgttggaaatttacagccttgtaagcctaggagattatacgtaaagcctgctctggctattatttgaaaatctatgtcttagctgcatctgctaatattcctctccttggttgaagttctgcagacgatgataacggacattcgtgacaaaacgactggcatcagtctttatggggttgtaacagacatttcatgtgatccaaacgccacaggagtggtcttttctttgaagatcgaggacacaactggagcaatatgggctaagctccattttaccaattactggtataagcgtgtttcatgaatctcgaaacgacatctgaacagaaatttgaaggctttaacattctgtttaacagaaatttgaaccatatataatatatggtttccaggtcgttgggaaggttagggcttggtcatgtcgtgtacgtgtctgggttatcctgcaaaatcacaaaagagaactggtaagccgtttctcttgctttgaaactgatagatatactacggatccatcgctattgggaaactgatttagctcaaacatgaactgaatacttatcaataagtaacagtaggtattggtttattgctttagcttaaacattaatggagttcttgtttttgggttgagcagcattgagatgttatggcatgagaaagacgagaaagctacattcgtaaaccttagctgcttgcctgcatttctgacctcttcttgtattcacctgatctccactctctcccaaatatcaaaacagagaaaacctgcaataaatgttcgtcttgctctctaaatgattcacagagctttatgtggcgtttcctttgcacgtctggataattcgtttatttttctttattggacagatttgtcgggttaagctggatgagatcgaccaatgccataacatcaacactagactagctcatagcctttgcggccatttcatagatgaagaatcatcatcatcttatggagcgaacctgcattgtagtttctgccgagtaagctgcaacagtaacacagaagtagtgagaacattccacataacgataacacttgcagacgaggaaaccaaactatacgcgtggtgtactggtcagtctgcatcagctatacttcaaatatctcctgatgaattctgtgacctcccagaggtaacaaagcaatctgttattatatatatttggttataatagtagctaatatatggcggtaaaatgaatgaataaaagaagcaatgtaaaattattggtggttcaggatgatcagctaatgtatccgtcttcattggagaacgaatggtttctagtgattttagcaaacagcggtagccggaatttgggttccggtcatgaaacggacgacacttgctgggaaatcacacgagctctcaagatttgaagctaccatgaattttcctttacttgtcatgattagttgaaaaaacagactctgaccgtctttaaaatactaaactagtggagagactatttgaattaagaacgtgaatgtctgtttgtctttttggacagtgttgaaaaacttggtgggcccagaccccgcccttatcttgtccgttacatttgcctccgtgaagatattttccacccactgtttttttgagctattttaatcgtaaggctgcgatcggtcgtggactccattcaacggccatgatgtttctgtatcgttagacagcattacagcgaataactaataattattaatcgttgatccatttcaatctccttagtaatacatagtcccttcttccacatcagaacccatttgtctttgagtgagagaatcagctttcagagaaaaaagtatacctacagagagagttatg

SEQ ID NO: 2623 - DNA, 3000 bp, Unknown
  misc_feature (1)..( 3000): cDNA_ID_2025385_gDNA_ID_1620567_Annot_ID_160742 3000 nt of promoter + ATG
ggaaaaagattagtggactgaatttagatctagtaactgcacatttacgattatatttttaagattttaactatacggttaactacttaactgtacggttttgatacacttacggtagtatatattttttaaacgtaactaatttttttttgtggttaaaggttatagttataaaccattttatatggttacagttagattttggtcatgcatacctccaccggcacctcctcctgcgccaccaccaatacctcctccaagtcctccaccagaacctcctccggcaccaccaccaatacccccaccgtggcctcctcccagtcctccaccagcacctcctccagcaccaccaccaatacctccaccatgacctcctccaagtcctccacctcctccggcaccaccaccggcaccaccaccaatacctcctccaagtcctccaccagaacctcctccggcaccaccaccaatacccccaccgtggcctcctcctagtcctccaccagcacctcctccagcaccaccaccaatacctccaccatgacctcctccgagtcctccaccagcacctcctcctaaaccaccaccggcacctcctcctgcaccaccaccaatacctcctcctccaccggcgcctcctcctaaaccaccaccggcacctcctcctgcaccaccaccaaaacctcccccggcaccaattcctcccccaaaacctttcccaccaccaaagccaccgccaagtccaccaccaccaccacctcctaacgtctccttctcaaatctcctacactccacaaccccaatcaccaccactacaagcatcaaacccaaaaacccaaacgatactttccccatatcttttagtaagtgttggagtatcgtgttattcactatacaattgttatagctcaattgactaagccaataacactatatatagcaagtacaacgaacatttatgagatatggttgagagagcttcaagctctttttcacaccgcgtttctccgcatgttctcatgtcaatctctcatgctcaaattttctacgaagcaattaatgagtgataccaattgtctcttttaatattaatctcctattcctatcataacctgtcatccttgatttaattccatgttcacctagtttacgtactgacaatacagcgtataagttatagcgacactctctcatatataatatatactctaatgtgttttctaaccaattgaattgatgaactaaggacttttgtataataagaacgtgcagagaaaatacaaacaattactagttcgataaaactatgaggaaacacagtgggatcggtgaggatgtgtaattacatttaagaatatatatcgtactttgttctacatttagagcttctcaactactttggatttggtagccacattcaatgcaaaatccccactatcattttcattatttgctctagcctctactataagtgtctacgagaatatcatccttatttgacttatgcataggaatacaataaaaatgtaaaaacatattggtatactgtgacttttaatgaaatttggaatccataataaaagtttgtaaaataaattgaccatagtcgtcctgtaataaatgtgataagagcacatgtgagagggaattaggcacgagtgaagagctaaagagaagaataaagatcgagtttaaatagagatagaaatgaaggatagagatttatcatgcgtgatcattgttgttgtgaggagaattaggccttgtgtgctctgttcttgtgtgataaaaatggagaattgtaattccagtcttatcaggttaaggttttaattcattgtaactggattgacagatattaaatacaaagaataggttaacgttcttatcaaaatttatcatttatatatatttacatttcttcttattcgtccttgtttttgttttttcttatgttatcatctagatcattttttgtgtacagaatcatgtagaccgtatttaaatcacaagtcaacgtttatgttttccgacagattttcataagaaatacatacggtcggcttcgagtaacgtaacaattcttttccgataatacttacatatttttccggggctgccaagctaaggccacaagttttgctagaaataactgtgtatattttatatacggtcttgtttgggctgctttgcatatcaaacatattagatacgtaagttatgttcggtcgtaaaaaaaaaaagaagttttatttcggtccagattgatacgtacgtatcaatcattaatttgcataatccacgcattgtactatacatgatccatttgcattccgttttgttgaatatcacatagctggtttttgacaacttttatagctctggaagccttagcttcctttgatacgcaaaggctttgcaccaagccaccaaagcatggtgttttttttctggtcctaaacgcaaaaagttatctaatatagttcaatagtaccatatttgtcatgttttttcatcgttatatgcagtcttctggtggaaattttcttactattttccaactataacaatagaaaaattatagctaaactaaaattgaagaaaaagaaaaatttatttccaacctcttgtgattggatgactacgaacttaatcatgcacctatccataccagagttctactgattttttggctaagaatctccctcagagcatcaaaccaataagatattaccacgtgtcactgaaatccaattcagctaagccatccaaaaactttagcaacgtggccggttattgcacagtcgtattctccgatgtattaccaaatcacccttaacgtaacattacaatatacataaaagctgagattaatataagggtaacatcgtacttttcatgaccatcattcttcttccccgagcccgcctagcttctccgtctctcctccatgaaaaagctcacaaacggttttatcagttaaagcttttttaaacaatg

SEQ ID NO: 2624 - DNA, 3000 bp, Unknown
  misc_feature (1)..( 3000): cDNA_ID_3409119_gDNA_ID_1620567_Annot_ID_160749 3000 nt of promoter + ATG
tacagctacaactaattcatttataccaaaaactctacaacaacaaaagctacgacaacagtcagcactaaaaaactacagctacaacccaaccaatcacctaaatagttgtttatcttcttggatcaattctgatcataacaatttatagtttacatatatttctgaattatttataaaacaagaaattttctaaaaaaaaaaaaaaaaaaaggaaccaaatattcgaatttaaaataatcgagaatatcgcatagtgatcaatatgaatatatgaaattgacttgtataatatgtaggattacaactgattatatacagaaacgaagagtaattatgctgagtaatgagtggaagaattacaaggatacgactcaattagaggaagctgaataagcaattcgtatatgtcaaacacaaatatggatcatctataccgttgcttgacttcatttgatatgctagttttggaattatattatgtaacacacagttcataagttttgcaggtaaataaaaatggtggagatctagagcttaacatcaagcaacatttgccattcttcataaagcagcagcatatgtatattgtatcagacgacccatgtaagagtcacatcatctagaaaagcaaagtaattgaaatttatgaagagtagaatagagagatacacattagcatatgtaatgtaatagtttaagtgacatttacatttgatgtaaaacagatttatttaatatatggaactttgattcagagtttcttttgaaatttgagttatatatatagagagagactattaatcagcatacaaacaatatataatttttaacagaaacaattaaagataaaaactatatacacgtcggtttacaaatgactcaaaagaataagatttacacgacagaacttaaccgatgttaagattactaaaaccgacgcaaacgtttcgacgtataagtaagcgtcatttcctaaagttaagttaattatattaacgtcatgcaatgttacgacggtttttaaaccgacgctattatgttaaagtcagtttgaaaatgacgttaaagtcaataatgaccgacgtcaaataccgtttctcttgtagcgatcataatttggaaagtgttgatcatataacaacatatacttggatattttttttaaaaaaagttagtgtcaaaacaaacatggatcataatttggaaagtgttgacttaagatgttacctttttttttgtgcaaaaagatgttacctatacagtataaatactgaacaagtttgattgaaatagttatcaacatatacttggatattttccaggattaaaaaaaaaaaaagtttagacgaattatgggttctcttgagacatgcttacttttctttgtaatggttatgtttatgagtgcaattatgtctcgagcctcgacgagtgtagtgatttataatgatcttggaggtggtttgccactacggcaccactgcaaatcaagagaggatgatcttggataccagagtttagcaccaggtagatcgtggtcgtttggatttacaccggatatttttggccggactttgttttactgtcgttttagttggggagctgagagtcatatatttgatatctacaaacagagtagagacaaagaatttcaagagtttggttgcaaaaaatgcgaatggaaaatacggaaaaatggaccttgcaagttttataagaagaccggcatgtttgatcattgctattcttgggattaatatccttattttataaaacatgtcgtaactatcaatctatgtctgtctacttcttcttctacctttttttttcttttttgtatgaggtaattgtgtcttaatatgatattttatggtttgacctacaattcgttttcttttttttttacttgttaatgacacaattatagtcaaataattttagagcgaagtaacaaaacattataagaatataatgtgaactacaatgagcttttcttttatgcttaacgttcattttttaacaaaaaaaaagaattataaataaatagagaacaagtgttgatcgaaagaacaactatgtaaattatacatttgtgcttaactaaacgcatatcgattagagtcccatttcatgaccccgaaactcaatgagtcaaacgtagtgcacaatctagtgtaatttaaaaccagaaaaaaaaaaaaactagtataattcgacataaccaaatggcatagttaaacgcatgttggtgaatggaggaaactaaacccgcgtgggaaggcttttctcgagtagtggaagtgaaatattatcttaaaacatatactttcaatgacataaattggtgaagatttactcccataagtgaaatgcattacatctagaaacttatctcttttatatttatttccgatttagcaaaagaagtaagtagaaagtctattgagtcaaacccaaattttaaaaaaaataatgcaaagaacttgcatataaatattttacattataatttgtattaaattttgatttagtaaacatatataacaaaattttcatctttcttttaataatatagtttttagtttgttagattttttttttttaatttgggcaacacaacagttgtgtaatagtataggcaaagaaaatggtcggacagctaagggaagatcgctctctcctcatcagacaaaaaattacaagcgagaatttctttgttcctttacgaccggacaagacacgtccgtcatcgtcttctactactttctatcttacgcctctccccttatcctacgccaaaacatcttatcctgcgcatcatcccttccattaagacctagggttttctctctctcccatcattctcttctcccgatctcatttccattacccaatcccgctccttttctctgattttgaatcgaacccttaatacccagaaatctcacggttccgaggagtgggtttttgggggttagggttttcgagagatgttga

SEQ ID NO: 2625 - DNA, 3000 bp, Unknown
  misc_feature (1)..( 3000): cDNA_ID_3068895_gDNA_ID_1620567_Annot_ID_160760 3000 nt of promoter + ATG
tcatatatttgcaagtggactaataactacgtgaacgatgaaagtataacattgatccagttaatgtgaccgatgtctttttttttttttttttcttttttgacggcgaccgatttattcttcttgaaaacaaaatcaacacaatctaatattggatccgattgttgatccgttgtataaagagaaaatgaaaataatcaaaaaaaaaaaaaatgaagaagagaaaataacacatgatttcagtgtttctttttaatctctttgaaaagcttttttaaaattcaattatttaggattttctttcactgtacttaagtctaaaacttgtcagtataggtgggaaatccattgacggacgatgagtacgataacaaagggattctagaatacgcatggagccatgcagtgatctctgatcatctttacgactccgcaaaacataactgcgacttcaagtcttcgaactggtcagagccatgcaacgttgctatgaacacagtgttcacaaaatacaaagagattgatatttataacatatatgctcccaagtgcatatctaatagctcatcaggagcttcctacttaggtttcggagtcaatgataagtctccggcggttaaagactggttcaagagagtgagatggtttgaaggatacgatccttgttactctaattacgctgaagaatatttcaatagagtcgatgttcgattgtctcttcatgctactacacgaaatgtagcaaggtggaaagtttgcaagtaagttttatgtagaatatatctaagtttcttaattctgtatattaaaaaggttaaaatgttaatctttttttggtttttttctttttttcttttttttgtgattaacagtgattcgatattgcaaacgtaccattttacagtctcctcaatgttgcctacttatagtaagctcatcaaagctggcctcaagatatgggtttataggtatactcgacacttctatctagataattggtgttccttttctttcagatatatctttcagatatatagaatgttccaataaccatacatacaaaaaaaactcagtttcgtgattgattgtcgaagaacttttttttgacgttaatatcattagaatttagaaaaaggaaaatgtttggctgttacaaagtagagcctttggctttgaatctttggcaaataataataagatgtttggctgttacaaagatttttttttccaaaaaagaggctgttagaaagatgaatgatagacatataaccacgagattcacaaagtaaacccaccgaagatattatgataactattattcacccaccaaactcttgtacgtatgtctcttttggatttacatgatctcgttacatataagtaaatatttgaatgattaattagctgtcaaatgaataacctaccgatgtaacccagtgtttgttcattgattttgtatttgacagatactgtcttcatagtctcgaattagttggacggtttagatatccggaaaactcttttaaaggaaaaataactagttgagtaacaatatctgattttattttccttagaaagttgaaaattgattagttataaatacttattattgtctaacagtggagatgccgacgggagagtcccggtgatcggaagtcggtattgtgttgaagctttagggatttccgtcaaatcggagtggcgttcttggttccacaatcatcaggttagggtttattgtgaaattagctagaaatgtgtgatattttagccaaataagtttatattagtacggttaaagctaattaaagtcttttttgtgtgtgtgtgtattgtgaaggtgggagggagaataacggagtacgagggagggttaacgttcgtaacggtgagaggagctggacacttggttcctctcaataaacctgaagaagctctcgcgcttttccggtccttccttaacggccaagaacttccgtcaagcccctagatactaccactatatcatatagctagtctcttctctctatctttttaccgagtataaaagatacatgcataaataataagtccaatacataatcacatattagttgttactgtctacccaactatgtgagaaatttacaatatataatggttgttttgtttagtgtataaggttggtgaaaaagagagtgagtttgtaatttgtttaagaacaagaatatttctctagtcgtagggatcacaaattttttggtcttggacttgttaattcgtgtgtcttttactttctctctacaacttctcttcctttcttactgcgtgctagacgaagaagcaggaaacactaaaataaaacttctcaaaccatacaaattataagttcaagactttgttagtccaagaactcacaagtcaacgaatcatttgtaaataaaattttagtgggcatttcagtgttacaacttgctgtgttatttcagagtgaagatgaagcaacgatggagatatggttaactagtaagattgatgaagccaatgacgacgacgtcccgtggagaaagttctttacagtgaaatgtaattatacgttttcattttcgatgagtttcatggtggatgaggagaacaaagtggcaatgtgttgtgacacatacatgagaaaagatggtaaaaccaatgtttacttcttgagaaatctgcataccaaccaattagttttgatggggtgttccaagttcggttcaaatcttgtaaaagaatgtgattagtctttatggaaacagaggttgcttacaatattttagtttgactctatatgaatacaaaacaaagggtcttttttgatctattgaaactgtaccgggcgatttgggaacatataaataacaataggggtcaaaatgatattttaataaaagttttcttatccaaaacccaaaaatgtctttgctcttctgctaaaaccctctctccccttcttcttacttcacttcactcgtgctttctccaatg

SEQ ID NO: 2626 - DNA, 3000 bp, Unknown
  misc_feature (1)..( 3000): cDNA_ID_2048879_gDNA_ID_1620567_Annot_ID_160757 3000 nt of promoter + ATG
cataatcatcaatatatgcgctgttttttcaacgttataagttatccactacaagtctttaagtatatcattttgtagttgataacttattagtttttgcttcaatatgtgtaactcttccgaatttacaataaaaatttgttcttgtcaataattacaaatatatgtatatatataattgttattttcaacaaacaaagattcttaaagaccattcatcagagacttaagcacagaaatcgccacgtcacaaagatttttaactagcttgtttctagccgtaacagccaccgagctttcatcgtcggcgccggcgttcgtgattcctttctgacaagaatcagtctgcttctcggcgtctccgagcacatatatcgcaaagccgaatttgccgccctgcattgcctccatcgcctgaggaatattaaacttgaccaccggccggtacagctcagcgcactgagccagcgcgcgctctgccgcaggatcgtgagcatgtttgatcagcgattggatgtatcctaaagtatcggtcatgtttccgagcacgacgctggccatagcggcacctaaggatttgggatcagaaggtgacggagagaatggacgaagagaggcttcacataggtcgcagaatggcgttgcttggcatattttgtcgataaggtcgtcggaggattggactaccgacggcagaagcagaaggagaaagagggagagacacggtaatgatgtgacggtggatgatcttttcatggtcggagatagtgaaatttgagaaaaaattgatatgtgataaaaataaagacgtgtgtggttgtgttgtgaatgctactggtagctctgtttctagacttatatagtagttgctatttaagtttgttatatgaaaagctttcaaattactaacaattatgtttttcttctttaaaccaccaagacaaatgtgctttttacgtgtcatcacatatgaattttgctatatatcgatgtgatcaactaggttaatgattattaggtctacgtggttattctaattcccacccgtgaacgacttcgtgatcaacaaactttatttggtttggagtttgatagaaataacatactatataagcagctagctctatgtattttagactatatgtaaacttggatttgagtattaatgtatatatgtaggtatgaggtatatattgattgaatcatactacctaatttttttgaatacatggatctgtgtttggtctttagtttttgtttgttacactttatccttttggttatatgtggttgttgggcacgataccaagagaaagaagagggtatgtgtggtttagatttggcgtatgagtactttagtagtcggtcacatatacgacaaaaaaaataccattatatatgagtccacactatacccgacgtcgaccaaataatttcaaaataccttaacttaattaaatattgtgggggctgtttctctcggcagtcgatatctggctcgtgaatgttttgtatatcccgtgattcggttctagaaacttcgtgccgaatttttgcccgtgttcaataaccggttcttaaagccagtcccggttaatgtaacgttatacaaatttgatccacatcattcattcggattaaagaggcatggtcgatattggttacgagctttattattattttagatcatattaaataagatgtaaattaattagagcaacattcggatgatggctctggtcacatcgcaaatcttttccattctctgagtcaaactggtcaacggagattggcctttggtaaaccctccttcgcatatggaagcttccacgccggcgtcaacaacagccccttcagcgaacttagggtttcctttgatagatataatggcagtgtggacgtcaacgtctacgatcgttttgtatctcatactacactcgtctaatggctttttcagcattggttttgttttgtaggcctcgttgatctgcccgaccgtttcggccccaagcgcctacattcccaacaaaaaaaaaaaaacatttacattttaacattaaatctaatatttttaactttaaatttagtaaataaaccccgtgatctcgaaaatattgtcttattcatattgagtctacggaaaaagagtgaaaaccttgattttgtcgacgaggacggtgtcggcctaggagctacgtggatcggagcggaggagagaaagacagagagtgtagtcaggtgtctgtttgcatgtcttatctacaatatttcccatcgcaactcccaccaccatagccatcatcatcatcatcatctttaccataatcatcttctcagctctctctcaaaaattataaatttattagtactaattggtaaattaagatgtactataatgcgatgaattactagacatgtctatttatatgtgtttgtacgtgtgacttaattaaaattatgccaaaacgttttcttttcattttgttgcttcgatacatgtaacctatttaatgtgcattctttgacgtgtccagcctgtaattatctacatagtttgaagttattaccctctaaatccggggatgatccctctgaataaaagatctgttactccgatttgaataaccattaatttgttgccaatttgaaattagggggaggggaatagttttgagggaaagaccacaagataaaatatataggctttggttgtgctaaatgtgtaacaataaacatgtatcaaatttgataagtatttatatatagagataaatagtcatatactttttacatctagtcaaacacattcaactacaataagaaagacaataaaagctagtagtatgcacaagtgttaatggcctcttcgtcaacgtaaataatatcttgccttataatgatctttgaccaaaacaggtcaatggcttcgtaatgatatatatatccagtatccactaaggttttcttattaacctttcaatgcactatcaaataaaaaca

SEQ ID NO: 2627 - DNA, 1663 bp, Unknown
  misc_feature (1)..( 1663): cDNA_ID_3068921_gDNA_ID_1620567_Annot_ID_160761 3000 nt of promoter + ATG
cttatagtcttcctagtattaattagttttataacattttaagaagtttctttgctctcttctcattctaacaaaaaaaaagaggaattatgttcttattcaatggcttatcagttttctttaaaatgaagtaagataaagaaggtcgaatctctttcgagcaagttattattcttatttctaaaatccagtaatcaaaagtctgagatttgtggggaatagaaactttgtgggcgtgcgggggaatcacacagtcttctaagacataaaatggtcaaaataatgtaaaaaaatagtaatatcacaacttatagtaactattaacattgttatatcatttgataatgccaaaaaagaatcccttgaccttcgttcctaaattaattaatgtttcgcgtaatgtacaaatatgtttattagtttaacacacacattggtggtattcagtaaaacctttatttttcaattgcaatatttttttataacaaaatactactacaaaactaggacaaggctcttaatttcataaaagaggtcccctactattaaagaataatagtaatgatttttgtttcgtgtattctttagcccatttcaatccgtccgttcctcttctgtcccttctcttcgtactacgtttcagagatctttcgttttatgcccaacatttttattcattctgttttggtccaataacataacaataatttagtttcactgctagtgagaaactgtaaatgtacatgttaaaagctttagttgcaatttctaagaaatgctctgaataatgtcaattaggatagtggtatattttgcatctgtcacttgaaaagtctgtgtaatttacaaagttttcggattatacggaagtagagtcaagaatatatgagtactatagttgacccattagcccatttgatatctgaactttctgtttattttcgcataggcctattctcggcccatttaatacttactgcttcttattacttgaccgaattaacatgaacagtatatcatgaacaaatcttgacacttgatgagtatatgaaaatgtccccatcaagtgcaatatgaagcctcgtaggaagttagttgtaaatgcggaatctcattattgactttgcttcttcttagttagtgagtaaggcaaatcacatgatcatgttagtggagtcaaacacttggcacgtaccatggccatcacaaacctggcttctagagaaaccttaaattgtaaacaacaactttttttttttcgttattactttctgaaatagtgtgatgttaaaattatggttgaacttggcaattattagttttaatcaaattaaacaaaagaaaaaagaagaagcaaatttcttcctatattttaacgatcgttatcttgtaattcaactaaaattataaaaagttatcaaacgaattgttcacaactcagaagtgtacattcagcttccaatcttccatccattacaatcttgcatatcaaacaaaataagaattgtaaaatcttatccttaatatttgtggccacatacttccacaatcaaccaacatccccaatacattcactacttgtctactttatatatacactaatacactctacgtacgatagacaaaggcaaataccaaagacaaacaaaaaaaacctgagatg

SEQ ID NO: 2628 - DNA, 3000 bp, Unknown
  misc_feature (1)..( 3000): cDNA_ID_2048914_gDNA_ID_1620567_Annot_ID_160746 3000 nt of promoter + ATG
atatataatcgaaacttgtcttcaatgacaagagctagtaattagtttactaaaacatagtaatgtatatagattacggctttgttatatatatagcatggtttaggcatatcgatacttttaaaatttaaatggttaaacctcttaaaagtatacgtacttgtagattcctttacggacatggacaataatccaattagagttaccaacagggacagcatcgatggctttctgaaccgaagtgtagtctcctttgccttcgatatctacaattatcgatctatttgtcgcgattttttcagtcaaaagtggggcgtcgaatttcgtcttttgcattgctgatgcgtccgaaccccatatggacattacaactagggttaggacaaggatcattcttgttcgatgacccattattttttttattttttcttggggtttctacttttcttttggaatggggttatgagaaagagattatattggtgaagggagaggtttaatttaagaaaacaggtttttaaatttagggtgctttgttgtgtttgtttagttttgggaggtaagggattttggaggaagaaatggtttttacttggaatgttttgttttttatttttagacatttattaaggattaatggacgataaatactttgaagtatatttctatctttggtaactaattacaaaaacaaattgtgaatgttgtgtaaatgatacactgtataagccgcttattcattaatcaacggtaatcaaagaagtaccttagtcgggggccattagaatctcgtgaagcccaatccaccaatagaacgtcaattattgtcataattaatttcttataccctacaaaaacattactgaaaatcaaaatcttgattaaaaaaattcaatggatttatgcattctccataatatacgataaaagttgtctcaaaacttcaatttgggagtgatatatcatcttatatgattcaatctgtatatggttcacaacttcttctctcatgttttttctttttattggttcacaacttcacattcgatgtacgtattactagttttcaacgtattaatgtaattaagttagcaaaatatttattgtgtttagctgtaataagggtaggaccaatatattcgtttatagaaaggctatattttgtccttaacgaatccacaaacctcaaacttgacgaggaacataggaaaagaaacctataactttgatcagtttgatgctactttattagtatccaacaaaaaaaaaaaaactatgcttgtggaagtttaccagttaccactacactctacactctagttgacattaaattaaattaaagtaatttttcgtattatagttaaattactgctgcatatattttcacaagaaagctttacgttttcttaccaacaaaaaaaagctttacgtttactaatatcaccacatttattactcttaacggagactctagctcctcaacttgtggacctttgtatgttattgcggatctaaaagaacacagagaattaagagaaagcaatagagagagttttaggatgacgaagggaaatagtgaagtcacagtgttgattccacatttggaaaacagctagggacattaatttcaccgcaaattcgtattaatgacttccaccaatattactcactggagtctctagaatctctactcgtctttttctactaaccctacacctttgggtcattgggtgtatatatttcttctgttggactctgttttctcaatatattgataactatattccaattatttatatcttatagcctatagactatagataatgcttatctgattttttattttattttctgaaatatgaaccctccattgacgattgtaacaatgaatgtttttttttgggtctagctaggccaatttctttttgctattttctcacgttttaggccaatgattgatgataaaaaaaaatatatatatatatatatatattcacgtttcacttaaattttagaatattttttcttttctacttcttttaattcaatttaaccaagcattcacatcatcatatatatatatatatatatatatatatgtatgttgttgaaatatttaatcaagcattattagtttatgataaattaaaatgcagaaaattgaaatgttattttatagtataagaacagtaattaaaagagaaggctaaaaaatccaaaatttgataatacattaatagacatcatgtggatagataatatatgtgtgtagtatatggatgcaaacgtgaaaatcaacctaactgtttcacattatccatgcatgttgcttttacccattctctgtcttgtcttctccatcaactgttacctataaccatttattgaaccaaaccggtccaccggttcgctacttttatgtaagcaaatgcgtgatttcaattcccatgtaccgcaactatactgaaacaaaacaaaacacgaattttttttggctatttctctacaatataattgaaaacatatactttatccaacatcatattaatacagatatattcggttcagaaactgttaaccaactttaaccggaaatatagtagtctttaaattagtattggttgactttttaataactaatgtcacatctctttagcaaaattttataaataacgcatataacattagccacattagtaaacctagcaatctggtttcgtttcgtataatgagtcgagaggatgactaaactcaacccaaaaaaatcaataacctatcggttaaaactaggtgggatctcaaaccaatttcatgttttaaaaattcttttcggttgggattattaatgtcacgaattcacggggactttcttcagcttcctatttatacatacacttccaattgcaaatacacaagtcatcttctctctctttttttagtgtgtgcaaagtcatcttctcttttaatatttacctaaaattccaaacaaaagagaaagtt

SEQ ID NO: 2629 - DNA, 3000 bp, Unknown
  misc_feature (1)..( 3000): cDNA_ID_3068938_gDNA_ID_1620567_Annot_ID_160741 3000 nt of promoter + ATG
acaagaagcatgtagcagcctggcatggatgggcaaacctggagataaaacaaggaaatataagtaaagcaaggaatcttctagccaaaggcctcaagttttgtggcagaaacgagtatatctaccaaacacttgccttgttggaggccaaagctggccggtatgaacaggcaaggtacctgttcaagcaggcgactatatgcaattcaaggagttgtgccagttggttggtaagtgttttgtatcatcagcatgtttacgatgagaactagccaactaggacaatgccattccataaagctgcatcctgtgattaatcctcttagataattgtgtaaaaagagaatgctactggagctactgccattttcatggaaccacattctggccccccctgtattttcctcatcagtcacataatttagtttctaaaaggctgcttgtagttatgaatgagcttcccttttcttactaaatgttcaatttatgaacaggcatgggcacagttggaaatacagcaggaaagatacccagctgctagaaagctttttgaggtaactactaactgctacatccttttttatatttgtcattcacaatgaggtcaaagcagtggaggctgtatattcatcccaggaatgacttactgcctgttaagcgatcgagctacatatgaaagcgtattttattttttcacagaaagctgtccaggcaagccccaagaatagatttgcgtggcacgtatggggggtgtttgaagctggagtaggtaatgttgagcgtggaagaaagctcctgaagataggtcatgcgctaaatcctagagaccctgttctccttcagtcccttggcttactggagtacaaacattcatctgctaatcttgcccgggctttactaaggagagcatcagagctcgatcctagacatcaacctgtttggattgtaagtatacaagattcagtttggttgctctttacatgattgatctgctcaaataggttttgtttatacgttttccttaaagtttgagctttagattttgctaatagttctttacgcccgttttattggtttatcttgtaaattaacacttagcagactttagttttacccagttctatctggctagcgaattcaagagtctttacaatcgtgtatgaaaggggaaatgattggtgaaagtgtattccggtttaggcttggggttggatggaatggaaagaaggaaacacaacaacagctagagaactttaccaaagagctctctccattgatgcaaataccgaaagtgcttctcgctgtctacaggtataactaataaattcttctcgctgtcctctcagcgaatgaacataaacattgtaaaaacgagggaataagacttgctagccaaaaacatttgaatcataaattagctggcaagtttgctaaatcattagcatattattggaggatgctgaaacaaattctttgtctctacaggcgtggggagttctcgagcagagagcaggaaacttatcagcagcaagaagattattcagatcttcattgaacattaactcacaaagctacgttacatggatgacatgggcacaacttgaggaagatcaaggagacaccgaacgtgctgaagaaatccgtaacctctattttcaacaagtaagctcttgtacacattcttgatattatagcaggttcttcttgtagagtttatatattaatctttacttcattgcaaaacagcgcacagaggttgttgatgatgcttcgtgggtcacaggattcttggatattattgacccggctttagacaccgttaaaaggctcttgaactttggtcagaacaatgacaacaacagattaactactactcttagaaacatgaatagaaccaaagatagccaatccaatcagcaacccgagagctctgcgggacgcgaggacattgaaactgggagcgggtttaacctcgatgtatttttacgctcgaagctgtcgttggatcctttgaagctggacgttaatcttgattctaagaggttagagagattcactagaggaagaataaatggtgcttgaaaaaataagagggatatttattgaggcggtgtaaagatgaagggtcgatgtataatttaaagaattagcaattgttataattttagaaaggttttgggagattctcattctcactataaaagatttggaaagcgagtcccataacctcaccggcggtgataaaattttctcaccagagtcgttgtctcgccgagcagaacgttcaactatgtcttctgcttctccatgggatatcgctgcatcttctcctgttccaattcgggcttctagattttaaaggtgaggctaaatttgtacacaatatgaagaaaggagaagctgtgagggagcaacgacagtatctccctatattttctgttaaagatgaactattgcaggtaataagagaaaaccaggtgatagtggtggttgtcgaaactggttcggaaaacagagccaacactattttaactctgttatcctttgaagtatggaccagttacatcttcaaaacgaatcgcataagaagtttggcgtaagatatctcaggcctaagaagtttggactgtgactttgaaaccccaaatgggtgatgtagaaacagagccaacactattttactctgttatcctttgatttttgtttcaaaatttacatttatacgggagaatgaaaacaattgatcacaagataaatatagtggggaatgtgtaaagacctgaaagttagggccttttgatgaaaaaggaaaatcaattagattaacgcatatcttaattgaggaatttgccggcgcgttattaattgagcaccgaattgattttaattcttttaaaaattccccgcgaaagcacaaatgccctgaattcctcctgataaaccccggcaatttcagtaacgtcaaatctagggttttgaattggtatccgagctctgatg

SEQ ID NO: 2630 - DNA, 3000 bp, Unknown
  misc_feature (1)..( 3000): cDNA_ID_2048936_gDNA_ID_1620567_Annot_ID_160738 3000 nt of promoter + ATG
tatggtgttaagcccaataagctttataaaagcccaataacattttcaaaagcccgagaaaacccgtgaaactacgtccgatccgaagatcgatcacgcgactctgttatttagaacgacgatcgcattatttttctcctaataaacaaaacgagcccgccagatttctctgagacagtgattcagttttggttttggaacctaattctctctcaagagattcagctaagatgagtactatgaaattttgccgcgaatggtaagagctctcttatgctaattctgttcctagtttctggaattgcacctctctgctcgtctaggttttttcaaagtttcgaaatttgcatgaattttttagtttttgttgtttacttttgatgtatttcttccgtggttgaaccatctatggttgataaggtgacaattcgctaaaagtgagtaccttttttcgaattttgtttttgggtcctttcttaattgcattgttgtttctgtttgattttggttcagtaataacattctgtatcctaaggaggacaaagaacagaagatcctcctctatgcttgccgtaattgtgatcaccaggtatagcttttggtcattttgtaccttttttttgtgtggaaaaagggtttttagtgttcaatgtagtgcacaaaattgcgagtgggacttagtttcattgcaattaagagactttaatgaaactgtttcctgcttttatctctcttttaatgctcctagtttccttagttttaccaacctctctatttactaactccttcaattaaggcttagcaagttcttatggtttatctttctagtgttgtgtttatgagatctatatgaatacttgaagggcctcttttagcttattgatttacacaaactgagtagttatttgcaattttttaagctgcattatcaatcttgttgttacaaattgacagattagattagatcatgtaaatgggtttgttgtcctcatctcagaatttatactttttgtggcactgacttgcaggaggtagctgataacagctgtgtgtacagaaacgaggttcatcactctgtaagtgagcgaactcagatcttaacagacgtggcttctgaccctactcttccccgaaccaaggctgtgcgttgctctaagtgtcagcatagggaggccgttttcttccaggtataactctcttaagctccattatttatttaactacttggttatgctgtatcttcactgtttgcttccccaaaacattatgctcaaattctgtacaccgcttgaggatttaatgtagctatcattgaatgtgcaggctacggctagaggtgaagaaggaatgacactgttctttgtctgttgcaacccgaattgtggtcatcgctggagagaataaagagcttttcggtttcaattggtgagttcttaagagttttaggagttgatgtagttaccagtaagtgtaatatgtggaatgacgggaacaaccttctgccccagtcagagacaaatccgtattcatgtaatctgttatgaaaccataatctcaacttgtgtttcaccaaacataaagattggaacttgtttctctttggcatttagaggaaatgagaaattcaaacccaaacattagctactgtcctccacggctcatctcccagaaggcaacctctagttcaagaactcgtacaagtacatcttcagcttcaccgagcacctcaccggaggcattctccagacaacgttcggcaatgttcttgacagacgaacaatactgtttaaacccgtcattcccccaacgatgacaagcaccggtaagctccaccggagttttgttcccgtcttctaaacaatgagcaaagctctcttgatacactgcttcaattgcccagaaagctgtcataatcaccggatacttcacctcactgctcatcagatcttccaaaaacctgaattaaccagaaactccggtttatttgctggttcctaatttcattttcgagtgtgagaaatctattcaatcagcatatatgaaatcaataacctgccatattcttgattagctctttgaggcacaacggtcgagaaatcaacatcccatttcgatccttctcttttaaaccattctatttcatcattcaacgatgctataccaccaagcaccacttccatatcggaactctcgccggaatctttgcaagctctgatcaacacactcgctacaaacggcacaaacctcctcacgaacagataatcttgcccctacaaggaaacaacgtcgtttaaaagtcatcgagtgagatttcatattttgccttgttttcatcagtaattactaattacagtaccagccaagttctgaaggacgagagatcaacggatccgtcacggatcgagacgacaaaagcatgacgtgtagccgccgtatagatcgaacggtgcttatcaatccatgtgtcgatcacccctctcttctccattgaaattgcttcttcttcctttctctcaagactcaagactcaagactcttcttcttcaccgattcactgtcaacgctttgattttctgttgtctgtgacgtgcacgtttcattgggctttaaattaatgggccaaggcctattaaagtctcgccacgatagcttaatgattctcccaaatcgacggctgtaaagaggcgcttaaatttctcagattacgtgacagtttctgaaccgttgagatgtttggatgactaaagtttattaattacgtggcacttactcagaagctctctcacgtcacgtatccgtcgttaaagagtgtgacgtggaaaatgttttggaattaattttgtgtgtttgtattatatcaccgtactaattagctcatctcccgaagccatgtggtaattctaattttgtgtatttattattttctgttaagacgaatcggacagagagaactccggcggcggattgcacttccggcaagatctcgtggggataaataag

SEQ ID NO: 2631 - DNA, 3000 bp, Unknown
  misc_feature (1)..( 3000): cDNA_ID_3068942_gDNA_ID_1620567_Annot_ID_160733 3000 nt of promoter + ATG
gtacccgaaattttcaaatactcgaacgggtctaaacttcaaaacccgaaaaatttgaacccgaacccgaataggtatccaaacatatctcaaatataagtatatattagttatatttatacttatatataaaaaatattaggatttttttggatattttagtgatttttgtgtatttttagatatattcaagcaaaactactcgtgttgttttgggaatttttgaaattttcaagtaatttaataaatttgcacacaaaatttcatatttcaatatataaataaactcgaacccaaacccgaacccaaaccgaacccgacccaaaatcttaaattacccgaacgggtcctaaacttctaaacccgaaaacccgaacccgaaatacccgacccgaatacccaaacgcatagggctaataattaattaaaaaaaacaatccacaaaaatatttagaaaccaaacattgttgaaaatatattttttgtatatgccgtaatctcgtaagttaattttacatcatgcaaattaatattaaatgagttaaaattaataaatgaaaataattgaaaagttaaatcctataagctaagctatttttctcaaaatgttatatttttcacttatgattagatgagttaaagacaaatttgttaattttccttttgttgaataaatgttaattgtttataaatatatagacgtataaattagtatatgtaaatttgtttactttttaaaattttcaattttttttagagaataaaaaagttaaattttgaatgacacatgtaaacatctgatcgtttgacttgacatgtgtaacaattatatgagttagcaactttgaaatccatactttatataataagatatagctgtctttttaccaagatgagatttccttttatacctaattaagttttactttgactcatattattcaaaacatataacctatgtaactgagtcaacaaaacaaagaagcttgttagggaaacataatcaataaagtttggtattataaatacaataaagtactaagtggaaagagtccatattcaatatactttcatattgcaaggaaaacaaaaaacaaaaacaacatgggtgctctagcagaacttgtagctctcattatcgttatgtgtgcaagtgtaacaatgtccctcgctcaaaaccccatggcttcaccaccaagtgttgagaacccaaatacaacagtggtgatacataacgctctttcaggttattggccaatggcataccattgtgcatcaaaagacgttgattttggactccgacgtatgctagctggtggatcgtgatcatttgaatttacacccagtgtttctggagatactaaattcatttgcacttttgcttggagactagtgtttcgttatttccgtatatacatacaagaaagagaccaagaatctgcaatgtttggatgcaaaagatgcgaatggaagatacgtgaagaaggaccttgcaaactgaacaaaaagactggaatgtttgatctttgtcctccttgggattctcaaaatatttgaattttttttaacattactgctctgtgtagctacctttatttatctaacaaataaattaataaaataaaataaaacatttgatctttaaaatcgattttttggagccttttattcggtatataccgaagttaatatagaaaaaatcaagttaacacaattgcattttcttgaaacacagagaatttaagcataatgatcataaacatgttaccatttaccaaatgactttatcatgcttctttggctacttgagcaagaggatctacaccatttttagagcagaaatacactccaaaaaaaagtaactcaagtctcaagatgagttgctagcaccaaaagatattgcgcggcgctggcttcaacaaaatctgatctacgtttcactagaccaacaactaaaatagggtggtcgtcctcgcttttgtgctccagaattcgtccattactggttggtgaatacaaagcaaaaaattacgaaaacgtacttgaagttgtgaactgttttatataatttacctttcttcaaaacgccatagaagcatagaacgatcgtgtaacaaccatgcacgtcaaatctcagggaaaagtccatgtaagattgtcccttccttatcatacatacatgtccttaactaaagaaggtaatttccaatatgcgtcaacctcggcccacggctgcaccaggacaacatgaaaaataaaattaaaaaccattaaggaaaaaagcaagcaatttgtttcatgaatatttatgcatagatataattaattaccttgcttgtttttcaggtgatggattatataaattaccacggctatattttgtaaagtcaaagaattcgttgattggacgacgctgcagcgagccttcttggcagtagtggttaatgagttcccatgcgagttccacattcttcatcgaaatcaacatcttgctggctacttttaattcactactagaactgtcgagcaagtaataacataaccctaatgaaacaaattacacgatcttatgagcgtgaagtggctacgaggtatttcataaagcattttaattttgaaaatcaacttcactatccaaaaagttcctaaaatctagagaaactagttttttaagcgatttgtttttaagtttgttacaaaatccaaaaattaatttaaatatatattcacagccaaaaatgggctacgaggtctattgacccaatgggctttttaagacttaaaccaggttagaaaaaatgaaagaaaagtcgtaaatgcctcgtgtacaaaaaaaagtggttaaacaaaacaaaacaaacaaacaaagcgggctttgaaaactccgcctccgtttgttggctatttacactcactctgtctccgccggtagatttgtcagctgcgtcttcctcgttttctctctctctgtctgtgtctcttagaatgcaatcagctatg

SEQ ID NO: 2632 - DNA, 3000 bp, Unknown
  misc_feature (1)..( 3000): cDNA_ID_2992744_gDNA_ID_1620567_Annot_ID_160730 3000 nt of promoter + ATG
tatttgattctttgtttttattcctttttgtcaaggtcaagattggccaaacattttcaatatctaaatatattgacattcatagcctggaaaagaaaaaatatatggttaaattagttccaaagtattctagcagcaacaaaaccgctccaataaacgatttccaatttctatctcaaacttgtttcccaatcattagttataatccgtcccctaaaccaaaaaaaaatctaattgtaaaggtgttgcaatagattaaccatttttattttattttggtaaaatagattaaccattttgttagaaaaatgaagtttaaaacatttacagttctacgtgtacatgcttcgaccaattttcttaacatgtaacttccactctaagaaacttcaaaaccaagcaaaaaaaaactcacgaaaagcaactcttctcctaccaccaaattccgaaaacttaattcctcctaaaacgaacacgacactactctatacatatatgtttgtatataaagttatacatacaatggtcacattgatagacgaagaaaaagacaaaaaaaaatcaaccatggtttcgaaaccgctattctccctattgcttctcacggttgcattggttgtgtttcaaaccggaacccttgtcaacgctgaagattccgagccttcgagttcaacgagaaagcctctggtgaagattgtgaaaggtaaaaaattatgcgacaaaggatgggaatgcaaaggatggtccgagtattgttgcaaccatacaatctccgatttttttgagacatatcaattcgagaatctattctctaagcgtaacagtccagtggctcacgccgtcggcttttgggattaccgatcattcattactgcggctgccgagtaccagcctcttggtttcggtactgctggtgagaaacttcaagggatgaaggaagtcgctgcgtttcttggccacgttgggagcaaaacctcatgtaagtttaattttagagcgatccaaaccggtttatttattattaaccgggaattgaaatcactaataaccgttacgattattcggtttaaaggcgggtacggggttgcaacaggcggaccattagcttggggattgtgttacaacaaggagatgagtcctgatcagctttattgcgatgattactacaaattgacatatccttgtactcctggtgtctcgtaccacggtcgaggagctttaccggtttactggtacgttgtttagattaaacagttccggttaattctaatttaaagtttctcggtttaaatttcattatcattggtctggtttaggaattacaattatggtcaaaccggggaggctttgaaagtggatctactgagtcatccagagtatctcgagaacaatgctacgttagcgtttcaagcggcgatttggcggtggatgacgccaccgaagaagcatttaccgtcggcgcacgatgttttcgtcggaaaatggaagccaacaaagaatgacactgctgcaaaacgaactccggggtttggagccaccataaacgttctttacggcgatcaaatctgcaacagcggattcgataacgatgagatgaacaacattgtttctcattatttgtattatcttgatctgataggtgttggacgagaagaagctggtcctcacgagaagctgtcatgcgcagatcaagaacctttttcttcttcctcctctgctcctccgagttctggttcctcttcttgagtgaaagttttataacctctggttcggtgacttttgaaaaagaaagttgactttggtgtatatgtgttttgcatgggcttggttttaatattttgtaaaaatatacgtacgaacgattgcaatattttccacaccattttcttttcaaaaaatataaatatatattgcatgcacaccaagaagacaaagatctaaaagattttgagattgttgtcttgcaattttttatggtctatgtttatgattgttatcgtctatttatctctagtttagtcatcgtttggttgtcttaattacttcgtataattgtttttatgttggttgtaatttcttctagtttggatgtaatccttcctcttttgatagaatttgagttaatgagattatcggtttgataaaaaaaaaacacaaacaagctaatactgtgaatagctacttccaggctccagcaactggccggccaaaggaatgtgactaccattcgaagcaattaagttaggtcgataagatagaagtatagaaacgccatgtaaatggattcaagaaataacagtagtttggtctacgtacgtcattctttctttattttattttaagtagctttctcacgaacggtcagatctagtcaggtcaaatctagtagagatcttaagtgattttaataatgtgattgggataaggttatagaaaaaatgttttcttggtgtgtagtgccaaaattggcaagaaattctttaattatcaatgacgtgtaaaacatgatactgttgccattgttattcttcaatggctaacaatattatcaagaataacgtgattctgttgccattgttttcctataatggccaacaaaatttatttcaaaacaaaatgaactactctttattcttctttgggtatgttgaaataatcgaatagaaaatgacaaaatgtaatctttcccatttagtcgaacaatattgtagatttgtagtaacagtcagagcatgatcctcaaattgcatcgacgacctcacaaaaatgttcggttcaaattaatttgagataatttccggtccgctaaccggaaaaaccagaagacgccacgtgtcgattacacctcacccaaaacggcgatacacacacactccatataagctttcctccaacctttacgacttcaacaacgtgtttgtgactttgtgattggattctccactcactgctccagatttgaataaacacaacctaaacaaatcgagagagtcagatatg

SEQ ID NO: 2633 - DNA, 3000 bp, Unknown
  misc_feature (1)..( 3000): cDNA_ID_2048968_gDNA_ID_1620567_Annot_ID_160731 3000 nt of promoter + ATG
tttacatattttaaatgtagtttttatttcagttttgaaatcaaataaaacttctaccatacacctaactctaaataaatatttccaacattcaaatatgtaagaaaattttgcatgtaacgtaagatatagattgatcataatgacattaatataatagtgaagaacttcctcttcttttttaaaaaaataaacaagtaagaacaccaagccgaaacttagatataggagagtcgagtcccatgtaagatgagcaacggtcacatgtcgcgggttaagctgctagctcatgcttccgataaaaaaaaaagaatccccaataaaaatgtgtcccaagttcaggaatattgttcgacttcttggggctgtaataatcggggtgacttcctcttactactatttcgtaagtggttggaaatcatttttggacagtgaaatttctatgttacacatgtaagcggatttccaaaacactgtcatgaaaatagtcggatcctatttgcattttcgtgtgcaggccaaaagtattcatgctcatgatctcgccgtcccactccactttcattgcataatcagtttgaatagtgaaaaaaacggttggataatatatggtctgctagaggacgcaatgttcaaggacgacaatacgatacccatccaccaactctcgagcttttgatccttcatttctgtatatttatttattaggaaacatttatacaataaaacaaaaataatacaaataatctaaccttctacatcttaatggtgagatcgacttgggtgcctccggaagtagatgtatttgattagtgagatatggtaatatgatgttctatatgtagttgcaaaagataaatatatgacattaaaagataataacagttttttaaaaacaattgaccaaaaataaatactaagcaaaacataagcaaaacataagccaaatatacgcaaaaaatctacttgatcttatttcttgatgtggtcgatcatatctctatccgggctctaataaattttagagaaaacaataggtcaacatacttaaactgtatttataaatttgcaaatacaaacaaaaagggaaagaatgtatgaatgactgtggacagtgtgcttctcgttctcgtaaagacactctcaaatgttgttgccaaaagtaatatagactcatgcatttattttctctaagctcgtggacttgatttgtctcttatgtttataaaaataaaataaaaaaaaaaaaaaaaaaaaaaaaaaaaaaaactatttattatcataagtggttttctccttgaaatcgagtatattataaaacatattcttaaattcttaatcaaacataaatagcataataatgatggacttcctcctatgtttataaccttactagccaaaattcattattattattatgagatattttgaatacgaagatgaagatgaagatggagagatcgaactactaaagcccgcctcgatgctattgatattactgtcgttgtatgaacctgagactagccagagttgacccaagctgaactcgttaaatacttctacatttggctgccacacattcattgtcgcatgatatccaaaaacaatcgaatgatttgttgcttaagcccaacaaaatgagaagtccaaccaaagatggaacaaataatcctatgggaaaatatttgggcgtgttcaaaaatcattcttaaacctatatttccatatgcatcgacattcatggtcagatttatgtttggttcacattagatgaatagatttattgttaaactgccttaatggcaaatatttagttaaaacacaaacaaatacgtacctcgtgtccaccggtgactctatccccggcgttagaagtgatgatagtctcgttcccaagggaaatcagccttcgaattggaattgatccctccggacattttgtgccgttcgtgtgccagacttgccatccatataatgcatcttcttctttttttcccgcagatggcatgtccgttggtctttcctgtatcatttatttacaaaagaaaaataaattaaacatttattaagttccccccgtaaaaaaaaaatatatatatatatatatatataacacatgcatcataattggtatgtccgtaggtgtttccttatcataactgaaccattggtaaactatcggttccgttaaagcataagactagaaaaggctcggtgcgactcgctaccacgtttctaaagattttatttagcaaattaaccccaatatatattttgctatgagggtctaaacaaactggtatatgagccatttacttaccacttattagttccaagtatttattttttgggttaattaatgtttaaattattggttgacaaaaaatataaaaataatggttaagttattgaaatgacttgagcaatctgatgcaactgcggataacatgaactcattcgaagtgacgtcccaaatatttgattctttgtttttattcctttttgtcaaggtcaagattggccaaacattttcaatatctaaatatattgacattcatagcctggaaaagaaaaaatatatggttaaattagttccaaagtattctagcagcaacaaaaccgctccaataaacgatttccaatttctatctcaaacttgtttcccaatcattagttataatccgtcccctaaaccaaaaaaaaatctaattgtaaaggtgttgcaatagattaaccatttttattttattttggtaaaatagattaaccattttgttagaaaaatgaagtttaaaacatttacagttctacgtgtacatgcttcgaccaattttcttaacatgtaacttccactctaagaaacttcaaaaccaagcaaaaaaaaactcacgaaaagcaactcttctcctaccaccaaattccgaaaacttaattcctcctaaaacgaacacgacactactctatacatatatgtttgtatataaagttatacatacaatg

SEQ ID NO: 2634 - DNA, 3000 bp, Unknown
  misc_feature (1)..( 3000): cDNA_ID_2167272_gDNA_ID_1620568_Annot_ID_160782 3000 nt of promoter + ATG
ataatggtggaaagaagagtaaatagaatcgccgagccatgtccgccacacgccggaaacttcaagttttctggctagatcgaagccacgaccgtcgtcgccgagcagtgccattgtcactcttaatttctgtctaatttttgttggcctgagtctgttttgtttttattgataatgggcttaggctaataaggcccatttaatttgcccactaatgggctttaagttactaatgctcatggaattttcccagtcaaaacaaaattaaaatatattgaattttaaaatgaagcgcgccaggtaggggtcgaacctacgaccttctgcttaggaaacagacgctctatccactgagctacaggcgcctatttgatctcttgctatgcaacaaaactaattataatatttttgttagtcattagttttaggcaacccgagtcgttgatggagagatcacttaattagttaatttatttgataagataattgatttgatcacatgaaaacgatatcttggttattaaataacctgtttgtcttttcaattcatgaatgatgacgataacaattttccatgtagacgtaaacactttcatgtcacatccactatcgttgtggttcggttagattttctatagacatgtctgtattttacgaaataatattctctaatccgttgttggattaagtgatcgcctcttagattgtcatttgattcataagtttacacgtaactcatttcaaattttctattaatcttttggcaatgcaatagaacaatcacagaaaattacggttaacgcaattgtgtttcacggtgacatatttgaatctttgattactaattgctctaaatcagtaaatgaaaaaactaaaccagaagtcaactaaaaacctaactgaatttcggattgaacaggagagtgtgtttatgactgtttaagtgagaatgaaatcggttagactgacttctccgacagaacttgacattggtgagtttggtggctattttgatttggactttggggcccaatttagagagcgaaagagattacatttggaggagtcaaaattagttaaggggtttagttcacccactatacaagaaacctctttttctctccttatcacctttctcactgaaattaccaattaactaatcatttcattacgttaagcatttctcatttcaccaaaaggctaaaagataattttttccagcaacaacttcacttacttgttgtttttatatcttcttgtctagataatattacaacaaataaatacacgtaaagaaaatcgcttttgtcataacaaagctcaaaaacaaatccaaaacaaataatcatcaaatctactaacattttttagaggaaaatttattgtgttggagaagtcttgtaacttggaggtttcttctcctttggtttaagctaagaaaattatcagtttgacccaagaaaaacaactcatgttagttaacgactcaactttactaaacccacatatatgtagtggaaattagacacatctatgtttatacttatagttttcgttggatttttcttcaatgcatatcgtacttctttctaatttatactcacgatcgcctcacgtaagctaaatcataaactaagttttatttcacgtaattcctaagttattaatgacaaatgagagcttaagtggtgggaccaaatgaactactaaggccatccataacggtggactctctaaaatgggtatgcaatgaataaaacaatattatttttattagagttttattatgtaattaaatttaaattacttaattggtattcaccaataaagttaaaacatgtgtaaagtagaggttctctcatgtgtgtcaaaatctctctacagagagtttatttgataaaactctctcctattgcttctctccctgatttctttctattatttttaaatattttaattatgagtttaagtgagagagctccaccgttgtggatgctctaataaactatgttgcgcctgatgtggtttggaatatatgttttttttacaaagcttcatgatgactcgtgaatgtcgtgtcgtgaaccaaaacaatctcataaatgttttctatcttacttagttataaaacgtgataaatttgatgtttattatattaagatgtcaagtaacaacaatggcttattggcttgttctagggtggtcaagcttctttgccatatgtttacacactcgttacgatagcgacacgataaccggaaataagatagcatattgccatattcttacctcgaaagattcacattcgacggcatttcgtaaataagttctgtgtaggtttacattaatgaagacaaatgctggaccaaaaccaaagaaaaaaaaaacaagatgtcagtatttcacatggttaatattaaattgctgaaagtacaaattaagtgaaattgtaatttcgaataaataaaaaacaaagaggggtgttttgtcttatcattctctataattacggaaatgccattgactagctttggtctttggatatttcaaccgtcggcgtgtctgttcgttggaaggcgttagttacggcatcatatcttttcatcttcttcttataaaaaaatgtttcataattttataaagctaacttgactttgcatggtggagttgtataaatatagcagagataccaatccattaccagtcatcaaaacctcatctttcttctttctctaaaatcttctaagaataaccattttctaaagatatcttttaacgagacaacaaacaacagaaaaacacacaaaaacacaaaacttctgtttccctgtttctccggattctctccggctctgagctttcggcttctcctctccggagatgttactctgcttccctcttttgtgttctttttgttttctgggtgaatattgtatgaacctttgactgggatttttccgaagaagaatcccagacgacgtaatttttctccaagctatg

SEQ ID NO: 2635 - DNA, 3000 bp, Unknown
  misc_feature (1)..( 3000): cDNA_ID_3068969_gDNA_ID_1620568_Annot_ID_160791 3000 nt of promoter + ATG
atacctgatcgcgggatgaatgatgattcgtgattggttgaattacttctcccacatcctctatgtcagccccaatcgatgatgatttcagaacacaagcggagaaggaagagattgggggcagtgaaagcgaagagcacctaggaaggttttgatctcgacctaggaggaactctaacatgaggaagaaaccccaatcaaagaatccatgtaccagacaaagagatgagagacgatcaacttttgatcaaagacgaaaagagacttctcagatttttcagagtacgacacggtgggcttcgacttctcgtttccattgacgacggcggagatggcgacagagagagagacgattgagaggagagatcaaaggattctcgtttccattgacgacgatggtggaggaagaaagcaatcatcaaagacaaagaagcttctcagattacgaatgaagaagacggagaatttcagacgacgacgacgcaaggtgggctcacggtggtgggcttttttttatgggccccttctttgctaccaaatccaaccaggtatttctttattcattctttttcttctttttcttttctctaaaaaaatgtttttggtaaaactataattaaatagtttaaatctttcactaaaacatttcaataaataaaacttagtataaaatcatattaatttcattattactttttaaaaatgagtttaagtgttaaaattttaaaaacgtcggaaactaactgcgcctacgcatcccgtccttaattggtccgtaagtcttgcggtgttcgaagttcggcaatgttttcacgtaatatagatttgacacttaaactcattttaaaaataataattatgattttcactaaagaaaaagttttatgcttgaagctctcgtcggtcgctagagctgaatttgatttgagggagatggaaagagacaaggttaatgattttgtggttaatggcaagattaacaagttaattaagttattatcaaatagaggttcgtagcgatggaggaagagagacagataagcttttaagtagacaagattctgatgcataaagatgtacaacttgttcttggaagatatgctatgagactcttttagtgatgtcctcatatttctttgccttaatccctttttctaaaccgtcaaaagattcatggtttggaaacttgcaatagcctctggttggttggttggttgtttcaaacgttacactcacaaatataacacaatttaaaaactaaacaacggtcaagaaaagagggtttattttaagagtccattcaacagatcactagcactgaactttgtttaaatattcttttaaatctatgtggacctccctgttttaggatcccatatagtaactttacgagagcataacgtagacgaaccaacactaaccacaagtataagagcattgttcgattcaattacgcctatttggtaccagagatgttaaagtgcaacatggaaacatgattgaatttttctcaagctaagaaggtctaaacaaatgctaaaagaaaacgaaaccaacaaaactgtagagtgtagaaaaaaacatagggtacacatgttataaaccaaaactattggggtatatacttaaataaataaaagtacacgatagggaacatttgtaatacacagaacttaggggtgcatacaaaaataaaattgaaaaaacagagcatagatcagtgatccggactctgttttggaagatctctaaaaagcttaggatcatcatcggcatcgcgcagatagaaaccatcatcgaaattctgcgaatagctcacagcatcgtagtgaaacgtaactaacgttttcgatttattattctccaatccgcaacttctaaccaataataatcttctcatcaaatcccttaacttcggactaggtcttgtcttgttgttgtggttactgattcgagcgtactctgtttcttctgtatggatgagacaagataacggcgaactcaagcatcgaccggtggagtacgattgtctacggttgtcggcgagaactctatccatttcttgcaaaaataaaagagagattgttttattgattgagtgagaaatatggggtttataatcgacgaaagagttagagctaacaataaatgaattaccaagcaaagttggaaaataatgtagattttggctggttatggttaagcggtccaatcataattctcgttttttctttggcagctcataatttctcatttatgggaagcattcatttattgaaacttggaagttttcactagtcattagtcaacattttttggttgtaatgtacctacctatcttcatttggtagtaaaattgtggtacaatgtcaatgtgaagttattagttttaactcctgtttggtttcatcaaatgatataaatttcattgtttcttttgtttttaaaagaagcgtaaagttaaaacatatttggtttagtgaacaagggatcagacttgccagattacgtggtcgtagtatttggggaacaacacacagagctacttcactatcacactatatcttgaacgtgtcgtgtttgttcttgggatgctctcttcgaacaagttatttattatgtatccgtgactcgtgaacttgtgaggcccattacttcataacagttttcggtaaaagaaaaaggacgaaaaagaagagttaaaaaacgctagaaggaggggtcgaacctccgaccttgtggttaacagccacacgctctaaccaactgagctattccagcttttgttaactatttcaaaaacaataaatatattcgtaaacagatgttttaatttcaatttgacttgacaagattaccctttggcacatcgattaacatatcatcgactttggaacctcacaacataatcgcatgtagtcacacttagtcaaatccaaacccaaaaaatctcaaagaaaataagaaaaaataaaaataaaaatgaagagaataagaata

SEQ ID NO: 2636 - DNA, 3000 bp, Unknown
  misc_feature (1)..( 3000): cDNA_ID_2105764_gDNA_ID_1620568_Annot_ID_160792 3000 nt of promoter + ATG
ttgataaaactatatgttacgttcaaaatatattataaaaaaagaagagatattttaactattcaatcagacataacaatatcttgaacatcatttgaaacttttcaattcgatcaaagaaaccttgatatctcgaggtggagcacagggccatcctcaggtctattcaatccactaaaccactattagaaatatcacattagtcaaaaagttatgaattttttctgttattttatgagacatccaaatatcaaattcgacacgattcatattatacatttccttcgaaacaattagaacgacttttgaaataaaaacaaatgggacgaatagaaagaaaaaaaaagagtggggacattcaattattacaacataagaagggagctttatgagagaacaggagccagattcagttaattatgtctacttctggtattatatttgttttgtttttacacagatttgtacgaatcataatcaaagtcacatcttatctcacattcacatgttcaaaactattcattttaccctggattttcatagtaacatttatattcgtgtcttctaatttgttttcatctctaatgccagcttgcaaattttttcttttttttcctaagtcaaatttctagatagcatcctatataatgattagtgttatcatttcgctcgtgtaggctaattatcgattttcttttattttcaaagacacatactcagtgctagagaggagctatttgtttccgtaatcctgggcctctgagagttttgaacaaacatattgggctataacaaaacccattattagcgggccgtttatatctggattctgaagtccagtccaactagcatagcgaaccaaccggtccgtgattcaatttaaccggttattgaaaaagtatcttatccaatatttagtcttaacatatttcattcttcttcctccctattgattaatgaaagaaattcagtttctaagagatcaaaatccgatttacactatttctcttctctgattctttcacttacatttccatgaaaattaccgtttaatttcgtgatgaaacaatttggaaggtttagcaaaaatgataatgtttgttctttatgaaggaaactataattgtgcagcatagtagtagtttgttgtcttgtaatgtgaagaaaattccgatttgcgacaaaatttatgtaagtagatgaagaagtgtgagcgcacggctcttaataaaaagcgcgtggtgcatagagaaaatatctgatagtgggtttgcttagctgtctggtccctactttggttgttgggcttagacgctacccttcttaacattctcatttctcagcttctccagtacttattacggattgccctttttcacaaagagtctttttttttttgggggtgaattatacgtaagtttaatttatttattataattgtaatcaatattatattttaagtgataatttttttataggaaatggaaataaatatcaattacaagaaaaaatgttttaaatcctttttaattaatataggttggttagaagaatttggcccacgactaataatcatatgggcttttgagaaaatatttttaaaattcaacggtccagattagacccaatttttgctggaaaaatatatatatgaaaaatggccctcattgattcaataattgtgtgtttggatcactcttttgccttgagttgtctttctctttcttttcttctcctctctatcttctcttttgttgttacttttgttagtcttcttctttgtttctgagaaattattcagtttacttagattttgtttaattcattcactttttttccagtttaactagatttatttattaaaagtttctgattagtttatgatgtaagttctgctccacacaataccatgctttttctggtaataaccgctctcaatttttttttcctttcgaaaataacaaaattcgtttttttttgagaaaaaaatgagaaatcaatattttagcagttctctagcccagagatctgaaagtgaaaaagcccatttgggggtttggttgggttcataaacaagaagggtattttcgtcattccgactaactggtgttgccctaaattcgtccgccgtctagtcggtgaccgcccggcgatgagaaatgagtttttttttcttttgggttttgtttgtggtcggaatatttaattgtcaactcattgcaatttatacttatttcatagcaaattaattagttatgatttagtctttaattagctaggagtaatccagtttaagggcaagattcaaaagttacgaggagcattcatgaaaccgagatcctagctgtctccacgtggcaaccgctgacctggcaaaataaaaagcgaccaatgagagagtcgaatccgaaaataaagaaacgaaagaaaacaaaaaataatgaaaagtcagtgtgggacccattcagacatagaaatgactagtttgcctctctcacaaaaaaaggaaaatcattttaaaaatccacatcaatttttgtaaagttcgtaggaattattaaaaaaatacaaaaataacacatacacacgacgcctcacgaacaaacggctaaaataactccacgtggataactacgaagatctgagccatccgtggcagatttccggggcagctagatcggtcagcgtcacccaacagatctgaaccgtaagatctaaatttaacggttagatttaaactaagcgttatgtcggtcagattccaatggcctttaagaagagatgatgcctcccatcttcttcctcatcatcatcgaccatctcccaaaaaaccctcttttcatccctttttctgaagctctaaaatttttcagttccccgatcgccggaattttcgccggtgatgtaattttcccgcgccttttttgggaggtgaatttttttttcttctaaaagctcgagaagagtgaaaaccccagaaatgaccttgcgattcgtatg

SEQ ID NO: 2637 - DNA, 3000 bp, Unknown
  misc_feature (1)..( 3000): cDNA_ID_3068965_gDNA_ID_1620568_Annot_ID_160795 3000 nt of promoter + ATG
ttttctttttttcagtgtaagttattttatttttactttcattagttaaatgcaatcaaagtgttatataactataacgaaaattaaaaacacattagatattttaatctattttatatgaaaaaatgtagaactacacttgtaatgattcaaacaactacttagattaaatgacattaaatatttaaagataaattaaatccatatataatttagatttttagctttattaataacaacaaaaacaaaacaaaatcgtgtattgtaaccctcagtcgaattctctatatctagtgagggctttgacttatgattagaatccaaagagaaattaatacagaagaagacgaagttataatgaaaattgaggagcagcttttttggttagtcacgtcatgtgaagaggaagaagatgaaggagaaggagaagaagaagaagaagatcattaattagggagagggtcacaatgcagtacgagacagttcactgaatctgtctatctatgtaaaccccacaaactctcacgcatatcatagcttctgatgaatacaaacaagcctcgatcccattaaccacagacttgtccgtctcttcttcttcttcttcttcacactcatctttataattaacacacacatatgttatatactcatctgtggatgtgcctatactataaagacatgtcacacgtggtgggttatctatgtaactacgtttttgagtgcaatatgtatctatttacacgatactttactgttttcttttaatggatagcattagaatgacttgatggtctaaccattaacattagaatgacttgatggtctaaccattaacattagaataacttgagtccatcataacttggtttaatagttttttttggttgtgatgttacgccacaagcacaaattctgggacctttatattgtgtgtataaatgatatttgaatacagaaattaatatttgtagagattcatcaatgatatatttgcttttgttttttgttcatcattaaatcaaagatcttcgtttaataaaacttgtgtttcatatttttaaataatttataatccagatatattgtactatatacacccacacatgtataatatgaatgtgaatgttgaattatagattgaaagtgagtgaactgaaaggacgagagaggcctaagacagtttgtttgttttcgtgaacatggagcttctctttaccatgtgctctcgatctttttattattaatcttacttttatttacttttttcacattttgtttttatacggttttttatatgagaatggcactgaagatggagcaagaagttcacatgcaaacataaaatattacacataaaaaaattgaaaagctacattctaggcatatgcgtgattttccaaggatttttgtttcgtataaataatattagcagtcaaagtagctagatttgcttctataaatatactttcaaatttcacccctttactttcagatttgtcaatttacgccccgaaatggtgcccttgatagcaaacaattatacagtactactatgagaacgagaatatatctttaaaaattcgaaaagctccaatattttcggtcattagttcataacttcatcatattcataacaattaccgcgaatagcccatccaattattataaaaattttgactatgtaaaagcgttaatcaaaagaataaacgtcatatcaaacgtaagacaaatgtgaacacatatgacaattattaataggcctacacttgaaaaaatgagattactattcacaaacattaccttgatttaagggtcaaattgaaattaaaaaaaaaacaagtgatgctgaatataaaattaaggcaagatctagacgcaatttagtagaatatgcgtacacaatagataattacgtacgcctgtgtatatacgattaattccctctcaataatagttcatcattattatgtaaaatataattataaaaatatatatggcagacagaaaaataaagaaagcaagaggggtagacaaatgttcatccgttttcgtcgagacatgaaatttgtgggatcaaagcaatcctgtaaggaaagggaattaatcaatgtatattactctctttttgtttgtttctcaattagatgaatacatttttcatttatataataactaagacctaaactcttgagtccattactccatttcccctttgtttttttccaacacttcgaaacacagatgtgctagattatatatgatcacctaatgcatgatttatatataatatatgaaaaagtaatataaaatagccagaaatttaatcttgttatgaaaaattgaaaatgattcgagtaaacacctagatggtcattttagactgatatagtaatatctcaatgtatcatggtatttttttcgatggacgaatctgtctacatacaatgcacgtatacatggatgttagaaaccgcaacctctagaactatatgacacacgaattgcagaacttctaaaagttttactgcagtaaaatatcaatcattaaaccaaaaagtctcctataaaagaaatttgattattgattatatgattttgagtgaaactttcttagcagttagcagtaccttttcttttttcgtaggctaaacttaccaaaataaaaactacatcggttcatgtcaagtcttgtaatatatagctaatctagtactagctataggctacagcaaacaaaaatgtttttattatttgtcacgagaaaacaataaaatgtgttatcaaactaaataaaaaccatatattatactaatcacaaattaaacgggaatcttttatttaattaatagtatactctctcacacagacagacatctctggatttatatataaatacagttcatcttctttaatccacaaactcacacacacacacacacactctgttttcttcgtccattctattaccagaaaacagagtttgatagagagaaaaga

SEQ ID NO: 2638 - DNA, 1373 bp, Unknown
  misc_feature (1)..( 1373): cDNA_ID_2106809_gDNA_ID_1620568_Annot_ID_160797 3000 nt of promoter + ATG
atcagaattgatgtaatagttgaaaaacaaatcgatcgaatagagacaaatcatgtgataattgttttggtttggtagctagcatatagtactcgtaccagcatatacttttctctcgcatttaaaaatgcgtgaaactatattataaaatctgaaagctcatcaaaatctaataaaataacgtcggtggagatcgacgagccaacgttattcctcgagtaaacaaataactatgcaaattttctttatcattaaataattaacgatgaagaggtttcaactttcaataatgttgtcacaaaattctttctaacccgactcacttgtattttaaaccaggaaaaactacacgagagcgttgcataaacatgaagaactgttctgttttgggtttatgatagagataagcataagttagtagatttggtaggagtagatattggagataagggtaggattagggtaattaatgaagattaggtgcaaaacggctaaaaagattaacatggtggagcttggagcccacgtcttctccgtacaggcagccctctctatctcatctttccacgtacattttccactctctctttccccttttttcaagcttcataattaatttcatttagattaacaatttcattaatctgttattttcaaaggaaaatggaaacataacactttgtttgttttgttttttatatatatttgtaaagataaaactagctttggaattgtctgtcttcatttttgtaaaagaatctcacatattattccaataccaacatctgatctccaaggaatccataaaagttaagctgtttttatcaccatgaaagtacaagattttttaacgcatttattttgtcagaaagatttttttcactcattaacatttaactttctagcaaaaaacaaaaattacttttaaaatcactgcataatcaaacagtaaaatgataagtaaattggttcaacaaaagtcaagaaacataatctttatatttttgaaaaatctatcgtttgatgatttaattattaatgggaataaaaatttcaacggcgaaaagaaaagggacaactttattgtacagcatatttgctttatgtgtactgcgaaaataactttttcacagttgtaaaataaaaacattttaatatctcatttttttgatttcacaacaaaaacaataaaataaaaatcttttataaataaacactccctatctcttcttgtttccccgtcccctgttctcaccaaactctcaaagctctcttctcttctctagccttctctctctaacacatgagagaacaaaatcatcagctcacaatctcagccgtcgattatatcgccaccgtcgtagaagaagatg

SEQ ID NO: 2639 - DNA, 3000 bp, Unknown
  misc_feature (1)..( 3000): cDNA_ID_1441391_gDNA_ID_1620568_Annot_ID_160796 3000 nt of promoter + ATG
acgtatacatggatgttagaaaccgcaacctctagaactatatgacacacgaattgcagaacttctaaaagttttactgcagtaaaatatcaatcattaaaccaaaaagtctcctataaaagaaatttgattattgattatatgattttgagtgaaactttcttagcagttagcagtaccttttcttttttcgtaggctaaacttaccaaaataaaaactacatcggttcatgtcaagtcttgtaatatatagctaatctagtactagctataggctacagcaaacaaaaatgtttttattatttgtcacgagaaaacaataaaatgtgttatcaaactaaataaaaaccatatattatactaatcacaaattaaacgggaatcttttatttaattaatagtatactctctcacacagacagacatctctggatttatatataaatacagttcatcttctttaatccacaaactcacacacacacacacacactctgttttcttcgtccattctattaccagaaaacagagtttgatagagagaaaagaatggaactgtcgactcaaatgaatgtgttcgaagagcttcttgttccgacaaagcaagaaacaaccgacaacaacatcaacaatctgagctttaatggcggatttgatcatcatcatcatcaattcttcccaaatggatataatattgattacctctgtttcaacaatgaagaagaagacgaaaatacccttttgtatccttcttctttcatggatctaatctctcaacctcctccattgcttcttcaccaaccgccaccgttacaaccactgtcgccgccgttatcctcctccgcgaccgccggagcaacatttgactacccttttcttgaggctttgcaagagataattgactcttcttcctcatcgcctccattgatccttcaaaatggtcaagaagagaactttaataatccgatgtcgtatccctctccattgatggagtctgatcagagcaagagcttcagtgttggttactgtggaggagagacgaacaagaagaagagcaaaaagcttgaaggccaaccttctaagaatctcatggcggagagacgacggagaaaacgacttaacgatcgtctttctatgctccgatccatcgtcccaaaaatcagtaaggtaaattacaaaatgctaatcttttttttctttcaaaccattaataataattgtagtcaaaatcagcaaaagatttgatcatttttttaatgagtaggttaatgactgtattattatatgtgttcataaagaaaatgacctttttaatcttcttgatttacctcaaaatctaaccctagctaaggtttttgtgttctttgaagatttatttaacatttaattcaaaaaattggtctcaggaaaatcaacaaaagattcgtccttttaaatgagtgaattagttataaaattggtttcaaattcagccttttgtattttaacattatgtgtttgtttcttcttttttgaaaccttagttttcttcttcaagattgtttaattattgtgttcttacttttaagggaatctacagaaccggctgaaaagtgataaatcatttaaaagtgttttaaaataatgattattggtatgttcaaaaaaatcagatggacaggacatcgatattaggagatgccatagattacatgaaagagcttttagacaaaatcaacaaattacaagatgaggaacaagaacttggaaatagcaacaattcacatcactctaagctcttcggtgatctcaaggatcttaatgcgaacgaacctctggtcagaaactcaccaaaggtacaaagatattttacattgctcttgtttttttccttctacatattagcccttgtatttatgaattgttataaacaaaccccctgtctttttaacaaatctttttgtaattctgtttatgttttgcatagtttgaaatagatcgtagagacgaggatactcgagttgatatatgctgctcgccaaaaccgggattgctactatctactgtgaatacattagagactctaggcttggagattgaacaatgtgttataagctgctttagtgatttctctttgcaggcttcttgttctgaggtatcgatttaatataaagtatttatgcatggaatgttaattatatagtattcgtaatgataatattgatgagttttgttgtatatatgtttatagggagctgagcagagagatttcataacatcagaagatataaaacaagcattattcagaaacgcaggttatggtggaagctgcttgtaatgagtcatgattgaaactaataaaccaaaactattgtttatttctaataatactagcgcttataaactttagatgttgttttaattcccttgtgagtttggtttttttttcctaggggaaaacattatgagttcagttgtataaacaaaagaaggaaatttaaaaagagatgtttctcctaaattatatcaaagaacaaattgagatataaaataaaaggttatattatgttgctttgagggaaataaaccacttcgataattgaaattagggttcgtatatgacagtgaccgatgttcgaaggatgcatcatcaaataaaaaagctgtattaatcaaaaagttataaaggctaatcataagcgtgattataatgttaatgactgtgcctccaccaatcaacgcattcatcattactgcggcacttacgtcaacgaattaatcttttatcgataaaattccaagaggccctaacttaggcttaatcaattattgggcctataaagaacggcaactgatgtagatccaaatgggctttatttagtaagcccaaactttatgttttctcttatatcttcctgctctgttattagaaagaatctccgatttagatagaaacaacaatcctccggtggtcactcgctaatctccgtttgatctcgccgacactcgagccttttaccg

SEQ ID NO: 2640 - DNA, 3000 bp, Unknown
  misc_feature (1)..( 3000): cDNA_ID_2167302_gDNA_ID_1620568_Annot_ID_160789 3000 nt of promoter + ATG
gaggaaagagtctcgtcggagacgacggattccacggcggcagcggcggcggaagacatggacggaggagaggagaaggggcggaaagaggaggaggagagagaggtggaagtggtggatctaggaggagggagacaaaaagagaaagaagaagaccagatggggcaaggatatgatttacgaaaagttgagggacgaaaatgacaagaagaagatgagaaatatttgggttttggcgatcgacgaagaagattgagagaggctcgagacgttggagtcgccattaacatgtttgctattacaagcgttgccattattcttattctcttcatttttatttttattttttcttattttctttgagattttttgggtttggatttgactaagtgtgactacatgcgattatgttgtgaggttccaaagtcgatgatatgttaatcgatgtgccaaagggtaatcttgtcaagtcaaattgaaattaaaacatctgtttacgaatatatttattgtttttgaaatagttaacaaaagctggaatagctcagttggttagagcgtgtggctgttaaccacaaggtcggaggttcgacccctccttctagcgttttttaactcttctttttcgtcctttttcttttaccgaaaactgttatgaagtaatgggcctcacaagttcacgagtcacggatacataataaataacttgttcgaagagagcatcccaagaacaaacacgacacgttcaagatatagtgtgatagtgaagtagctctgtgtgttgttccccaaatactacgaccacgtaatctggcaagtctgatcccttgttcactaaaccaaatatgttttaactttacgcttcttttaaaaacaaaagaaacaatgaaatttatatcatttgatgaaaccaaacaggagttaaaactaataacttcacattgacattgtaccacaattttactaccaaatgaagataggtaggtacattacaaccaaaaaatgttgactaatgactagtgaaaacttccaagtttcaataaatgaatgcttcccataaatgagaaattatgagctgccaaagaaaaaacgagaattatgattggaccgcttaaccataaccagccaaaatctacattattttccaactttgcttggtaattcatttattgttagctctaactctttcgtcgattataaaccccatatttctcactcaatcaataaaacaatctctcttttatttttgcaagaaatggatagagttctcgccgacaaccgtagacaatcgtactccaccggtcgatgcttgagttcgccgttatcttgtctcatccatacagaagaaacagagtacgctcgaatcagtaaccacaacaacaagacaagacctagtccgaagttaagggatttgatgagaagattattattggttagaagttgcggattggagaataataaatcgaaaacgttagttacgtttcactacgatgctgtgagctattcgcagaatttcgatgatggtttctatctgcgcgatgccgatgatgatcctaagctttttagagatcttccaaaacagagtccggatcactgatctatgctctgttttttcaattttatttttgtatgcacccctaagttctgtgtattacaaatgttccctatcgtgtacttttatttatttaagtatataccccaatagttttggtttataacatgtgtaccctatgtttttttctacactctacagttttgttggtttcgttttcttttagcatttgtttagaccttcttagcttgagaaaaattcaatcatgtttccatgttgcactttaacatctctggtaccaaataggcgtaattgaatcgaacaatgctcttatacttgtggttagtgttggttcgtctacgttatgctctcgtaaagttactatatgggatcctaaaacagggaggtccacatagatttaaaagaatatttaaacaaagttcagtgctagtgatctgttgaatggactcttaaaataaaccctcttttcttgaccgttgtttagtttttaaattgtgttatatttgtgagtgtaacgtttgaaacaaccaaccaaccaaccagaggctattgcaagtttccaaaccatgaatcttttgacggtttagaaaaagggattaaggcaaagaaatatgaggacatcactaaaagagtctcatagcatatcttccaagaacaagttgtacatctttatgcatcagaatcttgtctacttaaaagcttatctgtctctcttcctccatcgctacgaacctctatttgataataacttaattaacttgttaatcttgccattaaccacaaaatcattaaccttgtctctttccatctccctcaaatcaaattcagctctagcgaccgacgagagcttcaagcataaaactttttctttagtgaaaatcataattattatttttaaaatgagtttaagtgtcaaatctatattacgtgaaaacattgccgaacttcgaacaccgcaagacttacggaccaattaaggacgggatgcgtaggcgcagttagtttccgacgtttttaaaattttaacacttaaactcatttttaaaaagtaataatgaaattaatatgattttatactaagttttatttattgaaatgttttagtgaaagatttaaactatttaattatagttttaccaaaaacatttttttagagaaaagaaaaagaagaaaaagaatgaataaagaaatacctggttggatttggtagcaaagaaggggcccataaaaaaaagcccaccaccgtgagcccaccttgcgtcgtcgtcgtctgaaattctccgtcttcttcattcgtaatctgagaagcttctttgtctttgatgattgctttcttcctccaccatcgtcgtcaatggaaacgagaatcctttgatctctcctctcaatcgtctctctctctgtcgccatctccgccgtcgtcaatg

SEQ ID NO: 2641 - DNA, 3000 bp, Unknown
  misc_feature (1)..( 3000): cDNA_ID_2167276_gDNA_ID_1620568_Annot_ID_160783 3000 nt of promoter + ATG
atcttcttctccatctctgcaacgaatcagaaggaagaattttgtttctaatttctcgatgcacataacgtaaaaataatataaatttagagttggtgttataccttcaacagccatagcttggagaaaaattacgtcgtctgggattcttcttcggaaaaatcccagtcaaaggttcatacaatattcacccagaaaacaaaaagaacacaaaagagggaagcagagtaacatctccggagaggagaagccgaaagctcagagccggagagaatccggagaaacagggaaacagaagttttgtgtttttgtgtgtttttctgttgtttgttgtctcgttaaaagatatctttagaaaatggttattcttagaagattttagagaaagaagaaagatgaggttttgatgactggtaatggattggtatctctgctatatttatacaactccaccatgcaaagtcaagttagctttataaaattatgaaacatttttttataagaagaagatgaaaagatatgatgccgtaactaacgccttccaacgaacagacacgccgacggttgaaatatccaaagaccaaagctagtcaatggcatttccgtaattatagagaatgataagacaaaacacccctctttgttttttatttattcgaaattacaatttcacttaatttgtactttcagcaatttaatattaaccatgtgaaatactgacatcttgttttttttttctttggttttggtccagcatttgtcttcattaatgtaaacctacacagaacttatttacgaaatgccgtcgaatgtgaatctttcgaggtaagaatatggcaatatgctatcttatttccggttatcgtgtcgctatcgtaacgagtgtgtaaacatatggcaaagaagcttgaccaccctagaacaagccaataagccattgttgttacttgacatcttaatataataaacatcaaatttatcacgttttataactaagtaagatagaaaacatttatgagattgttttggttcacgacacgacattcacgagtcatcatgaagctttgtaaaaaaaacatatattccaaaccacatcaggcgcaacatagtttattagagcatccacaacggtggagctctctcacttaaactcataattaaaatatttaaaaataatagaaagaaatcagggagagaagcaataggagagagttttatcaaataaactctctgtagagagattttgacacacatgagagaacctctactttacacatgttttaactttattggtgaataccaattaagtaatttaaatttaattacataataaaactctaataaaaataatattgttttattcattgcatacccattttagagagtccaccgttatggatggccttagtagttcatttggtcccaccacttaagctctcatttgtcattaataacttaggaattacgtgaaataaaacttagtttatgatttagcttacgtgaggcgatcgtgagtataaattagaaagaagtacgatatgcattgaagaaaaatccaacgaaaactataagtataaacatagatgtgtctaatttccactacatatatgtgggtttagtaaagttgagtcgttaactaacatgagttgtttttcttgggtcaaactgataattttcttagcttaaaccaaaggagaagaaacctccaagttacaagacttctccaacacaataaattttcctctaaaaaatgttagtagatttgatgattatttgttttggatttgtttttgagctttgttatgacaaaagcgattttctttacgtgtatttatttgttgtaatattatctagacaagaagatataaaaacaacaagtaagtgaagttgttgctggaaaaaattatcttttagccttttggtgaaatgagaaatgcttaacgtaatgaaatgattagttaattggtaatttcagtgagaaaggtgataaggagagaaaaagaggtttcttgtatagtgggtgaactaaaccccttaactaattttgactcctccaaatgtaatctctttcgctctctaaattgggccccaaagtccaaatcaaaatagccaccaaactcaccaatgtcaagttctgtcggagaagtcagtctaaccgatttcattctcacttaaacagtcataaacacactctcctgttcaatccgaaattcagttaggtttttagttgacttctggtttagttttttcatttactgatttagagcaattagtaatcaaagattcaaatatgtcaccgtgaaacacaattgcgttaaccgtaattttctgtgattgttctattgcattgccaaaagattaatagaaaatttgaaatgagttacgtgtaaacttatgaatcaaatgacaatctaagaggcgatcacttaatccaacaacggattagagaatattatttcgtaaaatacagacatgtctatagaaaatctaaccgaaccacaacgatagtggatgtgacatgaaagtgtttacgtctacatggaaaattgttatcgtcatcattcatgaattgaaaagacaaacaggttatttaataaccaagatatcgttttcatgtgatcaaatcaattatcttatcaaataaattaactaattaagtgatctctccatcaacgactcgggttgcctaaaactaatgactaacaaaaatattataattagttttgttgcatagcaagagatcaaataggcgcctgtagctcagtggatagagcgtctgtttcctaagcagaaggtcgtaggttcgacccctacctggcgcgcttcattttaaaattcaatatattttaattttgttttgactgggaaaattccatgagcattagtaacttaaagcccattagtgggcaaattaaatgggccttattagcctaagcccattatcaataaaaacaaaacagactcaggccaacaaaaattagacagaaattaagagtgaca

SEQ ID NO: 2642 - DNA, 3000 bp, Unknown
  misc_feature (1)..( 3000): cDNA_ID_2167155_gDNA_ID_1620569_Annot_ID_160809 3000 nt of promoter + ATG
aattctcatgaaacttggatccattccagtttttattttggtttttgttttttgccttgttggttttattgttgaatgaatccttttttagttttggtttggactttgaagctgattgattacgctctccaagcagtgttatacagtatactgtatttgattcgatttagctgcaatgtattattgcgctaaaaaccattctacttgttgggcttttattaatatttgagaaagcccaatcaaaacaataatcagtcatggcccaatttatccattaccgcatcccaacaatgaaaccagtaaagatctgcggtgaactcatcaatgattcaattcatcatgaacatcgaaaactacaatcactactcactaggattacatatagcacaacttgaacttgaatactagagaaaagagagaatcacaaacacacgtgacatacacgtgtcaaaatctctgtcacggacaagaaaagacatcgccgctatcaatccaccgataataatcagcgtcgacggtggctccgttgttagccgcggtggtgtgaagaagactcttgattttgtgaatacatttgtggttgcggatgcggtttagaacggcttttttgttcagcgtttgcgtttgcgtttcagacgatatcaggtgtagctgcttggacacttgctcatctttcaaaatctcctctcctttcgaagtcgcaaattccattgtagtagagaaagaaaattagaaagctttccgattttttgttgttgttgttaatggaacgaagaagaaattgtgtagtaaacaacacacactcgtgtgtatttatatatattaatggattggtgagacttcgcattcatataattgcaacttgttacattaaaaaaacatcttttaagggaagaataatagatattacgtgggctcttgtcccgttggttctgtgaaaactggtggctgatttggcatttcattagtttataagaaagggacacaaactatgtgctctcctacgtgcaattctcatgcgattagtgcattcttaatccctttaatggactgctttatctttgtcattgcttgcgtaacgagacataacgacaattaacataatcatgttgttgttgtttttttcaatccatcatgttgatttttaatattacaactactgacttctattctctaattaaattttctgataaattaaacggtatgacacataaacaatgtagaaacggaatagtcaaatgatatatacaaaattcacaatagaagcgaaacataacatatatttgtttacttattttaaggttgcatatcaataacttggtaattatttttggtcatagtggtaggcaatctcccactgacaatacgaactagaatctcactgcatctcccattacttgggacaataaactcaaatagacacttattggtcagtatcatctcatggcttttacagaaacacaaccatgattcatgcgagaacttgaatcctctgtcgtgattcagaatcttcaaaggccacttctttccactttcatcacaaagctcaatatcttcctccaattcaatcccgttcgatctcagaaaagttaacggtaattcctagcaaacacatagaaattgatattatgtaaacaaccattattatgagttaatacagatttatataaaaaaaaaggttctttaagctcaccaatttctgaagtgaacctcttgtgatattcctaacaaaatgcggatgcttgggtttgtaaaccgattcttcaaatccattgtgtttcttctctggaaaccatgatatgtcacaagtatctaggtaacaccgaatgaaaaaaagagttaaaaaacgcaataatgtaaattaaaccaaaaaaaaacatgttaataattacctccagcccggttaactgttctctgagtcttttcactatgctccggtttggttttgtaagttgaaacatactccggtttatcatcaaccagtacgtgagggtcttcattaaccgaatcgcgtttccgtttccggttaatgctctggccacaatcacaatctctcatacgatccggtttagtaaaaatatcatccggttcttcctcatcaagagaaaccctagatctatccgtggttgagacgacaccaacatcttttttacatccgtcattagcgaaaatcgtaacggagaatctggaatcgccgtcgtagctgaagacaaggaagtctccaaattcaagagattgatcgtttgcgaaactttgccaaccttttgtgaagaaaacacagaatctttcttctgtatcttctgttttagtctctacacaccataaccgtccaatctcatcgactaagaacgcttctttaggtaatggtttctctaacatatcgatgaatgcaggaggaatcacctgcagatttatttttgtaaattaatctccgcatggaatatattttgatattataagaataaactgatgagatataaaacaagtataccagttcgtgagaaccgaattcagggagaaagaccttgaaaaattgtaagtctttactgagatcaaccatgatttcttctgtgattagggcttttggtagtgattgattttaaactaaaccagaaggcaaagaagcaacgaagatctcagaagcagaggaccttataagagagatgagaggaacagctgttatgtgatgttcttttttttttttttttttgtcgtctgttatgtgatgttctaaagtctgacaaggttggaaaaaataaaggaataaaaccttttttttttgtttgggcagaaaggaaaaacaaatttcaggaattttgctttcgctcccctaatttattgttattattactattatgggtgtaaactgtaaaacttgtgatttttacaacttattaaacagccaaacctggggcagtcccggcaagacgtatttatgtatccgagcaaaaccaaagccctaacctgtaaatcgcgaccgaatctctaattttctggatg

SEQ ID NO: 2643 - DNA, 1414 bp, Unknown
  misc_feature (1)..( 1414): cDNA_ID_2167182_gDNA_ID_1620569_Annot_ID_160818 3000 nt of promoter + ATG
acttcacaagtgttaagggtctttacatgggttcactgcatctcaacagcaacaacaacaagctcaagtatcaaaaactgcgcctctccaacctccccaagattcctgacgcaggtcgggagatgttggatcaatgtttcatgagcaagcacttggtggaatctccctctggtgaacttttcttggtcaactggtaagtttgtctattaagaggctagctacttttggataaattcaaagtagagattgagctgctttcttctctttatgcgcaggtacgcacaatgcattcacacagaggaaaaagacggagaagtggaaggtctccacagcaaaaccaagcggttcatggtctttagggaagatgagaagagcaaagactttagttacacggaagatattggagatctctgcatcttccttggcgcaagtgaagcgttctgcctcacggcaagcatgtacccggggcttaaacctaactctatctattacattggccatggtcttggttcatacgatctaacctctggtacggtccattccttttaccctcctcatgcaccaatgctcaaccatgttccttactggatcccttctcatctctgagctctagcctctaggctatgggtttgttttacggtctttatgcatctactctctacttactactgttgagtgttcttttgttaactactactttctggatccctactctttatgttataaccaggtgacacaatattattagtccacatcgtatttgactcttccgtcaccattcacgcccatcttaatgggcttgtgttattttctatgagccgttattttggcccaataaaatgtgcagcttagtacctataaaagaccatttgattttatgatgatgaaaaatactattataacagatttatttcgtcgacatatcacaattaaatttaagatttatatattaaagaaaaaagttgtgacacgtcaaccaaaagttaaaataaaaatcaatttagtggcttaaaatggggataagaaaacaatattgaaaattgatgatttatccactcacaatccaaaaaaaatccaccacaagcgctgatcacgtcacgttcaaatatttttaccaaacatttctaaatatattgattagtttattaaatgaatttctaatggaggagagaaaagacatgtcaacatcagaaggcgatatttgtaggcactcagagatgaagtgtgttgcgttgctgatgccacctgtctcctcctcctccatcatttgcctccttcttcttcaaaccaatttcttcttcttcttctctcaggtttgagtctgaggcatcacaacagataaagtcttgaactttgatcaagaattctaaacggagtttttgctcttctcgtcggtgaaagaaaaatcgagatg

SEQ ID NO: 2644 - DNA, 3000 bp, Unknown
  misc_feature (1)..( 3000): cDNA_ID_2167171_gDNA_ID_1620569_Annot_ID_160816 3000 nt of promoter + ATG
aacacaaaagtaggactagtattattaaggatatcattattgcttataataatgtttaattaatgtaaccaacgacattgcctttttctctgatgttcacgtaacacatccaaatacatattatttcgtagtgatatccaacgataggctgtccgattcaattcatctaactgaattatttttggattattaagggtttggttgaggtcatctctttgtaaatttggcttaatttgtatagtttcttcaataatgcaagtcatctgatacaactttaaatccaatattatacttttaagtttgtttttatcgttcactaaataatttccaccatctgaacggtcgagtgttttttctctgagttaggttatctatattttttttcttttctttctagcttttacgcatttttttttatcatttgaaagtccaaaaataattattatcccttgtattcgtgttgatttttttaataaaaaagttggattgtcaaataaataaagttgaaaaacaagaagaagaaaaaaaaagcaaactgaatcagttctcgtcggtccaaaaaggagagagttctcttattcacacattttccatttcacaagcaaaattccaaattactcgttctttgactttcccggaccataaattaaaacaatctcatatttcagtacgtaagacactaagatcaaagagtacaaataattttttatttatctgttctatgattatacgaaataatagtcaacaaacttttggtgacgccaactattacaattttttaagtcaaaaaagtgagcaaaagtcgactggatcgtgaaggcctcctgctgctcgctacttggttcctgatatgtcaaacatccaacaagaagacactcacgactcaccaaccgcttctactaagtaatatatattttttcttgaatcaatctcctgcgattgagcttaacatgtgtttcttcttccttctaaaagctttgtttttgtaaaaggtttaatgtcaagcatttagttttcagtaatacaatcaaccattaaccaaaatattgttgttttacggatttactccgaagagcttaagtcactattggtaatttacacatatgtcctggaattgtttacatttcaacatgtgtcttttgttaatcttgtgtttagatttatattcgttacataatgcatggtttcacgtaactcgatattgtaacatggttggggttagaaataacaactttgcgttcgaacgaagccgtctttgccacagtttgcgtgacccatcaacgttcgtttgtgtttgtttgggaaagccgtcacacgtgcgtttgtgatcctaaattaaattatataaaatctgctccacatacactaaatctactaaataacccattaaactgaagcaaaacatcagtaatcaatatacaattatatcaccattactatgattccaatgtaaatttgtaatgtgtttcatgactgagaaacccattcagcaagtttttcgaattgttcgacgagcataggcgagagtttcttaaccggtttcctctccttttccggtcgaaaatcaaacccaagcgcgtccgagacttcttcggagctccacccggatttacggagcgactctgagatccgacccgcttttaatagaagcacatcaagaacagtttgattatcgataattaccatttcgccctcaaagaaacccgatgctgacacgtggataatctcatcaatatcggattcgctccacccgcctcttcttaaaaccgaaccgatccggtttacgtactggttcacccatttcggagtctctgttttgggaaggtccggcgatgaagaagacgacgatgatgtggaggcagagtttcgccggcaacgatcaaccgccgcgtcactccaaaactcaacccatctcgacttacccgcaccattagcccgacccaaatctaagcttctccgggaaaaattcgaggatgatccagctgatttctcgctcactgaacgttgcttagtgagaattctcgggaagaattcagagcttcgaaaagcagattcacgctcgaagaactcggatagatccgacccgcaacagaagatccgagtctcgtcgatgaagaaaaccggattaccagctaaagacgggttacaaggaatgtagcagtgatcaaagatgggaatcagtaaaggagctctttttaaggcgtttctcgcgacccttaaagctttttccgggtcgggtggtttcaagccccaagatttgcaccagagactgtttttagcgatttggaacgatacagcggcgactggtaaatcgatcatggcacggaggtggagacgagctccgggagaacgccagtctgggaatcctgcgccgacggagagaccggcggagaggataacacggaggtccggtgggaaggtgaaaccaaactcggcttcgactcgggcaaactcggtgtcggagagacctggttggattttgatacctgaatttttaagatgattgattactttatcggcgaaaggggagaaagattgaaggctgtttctgatcgtaggagtggatggagcggcggcgcgagctgagagacggcggagaccggctgcgtgagccggagtcaaaccggtcattctccggtcaacgtcgaccatgtttcactcaggtaagagaaagagcaaatttttagaaagatgttagaatttttgaaatttttgggtgagagatttgtgtaactgagaagggaaaaagatgatcggaggaaaatgaaaactttgtagtgggaaagagaagtgtagcgaggagcttctatatatatatatatatatatatatatatatatatatattgatgggaccaacatgtacatatattagatattggctgccaggtaggcttcaccttcctactatatagattgttttcaaatcttcatgacaacacttttgatccttcgcattcactaaataagtacatattatcagtttgacaccaaaaaaatg

SEQ ID NO: 2645 - DNA, 3000 bp, Unknown
  misc_feature (1)..( 3000): cDNA_ID_2167357_gDNA_ID_1620570_Annot_ID_160825 3000 nt of promoter + ATG
tttatggagctgaaacttttaaaagatgtgttgccaaaagagattacaaagccggtcgaagtgttggattttttgaaaagaatggatggttgttatccaaacacatggatcacttatcgtatactactcaccattccggtttcaattgcttctgcggagagaacttttccaaaattaaagctcataaaaaattatctacgttcgactgtgcctcaagaacgattgaatggtttggcgctgatatctatagaacaagaactggttaagaagctcgattaccaaaaattaattaatgaatttgcaggagcgaaagcaaggaggattatgtttcgccatgaagaaaaattatatttctgtctttttttcttgttaacaatttttctgttcaattttcttaaacaaaataaatttcatattattttattttgcgagaaaattttggggcattaattttgaatttgctttaagcatcaaatattctcggaccggcactggtaatctttctctctctttggacgttttcttatttccatttgcaacctaaaatatactagttgcgagtgtgacatgatggaaatgtttttggcaaataagacatgttcgtaatgacagaacaaccttgagtaccaagtgacagtatcaattgatctttgatacgatcgggttattgagccaacctaagggatcacaatttaaagctaagcaatatcgccaagtagttcacctatactagagtacttgtggcgctctaagatttgcataaattaactgcacatggagatggcgttatgtgattttttttttgttatatttcaaagcctgaaggagaatatttaatgtagaaaacaaatattttgcgtttgcgcaatcgaaattttgttttggtcaaaaatttgtattgttcgacacaacggcaaaattatagttgtgacttttgtattaaaataacaacggttctacaaatttaatgggctatagatttaggaccaacatttcggatctgaggtttaacacaaaagttgtgaaaatgagatatggttgcatatgcaccaccaaaattgcaaatcaagggatactcttcatgccgaatttgtgtatagtttagtttaccattttttatttttggattttacaatatttgtagatacgacatgatattttctgattggcatagaaagcttatgcaatagcatgtcttgagcacacatagtgtttggagtgttagatattatggtagaattttcttgtgacccaaatccatcacttgcaaggaggttaatttagaacaaaccaaattcatatgagatgaaattttaattatcaatctactaagactaataagaggagaaaatacaaagaatataaacatagaggaagtccaatacaattaacttgagacgtcttccataatatgagaaggtttcttctaaactctctcaaatcttgacatttggaatttttttttttgtgtgacatgtgttggcaatttttccttttttttttcttttctacaaaaaaaccacttcaattacagattgatagtaggattttactcacttaatccctaaaacactatcctatcgttgtactattttaggatgtcaatccaatccggtgtgatgcaaacagatgagatatgatcaaaaagctctaagtcaagccaaacagaaagttggttggttctaacagtcctagtatgcaataacagaaatgaaatgaaactaaaagcagaaatggcaatagcaggcaagtaaatgacaaagcagaaatgataacaggcaatcaaatggataaacgattcctaaggatggggaatcgaatagtgtggtctacttaatctattcaggcggttgacaaaacttcacagaagctatccctagacaacaagttcaacaacagattaattcactcccgtgatagaaatcctcaagtaaagctagacactgacctaaatccctttagcgatctctaactaagcaggcattatcgaatcaacatgttaaaatcaataccctctctacagccaatcccatgggatagaggtagatatctctggaattaataggatccaacgcccattaaacgcctcctgagcgctggacgtctggactcatactccacattagccagtgaaacaagcaataagcgcaactaatccagaagggattctagtattctaaactcaaccacctaaaacgaccaagtaaaccacaactattctatcccatcctcagaaatacagttcactactcagacataatcaaagacaatagcaaagcaacgattaaaaacatgataacagaaatgacgaaagacttaaacgaaaactgaatatcaaatatttgaaagtgaaaatacaaagttgcaggagaaacactgcggctataaaagttgcgaaaatgtaaaagcgagataataacggataatagcggatgccctcgggaaaaccctaagaggcagtttatacactacaagaaaacagacaaacaacgactacagaaagcgacaacagatgtagtcgtcgtttttggcgactacgtcacgaccgttttacgacgcatatacgacaacatgaacattagtagtcaattagtcgttattttacgactaaatatgttagtcggcaaatactcgtatagcaacgactatttaacgattatattatataagaaaaacgtttgtcgttacatagtcgcaaatggacgactacagtttccgactgcggaagttagtcgcccaatcggcgactaaaatacgacacatgtctgaaatcgtacaattgtcgcaactgagtcgcagaatagtcgcattaagttgttggaaaacgttttccgcattgccaagtaggtacacctaatttgtttgttgtagtcataaattagtcataaaaattcatctatataatcaaaattcacgacactcttctttcacaaacaaatcaaaacaacaatcaaaagaaaaaaaaaagaaaacaataaaaatttagtttattctataatg

SEQ ID NO: 2646 - DNA, 3000 bp, Unknown
  misc_feature (1)..( 3000): cDNA_ID_2167433_gDNA_ID_1620571_Annot_ID_160843 3000 nt of promoter + ATG
agatcaaatgaagtttggattcttgcaagtgcatcacattggaacagagaatcagctggccgatatactgaccaagccattgcatcctggccctttcaaatcacttcttaatcgtcttggagtttcaaacctcttccttcctaaagagtgatttgtggggggctattaacatatgtatatgatgtttataattagagtaaaaattcctttagtttactctaagtgtatataaggaacatgtatgattcatttaatcattaaggagaatatatggagaattcactttatctctctataattaatatttttgtccaaaataaaagtcaaggatccaaaattggtgaaaatatcgtatttctgcgttgataagatatacattatgcaaaaattatacatttgtaaattgtactttaagttaactaaaaatgtcgtcttcggttattttgaatctccacatcagttattatcatttaaaataggtttcagtattgtagtaattcattactatttacattatgcaaatctatgagtgatatttcaatcttatctttcaatattagctaaattattttagatttttaactaatcgacagcttagtggctgtaaattattgaaagtttaaagtcgtctttaacaaaaaaaaaaaaggtttaaagtcgtactgaaaacaaacaagaaagcaaagaaaaaataagtggtggttgtaataattatgccttgatttgctcgtaaagtatgcttcggtattatttgtaccaggtaacaacaactaatcacaatcttcctaccaaaaaaaaatcacaatcaaatgattgtttagtcttatattacgtaatgtatcttcttctggaagaaaaattccttaattactctaaaataattctagtttggtagatacgttataagtaatttggagattggtggatctactatgtatcagttgtagccccatcattatctatatatatacacaggatcggtccttgaattgtttatggcctaaaacattatttgaataatatgattttctataaaaattaatattaaaaaagtcattaaaatacgtaaatatattaaaacatttcgaaaactcatataatttctataattcacttttgttcagataaattaaaaatatcataatacctaatcgccaaattaaatcaaatatttggagattttgttttatgaaaatattaaacaaaaaatattaaatgaactaaaaacaattctctcccactccacaaaacaaaaagaaaggacatgaaaatcagaaggaaaaaagaagaaagtaaaatataagacttgaacattgcaattgtagtaagcacaactcttaaatactcctccctacagttttatacttttatttatagttaatggcttaaagcagatgttttagctaccggcgggctggaccagtctatacgtttatataagacaatgcattgtctaaaaacatagtgtcatgttcaatatatagtgttgagatatctcgacgactcttttggagatccaattgattaaatacaccattttaaaatttgtgaaaacattacaagcatttagttgcatcatcacccttccaagatttatataccaattgatgaatattgatttggaaaatagcatttccactctttaacagctcaaatagtttgagaactttttactccaacaatttctaaacttggttccttgtataaaagtattgtatccttttgacgtattaaatttatttttctatatttaagacatttacttttattaaagttattatgaatcatatatttataaattaaattttagtatatattttaatattatatatccaataaccaatatataagctggtcagaaattagttgaatatatggtcaaaaaaattggtagaaatataatttcaaccattctttttgttttggtcagaaaattgcaaccactttttggtctgctatttttgatcactgttattggtcaaataaatttaagatataatgaaaaaaattgttcaaatccttgtaacaaaaagaaaattctctttaaaattcaattatcaagtctcctctaagaaatatatcttattcacatatcttttatacaacaaaaacatatttttctttttcaatttctatttcttttatctccatcaccttgaatcttgatcattattagaggacatacattggactgtcctatatattttggtaagaaagcgatggattatcataccggaagtgatagtctccacaatttactctctctcacttcaccaagctgaatatattgagtttcagatgtactgggctctcttctctcatggtatattttctattttaagaaatgttcttccgcatcttctttttatgtttcactattttgttgaattaattttctattttcttagttatttattggattaatctttattattggctaatttttttggctatatttgatataatttaatatcgaattaaacttgttttgatatatgtaaaaaacgtttagaataaattgatgtttggcattttctcttgctccaaaatatgagtgttctgagatatttattgtccaacatttgtttgtttaaataacaagatgctgtctaatttctcatgcataatatgcacttgtgtcgctcaattaccaaaatggtttctataaaataggtttttatggatttgtcggtgcactagctaaggttgttgccaaaaaagaaaaagtaacaatttctgttttgttttgatttgtaaacaaataaacattcttctctctcctttgatgttttttttataactttgcttgcaaaatttccatgtcttttacacacaaaatgaattaaaacaataaaaagaattaataagtttacctttttcgcggaatattaaaaaattgcgccgcttcaagttcaaaattagatgctaaaatgtgtttctgtccaaattcaaaccagttttgtcttgtcttgtcttcttcttcttcagagcattgcaatg

SEQ ID NO: 2647 - DNA, 3000 bp, Unknown
  misc_feature (1)..( 3000): cDNA_ID_2167452_gDNA_ID_1620571_Annot_ID_160850 3000 nt of promoter + ATG
gtgcaagcgcatgcgtttccacatctataagtaactttgtgcagaagaccctgaaagcatagcaaatgattttgacatgtataaacgtgcaaaaaacattgtgtgcactaatttgccaaaagcttcaatatacctttatagctaaagtttgtagatttggagatttcaaaagcagacgaggcaatgcctgccaaccgttttccttgtcactctcaatagatagatgaatgagtttgtcgaagaccggcatggtataacagcggtagtaaaacgcctgatttatagtcaaagtcagaaaccagatatagatagaaatgagacaatggtaactagcaagaataagagacctcaagagaactggacgagaggtgaagggtcttgacatttcttatcgcagaaaccagatttgtaacctcaccaaaatcaaaagtgttagttaactcccacaatctaagatccagtctagcttcggcaagcgaatcaagataatcaacatcagaaccatcggagcgaagagcagaatagtcaagaaactcaagattcggtgtcttgatctcaacatcgtcttcataaggatatgtgttatgaggaaagtggaaaacaatcgtgagtcgcttgatggatgcactaaccacagacctcgtccaagttggctggtcatcaccactaccaacatcaagtatgaataattcctcgagcacagggcatccagagatgagccagttatacagagctggcttagcaacaacagcaccgagggaaagtgtcttgagcgcagggaaaaacactctgccctcaggtggaacattgcctcgaagaaaagttcgataactagataatgtgagtttaaccaatgtattattgcggaagaaaatccctatatccagataatgatcatattgggactgcaagttaagttccaagcagccgcgtttgagggcactgcgaatccaacggttaacactagatttttcatagtgggaattgagagtgagtctcttgatgggacaattgcttaacagagccactgtatctttcatgaaatcagagaagctatcagcatttctgataggtgttgagtcttccaaatcaaagctgtctacaaaatggaacagattcctccacctcttggacagaacagatgtggatacaacgagttttgtcggaagtaaagataagatttttttgccaagaacctcatcaggcaaactgctgatgaaatctctagagcccataaagactttattcgcctgcaaatcaaacaacgttatgaactttcttaagcacacactatatatgaaaagaaatgaacaaaaatgtaatttttccgatacagttgattctaaatagcctaaatttgattacccatgtagaaaaatctatgagcagatgtgcttaatgaatctatagctaaaacggaaagggggcaattaggttcaattgataactctacattgattctgtgagtcaagaacgaaaaaacctttgaaaatgaaagcagacgatggatgtgaaagcaggattcgtcgtctaacaggaagttccaagcatcaccacttcaccacgaacaagaagaagagaaagagatgctccttttttttttttttctttacaaagacaaacgtttgggtttaccaatgcttaatcctttccttagttattaaaaaaaaagagaaaaaaatactagggcctgattgacaagagtctttacaaagcaaaaaaaaatctaaagctttgaaatatatccaatcaatcaatttgttacccacaaggccacaaccaacatactttcttaattattattattttggctgtaaaaagcagttttttctgtctaaaacacacaatttaattatttaaagctttccaaaattttaaattctacaactacaatcacagctaaaacatttacggtctaaaatctaaagccaaagtccgaaccaatcagatccgagatctagactttggggacttggggtattccgtatttgattcggtgttggttcgactccgaatattttggatagaaacatttaggattaattcggttattttacagtttaattcagacttggtttggttttagttatttttaataaatttggttaaattttgactaaaataactaaaaacttaggaatattttaaatattttgagtatttcttattttgatataaataattgatatttttagattattcaaaattttgggtaattaggttatttaagatctaaatgtaattaataatttgggtatataattatattttaaatatttatttggttctttggatatttaggatccattcaaatatttaattaattttggattcaattcagtttttttcttctatttggttctctattccggtttgtttgtttacccctactaaatacttaacaaaatataataaaacctctataaattaataaatattattaaataataaaatttacatgtcccaaattggacaaatataaaaaattgacaaaattcgtttagagaataagataatctctatttaaatatacattcccattaaaacaattaaaaatgttacatttgtttatcataatgttttgtttaatatatctacgtaattctatttataactgttaagaaattaaaaattgcgtctactcattacaactcttcctttaatatttttttttacttatatcgcatattttcaccatcatattttcaccaatcttgatttttcattaacaaggtaaaccagactcactgggtatatattacttgggaccctctcggctaaaccgggttcaaaatttaaaatatacagtcagaaagtttgttacaggggtatatacgtcattttcaacatttgaaattttcaaattcgctgtgtctccctcgcaggtatatatcacagctacacgattgagagcaaaaaccaaattctcaaacaatttttcacttaacaaattagcaactagtgagatactgagtgagaagagatagagagagagagaga

SEQ ID NO: 2648 - DNA, 3000 bp, Unknown
  misc_feature (1)..( 3000): cDNA_ID_2167473_gDNA_ID_1620571_Annot_ID_160857 3000 nt of promoter + ATG
tgaaagacaaatctaaaattccttctacgggaaatattgagatactgttgtataacgtgaatattcccacaatcaggtttaaaaatgggattattatggttcgagacaaatccggggacattatggttagagaacaattatagttagagcattatcccttttttttttagttttaattatcacgtttattatgataagataattatggttagctctcaagtgttgagcataattatatacagttactaaacactcacgatttgtaatgcgtaggtataaaacatataaatatttattgagtattggatgctaattaggttttccatttatactgcttatgttcaaccagggtcacgcaagaatgtctgagaaaaggtacaagtagatgaaaatcaaatatttctgttttctatccaagtatagttgaccatcagatcatatccaaacgtttgattcaaatagatctatttgtaagattagttcgatttacatgattcaatattgtaagattccccaatcagtaatatgttgaaaaattagtaattgtgagcaaattatttttcagatcatgtcagatttacaaagtgcatgtaaggttagaagtttgttgattctgaataaaaaatgtggacatttattgaatcggataatatagaatagagaatatcgactaatacatgtgatttcatattatatagcttagtttttaatattaaaaaactttttacaacttggtaatgaaatggatgtctctgaatatttacatgtagataggaaatgaatatttatatgtctatccacaagccccagaccaatcagatataaccaatcttaagtatttttggaattagtatagtcggaaaattttgctatgcatgctccaaaatcgaaagagtccctataagttatgataaacgagaaagatgttcactagtttaaacgttaaatacaagagagaaatacaacttcataataagattacattaataaactagataaaagagggaaacagaagagatagttatattctgaaagtgggtaactcatgtttttaaataaattaggaaagcaaaaggatgtctctgaagaggaagaagtagacgcaatgtgaacatctctcaccattatattcgttgtaaaattcatggatgacccaacagtctggataatcctcataatgaaagagctcagcgtaagatccgaatcgttttggttccaaatcagaaatgtggtcaattagtgtcttggccatgatatctacatctgtaaaacacttgttctctcgtttgaaagtattaaacgcgtctaatacttcattatctgcgcagcggtttagcgcaatgtaaagaagcttggctataggaatgacatctttacaatcattcaataatgaaatggcgcctttcatgtcgagagaacagaaccctagcctcaagctcaggagatacatagcgtaagggtttctttttgcaagacatttggagtagaatgagaagtgaacagagtcgggtgaagacatgttgatgaagtcagggcttttatctaaacgaactcgggatagtgtctcgacagagaaagctgcagatttcccttcatgaccagatttaatccagtttttcagagcctcaattccttcttctgaaacgtggctaacaattagtgcgagaattggttccggaatgtataatcttgcaatcttcctctgttgacaacgaagacgaaagtttatagaagttacatatactttgtggaatgaatgtaaactatattgtttaaaaaaatgaaaaatttaacctgtgtgtcgctagattgtgtgatagagtgtagacatttggatgatgtactcattttgtcaatttgttgcgaataacgaaagagtaagatgtgatggagagagaagttttagtactgatcaaaacggtttagaaatgagtaataaaaacagagtaattaattggatgtttctcttaataggtcacaatcgtgagggatgaagcttagtggggagtacgggttcagttaatattcactatatattaactctaaatataaaagctaccacttgaattccattaaaccaatttcatatacaaaaacgcaagtcatagttctgaaacaactcaaatcatttgtataataattgtgacaccttttagttgttgattattaagcttttgaaaaacggtttatagggatggcaaatgatttgagttagttcataattagctcgaatgatttacaaatcaacaacacagtttacaaacagaggtcaaaattaatatttttgtgtattttgaactattgttgatttgtaaatcttaatataaatgtcatccagtcatagtgaattattcaatcagacaaacgaattaatacagttatgttgtgaatggattcatatggatacattaacaattatctttctctttcaacatgaaagataaatctaaaattccttctaccggaaatattgagatactgttgtatagcgggaatattcccaccatcaggttttaaactaggatttttatggttcgagcataattcggggacattatggttagagcacaattatagttagatcattatccttttttattttatttttattttttattatcacgtttattatgagaagataattatggttagctctccagtgtttaagtttcttccattccccattcctacaaaataatcttatctctatattgctgttgaatgttttagtggtttgtatcatattatttgtttgttccatccataaccccatttattttcaagttcatctaacatttatatcagttaacaatgcgaagagaaataaataattttgagtattttgaactattgttgatttgtaaatcattcgagctaattatgtttacaaatacgttaaaaccagtcatagtgaattattcaatcagacaaacgaattaatacagttatgttgtggatgaattaatatggatatattaacaattatctttctctttcacc

SEQ ID NO: 2649 - DNA, 3000 bp, Unknown
  misc_feature (1)..( 3000): cDNA_ID_3069010_gDNA_ID_1620571_Annot_ID_160852 3000 nt of promoter + ATG
caacgacatcaaaagcggtatttggattgcaggtacgaaaattttcttatacatcatcatcttcagaaactttgtcagctgcaggaagaaactgtaacgtggcttatctcatttttcagatttacagcttttgcgttgccctctttgtgacctcagtacctgtgatggtaaaagacactatctgttgctgagactttaggattcatgctagtctattagtctctgcaataactaaattgcaactaagagtgtttctgttttactaatgtaggaacaatgcaaactcttgatgttaggcacattgaactcttccttagtgaaggctacaaagatggaagctgggattataatctgattggatctcataagttggagaaagacgcaagtgcagcctgtggagccatatttgacctcaaacaccttaaaaaatcttcatcctcaggtaacttcattacttacttttatgttcctttactcctctttgaatcatactcctttgtctctcatacatttccacatgaaatctgtctaggtattctcaacctcaagtcttggaccggagaggcagatgattcccaacctaaagcagttattgcaccccatgcagttgctgttcacacaagattgcaacaaaacgaaggtatataactttacatcatcaaccatatctttatctagaaaaaaggaagagaaaacactttttttttgttcttacatatttgaattgcaggaatccttgtgaagtaccacacaatgaaagcaggaacagacggtgacattgtttccatcagaatctcccagcagcttctctgattctttcacagtgcattgtctcatagtcagtatttctggtatacaaatccttctcctcttcagtaaaataaagataaacataagctttactgttctatgactttttccattgtctataagtatgtaaattccaattcccttagtgccttaccacaatatgactttctcaaaacaattccctcttcttctctatttcttcttcttcttctactttcctctcctaaatgcctcaaaaccaaaacgttgctacagttcttcatgtggaggaaacaaccttgacgttagcttccctttctggctatctcctgagcaatcttcgtcatgtgactacccaggattcaacctccattgtgagacagccttaaagcttccaaattccagacgatttctcgtccaagacataaagtcgcagcgtattcaccttagagaccccgataactgcttagccagacggcttctcagcttcgacgcttcaatgtctcctttttctcctcttcaccttgtcaactacactttcttgagctgtcataacgaaaacgtcaaatcctcttctttggaacccatccattgccttactaattccacaccttcagatctcaccggttcaatgccgtcctcttgtcaaaccttgaagacactacttcttccggtctcttcaccactcgcaggtgatctcaacaaacaagacctctggctgaaatgggactcaccggattgcacaggttgtgttgattttagtccgttatgtagcttcataaacaataccatcctcaaagtcaaatgcttcacatacgttgattctggtaaccctctcgtcctataagttctcacatatacaccccaacttgaaatcaaaatcttggcttcatcaagaacatatcaaagaacaatttttcttaaaaatgttagacttttttctatctttcaggaaacccttggttaataacgttaaagatattatgcttatgcctatccgtaccattcttcatagtgataactcctgccgtctgtatcatttttatcccaatccaacaacaagccaagagtgtcccttggcgaaatgacactctctgtcccatttgtttatcagaatacacaagtgaagagaccgttaagtgcttacccgaatgtgaacattgcttccacaccgaatgcatcgacccgtggctcaagttgcataactcttgtccggtttgtcggaattcgccttcatctttgccaaataaagctgccacgacgaacgttgtctagatttgattcgagccactattgattgtttatcgtaatttcaatgttgcgcattacgcaatttcagacgaacatttcccaagctttactaataaatggatagatgtgaatttgtctccgatattagctagtagtcgtctcagtccaacctttgaagttcgtgaaacacacgcacgcgtttctaagcgagtgagcgtagtacattgtatagctttagtcttaaacgttattggacttcaaacattattgggcttctaacaaaattcgctagaccacgacaacattttcataaactttggttagaaaatcgtacataaaatatgggagtcgaatttaacatcatcaaaatgattctgttataacgactactaacttacgggttcaattgcaccaataatttaatgacggagtattttagaaccataaataactaatgagatattgtttttccctgtaccaataactagattctgacccgtacatacgtgcgggatttcttattttaggaaatatattggaatacattttgagtgaaagatattgtaatatataaactagattttaacccgcggtataccgcgagacgatttatttttttaaagtaatatatattaaaatttgcaaattttatttttaaaaaatatttatattttaaagtttataattgttattaaaaaaaaaaagaaactactgtgtgtaaaaaaccttttctctctcttccttctgggcgattctacagcgatcctccaccgacttccaccgcctcaattttctggtgatctctttgtcgtcctagtgcggatcttactctccggtgtctctgccggtccgttcgtgttgttctctttgactgttgttgtcttctctgaatccatggataaagaattatggcaagcgcttcaaaatttagatctaggatctgagagagctcctctgaag

SEQ ID NO: 2650 - DNA, 3000 bp, Unknown
  misc_feature (1)..( 3000): cDNA_ID_2167449_gDNA_ID_1620571_Annot_ID_160849 3000 nt of promoter + ATG
acaaagagggcaacgcaaaagctgtaaatctgaaaaatgagataagccacgttacagtttcttcctgcagctgacaaagtttctgaagatgatgatgtataagaaaattttcgtacctgcaatccaaataccgcttttgatgtcgttgataagacatgaaccactggattgtaacatttgttctatagttccttctgttgggactttcagacgaccactcaaactctcagtcaggaatgaagttcgagagtcaagaacaaaggcaccaagacgcatccaatctataatcacagtgtcaaaaccatataaagatctgtacaacatctatatttaacatgagactaagagagtatgatgaatccaattcatggactaaccaatatgcttctccttctggtggaacaagtaagagtgactcccatctgcatttttccatatcgtgttttgagtttaccattgtttcagaatgtatcataagtcatgtgaaacttaccaaaagctgaagcataaatcttaatccaggtggaagaaactggaaacgtctcagggacctgaagatcacgcaagcatgcaaacctccaaacagtatcctccattgcaatcttatagaaccatttgttcgttgctcccagcttcaccaatgatttaccatccaaaaaccttgttatgtatgtccatatatcttgctcatacctgatttgtcagagaaaattagatctaagaaatctgattcgaaattgaattttcaaaactcaaatcccaggtttcagcaaccacacaggtcacgaacagggatcgatataagcatctaattctcatacaaatcaaattgattccagaaggtatcaaagatgattgatcgaactctatttcctagatccatccaatacatgccgtacaaatcaaattcgagctcagcccaaactcgcacaccaaaaatatctgagaacagatctatgtagttcatagaggagaagaaaataccaggagaagcgagactggtaagtcggagcagagcaccgaggagatacacagccatggattcctctcaggatcttcccgttcttctggtcgctgctctgaatgattcttctctttgctccaccatcttcgtctctctgaatatcgttgctctgtaccaattttctcttctgtccaccatttccgtctctcaccggagctatcatcttccctctaatatctccttcggcatcaccagatctcgtattcattctctctctctctctatctcttctcactcagtatctcactagttgctaatttgttaagtgaaaaattgtttgagaatttggtttttgctctcaatcgtgtagctgtgatatatacctgcgagggagacacagcgaatttgaaaatttcaaatgttgaaaatgacgtatatacccctgtaacaaactttctgactgtatattttaaattttgaacccggtttagccgagagggtcccaagtaatatatacccagtgagtctggtttaccttgttaatgaaaaatcaagattggtgaaaatatgatggtgaaaatatgcgatataagtaaaaaaaaatattaaaggaagagttgtaatgagtagacgcaatttttaatttcttaacagttataaatagaattacgtagatatattaaacaaaacattatgataaacaaatgtaacatttttaattgttttaatgggaatgtatatttaaatagagattatcttattctctaaacgaattttgtcaattttttatatttgtccaatttgggacatgtaaattttattatttaataatatttattaatttatagaggttttattatattttgttaagtatttagtaggggtaaacaaacaaaccggaatagagaaccaaatagaagaaaaaaactgaattgaatccaaaattaattaaatatttgaatggatcctaaatatccaaagaaccaaataaatatttaaaatataattatatacccaaattattaattacatttagatcttaaataacctaattacccaaaattttgaataatctaaaaatatcaattatttatatcaaaataagaaatactcaaaatatttaaaatattcctaagtttttagttattttagtcaaaatttaaccaaatttattaaaaataactaaaaccaaaccaagtctgaattaaactgtaaaataaccgaattaatcctaaatgtttctatccaaaatattcggagtcgaaccaacaccgaatcaaatacggaataccccaagtccccaaagtctagatctcggatctgattggttcggactttggctttagattttagaccgtaaatgttttagctgtgattgtagttgtagaatttaaaattttggaaagctttaaataattaaattgtgtgttttagacagaaaaaactgctttttacagccaaaataataataattaagaaagtatgttggttgtggccttgtgggtaacaaattgattgattggatatatttcaaagctttagatttttttttgctttgtaaagactcttgtcaatcaggccctagtatttttttctctttttttttaataactaaggaaaggattaagcattggtaaacccaaacgtttgtctttgtaaagaaaaaaaaaaaaaaggagcatctctttctcttcttcttgttcgtggtgaagtggtgatgcttggaacttcctgttagacgacgaatcctgctttcacatccatcgtctgctttcattttcaaaggttttttcgttcttgactcacagaatcaatgtagagttatcaattgaacctaattgccccctttccgttttagctatagattcattaagcacatctgctcatagatttttctacatgggtaatcaaatttaggctatttagaatcaactgtatcggaaaaattacatttttgttcatttcttttcatatatagtgtgtgcttaagaaagttcataacgttgtttgatttgcaggcgaataaagtctttatg

SEQ ID NO: 2651 - DNA, 3000 bp, Unknown
  misc_feature (1)..( 3000): cDNA_ID_3069021_gDNA_ID_1620571_Annot_ID_160845 3000 nt of promoter + ATG
gcaatgcctgagggatgatgttcttgcagctggcattcggcagctcttgaaacagcttggaaagacgttgaagaagaaggaaaaagagactgtgaaggaaatactatcaaatgcacaggttgtttttgccactaacattggagcagctgatcctttgattaggaggttagaaacatttgatttggttgttatagatgaagctggtcagtctatcgagccttcatgctggatcccaatattgcaagggaaacgttgtattctttccggtgatccatgccaattagcaccagttgttctatcacgtaaagctttagaaggtggacttggtgtatccttactggaaagagctgcatctttacatgatggagttcttgcgacaaaattaacaactcagtatcgtatgaacgatgtaatcgctggttgggcatcaaaggagatgtatggtggatggttgaaatctgctccaagtgtggcctctcatctgcttatcgattctccttttgtgaaggtacttcttctgactgtttctgctgtttgattggtgtggtatttatatgatggttacatggcatgcaatcacacatctgtttaccttcaaagcttttatttgttagaaattttccattttagcattatctggtttctcttgcaactctgttggtttgtctttcatgatactatctttacttgtggttgaaatatctactgattacagcttttttatggccttattgaaaagtgatgttgctcatgagcttgcaatagatgtttccctcttgttttgctggtaactggataatattaaacagtgtcacaaattaacttacctttgaatgtctaataaaatgcaacatcattgtagatcaaaagcacctttggtaacaccatgactcttagatgtaacatcattcttttcttgtacttactgcaggctacttggataacgcaatgcccactggttctgcttgacacaagaatgccatatgggagtttatccgtgggctgcgaggagcgtttggatccagctggcacaggctcattatacaatgaaggagaagcagatattgtggttaatcacgtcatttctttgatatacgcaggtgaaccatctattttcagttgaatgactgggatataacacaaaacaattaccagagcttgaagaatctaaacttcatgcatattaattgtgttcctgaatataagctcgataacctagtaaaaaacttgttggacatgattgtaggtgttagtccaatggctattgctgttcaatccccatatgttgctcaggttcaacttctcagagaaaggctggatgattttccagtggctgatggagttgaggtcgcaaccattgacagctttcaagggcgggaggctgatgcagtgatcatctcaatggtaaacattactctgcttcttttccattctgtggcatgaagatatttcataattaaaattctagcagatagtaaagaaacggagataacattaagaatctatttagatatgttagttgaacttgattgtgaaaaccaaaaccgattaacaaaattgtcgttatgaactcgtagcgcaaataagactcatgtacttgttgtgctgtgaacccattacaggtacggtcaaacaacctaggtgcagtgggattcctaggggatagcagacggatgaatgtagccattacaagagcccggaagcacgtggcagtggtatgtgacagctccacaatctgccacaacacgttcctagcaagactgttgcgccacatacgctatttcgggagagttaagcatgcagaccctggtagcttgggagggtcaggactaggcttggacccaatgttgccctaccttggttaaaaccgttgtaagtactacaaaaaccagaaccttctgcttactctctccctctctctctatctctcccgctgaaagaaacagtttccatagcaaattgtcgttgtacagaacaattgttaccacagaaaatagtctctgtatatgatgacaatatataattcatgtatatttttacaattaattcatgttaccacagacttcttccataaaattactacaccaccacttacaccgactaaaagccaattcacaaaccaaattgggaaaggatcttacgaccaaatttttttgggaaaagttgttctccgatattaacacggttttcttctagattattaaatcgacgcaactatcggcaaattatgggctcctgatgggccttctcctttctttggttcaacttggttctagacacttatgtgtttcaatctaagctaatttcgtttatgttcattgggtataaagcccaacctctaaagttagctttttttgtaagcacttttgttagagaaaacaagtttgaccaaacaaagaaaaaacaagtaagaacaaaacgatttgctagttgaacttaggaactcaattcggggtcctataaaatgacgtcgaagaaattaaagtccacgttttttttttattaacatatgtatatgatgtttataattagagtaaagtttcctatagcttactctaagtgtatataaggaacatgtatgattcatttgatcattaagaataatatacggaaaattcactttatctctctatagttaatatggtagcagagcacaaaagacattttctctcactataacagaaatctcagagtttcttcttccgccaaaactcatcttcttcttcgatttcatccaatttctatggaatcaccatcgttatcaccctaaatcttccatttcttttctttactgagctccgattcatcaatagaggtctcaaaatcaccaatcgcaatcacattcgcgattttcactaacagttgaagctcaagctcgaatctccttcatctttcagatcgattcgttctacatcacgatcgattcaactctaatcgtttttcggttcgtcgttctaatcaatttcagtatcatctctcgattcttgatttgtttcaatg

SEQ ID NO: 2652 - DNA, 3000 bp, Unknown
  misc_feature (1)..( 3000): cDNA_ID_2990875_gDNA_ID_1620571_Annot_ID_160848 3000 nt of promoter + ATG
taattaccattacattaagagattttattgtctataggcttatgtataattaataaaaagagtataagaaaaagtggtaaacaaatacatcacatacaaagacagcaagcatactattactattatttaattatatatttgtatactgttattaattctaagttatctttcataaaataattttattataacttattttaagtaatttaatatttaaatcactacgatgtcaccaaatgaattattttaatttctttgtcactaatgctattttaattttctggtcaattatttttaagcccatttttacctttttaaccttctcactaattttgccactaaaagtttattattggctaatgtaacccattgaatatatattcttttgacaaaaaatattttaggtagtatggttttaaaatatgacttttagaagattataaatgttaaattctatttatttaactcttaaaaatcaattcattttctttagtgaaaaataaaggcatctttgaaatcaaaatcccaacattattactttaagaggggtattcaataattgattttaacagaatgaaatggaacgagaaaagttttattataatgattatttctctcccaatttgtgaattagaaaacttttgttttctatttaatataaattataaatattaaaaactccacaaatcctaaactcattgaactaaaaaaagccccaaatcctaactagatcagccaggtgaaatctactacatgccatggagcacatcatatacaagcttttgtcccaaaggagacatatattggcagaatctagagagtactttcaattcctaatcttttgaaaattttgccattctttcggcaagtttgtaatccgtgttgtacacctcgaactcaactcgtatatgaccttgaggttcctcggtctccatatcacccctctatggagtgcctattgttgtagtcgtccttctttatgaagagaacaatatgttttctaccctccttagtccttatccaccttggtctccggttttccaaccgagaaccccccctcattactcctaacctgttttattatctttcgcgtaagaagtaatgtatctcacatgccagtgaaaattgaggtttcgactcatcatcttctcgtttgtggcaatgtatctaatcgctagtgtttttgtcatgaggaatttgatattatttgtgttttaaaggtctttttgtgcctcattacccatgaatatgtattatcatggaaaatatcaatgacgaaagaacttggatcttcttcccattttaattgtgcacatactctaaaattttcatttgatatataatataacattgatattttctcatttatctgtattaagtcttgaagttaatctcttatggatatagagatgctacatcattacgcgattactaggtttctgtattattaaatagaggttgtctgttgtcttttccactatatagtttaacaaattggtgaattgaagcgtccaacatgttcacaaaaaccattggaggcctagtttgcttagcatttgtataagagggactttttaattggttagttatcatcactagactaaattagacggttggatcaaaggttgagtaattgacattacgattgtacctatttttgatgcattagtattatgttgcatcaccgatattatatttctagttgttggagttctatctagtgactacatcaaattgatgtacactcaatatctatctagtaccaccgtgcatatgtccctaatgatagagaagcgttcaaagttgtcagggaaacattttcactcttatagaagtctaactagttttaagtcgtgctagtctttcttccttatatttcatataaataggtcagtggtgcttgtcgttaaatatacaacattgtctgaaaatatattacctcctacatggacatttctagtatctcctacacaagtataatctcatatagttacaacacaactatttgagcaaatgtttactattttggattcatatagttcttaaaaccaacatgcataatattctttattaataaataaccttcaaataacacaactttaatttacagtcaattagaagtgttgatgattgatttttagagattagacattcaggtatcaaattcaaacacctctctaactgatccaaatgatcaaatttaagctaaaattgtagctactgatcagaaaaatagaagcaacatttgttgaatagaaaaaaatagaagcaacatctgttttaaaaaacacattgcttcaaaataataggaaagtacaaaatattagatttaactaaagatattttaaattaattaaaaaagatatttggattatatgataataaatccaataaaaaataataaaatccagaatacagaaaaaaattgcaagaggggaagcagaagaagaaagaacaaaaatcaggagttggcattttgaagacgaaactcatcatcatcttcttcctcagacaacaaaaaaagcttttcactttctctccacccttctctctctccttctgaaagtctctctctttgccgtcgttagcctcttcctacacttggggctgcgattcttccaatcctccgatttcaatttcatcctctcaatcatagtttgaaatcatcgagcttttacggtgctgttggtgtttgacgccgtaaaattcgatccttttttatacatttgatgttgattttatcgatagttttgtgagatcgattttttagggtttcgagtttggcgctgacttgagggtttgattggatgagaataaggggttatgggacttgagtcaattgggtttgtctccctaatcatcgcaaattcctgatttctcagctctttggaaggaattaggattcgttgatttcgagttttgtgttgtgttggttgatgagagagttgggtttggtcaattgaggggtttaggtgttgttttactgttttgattctgatc

SEQ ID NO: 2653 - DNA, 3000 bp, Unknown
  misc_feature (1)..( 3000): cDNA_ID_2167443_gDNA_ID_1620571_Annot_ID_160846 3000 nt of promoter + ATG
gattttgatttcaaagatgcctttatttttcactaaagaaaatgaattgatttttaagagttaaataaatagaatttaacatttataatcttctaaaagtcatattttaaaaccatactacctaaaatattttttgtcaaaagaatatatattcaatgggttacattagccaataataaacttttagtggcaaaattagtgagaaggttaaaaaggtaaaaatgggcttaaaaataattgaccagaaaattaaaatagcattagtgacaaagaaattaaaataattcatttggtgacatcgtagtgatttaaatattaaattacttaaaataagttataataaaattattttatgaaagataacttagaattaataacagtatacaaatatataattaaataatagtaatagtatgcttgctgtctttgtatgtgatgtatttgtttaccactttttcttatactctttttattaattatacataagcctatagacaataaaatctcttaatgtaatggtaattatgaaaacgtattctctaaaattacagaggtcaacctcttataataataaccgttgaagataaattttaatgttggagatttgactagtatatatgttgtatctgtaaatataggtttagatggacatatgagttgattttttttttatctttaatttgggtctaattgtatagtttatactttaatgttggttatatgtttttttcatccaaaattaattagagattaaaagagtctctctatttgttgatgtacatgcaatatcatcatgttctagagaatttatcattttgttttcataattcatttacatagcaacgatatttcgaataatatcatgagagatatccctggctctaatcactatattttatatttctgtttaaatatttttttaaaaataggataaaacaaaaacataaaatttaaaagttttattggtaataatgaaaacatatggttcttttgggtttaactagaaaaatggtcaaatttaagagatccttttgtaattaaaaagtttatttcgatatataaagatatatataatattctttcaaatatgaaaccaagcattttagggtgttctaaagtttgattattttctaataaaatagtttgatgattttgatccacaacatccttttctcgcataatttttatgacgataaacaaactcaattttgaccatttgcttattttgcttgacaatttatgatgagaaacttctttctccacatattatttgtaagaattttattttttgacccaaaaaagaaatttctttagtgatggaaaaatgaacaagtaggatcttttcttcgggagacgcttagttgtctttctcaagtgatcttctctgccacatgttgcttcacccattattctacataggaccaataatctttggaaaaacagtttttcaaaaactataataatattccgtgggttacacacacccctatatttaatttgtagtactaaaacgaagacaagcttttcagtaaacaactactttctattaagtaacgattgtaagattataactcaaacatgattcagttgtttttgttttaccaattatattaaatttaaacatacctctttgcacgaagtgaatttattatctgaaatccaactttcgccgcaagtgaaagcatcagacattaatcgccgagctataaaatagctattttattgtttcacaagagtcttcgatcaaccaaaaacaaaaaaatgagtattcaaagtcgctaagaaatcgccaactcactatagatttactattagaagtttaatatgaagccaaatatagtcttatgagtaatccgaaagccatgtaatgttctatgtaactagggttagcaagataataacttatatatatagttatgcatgtaatgagaattttgattgtaacttcgagacatatatatatagttatgtaatgagaactttgattgtaactttgagagttatctcaaaacaactctctttctctttattaaagtatcaatggaattattgtgtttttggtgacaacaaagtaatctttcctttttaagtttatttgaataataaactcttaatgaactatctaatttccggtttatatttctcttaataaattcatttgagcataaacattattgctttagaaatatcatcatctacctcgtctcatcatatgatcggagaagaaaagcgtttatcttcgtccaccaacccaactatcgacaatgaaaagactttaatgcaaaaacggcgaaaactaaactcatagatctgtttttttagaggagatagaagatagagaatgatggaacgattgttttttttaaactaaatttttgtgagattttaaataaaaataatcttaattagttcaaaattaaggtcgaaaaaatttcgtgtagtatttcaaatgtgctatatgaatgatgtagcttgtaaaatccacagatcagttggatgcattctaccgatccattcgatcaattctaaaatccaacttaaagggtctccaaagaagaatctaaaaatacaggggtataagtcaacaaacaaaaatataaggataggacagtaattaaacacgtcacctgcccacaaagaatcaatactagccaatcacaactctccactacgatctctcatcacgactctctctgtgctatgtttgtgacataaagtctcaaaaacaaaattcgtttcaccaaaaaatgaaacaaaaataaaaatatttctgagaacctcaagtttaattttgcggcttagatttaaattcgtctctcaaactcaaatatctgaaaaaacctttctccaatatataaataagttacacgagactttcaatttctctgtatattttccttttgattcccagaaaatgtcactagattccactttctagcttgcgttttctcgggaatctgaagtttccttttgtgttgaatcgctgggaaaaatctgatg

SEQ ID NO: 2654 - DNA, 3000 bp, Unknown
  misc_feature (1)..( 3000): cDNA_ID_2167783_gDNA_ID_1620572_Annot_ID_160864 3000 nt of promoter + ATG
cttgtaatcacacagagacataccacatatgtctccataattttcctcacggtcatcttccttacaagatatctaagcatcaaaaaaatgttttcattgtgcttaatgtttttaaccttctcatgatctctctgtggcttctcatgattttaccctgaagattgtacaccgttggcgttttcttgcgatatcttccccggttttcttaattaggggagagaccgaaagaacttgtgtctccgacttcttaaccgattacacgaacgtaggttcggtttacctttggcgacatagtttttatttcattattttggtgttttgttcttctagggaagaagagatgatgaaaagaagaagaagttatattaaaaagaaaaagaaaaatttatcatattagcaaaggaaacgtagatttatagagatattagggaagttaggattctaggaagatttcataatcgtggagaaaaaagtaaatggatattctgtttccaaaagaatattagactacaaaagttattaaagatggcaattaaaaaaaatgaagtgatgtaaaatcataaaagaaatgattcttattaaattaacttaagaatcgataaaaaaaaattatgtagttaataaattatttattggcatcacttttttattgatgtaaaatatatatcattttttaagtgatgttaattaaattaataaacatatcagttatttaagtgatgtaaatttatatatttatatcaatatgtaaaagtgatacaaactaacttagatttgcatcagttttaattaattgatgcgacacaaattaataacagcatcagctattgtaactgatgttacattttaatatttgcatcaattattaataagtaatttaaaataatatcatttagttttgtgattcaatataaatgattcaattcgactttttttttgtagtgacaattgaccctgtacaaaactatgaaataatttaattgacatgcatgccaagttctgcttgtttttttttcgcatagttatgatatatatgggtacgtaatatttttgtttaactgttggttcggtattctgcaaagtttggaatatatgtttattggcctataaataaagtacgtaagacgttacaacctaaaaagaaaaaaaaaacgacaaaacctattataaagatgaacaaaacctaatataaaggatagtgtaaatctgcaaacttagctaacagaattcttatagcgaagtcagaaatagtacttctccaatacaatgaatttataaccccaagaatttacaacgcagtatatatgcatgcaccatgctctataagtctatatatgacggcaatttattaatgtatttttttttggtgagcaggcaatttattaatgtatgttaaccgtatctcggaatctggagcaaaactatatacttattggatatagtatatgacacatatagtaaatgatgtcaaaatagcgagttgtgttgtgaaaggctgcatgtaaggctgataggtacgcacatgaccaagcatagggaattgctctcaggttttaatgtcgcaagaagacgaattcaattccattcatgtgctttactgggaatgataactgataactcatgaagttgtacattttatatagaaaaatggaatatctaaaatgttttatgttgcgaatctccttcaaatcgagagttgcaattattatttttcactcttttgtctctctttttttttttttttttttaagaaacaacgacaatgaactacataaggaacacatcctttaataagaataagcataactctaaaatgtccagtgattagtgaataaggatcgcgggtcacatacataacggatacacaagatcaagctcgacaactaaacaatttctcatttggattaatcatgatcactcgtctctatttattgttgtgcgctgtggctttaaaattttaataatagatctaatacataaaaaatatagtgtcctctataaatcctgagtttcacaaaattttaatttattaaaactgtatgagtgtgtttaaggggtctgcggaatcaccagtcacccattaatcatcaaatattcgctttgaattcaagtttattttacagtttactggcatctacagaagaaccgatcactcttgaatcatcaaaatatttgctttaaatttgagtctatattagcaataaataatttactgctagtattgaaaaagctaaggggtaaaagaagtatgtgcaaaacaatctgaaacttcctaactaataaaaaatcttgaagacgtgctatttttggaccatttccaattttcatctctatattttttttattttaaaggtattgtactctaatggtcacctctaaaatagagttttctcaaaactaaaggaaaaaatagagatgaattgtagaaatctctatttatagagataaaaagtaaatatctctatttttttctatatttgagaaaattttatttttgactattgaagtacgatacctctaaaatagagttacttttataaatagaagaaaatatagaaattattattggagatgcctaaaaaattatatgagacaaagtaaagtggagacaaaaaatataacgtttgatggtgctagagtctcttaaaatatattacttaaaaaaatccaagacttcatattaatagtttaagggtgttgatatatgggtattatctctcataccaaaaaaaaatcgatatatgtcctctccctctctctctcaccctatctataaatagcagccggctaccacatttgatcgacgagatgtgaatgaagcattcaacaaaaacatcacataaaataaacaaaggaatccacaaaaagaaaaaagcaaaaaaaaaagtttcctcttagagaaaaagagagagagagagtaacaaactcttgtcgtttcgttaaggtcaaggtgtcgttttgttctctctttctgtctctttaaacacacacaagaaaatg

SEQ ID NO: 2655 - DNA, 3000 bp, Unknown
  misc_feature (1)..( 3000): cDNA_ID_2167832_gDNA_ID_1620572_Annot_ID_160878 3000 nt of promoter + ATG
tatactaatggattgtggctattacttaagtgacattttttatagatgcactcaaaaagttatagattattctattgtaatcactttggtgataaatgaaattagttactaatttagtattattttaataaaatatttatttgtatactaaactacaacaatagatatatttttatttggtggaatccttggttctcttggtaattatcttggattccaaagtccaacacttaccggtttaatttgactatgttttaaccttttactgataagttgctcttggcaatcacaaaatgggctttgcctttggtcgttttggcaaagatattccttctggctcaaatcaaatatagaataacaaaagacttatctgtcttttgtgctcgtatggtttgacataaaaaaattttgttttaaggaaagctttttgttccattgttgaattcgagagatataaaagatttttgttccattgttgagaagtggagattgatttctagattgtgggaaggttgcggttcttctcgaaaaggcaaaaactttctcttgtaaaatcgttttttattttaattttgtttaaaattaaaaattttaaaaatctagaagataaaaatttgggacttaaaccacgcattcgatggaatgggtttcaatttttgtagaattaacttgtaatttattagataaaatgctacaaatcaaaagttttgaaattcagtacgtcagattagatgtatcgtggtgagaaataatacatgaaatacttaactaaaacaagcttaacaagaaaacttcatgatgtgaaatacaatggtcaaaacttcataacatttttagtcatgcctttataaacttttgtattgttttgtttgatgttggcacacaattgtgggagaatctcaagaagaaataattcgttactttactaggaaataaacaaatagagtggtcttctttatactactagctagtttaaatctaagtaaacgtttttgatagagttctgagtcattccaatcatttttttgccatttgtaaatattataagggaaatttgcaagtataacctaaaaaaatttaataatttggaaactaacacttcaaaaaccataaggtgatattgtgtatattatatgtaataaatacaattatatcctcttcttcttctttcttctgcatgaacatcttctctcttctttcttcttttcttccacaaccaccacaaccaccactacttttaaagccattatcgccggaaaatcgtatccgaagccaccatcgccggaaaatcgtcaccggagtcatcatcaccggaaaatcgtcaccgaagctatcatcaccattgtactattctattttgctgctagatttttgaaaattgaaacttgagatgatttcatttcgtttaatgatttttgtttgggttccatgtatagtatcttagggtttagttttcttaaatcaatatatatttgtaattatcttttcgtcaccggcaccgccattgtagtcaccatcgccactgacaccgccattgttgccgtcaccatcaccaccggtaccgccactgttgtcgtcaccatcgccaccggcaccgccactgttgtcttactatcgccatcggcaccgtcgctgttatcatcactattaccatcggcaccgccactgttgtcgtcaccatcaccatcggtactgtcattgttactattaccatcatcgccatcttcgccaccatcacgctagccaacacttttctcttttatttatgtccataaaccgaaaagagtgtcaaggatcacgtcactcttcttctcttttcacgcgcgtgttctcatgttttaatgaggagttacttaacttttcatccctctctagtgttatttacttagttttatatattaaaatgctatattcttaaataaattatcaaacatggtcatttctgcaaatcaccaatgttataatgacaacaaacaatttagttttgtaaataataatgtgtatgacgtggcagttgtgagtcattgattatcgagaagcctcttctctagtcagagggtccaacgtgaaaaataaatgttccccttaaattaaattaaatgcgaaagacggatctttcaattgaagattctttctttgaattcgagattgaacccgacccggatccgaatccgaatccaaatccaacgccagctctcaacccacatcggtgcttcaattcgcaattgccgtcatcaatctctgttgttttaccggaagaaacatctaaacaatcattcgaaaaattcgaactttttattcccctcgatatacgatttgattttgtatgattttgatccctggatcagagatttcgtcagagtttgtggaatttggtttaatcgacgagaagcaataatggaaattgggttttctcgagagtgaaggatgatccagagaagaagactggaactttccaaaggattgatttaaacaatcatgtggctttccttcttaagacccagagatcgattctccttagccgaactcaggtttctttgatcgcctttggttttacaacaagtttcagtttttttttccgatttatctctcttttggttcatttgaattgtggctgagattatcctttgattgtgggggaaaaatgtttcttttaagggtgtttgttgaattggtagtttgcaagtagtttgctagggttgatgatttgagtggtgccattgtagggaaactatataagttcatcttccctagtctcaggggtcaaagggactatgttgaccattgtaggagaatgatttgttctcagaaagttcattgtgatcgtagtgttacgacattagttgttataccagatgatgatgaaacatagtaagtgttgaaagttttggtttttatataggtatttgactgaccagctgagaaagattcagatagtaaacgaggctaataaggttagtggacattgtcttggcattgttgttttgttaggctttgatg

SEQ ID NO: 2656 - DNA, 3000 bp, Unknown
  misc_feature (1)..( 3000): cDNA_ID_3069038_gDNA_ID_1620572_Annot_ID_160882 3000 nt of promoter + ATG
cactgattgttaacctttgagtttgaatggtatggttctatgtatgtgtaggatgatatagtaagtaatgtggaggcaaaacttgctgcgtggacctttcttcccgaaggtatttttggccatatgtacatagatttcctaattctgtctctttgtttagactttagttgcttacaacttctcatctcttttttgtctgtgttgcggatcagagaatggtgaatccatgcaaatattgcattatgagaatggtcaaaagtatgaaccgcattttgactactttcacgaccaggctaatctagagctcggtggtcatcggattgccacagtattgatgtacttgtccaatgttgaaaagggaggagaaacagtgtttcccatgtggaaggtaaagacatatattacttctggttccttaaattttcatctaatatttcgatttcgtttcctgagtagcctcatttcagtttgatcacacattcttgtagggtaaagcaactcagttgaaagacgatagctggaccgaatgtgcaaaacaaggctatgcaggtaagatcactgtatatagcttgcttgatatagaatactgtatcctgaacatgcgtttggcttaattgtgaaagctcaacacaaatggggattgtagtagtttgattaaatgataatgaaaggtataactatttttccaaatggtatattgctctatctgatttatgtatctttgcagtgaaaccgaggaaaggggatgcattactgttcttcaatcttcacccaaatgcaaccacagattcaaatagcttacatggaagctgtccagtggttgagggagagaaatggtcagcaaccagatggattcacgttaagtcattcgaaagagcgtttaataagcaatctggatgtatggacgagaatgtgagctgcgaaaaatgggcaaaggcaggggaatgccagaagaatccaacatacatggttggttcagacaaagaccatggatattgcagaaagagttgcaaagcttgctcatcttaagaacaacaagtaaaatcaaagctcttattaaaggatcaaaatttttgtatagcgaaaaaccgggttttcgccattcgggtagataaacatatcgtcaatagaatgaaaaatttagaactatatactaaaaaaataattctgattctatgttactggtttcatgtgcaagttatgttccttatggttcataactagaccaaaacttaataaaagtcggtttatgttatcatcaacctgaagcaagcgatacatgataactgaattaagtattatacaatcagtagtagtgtacatgagatgatagttgccaaaactacgtcatgcacttcgagactctatatttctaatgaagtgtaacaatcatgcaattaccgttaattaggagccttcaagcatgagatcctcaccttctctctctttctctctcagagcttttgcattgcatcactctatttccataaagcctttgttgttgtcctttcagacatttctcagcttcttcttcttcttcatcttctctcttgtgtttgaataccaaaaaatgggaagacctccttgttgtgacaagtccaatgtcaagaaaggtctctggaccgaggaagaagacgctaagatccttgcttatgttgctatccatggtgtaggaaactggagcttgatccccaaaaaagcaggtttttccaaaaaaaaactctctcatttctcttaactcttaagaaatctcatttcaaacaagtctgagttatttttcgttcttcggcgcaggtctgaatcgatgtggaaagagctgtagactaagatggactaattacttaagacctgaccttaaacatgacagcttctctacccaagaagaagagcttatcattgagtgtcatagagccattggcagcaggtaatgaagcaacctaattgctaactaactttttaacaatgacaagaatctatcaaactttttatctcattagtaataattgtaacctctgatgttttcaggtggtcttccattgcacgaaagcttccaggaagaacggataatgatgtgaagaatcactggaacacaaagctgaagaagaagctgatgaaaatggggatagacccggtgactcataaaccggtttctcaactccttgcagaattcagaaacattagcggccatggaaatgcatccttcaaaacagaaccatctaacaactctatactcacacaatccaactcagcttgggaaatgatgagaaacacaacaacaaaccatgagagttattacaccaactctccaatgatgtttacaaattcctctgagtaccaaactactccatttcatttctatagccatccaaatcatctgctcaatggaaccacatcttcatgctcttcctcatcatcttctactagtatcactcagccaaaccaagtacctcaaacaccggttactaacttctactggagcgatttccttctctcggacccggttcctcaagtagtgggatcctcagctactagcgacctcacttttacgcagaacgaacatcatttcaacatcgaagccgaatacatctctcaaaacatcgattcaaaggcctcgggaacatgtcattccgcgagttccttcgttgacgaaatactagataaagaccaagagatgttgtcacagtttcctcaactcttgaatgatttcgattattagatcccttcttttccctattgttgttacttctcttgtaactggtttatgattttcaagaactatgttttttcaataagttatatctcttctcttattagtacttacttagtacttaagtagtaaccaagtctcttgaaatacaaagctcaaaattaaacaccttttgatacagaaatagatcctctggctctggaagaaggttttaactctatttctatcattcgtcttctctgcagacgatttctctctgcaagctcccaaagtcgaaaactttatcagcaatg

SEQ ID NO: 2657 - DNA, 3000 bp, Unknown
  misc_feature (1)..( 3000): cDNA_ID_3069042_gDNA_ID_1620572_Annot_ID_160881 3000 nt of promoter + ATG
cggtgatgatgactccggtgacgattttccggcgatggtggcttcggatacgattttccggcgataatggctttaaaagtagtggtggttgtggtggttgtggaagaaaagaagaaagaagagagaagatgttcatgcagaagaaagaagaagaagaggatataattgtatttattacatataatatacacaatatcaccttatggtttttgaagtgttagtttccaaattattaaatttttttaggttatacttgcaaatttcccttataatatttacaaatggcaaaaaaatgattggaatgactcagaactctatcaaaaacgtttacttagatttaaactagctagtagtataaagaagaccactctatttgtttatttcctagtaaagtaacgaattatttcttcttgagattctcccacaattgtgtgccaacatcaaacaaaacaatacaaaagtttataaaggcatgactaaaaatgttatgaagttttgaccattgtatttcacatcatgaagttttcttgttaagcttgttttagttaagtatttcatgtattatttctcaccacgatacatctaatctgacgtactgaatttcaaaacttttgatttgtagcattttatctaataaattacaagttaattctacaaaaattgaaacccattccatcgaatgcgtggtttaagtcccaaatttttatcttctagatttttaaaatttttaattttaaacaaaattaaaataaaaaacgattttacaagagaaagtttttgccttttcgagaagaaccgcaaccttcccacaatctagaaatcaatctccacttctcaacaatggaacaaaaatcttttatatctctcgaattcaacaatggaacaaaaagctttccttaaaacaaaatttttttatgtcaaaccatacgagcacaaaagacagataagtcttttgttattctatatttgatttgagccagaaggaatatctttgccaaaacgaccaaaggcaaagcccattttgtgattgccaagagcaacttatcagtaaaaggttaaaacatagtcaaattaaaccggtaagtgttggactttggaatccaagataattaccaagagaaccaaggattccaccaaataaaaatatatctattgttgtagtttagtatacaaataaatattttattaaaataatactaaattagtaactaatttcatttatcaccaaagtgattacaatagaataatctataactttttgagtgcatctataaaaaatgtcacttaagtaatagccacaatccattagtataaattttcgtttgttgaaaaacgaaggccactagggtgaaagatgattatgctaaggtatattcacatcaaaatatatggtggttctatcattttcattgtagttgtgttcgtatataggttaggttagttaaaaactatttaaactttgtcatgaatattcctatataaaagtgcatatttgaccataccaaacccatacatacctaaccggctaaaccccatttgctctaacaaaaggtctacggtgacaacaccacacgcacgcatatgcaataatagtattaactattaagtatatgaaatacatatgaatatatgcttcttctttttttgttaactagggaaaatctagaaatctagaccaatgcctaaactaattttcgaaatacagaaatcgaattttctttccactagaaacgtttacgggtggctaatctgtgactgtgagacatatacatttctcatgatatgttgatattaagtgaggttgaggctgtgtcaaaaaaaaaagaaaaaaaaaagtgaggttgaggttttgaatctaagcaaagaaagatcatacacaaactccattgagatgcaaatttatctctcctaatccacttagatcatcctcaaggacgtatacataatgtattatgaattagatatttcaccttcgtgtccactacacttcattggtaacaaatactctctctgaatttgaggttttgagttttgcacatctattaagaaaaagtaaattttatatttttagttattattttgttagtttaataatattattattatttatctcattcttttattggtcacaaactaaattaatgatgatacttttacagaacattaatcttaatggaataaattaaaaattcaaaacattaaatttcttggaacagatggagtatatcattaggactaatgattgcagatagtgtgtaatccaactatatcatttggactaataattgcaactagtgttttaagaagaataagttctagctagtaattataaatgacgtttatcgagatatcttggataatggaattaaacttttaagcgtcttccttgtatccaatgaatttttataattttatcaaattaaacatgccagttttaatgctattgtcatcttgttgttataaaaatatcacactccaaaaagattgtaagaatccttaaatatcaaaattaaccaataaaaataactaccatcatggttgacagaaaaaaaatttaactaccactcggttcacaacaagcatatgatttactgcaaaagctcaccataatatatatgaatcgtttccgtgactttttccaaaacaatataaagacggtcgtaaaactttatcatctgcgtaaattgttgtaacaaagtttttttaattgtttctatttatgtgattttctaattttagatctattatatttatcaaaactttagggttttatatgtttatttttgggttttttgagttatgagtccatgagtttgctcaatttgagcttaatactgaaaacacggttctgtagaatcgaaaaaacaaattcggataaaggatatatcacataatatttgtttcgtttttcgttgttttgtcgacggatcatggaaaggaaatgacaagttttatggataagagtgattttgcaccttattaaataggaagtcgctaacc

SEQ ID NO: 2658 - DNA, 3000 bp, Unknown
  misc_feature (1)..( 3000): cDNA_ID_3069052_gDNA_ID_1620572_Annot_ID_160871 3000 nt of promoter + ATG
atcttttgacatcaaagaggaagcctacctttagatgttaagacaagatggaattcaacttatctcatgctagaccaagctctgaagttcaaagtggcatttgagaagatggaggctgaggataaacagtataataattactttttgctgaaagtggattgaaataaaaggatcggaccagcagtatcaggtgattgggaaaagttgacaggttatttcaaattcttgagattttctataaatccacattggttctctcaagttcaaactttgttgcttctcataaactctacaatgagatagtctctattattagaaacctaggtacattaaaatatagtgatgatgccttaagactaaagtcgagtctatgttagaaaaggtggataagtattgggatgcatttggggaacaagtggaaatgaataggcttgtaatagtggaaagtgtgtttgacccgaggaagaaaatgaaatttgctgagttatattttgaaaggctatatggtagagatagtgtggaggctactcatctttcagattcagtttataacatcatgactgatttgtatgatgagttcacacgagccaatttagtgaccaaaagtggtagcggttctagtagtggaccaactggtgggtcatctactcagcctcagtctgaaagtggttggagtcagtgtcaagattcttttaggagacctgttttgcgtaatggttttttatatgaggatatggaaaatgtatttgtagagactgtgaaggagacatggaataatacatcacatgaggtggatgtttgaaagagaatgtggagacactggtcattcctaaaggtatataatatgatttgctatcttggtggaaggtctataccggaaaatatcatattctctcactcattgccaaggagatacttgcaatgcaaatggcgtccatagcataagaatctgcattcaacacaagtgatagagttgtgaatccattcagaagatgtctctcgcattacatggttgaattgttgatgtgccttgagcaatggttaaaatgtgaaatccatatcaatgaaagaggtgtctccacaataaagcaaatactttctgagatcactttggaaaatggtcttatgagaagtaagttctgattttaatctttctttttagttctatcatgaggttgtgatattgtaattctaattcatgttcttttattttgcatagaacatgaacttggtgaaatagatttctttttcaactatgatggagcggattgaagatctttacaatagcccatgaatgtgtaatgtgttccatctcaagtttcctacttcaacttctatgttttttttcattaagttattacgcatgaacatattcgactaggttttcaagttgttttttctttcttggacttgtttcttgacaattgggaaggttttacgtctttaactttttctatttagatcattggatgattgcaattggatgttttaagtaattggattcttattgttccgttttagcttttatatgtgttgttgtagtgtaaacatacccaagtagggtaaaaattgatttcatagagtaaatagggcaaaaaacccgatcccgacccgaacccaacgaagaacttcaatttctcgggtttttttacggttctcaaatctcaattccgaatctgactagacctgaaccaaacccgaaccgatattttcaatttaccttcttgggtcctagactaccatacccgacatacccgtacccgatcgggttttactgaacccgatccgcatatccgaatgtccagaccgaaaaggaatggcgatttgtttaggtaactaaaaattggtaaagttggtatttgaaaatagaaaatgggtatatatatacaagaacaagtaaaaaaatgagtgtaaatgtaatacatttttttggtattcccgcgtatggatatatcaattcttaacaagttacgtacgtaaaagtctattgttcaggaatcgtttttgtcggagagttatgtgtggccatggaggctcttgttctaatcactgctctgcgagaatgttatctaaagacattcaccatccaactaccaacatctccaagaccctaatcttgtgctttcaagaaaaatctgatcttcttttgaatgatctcgaacctcggcttttgctttatatcttaaagcaaacctcatttgactatcaatccatagtctctccaacctacgctgattcactacttcacattctcaaatcggcgagaagttcaaccgttgttcctttgttaacgtgaccgagtcttttattgacagtgaccatcttgtcatccatcgattcgttcgtggaaaatctttcaacgaatcgtgacttcacatgtgccaaatcgccttctagcatttgtctcaaagctctcatgaaactttgttgaatcgttttcgtggcattgaagaatgccctcatcctttgagttttaaactttggatcgttgatccctcattctctttgtatttggttccttcaatgaatacaagtattttgtacacacaaaaaaactactccctcggtttttatttatttaaaatgttaaaagtcaataaatggatttgtaattttcttaaatattacgtttttcattttcataatgtgcaaatactctaaaagtaaagtgaataaacaattagaatagagtatttgatggtataaatcaccgtaatcacgcatctcataataatacaaattaatgtttcatacatattaaaagaccaacggtctccctttgtctcacaaacagccaggaagacgtgaacgaacaacataacatgataaaattaaatactctaattgtttcctctttaatataaccgcaagaggagagaaccttttgctcttcaagaaaaggagagaagactgcaagctgtcgtttccctaattaaggtcaaggtttcgttttggtattttctctgaaatagaaaggaaaagattacgtggaggaagatg

SEQ ID NO: 2659 - DNA, 3000 bp, Unknown
  misc_feature (1)..( 3000): cDNA_ID_3069062_gDNA_ID_1620572_Annot_ID_160868 3000 nt of promoter + ATG
tatatatatatatatatctgttcccctatctatcgtacaatatattcccttatgaaaatgtgtataaacaaccatacgaaaaagaaggccaaacaaaagatggcactgttcttggagaatctatgagcaaatatatgttcttaggattcacataggagccacgtcgaatccaccatctgaaagttatttttttcgatgctaagagttaaattgcgaaattgactattgtaaactattgttaaactgaaattgactatataatggaaaacacgttaaactgattaaacgtctcatcaataaaatagcttattgacatgacactttggagatagaggatttcttcgtgatacaactttagttaagatgtggaggatatgaggaaagagttaaccagacgtaattaacatgaatacaaaattgaaaaaatccattagtaaatttagaggactttaggacttttaaactaaagtgcataccgatcactcccaataatccagtggacatctttttctcaatctgctagtgcgactatcttatacataattcgactaataaagtggaaatggttttcgtatacactaataaattcaaaatatttctctcaaagataccaccttttacataatttagtttgtagtaaaataaacaaagttctagtaatgatttaacggaaatggttttcgtacaactattgggtgtgttattaatttttatttcttgtttggaaaagttctaattttcgtaactcttctatatattttttacaagttttaaaggggtcatagtggcggttagaacgttacaaaaactatgataacaactatataactaaaacagtaaaatagatagttgccctaattctacgttgcgttgtcacttttgtcatgtcatccacttgggaaaagaaataacatttatatcgagcaagaacttcagtagtgacaaattcagcatacgaggaaaatagcatattgacatgacatgagacttaagagatagatgatttcttcgtgatattacctaagatgtggaggatatgaggaaagagttaagcagacattatttaaatgtcatctttcactataaacgtgggtcttatctctaatctcatcggctttttaattagttatctttggaaaaaaatcaggtttttgaaattttgtaagcggacaaagaagttcatttgtgatatctcacatggactttcgtgagccatcagatatttcaagtcatactatatctgatttcaaggcttggaaggaagctcaattaacttgccgatgtaatagttcaactggtaaggtccataacacatgaaaattttcaagtggatggatcttggaaggattgccaaccctagttttgtctctctttatttagagtttttaaaccatgttttttgaggggatcgagagactagattttgagactgattgcgcggagttgatcaagatgatgcattgtcttgttgattgacccgtcttctctagctttctagatgagttcggactacttgaaatccttttattgtttctcgtttttttcagaaataattattgtaattgaaattatagaatgtattgcatattttgttgagtacgtacttttctattgattaattataagactttgaactacaaatctcttgatagaaatcacactttggcagtggaaaacatggaattataaacatggtggtagagaggaagcattgattataatatttcacttccatattgtatatttcttggttttctggttcactatcgagtcgtttttactgtcttctttggtgggcaacatggaatctttaaaagaaagagcataatctaaagagattagcaatcactttcataaagtataagctaaagagattagcaatttactattgtttccaatcaaacattaaacttttaacaacactcccagagtgattgtccatataagatttcactacagaaaatggatgacgtcgatttaccagcttcacttcgtaaaccaacgtaaaatttttaatatatgaaggtccattaaaataaatgtccactacataaatcagagtctaaactgtttatttgatttattagcttatgcttaagaacttttacgagcttctttgtaattgactttaaagcgagacaatattaacgtcatacaataatacgacggtctccaaactgacggtagaagttttaagtcagcttatatataactgacgttacacttaatattaaccgacgtaatttgccgtgttctctttgtaatgttgcgagaaagacatctataaaaattagatcataaaatttgagtctagaataacatgctaaacaatctcctgtactatctttttaaatcgagtagtcgctggtgacgtccacaagaaaaattgcggtcattttgccaaatcatgagaagtccctttaactttgcgaaagtatgcaataaaaactcaaataagtatgtttcctaaaaaaaaaaaaaaattgtatggtatgagaaatttaaactattttgatattgacgttcgtcgttatgtcgtaaaatcaaatcaatatctttacaaaagcattgtgaattaatgaagaaattaacctaattgtttatcaaagaaaaagaaacagcaatacacgaaagtatttgaagttcatacacaaattaaattttgaaaactaatttattagcttaaagccttgaagtactcagcatatattattttatttgttttcttgtagctaggttactgagcctggttcgcgtcttcgcgaggagttgtataagttttaccgaattaaaataggtactgcaggtatataacagatgttaacaaataatattatatatatcatatcatatcactttcggtgaagtcgctctgtctcggctactatatatagaacaatcaggaagacggaaaaaataacattacacttgaaaaaaatccacaaatataaatgaaaagagagaatcttttgttcttgaagaaaaagagagaagaagatg

SEQ ID NO: 2660 - DNA, 3000 bp, Unknown
  misc_feature (1)..( 3000): cDNA_ID_3069056_gDNA_ID_1620572_Annot_ID_160870 3000 nt of promoter + ATG
cagctctatttggggccgtacaaccaatttactcgtattcttcggggtcaatggtatcagtgtatttcctagcaagccatgaccagatcaaggagaaaacaaggatctatgtgttgttatttgtcggtctagctttgttcactttcttgtccaatataagtcagcattatggttttgcgtacatgggcgaatacctaacaaaacgtatccgagaacgtatgctcggaaagatactaacgtttgaagttaattggtttgacaaagatgagaattcgagtggtgcaatttgctctagactagcgaaagatgctaacatggtatttcttctgcctttctaatttgaacttcaatgaacaatctattctaatctatgtattgatcttggaatggtttgttatgataggtgagatcattggttggtgatcggatgtcattactcgtacaaactatatcggcagtgagcatcacatgtgcaattggtttggtcatctcttggcgattctctatagtgatgatgtcggtgcagccagtgattgttgtgtgcttctacactcaacgcgttctgctcaaaagcatgtcgagaaatgccatcaaaggccaagatgaaagcagtaaactagctgcagaagctgtctccaatattcgaaccattacagctttctcgtcacaagaacggatcattaacttacttaaaatggtccaagaaggaccgcggaaagatagcgcccgccaatcgtggttagcaggaattatgttggggacttcacaaagccttataacgtgcgtttcagctttgaatttctggtatggtggtaaacttattgctgatgggaagatgatgtcaaaagaatttttagaaatatttttgatttttgcgagtacgggtcgggttattgccgaagctgggacaatgacaaaagatctagtcaagggatcagatgcggttgcgtcagtgtttgcagtattagatcgcaacacaaccattgagccggagaacccagacggttacgtccctaaaaaagtaaagggacaaataagtttttccaacgtggactttgcttacccaacacggcctgatgtgattatattccagaacttttccattgatatcgaagatggtaagtcgacagcgatcgtgggtccaagcgggtcaggtaaatctactataattagcttgatcgagcgattctacgacccgttaaagggtattgttaaaatcgatggacgtgatataaggtcgtgtcatttgagatcacttcgtcaacacatagctttggttagccaagaaccaacgttatttgctgggacaatacgtgagaacatcatgtatggaggagcatcaaacaagatcgacgaatcggagattatcgaggcagcaaaggcagccaacgctcatgattttatcacatcactatctaacggctatgacacatgttgcggggacaggggagtgcaattgtctggtggtcaaaaacagagaatcgcgatcgctcgagcggttctaaagaacccatcggtgttgctcctggatgaagctacaagcgctctggatagccaatcggaaagcgtggtgcaagacgcgcttgagcgtttgatggttgggaggacaagcgttgtgatcgctcataggcttagcaccatccaaaaatgtgatacaatcgctgttttagaaaatggagcagttgtcgaatgtggaaaccactcgtctttattggcaaagggtccaaagggagcttatttctcattggtcagtctccagagaactctcttttgaacttgaaagttagatttgtatcaatatgtctctttgcctaagttgctagattacctacctatgctctctattctcgaaaacaccaaattaattataacggaacactatcaattgtagactaaactcatttacatatttttcatatttttgcaaataaaatgaataatatttttaaataagtcctttgcacaaatttttatgaaaccatttctttgattattaaaactgtttagtagttgatttgtgaatgttatagagaggatttgaaaaaggccatgtgaggtataagtacgctgcaatctattattgtagtcagcactagatcaatatttgatgttatataaaattatttccataagataatacgtaaagacagctaacgtcaatatgacatgtatgattaaacaatatttttgttttaaaatgatcggattggtctttaattaatggtgtgcctcggtaaagggtacgtcaatcgccggaaaaaaaatctaaaatccgaagaaagtgtgatcgatcgaaaagaaaaaaatcaaacggtcgagtaaaaataaaaacctgccgtgaataacacgaatcctcggtattgcagtatggtcattcgtttgttcaggttacttttatctttactttgaacatatgtagttttgctccgtggtccgtgtctagtttcaacatcggtcaacaccggtcaacactggtcaatgccggttctgatcaaagtagaatgtatcggtcaatgttggttaacatcggttaacaccggtcaacactggtcaatgccggttctggtcaaagtaggatgattatggtgttggcaacatgacttatgtttgttcgtgtatgtccgtatgtgatatcaatacttcgtgtagctaacgagacatttttaaaatatgtacgtgtgacgatgtgttggtttatacttcgtgtaactaataaacatttttctctcaaatctaacatatttttgttatgaccaaatttttttaaaaaaattaactcaatgctagaaatattttatttatgctaaacttttctacactagtacattaattatcttcacgtattgataccaatgttataataacttaattttcatacataataaaaggcctacgatctccctctgtcccggctgctatataaaactgtagtttgtcgtttcccaaaggtcaatgcgtcgttttggtctctctctttctctctaaacaaaagagataatg

SEQ ID NO: 2661 - DNA, 3000 bp, Unknown
  misc_feature (1)..( 3000): cDNA_ID_3069060_gDNA_ID_1620572_Annot_ID_160869 3000 nt of promoter + ATG
ccactgccaaagtgtgatttctatcaagagatttgtagttcaaagtcttataattaatcaatagaaaagtacgtactcaacaaaatatgcaatacattctataatttcaattacaataattatttctgaaaaaaacgagaaacaataaaaggatttcaagtagtccgaactcatctagaaagctagagaagacgggtcaatcaacaagacaatgcatcatcttgatcaactccgcgcaatcagtctcaaaatctagtctctcgatcccctcaaaaaacatggtttaaaaactctaaataaagagagacaaaactagggttggcaatccttccaagatccatccacttgaaaattttcatgtgttatggaccttaccagttgaactattacatcggcaagttaattgagcttccttccaagccttgaaatcagatatagtatgacttgaaatatctgatggctcacgaaagtccatgtgagatatcacaaatgaacttctttgtccgcttacaaaatttcaaaaacctgatttttttccaaagataactaattaaaaagccgatgagattagagataagacccacgtttatagtgaaagatgacatttaaataatgtctgcttaactctttcctcatatcctccacatcttaggtaatatcacgaagaaatcatctatctcttaagtctcatgtcatgtcaatatgctattttcctcgtatgctgaatttgtcactactgaagttcttgctcgatataaatgttatttcttttcccaagtggatgacatgacaaaagtgacaacgcaacgtagaattagggcaactatctattttactgttttagttatatagttgttatcatagtttttgtaacgttctaaccgccactatgacccctttaaaacttgtaaaaaatatatagaagagttacgaaaattagaacttttccaaacaagaaataaaaattaataacacacccaatagttgtacgaaaaccatttccgttaaatcattactagaactttgtttattttactacaaactaaattatgtaaaaggtggtatctttgagagaaatattttgaatttattagtgtatacgaaaaccatttccactttattagtcgaattatgtataagatagtcgcactagcagattgagaaaaagatgtccactggattattgggagtgatcggtatgcactttagtttaaaagtcctaaagtcctctaaatttactaatggattttttcaattttgtattcatgttaattacgtctggttaactctttcctcatatcctccacatcttaactaaagttgtatcacgaagaaatcctctatctccaaagtgtcatgtcaataagctattttattgatgagacgtttaatcagtttaacgtgttttccattatatagtcaatttcagtttaacaatagtttacaatagtcaatttcgcaatttaactcttagcatcgaaaaaaataactttcagatggtggattcgacgtggctcctatgtgaatcctaagaacatatatttgctcatagattctccaagaacagtgccatcttttgtttggccttctttttcgtatggttgtttatacacattttcataagggaatatattgtacgatagataggggaacagatatatatatatatatatacattatatttttgtgggatttatgcattccatagcactaaaaaaatcttttgtttttgtccaataacatatggagtttttctctatcaaaaatcattttatactttaaatatatcataaatatttaaatatatatgaccctgtaattaaaatttatgctttaaatgtatcatttcatactatattttctctattagaatatagggtgagcggagccagaatttttgtttacggatcataaatatttaattatttttatttaaatataatatgatatgatatatttaaagtataaatttttaagaagagatgaactacaaacaaaaatctgaaacaaaatgtctaaaacagaagaaacaaaattaatatgtaagaagatgttagaaatttttatccattttgaaagaaaaaaaaaataaaaatggaaagaggattaacatttaattgaaaaaatgaaaatgcatgggtcaaaggcatggttctagtttctaccatcataaaaaagaggcatgattctagtactatttatgggggtcattatgacaactttaaagaaaaacatctagaaatcattatctacgttataattaaaaaattataaatgttatgggggtcaactgacccccttgccaatacactagctccgctactagaatatccctatgctcctcggttatctctcaatggatcatgatcgtttgggttgatgtacaattgtatttataatttatgacatacaaccccacaagttttttaggcctgttattaaaaaaaaaacgtaaatttgaactattatcttttgaaattaaaatctattgtttttactaataggacaagaaaatacttttaaaatgcacgccgattatattggctatataatctatggccgcacgcagatgcttcatcaatttttgtccagggcggctatgatgacataccataacgtttgctactaactaatctccttcatcctctaaaacatcctcccactggagctatcactaatttgtcgactaaacctagtttcacattcgtcatccactctccataattccttttagtgaagaagattcacctgatcatgttttgaaagtagtcattcacgtcaatcaaattaagtttcatgagatttaactgaaatatgggttagatacaattttcatgacgtcaattttcataaatacagtttcgataaccctcgataatttgggcctccataaatatgggccgatatttctaatttttcgcctctctcatagacgcgaacagttttagaaaggaaccgagatatttttctcagtagagagcttgaacacacgaagaaacc

SEQ ID NO: 2662 - DNA, 3000 bp, Unknown
  misc_feature (1)..( 3000): cDNA_ID_4255199_gDNA_ID_1620573_Annot_ID_160901 3000 nt of promoter + ATG
accgaaccggattctaattgtaccgactttattaggtggtaaatgtttcacttttagttttattggggttgtttcgttagataagattagatttgggtccagaatgtaaataattttgattttcgttgaggttatttcttcgtagagcgggttgttcgataacaagtcagtcattaataataactgtagcgagagtgagaagtgcttcccatgttcagagatcgattccagagatattaaaccacatgctttgataatataaacaagttttgactcattagcacagtgactttagggagcgacagcttttgttcctcttttattatatagttttctacacaaataaaaatattaaggtatgattttgcatgttagagacaaatccaaaatgcaaatcctctccgtatcggcttagttcatctactgcactgtggttctttattttaatcagtgtcaacttagtgtaattatttgatgatgaagagacagctttaccatgttggcctagattaagattaactactacatgttgatctccggtgaaaagatatttatatactcgtggatatgtaacttcaagcagctttgaaactgagggacataagattaacgaaacgaaaaacaagaaactgaaaggtaaaatgggggatggtcaaagcgtgaagaaagatgtcagtcatatgagctgcaattttttcgagtaaatgaagttttggctccaataattttatcttttttcaaatatatatagtacacatcacaaataaaagttgctggtcgttctcgaacactgtattttcaatcccatccgttggatgtttccttcgtcctcacctcaatttagtgaccacaataatataagtacatacacacatcacagaaaagaacaaggctacaagttcacgattttttatttttgggttttaatgtgacgctagaagttcttgtttatcaatcgttttgaatggttgcacgtatagaaggaacggattaacttccttgtgaattagacccttttgttttgggggcggataataatttataccattttttccaacagttcgtaattagtttatagcaggaaaaaaatgatttcgatgcaaccatataaaactattgtttgaagtatcagaaggttaatataaatttatgtcaaattttgttattagtaggtgacaaactaaactagcatataaaaagtctagtagtgtgaaatactcaacatgtagaaatgtcttttgaaagattttgtttcaaagttttaaccaatattgtaaacatagaaaaataatatatagttttaatacaggttcttaggaatcgtcttggactaagagaagttttggattaatgatactcctaagaagataatatagtatattcatttcacagaaatatattcatttacacaaagtacactacggtaagataatgaacctaaagaagtattacacaaagtatattagtgtatgcatgtatttgatgtattatttactaaagtgtttggatttaatttcaatatgccatataacaaaacagagtccgaaaacaaaaatctgcaatggtctttttgaccggtcttgaatttatggggacccatcgtcctcttgccaattatttggatttggaacgtacaacactacaacatataaaaacagtacagttaaacactgattactacatttttgtttttcaaccacatattaccacaatttcaagggatgttctcacgagtctccttcaattccaatggtgtaaaataattgaattggctaattctatgaattatgtatataattaaaacatttatgtatgtaagcctcaaaattcgacagaagtatggaaatgttttttctatatgtggtgtaactaaacctaattcatattggtcattggtcaatgtagcatccagtccggtggtaaaatttcggcttactcgaataagacattctagcagtacatatcgattttaaatcagatagctagacaaacatactcgcggattcatttgaatcctaagacaaatgtggaaaacaaatgctagaaaactttttgaacaataaataatttgtttttttttttacgaaacaaaagtaataataaggacagaaaagtaagagtaaggtggggaagatgaaggagagaacgtgatacatcccagtcttgtgccctctgatagattcgcaatctcttatttgatgctttcattcatatgtctctttgctctttttattacatatttgcgcatttatatatttattgtttatatcggagtaacgagccacgacaaatggcctaagtagaaaaggccgacaagaaaggagaaattagttagaaatagatactatgcctaatagataccgagtttagtacgtcaaaatggacattaacatgttagagttaggacaaagacaaataccataatccatagataatctaattatttagaaaaactataaacctaggtaagaaacgtctttttgtttctgctagctagacttattaacatgttacatgttcaatcatgcatgaaacctaaactataggattgttgtgagattaaagtgtacaatcgaacaatatgctaatcaatattttggcacttaataaggcatatatatatgtttgttttaggattcgttctctatatatatttagactttgatgtttctcgttattggagagagcatgaaagcgagagaaaagtacgtaagaactatgatgggaagtggacatcattttcgcgttgaatatgaaacactaataataatatgtggtttcaattcttgttcttttagtcgttttatgagattgggggaaattacgttatacattaataatgctcgtgacaacaccacccactctatatgaattgaaacaatgcaggtccttatcctaattgggcaacaattgttatatacaagtgtgagagtgatgataaagatccacagctaggatgctatgtaatatctaatgcagaaagatagtaataattccatg

SEQ ID NO: 2663 - DNA, 3000 bp, Unknown
  misc_feature (1)..( 3000): cDNA_ID_2167593_gDNA_ID_1620573_Annot_ID_160913 3000 nt of promoter + ATG
atcaagcctgggagtttcagcgcggtctgtgatagccagctcaagttcatcagacaggaactgtaattccatttgatctgataagcaatagctgtcattcgaacagccaaaatcatgaaaatcgccatcggaacaagcatctccagaaagattaaggaagtctttgagaagcgacccggagttgcctccatcacattgattgcccaaatcctcagtgaaaatagatggagatcttgcagactccacaccagaagctgagtgggtgtaagaggagggatcagggaggaaaggaagactgtttcctagatgtttctgagtctcagaggttgaagatgatgacaagtagaggtttgtgcaaaaggtggaagaccgagagaaggtgctctgagaactattctttggccatagctgaccaggtgaatctggagattgtgaccttatgaaaggagttttccggtgttctggctggacattcagaaagttatggactggagataaagaagaagagcaagcttgaccaagttttttattgcattcatctgttgccgctgagagaagcctgtgtctgttcatgattgctttgatgtacatcaacaatcaaaactgtctcttgacaagatcccccattagtttgcagttagcatccaagccgctgagaaccaaacattttgatgattaggataagaatggtggggtcaataaacatgttagtgacaagaattgagtcagtttgtttagttaactttcagaacaaggcatacagaatcatccagtgatccatcttggctggatcttgacaagttaataagttccttgagaactaaaaagctaagtaattggagcaacaagagtacatccgagattgagatttaccatatatacagacacagagagatgcaacgattaaatatggtgttccaaaaaatgcaaaacgagttgccgacacatggaaactttaaaactcgaacagaggaatcaaatcaggttacgcaaagacacgattacaggaggacagaaacgcaaagagaaatgaggtattaaattctaaattcagaatgttgagactgacaagtagtagtacgaatcattcacagagaaaatcaaaagcaatttatttgattttatatttgattttatcaaagggcatgatagaatagaaacggacctgagaggatgataaagtcttcacctttttaatacttgctgcataacaaatgaagaaaaaactaacatttgagaaaacaagctgaatcccatcaaagagatgaagttaattcgaatgagaaagcaaaagaagaagaagaagagatggggttaaaggaaggagacggagatttcgctacgaaatcgccgtcgaagtgtgtactgttggctttgcttgattggtctccgtcttgctggacctctttcttgttccacccgctctttcctcgactgtaactcacggaccaattcaatccgttagttcatttgccacgtaggattcaagtgctcgtgcgttttgccacataaattttattttattttatcgacatcacgcttagctctctctcgtattctcttcctaatcacatttcatacctggtcaaccaaattattggttttaaaaaaactatactacttctttgggttatgagatttgaggatttttttaaaatcatttatcattgttgattcgaattatttatgtgatcgatactagtagtacttcgtaagctttgttttttcttttccaatggagtacatactattgtgaactattctctgcttttctttttcagttagtattgatatctttatgttgtaagaaaaatcgtgacacaattacgaattattgatataaaaacgaatgataatgattaatgaatatgaatgagaaaatggttgcccaaaaatgatagtgactgatctgtaatgcagtttagtagaattagtttcttttaatagcaaaactaatgatcattaatcttccaaaaggaaagacaaagtagcatcatccattaacttgtgggtcatatctaaagccttagccacacaaatccatccaattttttttgttttttttttgtctttagtcttttttaccacataagtaagataatgctaatttaatgctcatcatagagaatgagctcagcaaatgctttctacctgattatttattatcttcaaaatagtcaagtttgaggcatcaagtggtagaatgtctaaatccttacataatttatatttatttttggcaacatacataacataattcaacactgttctaagtaatacatggctagtgggttatataagattatatacttcactaaaggttgataaatcaattctcagtttgcattttgccaatatacctcaatttatcatctttagtcccacaaatgatggccacttttgtcgtactgtatgtttgttttcgacttgtttaagtgttgggtcccctcattgatcaattattgaaaaataaaatgggccttactaaaaacatatatttgggttaactagagagaaagcccaaatacaaaaagagaatcatcagcgattcaacagaggcttgaacgcgcgtcaaaaagcttagctcaaagattgaattttgattttcacatgtttttcttcataggccaaccattaatggcgttgactttgtcaattctctgacaattgtaatttcgttctcctgaaaccgtgggagaaaagaatctgcatttccttcaagttcaacgtcttccaggtttgattttgatttccttttcccaattccatgacttttttgatccgtatccagtaattgaccaccgtgattcgcgaatcatgattagggtttcgttgttaatgaatggcctttggatgatcaatggtggtgtttgagatttaattgggatttagttatgccctcttggaatttggtatcagcatgagtgtggagcatttagtatctgaatccgattgatgaaaggttgacacttttctcttttgttttttccagattttgaa

SEQ ID NO: 2664 - DNA, 3000 bp, Unknown
  misc_feature (1)..( 3000): cDNA_ID_3069070_gDNA_ID_1620573_Annot_ID_160916 3000 nt of promoter + ATG
aaatcaggttggcttcaatgagaatgcttctctggtctaccaaacgggatatggatacaaccctcaaatgccatatgggccatattcccctgcagcaagtcccttgccttctgagggacagttgtattctccacaacagtttccgttttcaggggcatcaccgtattaccagcaggtagttcctcctagcatgcaatatattacttctccaactcagcccgagctcaccagccttgtcggtgttgaccaacaaggtgataacatcggaccacgccaatcctaccatcctcatcccattggaccgtttaatggaaaccagccaaaccttggttttcctgaatggcagcaaggttttgacgggggaatatggtcggattggtccaagccttctgatatgcacaggcattcttcttctatttctccggctttatctcctcagccactcggctcatatggatcatatggccagaacatacccatggttggttcacttttcttatctactcttatccgacatatggatagctttcttctattcatggttacatattggattatatgttaaaagtagattgttctttaatttgtcaggggtcacagcgacagagatcattttacggttttggatctggttcgaactcttataacagaggttatatgcatagtggtggtcgtggccagggttctaactatggaagtagactaatttctaatgtgggtatgggaaaccaaggctggattggggttgacaacagtcgagggcgtggaagggttagtgatccatctttgggtggtgcttataatggtacttttgatatcctcaatgagcaaaatcgaggaccaagggcttcaaagcccaagactcaggtcttagaggagcttgattctgctgctgattctaagaaaaataacaaaggcagtgcaaaggagcacgaggaatccaacaacgcagactttgtcaccgactacactaacgccaagttgttcatcatcaagtcttacagtgaagacaatgttcacaaaagcatcaaatacaatgtatgggctagcacccctaatggcaacaaaaagcttgacgctgcttatcgtgaggccaaggatgagaaagaaccgtgtccactttttcttctgttctcggtacgagtctaatccttgatcaagtgaaaaaaaattagtttttcttctttttgcagattgcttacgggtttgtaaattcaggtaaatgcgagctctcaattctgtggtgtagcagagatggttggacctgttgattttgagaagagcgttgattactggcaacaagataaatggagtggacagttcccagtgaagtggcacattatcaaagatgttccaaacagccagttccgccacattatattggaaaacaatgacaataagcctgtgactaatagtcgagacacccaagaagtaagtagcaatttgtgcctatcaagctttcttgtccataagatacctcttttaagccacaccataaccacaaccaaaaactacaggtaaaactggaacagggcatcgagatgctgaagatcttcaagaactacgacgctgacacgtcaatcttggatgatttcgggttttatgaagagcgggagaaaattatacaagaccggaaggcaagaagacagccaagcttgccatctgcaggagtagtagcaggagaaaatgaacataaacctgcttctgctgcattacccacagacttcatgaagaacatgtccaagagttttgcgcaagttgtccgcttggacgaaggcagcaaagaagcagtcaaggccagttcatctccagatgcaattacaacagcagcagtctcttctggtcaatccaactagtaagtaaaagacatcaattagcaaagactatgttttcaaattccataatatgatcttttgtttgttctaagaaggtatttcaaatgaaattttacgtctgaccgggtctggtttttgtgtaaagtaagcctctttcctccgcccttttctgcttcaggggtatttagccaaaatttgattcatttccctcttttcaatgttctataataccctcactcttctgagttgatagaagaagaagatgaagaagataatgtatgaaagacaatataatgtttctcttgtaaagttggcctcatttatctttgcaggcagtttttcaaaataaaaatgcagattacacacatcaatcaaattcaaagctctcagctttccacatatccaaagtttgtttctttgtgtgttttttctacacatatcttagtttttgagagtccgattgtgaacgtgacaagaaagtcaatcaatgacttatccatatgaatgaattgtcatcaaaagggacactgaattgtgtggttcatactcatagcatgtcaatatattcgtgaccctttttacaagcaagacagattcagatttgtgagatgttatgattcactaacaataatgtggctaagggatcagttgtaattgatattatccatttgtgagaaacaaataaaatagtttcatataaatctaaggactgtctatgtcagtccttagtctattttgccatatttctagatctaatcgggttgcattattacgtagatagatatgatctacttactgatgatttttttttttgaaaccttaatgtataaaaaaatggtttaaaagtactaaccattgttggtccacaaaaataaagggaagaaaggagggccaaatcgtaacattaataaaaaaggggccaaactgtaacaacaaaaaaacaaaaagggccacaaagaaaaaagagagaaaataagaagagtcccggacaggaccgagcttgaggattcgttgttgcctttatgactcagccaacaagaaccagactaatcctagtcctagtcctagtccacgcgcgaatatacaaacgtcttaaagccatttgatagaaccgatttccaagggttttgctcagaaaaaacacagagagagattttggaattcg

SEQ ID NO: 2665 - DNA, 3000 bp, Unknown
  misc_feature (1)..( 3000): cDNA_ID_2167587_gDNA_ID_1620573_Annot_ID_160911 3000 nt of promoter + ATG
aaccctttcctgaggaattcaaggcacaaacatcaaaatcaaatgaagccacaatgcatcataaacagaagaatatgacccaaaacaaagtccattttagcattgattgatgaccattgacacaagacacacagaaatcggatgaacaaaggatggtcataagctaaacagtctgaaattcagcattagacaaggtcagagatcattcaattcaagagctcataagaatatgaacatttacggaacaattcagccgtcccctttctacttgaggtaccaagaaacttatatcaaagacaacaagtatgataaaagctacctgcggccatgtttatcagaaacaatgccccaagagtaagcaccaatgagcatgccagcaaaaacgacgctagttattaagctttcctggcgtgcagagagattccagagagattgaacagcaggtccaacgaaagagagaagcatcatctccatggcctctgcaacccaacccattccagcgtaagcaaggacgtaaatttggaacttgccaaatcccatcgccacaagagcttcatccaccgtgaatcttgtgttcccatctgccatttcaaaatctggaaaaaacaaaagagaaaagtgtcaacctttcatcaatcggattcagatactaaatgctccacactcatgctgataccaaattccaagagggcataactaaatcccaattaaatctcaaacaccaccattgatcatccaaaggccattcattaacaacgaaaccctaatcatgattcgcgaatcacggtggtcaattactggatacggatcaaaaaagtcatggaattgggaaaaggaaatcaaaatcaaacctggaagacgttgaacttgaaggaaatgcagattcttttctcccacggtttcaggagaacgaaattacaattgtcagagaattgacaaagtcaacgccattaatggttggcctatgaagaaaaacatgtgaaaatcaaaattcaatctttgagctaagctttttgacgcgcgttcaagcctctgttgaatcgctgatgattctctttttgtatttgggctttctctctagttaacccaaatatatgtttttagtaaggcccattttatttttcaataattgatcaatgaggggacccaacacttaaacaagtcgaaaacaaacatacagtacgacaaaagtggccatcatttgtgggactaaagatgataaattgaggtatattggcaaaatgcaaactgagaattgatttatcaacctttagtgaagtatataatcttatataacccactagccatgtattacttagaacagtgttgaattatgttatgtatgttgccaaaaataaatataaattatgtaaggatttagacattctaccacttgatgcctcaaacttgactattttgaagataataaataatcaggtagaaagcatttgctgagctcattctctatgatgagcattaaattagcattatcttacttatgtggtaaaaaagactaaagacaaaaaaaaaacaaaaaaaattggatggatttgtgtggctaaggctttagatatgacccacaagttaatggatgatgctactttgtctttccttttggaagattaatgatcattagttttgctattaaaagaaactaattctactaaactgcattacagatcagtcactatcatttttgggcaaccattttctcattcatattcattaatcattatcattcgtttttatatcaataattcgtaattgtgtcacgatttttcttacaacataaagatatcaatactaactgaaaaagaaaagcagagaatagttcacaatagtatgtactccattggaaaagaaaaaacaaagcttacgaagtactactagtatcgatcacataaataattcgaatcaacaatgataaatgattttaaaaaaatcctcaaatctcataacccaaagaagtagtatagtttttttaaaaccaataatttggttgaccaggtatgaaatgtgattaggaagagaatacgagagagagctaagcgtgatgtcgataaaataaaataaaatttatgtggcaaaacgcacgagcacttgaatcctacgtggcaaatgaactaacggattgaattggtccgtgagttacagtcgaggaaagagcgggtggaacaagaaagaggtccagcaagacggagaccaatcaagcaaagccaacagtacacacttcgacggcgatttcgtagcgaaatctccgtctccttcctttaaccccatctcttcttcttcttcttttgctttctcattcgaattaacttcatctctttgatgggattcagcttgttttctcaaatgttagttttttcttcatttgttatgcagcaagtattaaaaaggtgaagactttatcatcctctcaggtccgtttctattctatcatgccctttgataaaatcaaatataaaatcaaataaattgcttttgattttctctgtgaatgattcgtactactacttgtcagtctcaacattctgaatttagaatttaatacctcatttctctttgcgtttctgtcctcctgtaatcgtgtctttgcgtaacctgatttgattcctctgttcgagttttaaagtttccatgtgtcggcaactcgttttgcattttttggaacaccatatttaatcgttgcatctctctgtgtctgtatatatggtaaatctcaatctcggatgtactcttgttgctccaattacttagctttttagttctcaaggaacttattaacttgtcaagatccagccaagatggatcactggatgattctgtatgccttgttctgaaagttaactaaacaaactgactcaattcttgtcactaacatgtttattgaccccaccattcttatcctaatcatcaaaatgtttggttctcagcggcttggatgctaactgcaaactaatgggggatcttgtcaagagacagttttgattgttgatg

SEQ ID NO: 2666 - DNA, 3000 bp, Unknown
  misc_feature (1)..( 3000): cDNA_ID_3098973_gDNA_ID_1620573_Annot_ID_160904 3000 nt of promoter + ATG
gagctcgtctgtgactacttaatgagaagaaccgttcgcagcctctatcaaccagttgtcttgatcgacgtcgatcttaacaaatgcgagccttgggacattcctcgtaagtaattctgtgtttacacaacatctcgcaactctatatcatatagtttaaaccattccatcggtagctattaaatccataattcttgtttccaacatgatctggttattgtttcttctacaattcgagtatatgtggtgtttagaaaaaaaaaaaaaaaaaagttcaacttgcaagccacctgcaaattagtattttgttccttactaatttctcgtgaaaagaccatttagctgcacaattataaatgcttagttcacattcattagacgcatatagtttattaatttagaatgaaaacgataccgtccgtttacataataaaagaacaaatcatcctaatcttgcagacgtgttggatgcctattcgatgactggttggttaagatatgaatatatgatacggatagaaaccatttggatattattgaatatgtcattaagatgaagactatttctgaaaagagaattctgtttatatatcttaatcttatcataaagtttctaaaatatgttggagaaaataccccctcccttaatagaaaactaaaatccattaatgtatgttagtatgtactatgtaatatacaaagaaaaacattcaacgcccaacttcttatcaatagttaagtttgatagtatataaaaaggtcattttcagaaacggcgagagtgggagggaaagaatggtacttttacagccaaaaagaccgtaaatacgcaacaggctacagaacaaaccgggctacggccaccggttattggaaagccaccgggaaagatagagcaatccaaagaaacggtggtcttgtgggtatgagaaagacacttgtgttttaccgaggtcgatcccctaaaggtcgtaaaactgattgggtcatgcatgagtttcgtctccaaggaaaacttcttcaccactcccctaattctctcgaggtattactcgtaaaaccgattgggtcatgcattaattagtccctctctttagtccattttttcctgcaaaataaatgtctctttgaaatgtaaatatagtcgaaattcaaaagtcaacttttctaaaatactccacaatagaacaactgatttatttttatgtcgcataaaaaaactaaagcaacatttagtattacattatatatcggctcattagttctactctttcgtaaatagctactatgtgcttttgaatgtaaatactaaatatcaaatgacgcatgaatgaagcaaacagccagagatgtcgcaatcatattatcccatgacttaaggcaaaagttttgactttatctttctttcacattcaacctaaatgttaaatgtctttaagggattttgctgacgattttgcaaagatttatttgtggctgatttaagatgatctatgacttggcgcacatatctactcttaaccataattttgacaaaattagttttgctgggacaaattaatgaaaacaggaagagtgggtattgtgtagagttttccacaagaacagcaacggagctgatatagacgacatcacaaggagctgctctgatgcaacagcttctgcattcatggactcttacatcaacttcgaccatcatcacatcatcaatcagcatgtaccctgcttctccaataatttgtcacataaccaaaccaaccaatccggtttaatctccaagaactccagcccattgtttaatgcttcccctgatcaaatgattctcagaactttgctaagtcaactcacaaaaaaagtcgaagaatcacagagtcgtggagacggaagctcagagagccaattgaccgacattggcatcccaagccatgcatggaattactgattatgaataaggcttaccagatatatcactatgtataagtatcatattcatgattcgaaacaatttattcaaccctcttatgtaaactgttataccattatattagcaatccaatcatatatagttgctaaaaaagcaaaaaatcattaaatttctgttatataatattttatttacgttatataatatgaaacggtaggtcgtctcgtcccataaacaaataatccaaagttacttaatcattatgaaaatagaagaggaaaaaatcttgaaaatttcccttcaatgggaaagtaacgcattaccataataagtaatttccacttggcttttcgacttttcatgtgattgactttgtggaagagagagaaaacaaaaaaagtaaaagcttcttcggtctggatatttatttgattgggtaaaaccgtaaaagtgccactggtgttgtgttctgtccgttggattttaatatttccgtttttcttttcttactggaatctattagtaatatatattttgccataattcataggtcggtaaaaaaaataaagatcggcgtatcgtaccaaaaaaggatattttgtttaacccggtcattatcctacgcgcaccgacctttctcattctccgtcgtcgtccttcttttgtctttcgccgtttctttccttattcggcatcgatttttccggctttgatctccttctccgtcgtgttattgcgaattgcccttttcggattgaaatcgttgttttcccccaaatttcaggtttagttttttttttttttcaattgtattggtctattcattctgagctagggtttgtgttgaaatcacaatttttccccaatttgatttaattggatggtttcgcgaatccgggcaatgtaatttaatttataacttggtgtaattcacgagttgtgtgtattttgttccgtatttctgtttattactgcgaactcaaatctctttttgtttttttttgttttaattgtagactccagcttattgtggtggtgatgatcgttctttggcaagtgtttgaatcatattgaga

SEQ ID NO: 2667 - DNA, 3000 bp, Unknown
  misc_feature (1)..( 3000): cDNA_ID_2167574_gDNA_ID_1620573_Annot_ID_160908 3000 nt of promoter + ATG
gaaatgtacatctcctctgactgacggtctgcgcttgttttcaaatgccgacaacaatcagcatgtcggatatatctatgacactttggacggcataaagctgagtatcaagaaggaattcaatgacgagaaaaaacattaccttacattatgggatgtgatagatgatgtctggaacaagcacctccacaatcctcttcatgctgctggttactatctgaatccaacttctttctactcaactgatttccatcttgatccagaagtttccagcggtctcacccactctctggttcatgtggcaaaagaaggtcaaattaaaattgcctcacagcttgataggtacagactcggtaaagattgttttaacgaggccagtcaacctgatcagatctcgggaatatctccaagtgagtgaacttgttgactttcgatatagttgttttgtttgtagagatacttgtgttgttgaatcagtgagcaaaacattatgttgtcttaaaatttatttgcagttgattggtggactgaaaaggcgagccagcacccagagctgcagagtttcgccattaagattctgagccagacatgtgaaggtgcttcaaggtacaagctgaagagaagcttagcagagaagttgttgctaactgaaggaatgagccactgtgaacgaaagcatctggaagagttggcgttcgttcattacaatcttcatctacaaagctgcaaagcctaactaagctaagagcagtgaagagattgtgatgcaaatgtggactgacccgttcagcttttagtcattgtgcagatttagttttggagtttgtattttcttttgttcattacaatttccatcaatgctggtgaatatatacatgaaaatgttaatgcacttattttggttaattataatgagatttgtccttgtaattagatgttcgcaggtgtaggaatgtcttctcttacctttttatcttttacttagactccatgtgctgagaaaaaccactgtcaaatctccaaattcttgtgcttagtagacaaccaaattggtctttttctctaagtgttatattatcacatgtattatgtgatttatgcagggattatgtaatttaaatcttttgtacttaagaaaagaagctgaagtacatttgttggagaagtttaacttgtgagaatgtatgactctcacgttttgaaatctaaagttaggattaccattttttgcatctccttactagttgactgaatttgtttccatttcagaaactaactccagattttacctgttgaatgaatatatgcagttcttggaaaaataatctgagtttggttgcttaatttgtacagggcagaattattcttcttccttaagatatatgaatcattcagaatccgacttgcatcaatcagcagaagacagtccatatcaagaccaaacagtccaacaccaagaatcttcatctgaatcatctccagcagagtcaaactgttgaggtattaactgatattcttccttcttttgtacctttaggatggtctttttaaaagaaacagtttacatgaaagaaaaaatgtatctgcatactaaaccagaaagcattggacccaagtaatcactttcttgaaaggaggctaatgagaaaagacaaatgcaaggaagctacctcgaggaatgccacctaagtacctgtgggatcaccctaatctatcgtctgagatatggtgagatatatgttttaagaatatcttcatgtcgcttgctgatccaacggtaactatatatgaaagcttatactaagtaaggcttactatttcctttctttttttaaaaagctactggatattttttcagcatctccttactaggtaattgaatgttctcagtaggacgttcccattctagacaaaaaaaaatccagggcatataaaccatgttagagatatgaacaaacactgaattgttttcatttcaaaaccaactgttgaataagagcttgcttgcttaatttcttactcggttctttggggtttgaagtaaatgattcaccactaggtcgagaaacacgaaattttgttaaatcactttttcttcatataatccattttgatctataaattggttaattatctcctaaccccaaaagttatagtcacatggctttaaatttcttaaaaacaaaacaaacaatatgatggcattcaacattgtttcaaaatgtagaaatgacttgccgtaaaatacacgcatagggcgagggaaattacctagtataaaattcaaaagtaaaagactaatttccattagaagcttaattaatgcattttttatcttcattggactaatgagcgagagactaatgttcaacatcacttcaaaagtagaaataacttaccgtaaaatacacgcatactgcgagagaagttacctagtttaaaatattttaaatttttaaccaaaaaaaaaaagaaagtaaatttaaaagtgaaagattactttccataagaagcttaaaaaattgcatcttcttatcttcatttgactaatgagagagccactaatgttgatttatagatatccaacaaatctactaatgctctcatgtacacacaaatattatttacatagtcaaaacaatatttatctctcaacaagagtttgtgacaatttgatctctcttcctgtaatccgacgcgacgttttcactccctctgacacaaccactctcaggtttttattctctcatcatgcatatgttccagtttgttcttgttttttgtcttgctttcgtgagttcttctagaagaaaattgtttgctttgatcttctgtgtcatcatagtcaatatgagccatgtttgaagttagggtagattttttttgttttctgataattctcttaaaaaccaaaatttcgataattcttaagatatgggtctgtctaccatttcgtttgactcttttgctgtaggttcatttaagtgaatcttttcaatg

SEQ ID NO: 2668 - DNA, 3000 bp, Unknown
  misc_feature (1)..( 3000): cDNA_ID_3099004_gDNA_ID_1620573_Annot_ID_160907 3000 nt of promoter + ATG
gctggtcaagttttctggtctgtgagtctttcctattgcttaaagcttatgctggtggagattgggaaaatgtattcctttgaagacatatttgaaaaggtcaagctccttctagatctgatcaataacaacccctcctttctatatgtcttcagagagaatagtcataaagtcgacgtatcctcagagtgtgagtttgttatgccgtatctaactctagagcacatttattgggtgaggagggcagggttgtttgctagtcctgaatggaagaaagaacaaggcatagcaatatccagttttgtgaatgattccacattttgggaatctcttgacaaaattgtgggaagtacatcttctctggttcatggatggttatggttttcaagaggcagcaagcatgttgcatatgcctatcattttatagagagcatcaagaagaacgtcgcgtggactttcaagtacgagagacagttttacgagccgacatggaatgtgatagatgacgtgtggcacaacaaccacaatcctcttcatgctgctggttattttctgaatccgatggcttactactccgatgatttccatacttatcaacatgtatacaccggtcttgccttctctctggttcacttggtaaaagaacctcaccttcaagtgaagattggtacacagcttgatgtgtatagatacggtagaggttgctttatgaaagccagtcaagctggtcagctcaatggagtctctccaggtgagtgaactttcttgattttttatatatatatagtaatattgttttatttgcagacatttaagtttttgaatctctttgcagttaattggtggactcaaaaggcgaaccagtatcctgaactgcagaatctcgctgttaagattctgagccaaacaagtgaaggtgcttcaaggtacaagctgaagagaagcgtagcagagaagctgttgctcactgaaggaatgagccactgtgaacgaaagcatctggaagagttggctgttgtacattacaatctccaactacaaagctgcaaagcctaaggaagtgaagagcagtgaagatttgttttgcatatgtgactccattgatcacaagctttagacaattcttggatcagagtactttttacccaaataagttccatatttctgtattcttgcaaggatttgcaaaaacatgagttcgtttagaacaaagaacacccaagagattgtgttgcaaatgatttcagtttttttagtcaagttttgtgatttatatatccaagtctcatctttatttatcacattttttgatatttcaatgcattattggtatcgttcaggtaaaacaatgatcaactatataaatatttagtttctactagaatcgaagtataagttccaaagtgaaaagatttaagacgcaacacaattatttcaacacaaaagtatatagcaccatgattttctgggaaagtgattctttactcgttggttttcaaatttcgaatataaaatttgaaggaaatattgaatatcaaaatgtcaacaaagaaaacaaaactcagaaaaaggaatcaggcaccagtccactaagctctgaccagaaagcgacaaaaaaatgtcttagtagttgtataaacatgtgataatgggatgcttcaaggtttggttttaaagtgagtttggttttatttgcttctctcctttttaaatcactttttactttgtcattttttgagagaaaaagacgtcaaaatccaagtgcccgtgtaaattgaaactagtgttacagattctccactgttctgttccacagtatctttgtcttgtactctgcccaattctctaactcattattttatttcatagcccataataacaagaaaaaatagagtcttctttttgtagttaagcattaaatgctgacacatatttgagaagtttttgaatttcaaattgagaaactttttctaagtttggaaaataaataagaggttttcttctcttgtactcttatctagtagtactatctagtaaggcagagagatagatattttttctgggggagaatctagcagaagaagcctactagggtttggtttcttgagtcacatagatcttcttctctatctgtctctcttggattcttcaatgttcactttcagtcattggaaaaaaaggttcgcttttgtccccacttctcttttctcttcgaattttggttgcagaaaattgattttggtcaatctttttgaaagtgtcaatctttttttgaccattgattttggtatattcttttgttgaagccaattagatatatttgttcgtcttttagggatagggtctttagcttcttccttctttaatgtcttgtcttttcaatggaagttatcattatgtatatttcaagctcaatatcttatctttcaatcaaattaccacaagaaaataaagaaattcgaccttcggattacacaattttttttaaactcctcaacaaatcttgaattgcatgttaacagactgcatatttgtttaagctgctggtccttgtgttaatctcgaacgaataactgattaacctgtcaaaacctttcagtgtgaaatgttgaccatgtgactggttttgccgtctggtcgtttttgaaaaggacatgttgctgcacttattttgtgtaaattataattagatttgtccttattagatgttcacaggtgtaacagtgtcttgtcttgcctcttcatcttgtacttggactccatgtgctgagaaaagcctttgtcaacctcaaaaatttgtttagtgtcttgtgcttagtagacaacaacattggtcttttcctctaaatgttatcttatctcatttattatgtgaatatgatttatgcagggactatgtaatctaactctttttgtacttgagagaagaagctgaagtacatttgttcatcatttggttttatagtattaataactgccaaactccagagctttaagatg

SEQ ID NO: 2669 - DNA, 2129 bp, Unknown
  misc_feature (1)..( 2129): cDNA_ID_2167611_gDNA_ID_1620574_Annot_ID_160924 3000 nt of promoter + ATG
aacatggagcaagtgtgctactctcctgagatattagaaacacaaacctattacaccatttcgaatcaaattctacaaccattactgattccggcggcgagcaaagccaattctgacggtgaagagaggcaaaatctgggcacgagcagccgcaaatttccaatcaaattattctcagccgatctcagacgccatgactggaacgggacaaaagcttaacatccgacgacgggttggagaggtaaattctttgtctttttgttgtttatctccgacaccgacaagcttagacgtcaaattcatagtttttctgttgtgttgtgttgatgattatttctgccttatattgaacattcaatacccttatgaatctgtgttctccttctgtagtgcacctgaagtggagaaaacaatttgaatgaagcagagatatttagttaaatctgatggtagtgtaggtgttaacggatatgtttgtgaagtgatgtgcgacgctatggctggaaatacgaagatgtcaccagtggtgactcaccactgagctccaggttcttcttctttcctctcattctctccccatctgctttccacttttttgcaaatggtcatacatcttttatttggcctatttttcagaaccggtgtgtaaatatgatagcaaacttgttccatgctcctgttggacaagacgaggctgttattagttgtggaattgttgcttcatctgagtctgctggtttagctttcaaaatgaaatggcaacataggagaaaagctcagggtctacctattgataagcctaacattgttactggagtcaatgttcaggtctaaatatttacttattcttatcctccaaaccatcacatttgctttggatagtgatctgtttctttcaaaaatcagtacattttcaaactttgtttcatccgctcaggtgtgctgggagaagtttgcaaggtactttgaggtagagctcaaagaggtgaaactaagtgaagactattacgtgatggacccagctaaagctgtagagatggtggatgagaattccatctgtgttgcagcgattctaggatccacatttactggagagtttgagtatgtgaagctattgaacgatctcttagctgagaagaatgcaaagacggcttgggaaactcctattcacgttgatgcagcaagtggaggattcattgcttccatgggtgaagagtatcaatgtcagtgatcataagtatggacttgtgttttattgttccgtgatcaccaagctaagagtcatcaacccacaaaccataagcaaccatatggttggtgtaacgacaatttgcctccaaatgaaatagtgacagtttcacaaatgccaatatagcttaatattaatgcgtaaagtgggaaaaaatatttttagtgtcaataagcccaaatatattaaacttttagtatatatattaaggggcccaaaatgtttttccctagggccctaaatatcgttgggccgggaccttactgtactacttaccactacaaccgcagaaagcagcccaaattccatgtatgtttcattttctacttcatagtcacaaactagcttgagagtcaagttaatgttgctgatacagagtctttcttttactctctagctagttccatatttgtctgtatgatggtgctaactgctaaaggttggactaggcgatttgcttcatctgatcacatgtacatgtaaaggcagatatatgtctataactatataagtatatattatgctaataacgagatcaaacgtgatcctttttttataacgaaggaattgcaaggagcttgcaagtaacgtttgtcaagaatctccaaaaaagataaagcgaaagataaaaacaacaaaaagaagaacgtccagaaaaaagaaagaaagagagagatataataatataagtaaagaaaattttaataattaatcaatctagtgaccatataagttattaatgtatgcggtcaagaaagaagaatatatatatatatatatatatatatatataagtttgagtaagagaagataaatgaggtgaagtcataagtacgtacccaagtcccaatattgttaattgtctctgagagttataatg

SEQ ID NO: 2670 - DNA, 3000 bp, Unknown
  misc_feature (1)..( 3000): cDNA_ID_3069096_gDNA_ID_1620574_Annot_ID_160931 3000 nt of promoter + ATG
tttaaccgatccgctccagctctttagacgggcctatatatagtgttccacccggctcatccgatttaagcaagaccagcatgcagttaactgccaaatacttaaaccaaacagataaatgagccccatgactgaaccatcaaagcccagaacacccagatcagctttgctctggcagggctgtctctcaagtcaatctacagacatttgcaaattttactcggaccactaattcttccttcactactattagtacaggaaggaaatcttatttcttgtaacaactataatctgtaaaggtgaattctggacgtgaaaaacagagcctgttgttcctccaaaaagtaaaccaaaagttgcagaaggaattaacacaaaagggtctgtgtaaaaattttctcaagatcaaatcatgctctcattcagtttttgggactactcacacgccgagtgatactataacagtagtaccagactctcagttgggaagatttctactcgtccttgtatctcttctctaattgctccaaacgctcaaggtctttgtggtacttgcagatgcggaagatgcacctgtcagtgaatacgagagaatatcagtaaaaaactaaacatacaaagttccaagtgagttatagttgaatgatgtaccagtagagaaggatcccagccgcacacagaaccccattcctctgagccttatagacctgaaacacaagtaaactactagtaagcaagctgaactgagacaatttagggacagggaactgaagctttgatgtgttgctaataacagatggaagacataacacatatcgaaaaggctcgggtagatgttttaggaaagaggtacaattggagtggtataatttcatcaacaaccaaccgccaacaagttcacaagaacagggcataaaatgaatacgacatcagttcctttctcacataatttatcaaagaaacttgtatttccaccacaagaagattccttgcagcattttatagctcttaacaacagcaaagtgatgctataaacgcgagctcagaagagatcaacaccaagcagtagcactaaccctgtgagtctctgaccaaatatgcaattggtaatgctgctactgagaactcaaatgttgtatgaactaacactcgcttcaattccagtatcaaagatcataagtgaaatgtttcatagatgaacttacggatttctcgtgacgatcccgctctgtagtagtgcaaacttcagatgagcacaatagcctatgctcattcttccagtaaatatctgaataaaccattaccaaaacaaaaaaaaggtaccaaaattaatcccaactcgaaaccttaattataatcgatccagacgaagaaaaagagtgggaaattagacgatctaagaaatagagagagagagagatagagaggcgattaccgaggagttgaaatccagcgaaggcgacgatggaagcggcaggattgagtatgagcgagataagtgatacgatgcgtttcttcaggagcattgggtaagggagagtcaagatgacggcgatcgctacctcggcggcaaccacatacgacagaatcagccattgcaatgccattattcccccttcttcttcttcttcttcttcttctagatctctcttccgatccaaaaacaatatattctgatttgtgattatgcgcgcgtcgaccacgtatctacgccgtgagcgtctgccggccggttttgactttttaaaaaataaaataattgatgggcctttttacggcccaattgttgaccatgtattgacttcattgccagacccactaattaacttccgtttcagaatggttcgtcaaaggtgataatcgaacttaaaaagtagctatgactcctaattacaactatgttaggaacttataccattcatgtataactcatactgtatagctaataaccaaactttatatagtataggttgtagaattaagaccaaatgcagaagagaaaacattattaggataacttttgaaataccaaaatatgatattttaagaaatgaatcgacatgtgaagcaaatcaagacattcaacgaagtctaaagttgatttcaaactttgaacaaaacaacttctagaacatataaatttgaaaaaagtatattaaaatgttaaaaacttatatacgatgaactctttggggaataaaatgttaaaactgtagtttcaaaataaaaataaaaatttgaagtttcatcatccaatacaaattacaaatacgcagtgacacggcagaggcgagcgcgtggcacacgacgacgtactcatatcacgtgttcaccacacagtgaccatctagagtctaattaggtaataaacctatgaaaataaagtaatatacaaactcgtcataatcaatcttatccacttaaattgggcctggcccatattagttctgcaactgtcatttatttaagtttggggtttctcgtacggaacaaactcccatttgcgtctctcttcttcttgctcctttctcttctctctcacgcgttgctgttgttgactcttatttctctctgggtttccttaaaccttccgctacaatcttctcctcttacatgcgagcttctccgattctcaggttttgatagcggcttaatactcgcaattatggatttcgcagccaagaaattcatcaacaaccccaacggttcgttcttcttcgtcttcctccttccttttttttcttgcgtttctctgttattcgcatccccgacattttactttctccggcgtagattaggtcgattagaattgtgaacgctctggcgaactgttgacctatgttaattttgtttcccgattgtgttactgtttgcgaaatgatttgcattgcgagtctcttgctcataaaattcgccttggtctatttatccacattttccccccaattttgttctggatcctcgaaaatctgcttcgtcaccgttgtgtttcgttgcatg

SEQ ID NO: 2671 - DNA, 3000 bp, Unknown
  misc_feature (1)..( 3000): cDNA_ID_2167630_gDNA_ID_1620574_Annot_ID_160929 3000 nt of promoter + ATG
tctacataccgaaatggaagctcttctttgggcgatgaagtgcatgattggagcagataaccagaacgtagctttctttacagactgttcatgtcacgtatgtaaacaatatcccggattgactcttttgagttttaatttatatcggttgaaaaaaaaaaaaaaaaaaagataaacacatttaataaaaataaacgaaaaaataaaataaaaattggcattattatttgcgcattggtggcgttgataatgggatgtccaaggaggagggaagcgccgggattgcagcataagcaaatttattaagacgaagaagaagaagctccattagattttgcagaacaaatcaaaagaacttcaacaaggaatattgcaagaaattgattgaagctgctcgaattagatctgtaagtgaaaatgattgctcgacttcgaattctgggttttttgttttgttttttatggggtaatattcatgagagaaggagaatatgcttttgttagggttctgtctaacgaattttcgtactagtcactaagttgcttaattttatctttctgggtttttgtttggagggaggaattatttgagattcgaagaaataaatcatggagtttctgtttgtgtaaatgtttctcaggttttgtgaaaatttgtttctagagatttggggaaatggaggattcgagctctatcgattcgattttggaatttttgcggaagaatcattttatgagagctgaagctgcgttgattagtgagctttctaagaaaccaagttcaaatgggtctcttcaaaagcttaactttgaggataattgtgtgagcaagttgttggataagaagaagcaaggcgggagtagccaagcattgggtcttcacaacgatagtcacatttctgatgaattggttgtgaaagagatacaatgtggagctgccaataacttacacgagagtaatcttatgaatgatgtttctgttcagacacaaagtggtaatgcagatttttgggaggagagattcacgtttgctgaaggatttgaggataccgagctcgatttacctccctggaaccatacctctactgatattgtagctgactctgaggaatacagtatcaatccaagtaaaagaggctttgtgaatccacggagttcaaagcaatcaagtcatgaaaaggttcctgaacctggtaaaagcaataaagtggttgtggaagacgtcttctcttcttttgagaagatacggactggaagctctagccaggtatctcagtatgaccatggcaaagcatgtcaatctctggaagttgataataaggttgggaactctgcaatacaagaaggattcgtcaccacgtcatggtcaagaagcgaagagaacattggtgcttcaccagaccattggaaggattgttctgttacaactgtttttccgttgtccaaaggaagcacgtcaacaaaagataatggtgtagccattttagataaatggcaaggaaagaaactggttggcgcgagtgattccaggattcttatcaaggagcaggaagatgatgtggcaacagcgctataccttgggaagtcacagtctggttatgaacataagattccaagcagcttagcattttcgctggctcatgatgctccgagggaagatttacctagactgccacatgtaaaaatcaagtcagaggataaactaatgaactttacttgggaagaaaaacacgagcgagacatattggacgagaagctgattaatactgataatgctttcctattaggctcttatctagatgttcctattggacaagaaataaattcatcaggttagttgacatgatgatggctaccatccaaatcttaaaactttatgttctgtatgagtaaattatgttaccattggctagcttttgcgtacaccttttcttttgttttttgcaacctataacttaccttttctattgtgatggtgtcataggtggcaaaatggctggtggaggaaactggttgtctgtaagtcacggaatagcagacgatgcatctgacttgatttttggctttggcgatggcttaggtgctctcaatgaacattcaaatgagtattgggactctgatgaatatgacgacgatgatgatgttggttacattaggcaaccaattgaggatgaggcatggtttttgggtcacgaagtcgactatcctagtgataatgagaaaggcacagagcacggaagtgttcctgatacgcaggataaaagtcaaaccaagaatgatgatgatcattcatttgccgaggaggattcttatttctccggtgagcaatatgtactcgctaaaggcattgagccagttactgcttccaatgatccgatgggtctctcaatgactgaaacatacagcacgaccaagcaagctgatttggttgctcgatatgacgggcaattgatggatgcagaggagctaagtttgatggacactgaacctgtgtggaagggatttgtcagccatgaaaatgatgtaattttgttgaagaaagggaaagtcgaggacaactctggtagaatctgtcggaaggatatccgcgcagaagatgatcgaaatgctgcagttaggtcaattggtgtaggaatgagcgatgatgttgatgacaatgggagtataatacctgaatactttcctggagaaggtagtgaatgggatctggagctccttccttatcgcggagttggagttgctggtgttaagcctccacctggtaaaggtgcgagtatgctgcttaaaaactttgcagatggtggattctcatttccctctccagtagctgatagacagaagtcccaggatgattctgcaaaccctgaatggtcaaaccattgcgatgctgttgtgagaaatgaaagtgatgaaccaaaggggctaatccagtccgatagcatgattgtctcttcgacaaaaagatgcagtggctcttcttctgaaagaaatttaagagac

SEQ ID NO: 2672 - DNA, 3000 bp, Unknown
  misc_feature (1)..( 3000): cDNA_ID_2167620_gDNA_ID_1620574_Annot_ID_160926 3000 nt of promoter + ATG
tatcctgcgtatcaggaacacttccgtgctctgtgcctttctcattatcactaggatagtcgacttcgtgacccaaaaaccatgcctcatcctcaattggttgcctaatgtaaccaacatcatcatcgtcgtcatattcatcagagtcccaatactcatttgaatgttcattgagagcacctaagccatcgccaaagccaaaaatcaagtcagatgcatcgtctgctattccgtgacttacagacaaccagtttcctccaccagccattttgccacctatgacaccatcacaatagaaaaggtaagttataggttgcaaaaaacaaaagaaaaggtgtacgcaaaagctagccaatggtaacataatttactcatacagaacataaagttttaagatttggatggtagccatcatcatgtcaactaacctgatgaatttatttcttgtccaataggaacatctagataagagcctaataggaaagcattatcagtattaatcagcttctcgtccaatatgtctcgctcgtgtttttcttcccaagtaaagttcattagtttatcctctgacttgatttttacatgtggcagtctaggtaaatcttccctcggagcatcatgagccagcgaaaatgctaagctgcttggaatcttatgttcataaccagactgtgacttcccaaggtatagcgctgttgccacatcatcttcctgctccttgataagaatcctggaatcactcgcgccaaccagtttctttccttgccatttatctaaaatggctacaccattatcttttgttgacgtgcttcctttggacaacggaaaaacagttgtaacagaacaatccttccaatggtctggtgaagcaccaatgttctcttcgcttcttgaccatgacgtggtgacgaatccttcttgtattgcagagttcccaaccttattatcaacttccagagattgacatgctttgccatggtcatactgagatacctggctagagcttccagtccgtatcttctcaaaagaagagaagacgtcttccacaaccactttattgcttttaccaggttcaggaaccttttcatgacttgattgctttgaactccgtggattcacaaagcctcttttacttggattgatactgtattcctcagagtcagctacaatatcagtagaggtatggttccagggaggtaaatcgagctcggtatcctcaaatccttcagcaaacgtgaatctctcctcccaaaaatctgcattaccactttgtgtctgaacagaaacatcattcataagattactctcgtgtaagttattggcagctccacattgtatctctttcacaaccaattcatcagaaatgtgactatcgttgtgaagacccaatgcttggctactcccgccttgcttcttcttatccaacaacttgctcacacaattatcctcaaagttaagcttttgaagagacccatttgaacttggtttcttagaaagctcactaatcaacgcagcttcagctctcataaaatgattcttccgcaaaaattccaaaatcgaatcgatagagctcgaatcctccatttccccaaatctctagaaacaaattttcacaaaacctgagaaacatttacacaaacagaaactccatgatttatttcttcgaatctcaaataattcctccctccaaacaaaaacccagaaagataaaattaagcaacttagtgactagtacgaaaattcgttagacagaaccctaacaaaagcatattctccttctctcatgaatattaccccataaaaaacaaaacaaaaaacccagaattcgaagtcgagcaatcattttcacttacagatctaattcgagcagcttcaatcaatttcttgcaatattccttgttgaagttcttttgatttgttctgcaaaatctaatggagcttcttcttcttcgtcttaataaatttgcttatgctgcaatcccggcgcttccctcctccttggacatcccattatcaacgccaccaatgcgcaaataataatgccaatttttattttattttttcgtttatttttattaaatgtgtttatctttttttttttttttttttcaaccgatataaattaaaactcaaaagagtcaatccgggatattgtttacatacgtgacatgaacagtctgtaaagaaagctacgttctggttatctgctccaatcatgcacttcatcgcccaaagaagagcttccatttcggtatgtagaggagataggcttctacgaacgttgacggctcccatggttggcgactctccaagagatgatagacagaaccatcctgttcctgagaactggtcacttgctttccaagatccatcaataaaacaccgatagccagaaaaagttgtatcttgtgatacatccctcacccgaattcgattatctatagacaaagaaccatgactttcactatggagctcgaattgagcttcctgccacgattgagcctcttttaccgctaaaagcaatatttacgcctgaaggaattctccaaaacaaatgtgtttaccttctccaaaatgtgtttacctttggatccatggaaaatcattagttttggtgggaaataaaaaagcaaaatgacacttttgccaatttttattagactgtcctaaatttatcacaaattttagtttattctttacaatattgcacgtggtttttatactttttgctgtactttttcataacgaattaacgagtaaaattaaatatggcgtaataattaatcaataaatatttaccggttatgtagtttcgaattcaaattcgaatgttgttgaacattaaacaatgagtaaattctttcaatgttaatagagcccattaattatttatataggcccaataattaggcctattcagtattcacgatccttggcagaaatatatagcggcacaaaaaaaatacagaatcggttttgttttttccggtggatgtaatg

SEQ ID NO: 2673 - DNA, 3000 bp, Unknown
  misc_feature (1)..( 3000): cDNA_ID_2167626_gDNA_ID_1620574_Annot_ID_160928 3000 nt of promoter + ATG
ctagaacgagttcctgttggatggcagcagaatccaatggttcagatgttgtatccacctgcataatccaataaatagaattagaccttacaatgtcaaactgctattaatgagaatatcaataatgccagcgattaaagatagtggggaaacaccaaacgacttgtgacagtaaacagtacgtaatgaagtgattcatcaacccttatcagttagcaccataaaataagaacctgcctatgtcgcttgctgcaagcagaagaaagagcctggatcgcataagaatacagcctcctcacttctgatactttgaatctggagaactccccttgaacaacacataaaaactccctccataatttgtagcttgcggaattctgcataagtgccttttcccacctactgattagtacatcagcgttgtctctgcttcggtatgccttgagcagagcaagcaacagttcttcgctatctgggttcagctcaaaagccttctcaagtatactaatctttttctctaaagtctgcaggcgaactcctttctgagattgcatacttgaaaccttgtcttgaaaatcagcaaatgccagccatgcctttgcatcatggggacgttctctcgtcactctgttgaactcccgtgttttattcagcacttcatcctcccatgatgctccaatcattgagtcctttgataaaacatcttcttcgtcactttctggaacagtcacgtcttcctccagtggaatgaaattatcaaaggaagaatccacagcttcacttgcagcagataaacgaatacgcttgaaattcttgttgcgttccatggcagcatgttttgcataccagtatcgggtatcagactttgctctcccctccaaagaatcaatatcaatctctgtgtcaagcatagaactacgtcgattccgcaaataaaacctcagagaacctgaccctggaactctctgagaattgtcaagtttataacgaggaacattcatcctgtattatgcaaacagaagcaaaatttcaatatccctacactcttaaaacgccttgcacagaatacagaaaatgaaaccaaccataactagacaaattataagcaaagtacctgtaaatagagccataagccagattatctggatcaggacgagtgtccaagtaataatccttcacaggtttcgaatagtattcatcagatttacgagaacgagattcatccgaagcattatcactcttccgtttcttctttttctctcgcttcctctttaccttgtcgtcatcagactccaaagacccttcttcttcaaccaaattataaaccctagcctgattagctaaaccgatatttccatcagctcctccttcttcatcttcgtcgtctccagcctcgacctcggatgaggaaggagccgtcgaagcggcagcgttgatgacagagagatccgtagtgaagctagcgttgcgaagccattgaggagcattcgaaatagctgagatggagttcgccgaagtagggaagacggggaacaagccgcctgtagttacctgtgctccgtcgccgtcttctggtgtattcgacattacatccaccggaaaaaacaaaaccgattctgtattttttttgtgccgctatatatttctgccaaggatcgtgaatactgaataggcctaattattgggcctatataaataattaatgggctctattaacattgaaagaatttactcattgtttaatgttcaacaacattcgaatttgaattcgaaactacataaccggtaaatatttattgattaattattacgccatatttaattttactcgttaattcgttatgaaaaagtacagcaaaaagtataaaaaccacgtgcaatattgtaaagaataaactaaaatttgtgataaatttaggacagtctaataaaaattggcaaaagtgtcattttgcttttttatttcccaccaaaactaatgattttccatggatccaaaggtaaacacattttggagaaggtaaacacatttgttttggagaattccttcaggcgtaaatattgcttttagcggtaaaagaggctcaatcgtggcaggaagctcaattcgagctccatagtgaaagtcatggttctttgtctatagataatcgaattcgggtgagggatgtatcacaagatacaactttttctggctatcggtgttttattgatggatcttggaaagcaagtgaccagttctcaggaacaggatggttctgtctatcatctcttggagagtcgccaaccatgggagccgtcaacgttcgtagaagcctatctcctctacataccgaaatggaagctcttctttgggcgatgaagtgcatgattggagcagataaccagaacgtagctttctttacagactgttcatgtcacgtatgtaaacaatatcccggattgactcttttgagttttaatttatatcggttgaaaaaaaaaaaaaaaaaaagataaacacatttaataaaaataaacgaaaaaataaaataaaaattggcattattatttgcgcattggtggcgttgataatgggatgtccaaggaggagggaagcgccgggattgcagcataagcaaatttattaagacgaagaagaagaagctccattagattttgcagaacaaatcaaaagaacttcaacaaggaatattgcaagaaattgattgaagctgctcgaattagatctgtaagtgaaaatgattgctcgacttcgaattctgggttttttgttttgttttttatggggtaatattcatgagagaaggagaatatgcttttgttagggttctgtctaacgaattttcgtactagtcactaagttgcttaattttatctttctgggtttttgtttggagggaggaattatttgagattcgaagaaataaatcatggagtttctgtttgtgtaaatgtttctcaggttttgtgaaaatttgtttctagagatttggggaa

SEQ ID NO: 2674 - DNA, 1490 bp, Unknown
  misc_feature (1)..( 1490): cDNA_ID_3069156_gDNA_ID_1620575_Annot_ID_160936 3000 nt of promoter + ATG
gatctgtcttctttgatttgatctttcttattttttcgtgaacaatctctaaaatattcccattaaggcattaaccatgtgaaaacacttgtacgtgtggactatatagttcacgtgtgtatgagtacgggagcattgaataattatcgctacggcaaccacaaataaattgatgtgaacaacgctgaatactttccatttttcaactttgtctagtaaaaaattactaaaataatgttccaattatggtttttagtgaacatcttattgtcattggtgattcgataatagatgctacgagacatgttatttgttcttggaagaaagaggtacgtaaattctcaaaagggtctttcagtgtaaagaggcagctttgactttgctaacacaaaaagtctccatatgattattttctttttcttttcagaagttaatattctcaatttctcataaacattttcaattctttcttttgttattggttgaataattttgttgagttttataaatgatgttttaatgtgaaaaccaagaaacaattgatcatttaattagtttcttgattagtgtgctaaaaccttaaacatcaactaagatcaaaaagagattaggtagttgtggtcaaccacctttgatgataactttctcatttctagttttctaactattttgttcatactgccttttttttttccttgtactcgtagaacactttttatttacttactatcactttgtagtactcttcacaaaacacttttaagttttctctaaaaaaaactatgagtgtaaataataaaagtatacgtactagcgttaaatggcgatatttgtaaaaatagttattgtactatttgtatcacaaaaattgcaagtagttgattcaaatggtaacctatctatagacgaattggtaccaatcgtcaccaaaagaaatttcagttattactactcattaatccgctaaaatccaagatcaataattcactaaattctgctataacattgtaacattgttgctatcaataatcaaattattctattagcatataattattagatccacaaaacttatctactagagcagaagattccaccaaaagttgcttccgacccacatatccaattctttaggacaaaaatatttattacaatcttttaagaggaaaacaatgtaacatggacaccaaaataaagccgcctttaacggtgacggtaacggtaacggcgtttgagtgctcttgacaatacatgaaaatttagtaatagagttaagaaatgaaattaatagagtttggagtgagacaaagagagaagagaagattagagagaggagaggaagggtcaaagaatacatagcatcaccactagtcaacgcttttataaaacttcttcttcgtctcctctccttctcacatctctctctgtctttctctctcaaacctaacaaaagcttcagacttcaattctttagctacctctctcccatg

SEQ ID NO: 2675 - DNA, 3000 bp, Unknown
  misc_feature (1)..( 3000): cDNA_ID_2048995_gDNA_ID_1620575_Annot_ID_160971 3000 nt of promoter + ATG
caaaacaaaaaagcaacaaaaatatgtttaatcaattgagatcacaataatcttcataatatattaagcctattaaaatttcctaatctaaggaattaatcaagatgtgaagaaatttcaaagtatatttacgttggtaatttcctaggttcagtccaaaaaaaattgaactcatttttctagttaattaggtctgactgatatggatttaattaaaagagctgagttcgatattatcgaattctaaacttcaaattatttgctacaagttatataacatagttattgatattttgaaaattaatgtagtattacaaactcttttcttcggaaaaagatatatgtaagaaattaagaaaatatgaaatgtcaatacaaacctagtataagaaccgtgaagacaataagaacagtaaacgagagttgaaaggatttgatcatcgtaaatgatagaaatgaattgatagtactttgaaagttacaaaagaaaaccaattgtagttatatataataaggaatatgtatctcacattcaaacacatatatctattttaagatttttactactttgtactccgaattaaaagatctaccttgactcaggttccaggttttttgcttatatgataagtaaaagtgtcaaactcttatttcattttttattaaaaggttgtaacttgtaagccaaaaggctcgataataacatgtgatattattattattttttaacgacttcatttcattgatagaatcaatgatcataatacaaagttgatgttatgaaagcgggtacatagtagtgaaatttaaaactctgatttggttgaagatgatgctttgcgaggatatctgcaggttggttgtttgttcttggaacccatttgaagacagcctcctcaaatcgtttttgccaaaatctgccttctcttatccagttgaatcttccaaagtttagcttttcgttgttcataagctcttccacttgtttactgtccccttcaaagataactttgcgatagccttggctccaagcatgttgcattgctataatcaaagcctgaaattcactctccaatgagtctgatgttgttgatcctattgcttgacccgaacccatgtatactccattctcatctctcattagccagccagctttcgcatttcgtgtttggtggttgaaagctccatcataattgtactttatccaagtgcttggcggccgttgccacttcgtacgtgccatagttggttgttgatgtcttgatgaatgcacttgttggttgagactctgaacataagtgtttgtgtcttcccactcttgaacatcattccgtgcacgttgtagggtgttttgccatgatatgcttttttgttgaaacaccaattgatttctgctcttccatagtctccataagatccagatggccaaattaaaaagttgtggttgtctgttggctaaacaactcgataacagcagctccatctttgtctccattgtaattcctgtagttcgtaactcttggtgtggtatccctgaagctcgccaaacctgttgggcataaaaacaatcaaagaataagtgttgagacgtttcgtcctcttggcagcaccggtgacattgcgggtgattccgtatatgtcttcgttttagattgtctcctgtggctaaggctcctgagagtagcttccagaggaagtgtttgatttttggcgccgttttgagtttccatatcttagctttaatctctgcttttcctgggggtggttgaatttctggatccatgaacacttggtttgctaaccagtaagccgacttgactgaatagatcccatcttcagtgtaatgccagcctagaaagtcttgagtagccgctgtacataacttgagagacaaaatgatttccgcatcttcttctgtaactagatcgcgaactaagtctctgttccattgatttccatgaagaatccaattgttgagaagacagtgttccacttggttattctttggtttcggtggtcttggagggtgagttggcaaccaagggtcgatccaagtactgactgttgaaccgttccctacatgtgatattatttatcatcgaaaatttgaagcagtacaaagaaataacaacttggtattaaaaaaagtggaaagaaaaataaaaattaatataaaataataagatataactatttttgaaaataggtgtaagaaattaaatgtatattaattagtcagatcatgtaacaaaaatataaattaaatataatatatttacctaataatagagaagaaaatattatgtaaaattaggtatctatagatttgtattcattaaattatgcttaagagattgatcgataagtaattctaaacaatttcacaaaagtaaagtgttataccaaattaatagatatcttctaggtaatgcattcatgtataacgttatatctattttatatgatatttacattttagcgcaaaaaaaaaaagaagaagaaaggaagcataaaatgtaaaaagaacaatcgaaatcagtttttaattatctgtattttgaaagttttggcatatgagtaaacaagttttatcatatactaatttaagatattatgttaaatatatggttcatttatttacatatatgaattcgagatatcttaaaccatatatatacttttctaaaatctataataaatgtaaaaatcttgataacttttgtaagattagtttataattttttatattataaaataattatttgtatatttatcaacaagttaataatatatttatatatttttcctttttcactaaaaggaggtctaaattggccagcatgtttgacaaatgtcacatgtcactatgtcagatttagattgatattagctacatataaatacttgttcactactatataatgtgttagatttatcgtgttcataagatacatcgaaagcacatatacacgttgaaatatcatttcatataacaaagct

SEQ ID NO: 2676 - DNA, 3000 bp, Unknown
  misc_feature (1)..( 3000): cDNA_ID_3069112_gDNA_ID_1620575_Annot_ID_160966 3000 nt of promoter + ATG
tgtcactgatccacttgacgacgacgcgaaggctcggatcttgagcagccacagttacatcctagaccaagattctcctcgactctgcgagctcgtacacgggtttcttgaggatggtcctgaagagtcattctacgactctgaccccgacctgtctgagacttcttcagctgaacattctggtgaagctagtgtggagatcgtgagaatggcggtgagcttctccgattccgatccttaccggaatctattgctagctcacgttttgagagccgtggaggtatattccggttttaggtcaaggaacaaaactgttttccgggataaggtagcttcgtttctgcgagagcttggtcacgacgccgcggtttgtgtatcaaaatggacctcttcatccaaactcatcgctgggagttaccatttcattgacgtcgttcacaagccgtcagataatgatcagaaggccgtccgttacttggttgatctagactttgcttcggagttcgagatcgcaaggccaacgcgcgaatacacgcgtgggctgcagctgctgcctaacgttttcgtaggaaatgaagagaatctaaggacgatcgtgagagagtcatgcgacgcggcgaagcgatcaatgaagagccgtggcttgtctcttccaccgtggcggagaagctcttacttacagcataagtggtttggtccgtacaaaagaaaggtgggatctagtttgggagtgaagccgttgaatagtgacgccgttagttgccgatctttagggtttgatgacggcgccgtcaatactcgtttgttcatcagggcatgatccatatgcatgtggtatgaagtagactagtataaagtgtaggcgaatagctggagactacacttctttttattcaatctgactgactatgtatgttctcgtttaatattaaaaaaaaagatttgttctaaatcagtaacttaaagactaatagaggtcaaactattaatcagtatcttatcattaattagaccaaaatgtaaaatacttaaatgtatcaatcaacctggattatgtggcattcatttgcaatgaaatctcgctagtaatgttgatgtgtgatataaaaaagaatatgcaaatgaaccataacagtgtcagttgacagttaatatgtgaagaaagaaaaaaaaaatatgagtttagatcatcaagatcggaggctagaaaaaaaaaaagatgggaggctagagactcatatgtcaagctttacttcttatactttttaattaaacttccaaaacatcaaggtcctttcattttcaatttgacttctaactttattccaaattttgaccgagactataggaagtcaaatatgagtttgtgagttaagtttgagctctcacaaccgctgggataatctcaaaggtgaatatcttaggtataattattttcatccgagtgcttactcacatgaatttgtgtctaaaggttttgctcggattttacatattttccgctacatcatatttcaccgtcggataatcctaaaaataatttggagaccataaagatttttgagatagcttccaatgcaatgagaatcaaacgatcacttttgactaagactttaggaggtgatatgtgagtttgtaagtcagggctctcaaagctgaatatcttaatatatgtttcaattatggcaactgtccaaatgagcgaaatgaaactttcatcccaatgtagtactcatagaacttagttaatatacgttttgcttgcgttaaattttcttaagtaatgagaatttgccgtttatctagaaattacctaaacgccgatggtttttggttcattcggttgggtttctgaatctctcagtcgaatatcccctcaaatgtactaacttgtatagtttatgtatcccattgaacgggaccttaactgctttatgtatcataaaccctgaatattgtgcatttcaaaatatatttctgaaattatttagttttggctaatcgtttccactctataagactataactactgttgatacgagattctcatcagattgttcatgtttgatcaatcagtcatctagttttgtgaatcgcttttttttttttttccttttcatataattttgtaaatattctcttatatatatttttttcaactttttctatttaaaattaataattattcaaaaaatatcatgtaagttacaaaaatgtatccagattctttttgtagtgataaatattaaaatcaacagtttgttaattttaaaataacttttgattttagttttaattattgttttttaaacaaactatctacaccagtaaaatacctttttaacacaccaaataatatgagattacattccaaaagtatacaatgttttgagtcttgactaaaaaagtataaaaaaaagaaaaatctctgtttccttactctattcttaaaattagttaatcaatgcaatttttgggccattgggctttagaaatattgaagtattccattatactctttcgctgaccggtcaaaaagctttaacgctcgaaggccgccgcgtcttccaaggcattgaacgtccctcctccacgccttctaggttctttcgcctccacgtaaaacgtcacccctgacgtcacatcctctagaacaccacgtgtttgtcttaaacacgacgagtaattacacatttggtcaaactcaaaccaacaaaacactttttaaacaaggctaaattggtcaaacgcatggcaacgaatctcaggcgttttttcgttttctttattattgacttatttttatttttattttattttgcttctttgaaatcttccccggcaaggcaaagcaaacgagtggacgtttttgaagattcgttaatttttctctctctctttataatataagaagtcgcctactacgtagaaccaaaagagagacaaaaatacactttcattgctgtcttaactctaacggagttaactaacgtcgacatt

SEQ ID NO: 2677 - DNA, 3000 bp, Unknown
  misc_feature (1)..( 3000): cDNA_ID_3069116_gDNA_ID_1620575_Annot_ID_160965 3000 nt of promoter + ATG
gaatcatcatgtataaaacgtgaagctaaacttattagtttaggcgatgaagttgatatatctcaagtctttcactgcaacggtttattgttattcatcagcatcaccaaagacaagactaggctagtggtttggaacccgtatgattggggacatacccgtacgatcgaacccacacataactgccacatattcaataggtataatatatgtatgctctcggatacaacaagagctagcagctaatcccacaaaatcttgaggtttgttacttactggatgagggttatggatgagttcataatctacgattttaactctgattcatggagggttcttgatgtcactccagattggacgataagttatatgaaccttggcgtgtctctcaagggaaatgcatactggtttgctactgagagatattccgaaacagacgattatttcttagtctgttttgatttcacaagagagacatttgggcctcttttgactcttccgtttgtgtttgttaaatctgaagatgttatgtgtgtatctaatgttagagaagagcagcttgcggttttatatcagccgtgggataaataaaagatggagatctggattacgtctacgattgagcccaacgcggtgtcgtggaacagcaaggtgttcttatcagtgagtataagaaaactcattggccctccgtttcagttttgtttggggagtttcttcattgacgaggagaagaaagtcgctgtggtttttgataaagactacaaagataagcgcaacatagcttacatcattggagactttggagtcgatggatcctttaaagaagggatctcggagaatcagcctacgcaatgtgttacccacttatgtgctcttatgttccaacttccaagtctagtgcaatttaattagtcgaccatctacttcttgcatatttttgctcgtttttttttcctacctaaccatctagttcaaacattatcttttgctaaagttgggaagtgtggtggaaatgtcttctccttttttttcttgtaatgagtcttgtacggtggtggttatatcgatctacgtcggttgtgttcccctcggtgatctcgacctcagcgtaggtggcgatcaatgttggaaatgaaaattcctcctctggattatcagtctatcttttattggtatattgccatatatgtcttcatatggtattctgctatctttcaatgaacatcacaaaaatagtgatgcttaatgtcttcatatgattcccctaaagttagtgcttttgtgttttgtgtgacatatgggattgtcatatatatttcgaatctttttcgtttgttacacaattaattgccttaaaaaattcaaactattaattaaaaagaaaaatcagataattaaaattcagtggcaactattgtaaataagtaccaactccaagatttatttcacaaaatggctgcaaaatgtatatgtagatatttagcttaaggaggagtctaaatttaactttagaatttttttagaatataatgtatattagagtaaaaacatttagaatatacatataaggattaaattatattgtgtattattttttactgcataaaattgatttgtaattttgagaaatataagataaatttgcaaaaattaacgaattggaagattgttttgcaaaaaatccaaatattttgatataaattatttgatctattgttaccatatatttttgaaccatttaatccgtatttttccttgaaatgtgtttgatatggtttattttgcataaacaacttgatttgtgaatttcattttcctatttgaaatctctttactatataactagccttgttgggcgcgatccacatatgtattatatgatacttttgctcattagttaaaaaaaacaaaatgaatagttattagtcaaaacccaatgtagagatattgccgacgtagtcaacacatatgaatatgatatgatcctgcaaaaaattttaacgacgttagaacctaaagaacatatgtgttctggaaccacctttctgtcacttaactctgtcatcacctttcgaataaatgatttaaggagttctctagaagactagaatcttccgtaacctaaaactcaacctcatgtagaaagactcacaaatccaattcctctattctcctgcgaaaaacggtttctttatatctctcacgatttgatttcctcttcgctttttttaattgaattgagattgatggatgataattttaatttcaagatttttttgttaatcttgtaatggaaaatattaaaaataattgcttcaatattgcaaagctttgatattttagaaaacaattttatttaataaaagtgatatatatatatatatatatgttatagtatattaaaagtaaattagatttaaaagaaagtgagtgtataagagacaaaacacgaaaaaaaaaatatgattgaggatgacaaatggattataatttcatatatatacataatgaattcaagcttgtaacttatgaaaatttagggggataattaatactcaattctagatttatttatttgcaacgtatccatctatacctagagaatttttaataatttgtaagcaaaaaatcttgaaagaccacaaatggatttgaatttgttctggatttgtactgtgataatccattttgctttgcttgattagtttttactttttaccattggtaataatttgggatcatgtttagttgtttactagataaccaattttgttgggcctgatccaacaattttgccgattataaagtaaataagtgaatagttaagcccaatataaatttacgagtgacggatcatctgtgttctcgaaccatctttttaacgaactctctagaaccctttttctttttcacccaaaacccaacctcgtataaatctcaccaatccatttcttctcttcttctttgcgttttttgtttggaactgaatcgaaaaag

SEQ ID NO: 2678 - DNA, 3000 bp, Unknown
  misc_feature (1)..( 3000): cDNA_ID_3069124_gDNA_ID_1620575_Annot_ID_160962 3000 nt of promoter + ATG
tttattaatatttttacatctagatttggggtttgagttttaaaaaataagattaatgatgcaaagcttatcgaatgtccaaaataccacatgtagagctgtttgtaatggtttgagcgttgtagagaaagcatgtcatacatacataattatgtccatcacaaggatgtcatacatacataattattccttgaaatctgaatattgtggaatgagttgcagcgtggaatcgttgttcgtaagaactgttcatcgtaatcacatatgcgtagttaagtatcattataataattaataagaatagattacatatataattcaaaaaaaatcattaaagtagaatgatataattgtgaagaaaaaaaagtataaaataaaattttagttgaatgaaactatgtttgaattttatttttttaaaaatctttgattgattgaattcaattttcgaacccaaaataacatatcgtttaacacactttgatatcttgaattttaatttatataactcttattttctttctttagttatttttcccttattctttttccagtttatctaaacaaaaggtaattaatttcaaaattcgataaaccctactatttgacatcttctacgaacgggcacaccggagaatcagcttctcgttccgtacgatgtcggcgacactccgacgcctcattcttctcacctccacaaatcgctcccgtaatctatctccgccgtttctttccaccgccgtgaaccacctatctctatcattctcttccgtctcatcttcaccggaatcacacacttccccttcccggatccgaacccgaacaccactcgaaactcaattcgaaacatggattcagaatctaaaaccaggattcacaaactccgacgttgtgatagcgttacgagctcaatccgatccagatctagctctcgacatattccgatggacagctcaacaacgaggctacaaacacaatcacgaagcttaccacactatgatcaaacaagcaatcaccggaaaacgaaacaacttcgtcgaaacgttaatcgaagaagtaatcgccggagcttgtgaaatgagtgttcctctctacaattgcatcatcagattctgttgtggtcgtaagtttctcttcaatagagctttcgatgtttataacaaaatgcttcgatcagatgattcaaagcctgaccttgaaacttatactttgctactaagttcattgcttaagagattcaacaaattgaatgtgtgttatgtgtatctacacgccgttagatcgttaacgaagcagatgaaatcgaatggtgtgattccggatacgtttgtgttgaatatgattatcaaagcttatgcaaagtgtcttgaggttgatgaagctataagagtgtttaaagagatggctttatatggctctgagcctaatgcttatacttatagttacttagttaaaggggtttgtgagaaaggtagagttggacagggtttagggttttataaggagatgcaagtcaaaggaatggttccgaatgggagttgttatatggttttgatttgtagtttgtctatggagaggagattggatgaagctgttgaggttgtgtatgatatgttggcgaattcgttgtctccggatatgttgacgtataatacggtgttgacggagttgtgtaggggaggtagagggagtgaagctcttgagatggttgaggaatggaagaaacgggatccggtgatgggtgaaaggaattacagaacgttgatggatgaggtttattttttgaataagggatgattgattgggttctgtttatctgaaaggcgatcaatcggctaagcttaagggctacaagatggggggggtttgttgcaaagtctgtgttctgcactctagttagtgaaccccaaatctcagtaatgatctgaatcataagggttatcaagttttgagcttcaagattctgtgttcttgagatacataacaggttgaagcatagtgtgattggaagactgaagatctcaagccatgatagcttagagatattctgtaattgcaatttgattcaaggattcaaaatcatgttgtctttgtatcatgttctgtgtaaatgaggtcttatgacaatcaaggatatcaattgttactgacactacttgcaaaccaaaagctgttcagcatgattcttaacgcccttttgtgtattattactgttgatgcacaactataacatttgctgttacaggatctacattttcagacaggtcacaagattcttatgttagctcaatatctcatacgagcattggttacagtttattctattttaatgctctagatatatctctttgtggttttattgattctgactggattctgcatctttataggggattctcttgttttttgggaagtcaaagaaacagtccattatttctcgcagttcttctgaaacaaaatacaaagcaatgactcatggacaatgctgcaattatttctactacacattgctaagaatcatgtttcccataaaagaatttgaacacattgttcttgaatgcattagttctgatttcatgaaaactttacatgtttgttctaaaaactccattttggttggaaggtttaaaaattgatttgtaacatatatcgtttctggaagcttataagttattagaagatgataatggtcatagttacgttttctagtttgttcaatgactctggagtacacatttgttcattcaatgaaactgaaacaaaggtacaaagtacaatgtgaatgactccgtgatctgccgcttaaaacacgttagttttttcttcttgggacaccgcttgaaaacacgttaattaggtgaatctgtggatacacatatgggcttaatggcccctatatataatacgatgataggcccattacatttagttgtcttccacaacaaaagagtaccctgaaacagatctttcgtataatcagtgacgtagagatcgaagacg

SEQ ID NO: 2679 - DNA, 3000 bp, Unknown
  misc_feature (1)..( 3000): cDNA_ID_2049070_gDNA_ID_1620575_Annot_ID_160947 3000 nt of promoter + ATG
gtaaaaagttaagtttttaaggacaaaagagattgaaaaagtaagaaccattatgggtccatttagaagaagtagaaaagataaagtgaagagacaaaagaactaataatgatctgcacttgagtacccattatgttttatttcccatatgcaaccactaagagtactctctttggtttgaggtattagtatgaactaactagctccgtgattgtaggtgttttaggataagataattgaatgttgttagtacactcataacatgaattgggacagtttggttaggctcttgcatatgacattatcagtttggttctaattaaggagataaacatgctaaaactttgatgatctatgtttcttaggacttgatcacaattcacaatcactgcaaattgttgtaattgttctgatcaatctgtttatggttttgatttttggtcaaggtaaggaacatttagactgatcaaaagaaaaaggcaatggatggtggtggttattgaaatggccaaacagatgaaaagaaaggtaactttcaaaagttgctttctttttttcttgtcactgtttctttatctttctctttctcacacatctctttcttatacccacaccactcttgagagagcagatcaatagagaaaaaaacttggctagtttttctccacaaggttttttctgcaaacatgtctgaacttgcattgtcatctcaagaagagtctccaagtagtaataagattggtttatcttctcttcttctctctgactttcatctcttttgctcatttatcctcactcaccctttctatttttcttacttgctcttcttttcaccttacatcttcaagattctctcttttctttcaccactctttgtcaccaccacactcttgcttcttgccttattgagtactttacatgttcaagacacttgtctcgactctgaatcactagaaacacaaccaagcttccttttctccttttgtagtaagcttggaagtgtcttggaacacaagtttgatgtcaacaatgagggttttaagtcattggaggagttggaagcgtataagatggtcgtcgaggcttgctcgatggaatgtgcgtccgagaatgagatatgttcggatgaattgacgtttgttgacaaattctgtagccatgagagcacggtgtcggaatctttgaccgatgagacccttgaggagcaagttgagatccaaccgttgaagtttgaggatgtgattgttttggagaaagaagaagaaaccaagaaatgtgaaaaggaagaagtagaagaacaaaaagtcaagcataaaagtgacgttgtcctcgataacagagaagagccgacaaaagaagaatccaaagctcaaaaagttgaccttgtcggagatagtaataatgaaagttatgatctcccaaaactgagcaattttctcggagaaggagaaggtaaaagaaatgtagtgactaagaacgaagaagaagataatgtttctctccaaagctttggatcaatgagaaaagagaaagaatggaggagaacattggcttgcaagctatttgaagaacgacacaatgctgacgttggacaaggcatggatcagctgtgggagacttacgagacacaaacagagaagaagcagcaaaccgaagaagagaagaagaagctcaagaagaagacgaagtcgatgatgaagacaaagagtatagagaaggaagttatagtggaggaggaagatgatgatgggattgatcatcagcaactttgttgtttacaagctttgaagttctcaacagggaagatgcatttgggaattgcgaggcctaaccttttgaagctatctaaggctttcaaaggcattggacgtttttacaatgctaacaaacattccaagaaagcttgaaaaggagatgaataataaaactttgtattaattgggatctataaacaatgtaacttgtaagtttccattgttttgggcaagttctatgaacaatgtaagggaaaataaaaggtaaaggctaggattttgccatatgtgtttagctttgatcttaactttctttcctatccttgtatattttgggacggataacccgtaatggcccgtatcgattgagaattacttgtcccataaggcatgttaccgttgaaatatttaccttttttaaaatgtaaatttttgtttaacaagtaagggattgggtaaaaaattcaaagatatccgcattttctatattttccgcttgagtaatataatatttacaaagtgtataaaaattatccaaaatttcttcatatacttcataaaaactatttttttcaaaatttcaaaaaaacaaaaaattccgtcttgccgtagagttttacctctttcgaaatcgacactcacccaaattaatgagagtttgagaattgaatttagatacccgaatttcacattctctatacattacccaaaatatttgtcccgtattttatcaaaaatagttctgatcatgtttttcaattactacctgaactatttttcgttctgatatccgaaataaacatgtctattcattatatctcttctaatgatctaatcccacaataattttttccttaaactgtaattttaagtcatatatttcattaccattcattctattaataaaaatattgtaacattttatggttgcataaattaaatccggcaatggaatgtctaaaagtagtataatcggtcttgttcccacttttgtttcctagttgaacagatttgaatctcagatctgatataaaaattcactaatcgacaacattttactacaaaatttaatagaaagtcaaaatatgattgttacacttcaattaacttaaaaaaagttgaaaaaatggttaccgacatatttcatagtttggccgcgtacgattagtgagacactccattaaatagcttataattgaaaattgaatgacactgtgagattcaagtgtaaagtgctctctcccca

SEQ ID NO: 2680 - DNA, 3000 bp, Unknown
  misc_feature (1)..( 3000): cDNA_ID_2049062_gDNA_ID_1620575_Annot_ID_160949 3000 nt of promoter + ATG
gaagacatatttgatattgaaagacaccgtacgtgtcatcctatcattcgttatttgtttttttcttttctccatttgcaattttttctctctctttctcttccaatctcagctccaaaaaactgaaacacatgagctaaacactcatccggcagatctccgatgacatcccgctttctaaccgccataacatttcccaaaaccatcgattctcctccaacaatatgcaccggagaatcgccgtagatgacggcgcttgggccatcaccaccgaatgattgtgttttcctcctgatcttcctctacatttatttatttattcatttggctcatattctcaatcacacacaaattcgggactctttctttcccaatctcagatcgaatttgtttcatttttctgtgattcatcaccaagttttggtttttaattgttctgttggggaaaaaaagtaatgagacacccatatttaaagatgaccaatggaaggagaaaaaataatacataatttgtaagagtcttcagctttaaatagtactattaattttatattaatttatagtaaagacatcttaatgggagtcaccaatgtggacggtcttaatgagctcgagtcctctgctttggattctactcatggagttatatcattttaacattgggatcaacactcatttttgtcgaatatatatatatgttgtagatggccactacaaaaatatagttagctatattctttgggactgtgaagtgtagcatagtggatatccatgacatgaaaaacctactacttactggttataagttataactatctatatttttgtgtttactttgaagtgtatggtagtagatatacaacatgcaacctattgaatcaaatatcatcaatataggatggggtgatatataagcagactagaaatcaaatctcatcaatcacatatgtatttattaattcaaaagaaatttggctgtaaaaacaatggaatcccgaaaaagcatctctagctaaaaaaaacatttttcacatccttaacttagaattattttttctttcaaataaggaatagctaaaactagcatatgctctaagccctatatgtacccatatccacatcacaaaaaaaaatagagataacaaagaaacaatatttgaaatcgccaacgagagaaacaaaaagaagaaaaaaatgaagacatttatgataatcttgttggtgatttgtagcatcttgattgtaggacgagttgaggctaacgataacaagagaaaatatctactactcgatccatgcttgcgtcctaatgctccaccaggatgtcatcgtcagccatataaaccccgtactccggttaacgtatatagtcgtggttgcaccacaatcaaccgatgccgccgagtgcagaatccgtgagatctaatgacatattttatggacttatgcaaccacataagtcatattatgtatatgtttccaaaaatttcataggattgatcttcagtattgttgaggctcatgggggtttgaatttaattgattcatgtgtaatagtaactaattttttgaacgacgccaaatgacaatttggatatatgggatctaattttttcacaatatatgtataaattctttgatatatgaaataaaaattgaatttcattttttgtctacttttattattgaaatatgaaaaagccaaagaagtacaagccataaccaaaaaaaaaaatccagatgatcaacaaattaaccccttcataattatatttagtaatttaagtagattttgcgagagagaaatgaaatgtgtcatgggtaacttcatctcacgacccccaaaagcaatatgaactcgtgttgtctatgcctggtatcgtagctctccacgtttacgattgcttctacaaagatagtttggttctcgtggtatggtttaaattttggtcccaactttggaacctcccttctcttacactcttgtaaataatctgtcatggttttgttcaattgatttatcatttcatcagatttattttgtatacgtaaatttgtgttttgttatcatttttgttttgttttaattagctatgttgagaatgttcaaactttatattataagattaataaaatcttgatttctttttccggtaagagaaagaatttttactttttctaaatatatatatgaacaaaaaaaaacccaatagaattaaggttatgaacatttttttatacctaagaaaaacaatttaatatagaaaaagaaattcttctttatttatataaatagagatattattttattatattaaaggttaagaacttttatattttattttaagaatttatatatacactaacagtatttaaacttgacacataacagtaatttatgttttacttgacacacattatgatctatgtcttaataactttgaaaaccaaatttcatgtaataagattttagttacctaatttttagctaaaaccaaacacaacaaaacgaaaattgtatcaaaccaaaatatatatagttttgtggcaattttttaaaaaaataacaaattcagaaaaaaaaaaaaacaaagaaaccgaaccgaaactaaaccattaatcgataaggctggaaattagagagattaagttatttttggcctccaaatgattccgataatcttacaaaacaggcaataaaatagtcaaaatacataactttatttcctaataaaaagatctttaaaaaccaaagatttgcaatgaagatttgataccacaaacaaaaaaccattactcacaagtgtcttaatacgattagttgatcagatcagaaaaatacgaccgccacgtcatcgaccgcatgccctcgtcgtgtcttcgctcactcaacaaaacgtatccttcgctttcacgaacgtcgcataaaagctctgcaaaacacacacaacacaactgagagagatcagagaaagagagatttgtaataatcaaatcatg

SEQ ID NO: 2681 - DNA, 3000 bp, Unknown
  misc_feature (1)..( 3000): cDNA_ID_2049052_gDNA_ID_1620575_Annot_ID_160953 3000 nt of promoter + ATG
accctaagtttgatgtaagcattaagcagagagcacaagtatttaaaaggcaacagaggctctctcattctcactttctcccagtttctctcactttctgtaatttccttgcgactcacgattttgttctcagaacaacttgaagttttcggttctaatcacaaattcacaatgactagtatgtattacaatcacgatcatctcactgcttcagggaagaacatgtggtcgaatttctatgtactggttgatacggcggtgatgttatatgaagaagaaaaacaacgtcgtaagattgtctctgaagaagaagaagaaacacagaagagaatcttttgtctcttcccgagaaaaacaagatcgtctttggtaaagagacaacaaaagcttagtgggtttttaacttcagcttcttcatcgcttatcgatcttaaccagttcccttctgattctgagatcgaagacccactaaaccatcatcagttgctatcttcttcatgtttcatcgccgctgatttcgagacactacaaaaccctagttccgaaccttgttcttcactcgtactctttgattgcaagacggctgggtccgagaagacagagacgaaagacccaccaaaccctaatttcccatgtcctctgtctttgtgcctaacggagaacaaaaaccgcaagagacgtgctgtggaacagaggaagcgtactggtggagtcaagaaagcaaaggttgctcctttttcacaaacggcgagagagacgcctgagtggcttgtcaatgtgatgagagacatgaaagaagccaaagacgctaaattgatctttgagaagactctgttcgttactgatgtaaacccaacacagaaccgtctctcaatgcctttcaacaacttactccgcaacgatttcttgacttctgtggagtcaagaatcatagacaaagacatcaaaaacgataagaagattggagtgggagcgattcttgtggatcaacggtgtaagaagtggggtgtgatgttaaagagatgggagatgaagaaggaatcaggtaaaggaagctggaattacaatctaatctgtgggtggaacgatattgttgaggctaatggattgaaagaaggcgacaacattagtctttggtcattcaggtcctgtggaatcctctgctttgccatggaacagagaagcccttcccttgctctctgtctctgctaagttccttgtgtctcaacttgagactataaattggttgatcaactcgtatggcgatctaagttcaggcgattatggagtttttttttgtctagtaacttgttccttctattgtttagttaagaaaattaggatacctctctattgttagtaacttgttccttctattgtttcagatcattatatcatgaatctggtttgttgtttggtctactttaatactgcattgttacctatcgatttcttgtaatatatctcaaagtataattttgtgtggtcaaagtatactgcgttgtctagtaagaccatcatgactcttattattccttaagcacggatctttaatataatgctgcaacagatatcacctgagcactgtccaaagttttactggccacctgaagtatttattctcaaagggctttctctatccttattactcaagcttgcatcatccaaatcctcgagaactccagagaatttaggtctagttccttgtgaccgaaacaacattacccgagaggcagattctactatgcattgtttaaacatgtccaaagcaaaaatactttgccatttccaagacagcaagttgagatgctaaccaagacaagacttgaatcaacaagactggacactgtcaaatgttatacttttgcaactactcatactcaccaacggcattagcatcagacagactctataaatccacaagcttctttcacagccgattgtagacacaacccgaaagagtgattgtcgtccctgtggagaagagaagagtggtctaaagctagattttggaatctaagttcgttctttgacattcagacaacaaggattgtaaagaagatagtgtaccggagatggagtaggtgttaggattttgaagaggaggtcgtaggattagtggtggaagaagttcggatttgggttttcatattaacggcgacgattagtgctaggttaaacaaaattgtgctaaaccgagtaaaattcgtaaataaacctagaaactataatgtgcatttacattgataagtgaattatatataagacgaaataactataattacagccactaatgtcagacactaatcgaaaaagcaagcataatctcctttcacacattccataagttgggatatatatacacagcagaccacatattccacatgctcctatcctacgtgacaccatcataaaacgaatttctatgtattttatacgtgaacatcattgaattttatatgtattttacacgcgttatcatgataaaacgaatttgaacatctttggatcttttatttttctcgtgcgttatacatgcctggaaattgatatgtatgaaatgtcaattcaaatgtgaaacttgcgatttttaaggacggccacacatataaaatcacatgactattagtcgtactatgtactaatgtctctttgtcatgtatcatgtatggtgtgaataaaataacgtacagactttctcaatagaaacatcaacgaaaactcaaaatatctccgacaatttgaaggaccatctttgaattagctagctaggccctaaccaaaccaaaccccacaaaattgatgatgtctttggctcttatcaatacgtacgattacatggagtctaaactctaaaggttatacgcgtttactatacatacatatagtatagtaaatgaaagcgacattacctcatagtccagaccatactactatatatacgagtaaaagaaagatacattctcattatcccatacattaaacaaagtgatcaccatg

SEQ ID NO: 2682 - DNA, 3000 bp, Unknown
  misc_feature (1)..( 3000): cDNA_ID_2049039_gDNA_ID_1620575_Annot_ID_160957 3000 nt of promoter + ATG
ttctagatgttgattaaggatacattataaaagtaattcttacatcaattagaaaaagaaaaagaatttaaataaaaaataaaataaaattgattacaatttataactatacagagcggttaaataaagattactcttctgtaatctcacaataattatcaatggtgttagaaaaggaaaaataaaataaagattactcttttgtaatctcacaataattatcagtaatgttagaaaaaaaaaaaaaaaaaaactagcattaggtttcgtaggttatatataaagcataaaaagaaggacacaaacaaaacaaaagaagcaaacgatggatacattgttcgtcaacaaagttttaattccgttaggacttttcgccgtatcttgtcttttttcccttgtggtgttgaccattaagtgtcgtcgttatgaggatccatacgatctaggaacgaagactcgttgcatcaatctccttcaaagtcttaatttatatttgtttttatgcacttgtatgattcttttcttctttttctgtttatgattatacgtttgtatttaagatttgtatttcatatatgtaagattttgtaaagtttggaatcgtttgaattaacgtgaaaaaatcatcgaccaagctgtatcgatagtctattttgaattagggttataaattttcttcttatgattctttgaatatatgttttggttgccaaacgaatctttacttctcgcatggtttaattatattcaaaatccatatgccttaagcctatcgtcaagtctgtggctttgccagctccgatcagtttcatgatcatcaaaacttcaatccaaaacacattatcctttctttcttttcacgaccaagatttttaactttttgaatcattcaatacccaaattttgctttgttaacccatgcatgtgtcccttacacggactttaagataggacttgagaaaactagctagggtaagtgggtaacaaggtctctgatctttatacatatatcacaagtgtttgatctagtaatgttatatgctcttagtgttaacgctgaaatccactactatatatgagtccttctcgtgtgagctagctctaacagcaattgcatgcttcaaaataattagatgtcatatgcacttgcacattagagcatccacaatgagaagttattagcaaaggctcttaccaatactttatgaattgattttgaaaattttgaagttaagagtttgggtaaaagtttaaatttttttgtcattgtccaataacaatcagattgtgagaggtaaatgaagagttctcaaatgtcttgagtgtaaatagcgtttcctttatggtctagcttgaacaccattacaccttttgttttcatgatctttcgagaggtcttcttgtaccacttaaccaagaaggtttcattggttggttgtgactccagcaagaatacgctcgtcaagcaagattccagaagctcgcgttgggtcttggtcggttttggagccgcaacctctgattcttttgcttgtgtctgtggagatcccaagatccgatgatgtggcctccagatccaggaatacgaaacatgtcatctctcttggaaaacatgacttgggaggagtaaaagcaagggtttgcgattcttacgttggtccacccctcaaagttgctttaagcaggtctgaaaaagctgagttgaggtcccaaaaacttgacagccacaacacagtcctcgtcctcaggagaagatgatggtgacaatttgagtttggcaacgaggtaaagttacaaaaggaggcgacgagtattgtattggtactgctatatccgactcccatgtacatgtatcatcaaagaaagataacattccgtcgtgaatgaaactagctgccacgcaggggtaagctgaccacattatttcacatttatcctcagtaaccttctttgccaaacaagtgtggcgaccttgagtcacgactccacagccgttgatggaagaaggaggaaattgcagtgaagaggattagaaaccattagagagaaaatgagaggaggatctcatcaacgcaggttggcctaggcacaacttggaaggctggttgagaaacagagacatgataaaatagtgaatgatcgatcttagcaaaaggcaagagatttgggaaaaacaaaacccttattgaagaattcggtagtgatatactgatatgttaacttttagtcgctacattattaatacagaggaaatggacttgctcaccaagtttaccgtctccaaattaggtaaggtcagacacattaatacagatgaatgaacttgtaatgtaaattgattcgttagtcttttttcatttacgccacaaaaaaaggaaaagaaaaaaagaagaagatttgcatatgaataaaacttgtgagttgttgaggcatttggtatttgagaagaaaaaaagaagggaattaacaatggaaactttgatagatgtgatcatctttagtttagaaccctaaaatgcttttacacagatgcttggaaaacgtagatgcgaaccctagacagttgtgttttaagcgtttttgttataatagaacctttgcttcgtcaggtggatgtgaaactccagaagtcccaagtgtcgccatttttgttgaaaaatcttgctaaggatttggggaaaagtctgaactgagaagttttggagggaagcgtagggataaaggaagggagaatcatgggcttaatcatcatgggctaaaccatcatagggccaatattatgggcctgtatggcccaaacgtaatgaatacttcttatttaaaagcctcaaaatcagttttactaatcaaagtaactaaactagtcccctaataaaattgtaaatgttgtcactaagcacctctgaaacattctttagaaaaagtcataagcagtgcacgtcggttatattgtttttctttctaagccaaaaggcaaaaagaaaaagatcagagaagatg

SEQ ID NO: 2683 - DNA, 3000 bp, Unknown
  misc_feature (1)..( 3000): cDNA_ID_2049048_gDNA_ID_1620575_Annot_ID_160954 3000 nt of promoter + ATG
gaattggcaataaatatgtgactcatatatctttaaatacgaaatttttatctcattgtttttcaaacgccaacttatacatatagtaatcacatgtcatcaaaagagtcacattgtacttaatcataaaatataaatgatatattttaaaatatatatatgagctgaaaattcaaaagcctacatgctaactaataaggaaaatttgttaatatgattcaaaaaatagtgccagattggtgtaggtaataactatgggaaaatacgtatacataggtttctatttttatttttatgtgtgagtaaagtttagtgtttaattagacactagctacattacctcctcttgttcgtcgattgctgatagtgatgtcttatgttcaatagctctcttcatctgtgcagtttcaatatccctttgggtgcacacagacacaaactctccaatagccatactacaagcacccgcaacaaggccagcaaaaccaacgagaagcattgctttgacgtcttctttgatagaaccaacacccatcattagcgaagcgactgtgaccagaccatcgttggctccaagcaaggcagctcttagccactgagctctctgcatgtagtccacttcctccttctctgctctcggacgggttttctgattccttgggctgtttgtttctgaaagctgaacgttggaagtcatggtttggatttagtacaaagtagtgatgcttacttgatcttgattgatgaggaggcttgtggagaactcacgccttatatagaaaaatagagtatatagctttgtttattaatagttgttacctaataatatttttataagagaaaaagatagcatagtggtagtggtggagacggtaacgttggacactacacttatttagagtggaaataagaatcggatggataaaatagccacccaaaagtgtcatcgtgataaacaatactattggttaatttagtgaatcggattacaatactatttagtatttacctgtttccaatatataagaatttcgaacttttgaatgcgacctgtttgatatatacacacgtacataaccaattcaaatcttttatactttttgcttgagttgattcgttaataaacttgcaaatgaaaatattagtataaaaatttaggatgaatgtaaaaaaatgatattatttggtatttaccaaattatgttttataaaaggcaatttcactttttcatactaaaaagtcatatttacaagaaatatgaaaactaaattaacctggtgaaaggaaattttaccaggttaaagtgattctggaattttttggttaaagtgacgtataaaagcctaactctctagtgattataagtttaacaacttgaaactaatggatttagctaagtacaaccaacatttttgtaattttttaacctttatattgaaagcacacatttgtttgtgtgtgcaatgtcattgctaacatcattttgaatgctatgtcattgctaacatcatgacatgcataatctattttatgctttaattttcttaatgaaatcttatatgcactttttcttatagaaacaattaaatgtttttttttttcctttttgttgacagcagatttatttattaaataatcgttacccaaaaacatatgtactgcttagttaatagtagcaaggacttgcagtcacactcatacagtcatactatactcccaatgttccattttataagatgttttagttttttaattgtttcagtttacgagatgttttatatgtttctgtgtaataaataaatgtatgtaatattttataaatgtatgttttattcaaaaataaaaaaatgtatgtaatattttgtgatttttatattatgcgggtttttatgataggttgcaattgcatggtttaaaatatattttttagtgaaaagaaatttcttaatatatgtacttttaaccaaaaaatcttataaaatgggatatatagagtatcttttgccgcaaaatctagtttcctatcaattggaatgatttttttgaaagattttttttccaaactaaatgatgtacttatcatcttatgcaaaacaaaacaaaaaacaaaaaatatatttggcaaccatctgtatgttacagatattttgttatatgcttatttactttcttcatttgttagtgaaaaccttaaaccatcattaacagtaaaacagttaaagtattttactttaaaggtttgcctagctagaaatttttactttcttaatttgtaagtgaaaccccttaaacatcatctcagtaaatgaccaagtaaaccataaaacaaaattgatacactagcagtaaatttccttcatatttattaagataactcatcattgtgtcgactgtagatcagtttttcttaacttcttaaaaatatttattttcctattcttttattaattaagaaggaatgaaccaaacaaacaacacaagaagcatagttttaaaacaaccaaatagacaaagaaaaaaaaaaaaacagagcacgaaaaacaaaacccatttggatacattgtccggcataatatttgataaaagattaaaatatcactgaatatttctgagtaaacttatatttataaaggaaaaaaaatgttaaccaatcaaactgtaaactaaacaaacctgaagcaaaaaggcaaattacttacctgaaaaaaggaaataccgagtcactgagtcagtgactaaatcgtaattataaggttaatcagacaacggctataattagttactaatcgcagtaattaaactactaatctcaaagaaaaaaggaaaccctaagtttgatgtaagcattaagcagagagcacaagtatttaaaaggcaacagaggctctctcattctcactttctcccagtttctctcactttctgtaatttccttgcgactcacgattttgttctcagaacaacttgaagttttcggttctaatcacaaattcacaatg

SEQ ID NO: 2684 - DNA, 3000 bp, Unknown
  misc_feature (1)..( 3000): cDNA_ID_3069136_gDNA_ID_1620575_Annot_ID_160945 3000 nt of promoter + ATG
ttgtaacatgatcggatcatctagcgatgaattggtttatccaacgaattactaggacttaatccggattattgatgtaatcaaagaaaaatataaaaatttgcatataggtgtaagactaattaaaacagaagaattataataaccaaatatattgaccattatgcgtagttagcggttcatactagttagttgtatcataatcagagctcaaattcagaaatgtacgttatatcagtttaacaatggtaagccaaaagtcatctatagacaaaattttcgaacttttaggtaagcccataattaaccatgaatatatacgctttatgggtaggtcagcatacaaagatgttttcttatgtctcaagaaaatttttaccttgaggaaacaacaaaaaaccaaaatcctcctcaagtctcatctacaaggtctggaattactttcagtctttcacgaaacatcaccgataaacaaaattccaacttaagaaatttatgggggcaaaagagaaataatcttaagttggttaagactattctttgttcaatttgccgaggactctttcagggaatatcttctcttcatgagctttcttctttgctaaggcttcttcgtcgaggactttaataggagaccattcaggtaacttgaatgactccatgttacggtagctctctaacattggttttcctttaagggtagcataatcaaatgctgtgcctacagcagcaaaaactagagagtagcgaatcgcacccttaggacctcctgtaaacaccgataatatgtcagttccgagcttaataaccctaaagagactatcatgaaagtttcttccaattgatttaaatatggcagagttattatgatttgatctcttattgtaacagaaaatagcacactctcatggtcagactacttgagactgagagtattacagccaaatcttcagggacatggagtagaatagatactgccagaaaagaattcaagataacgaaccttgaagtcttccaagcaaagcaccactaaaaagtcctccaatagctgagttcattaaatcatcgtgttctgatcttcgagttattctcacagattcacgagctcctaccaaaaccaaaacattgcaacaatcacataatattcacattacatgagagtccaccttcttagagaaaatggaaacactcagtttcaatcttgataacacagatggaaaagagcaggtaccgcaatagcaaccggcgacaatagcaaaattagcagcgtaaacagtaggaatattgggatgagctatccggtgtttagacactaaaccagctcctccaccaattactcctgcacatgaaacatcttctcagtcactgtgatgcaaacatttcttacatgttctatgcaataattaagcaattgaatagccaatcaaagctggtgaactgaattatctatacaccaaaagttatgaattcttctaattaatggagcaataaaacctagaatcgaacttctagtaaccgatacaacaacgagaatctaattgcttctttccgatgaactttggctactttccgatgatatgtgcaaccaaaaatctcaaaattgttctaagatggaactcattatagagtatcctagttcttgcgatcaactaaacgtaataataaatcccgaaagtgagaagaagcattgcgaaacctgctaaaagggaagtgatcaacacacgcttcgtcggagttccattttcctgcacaataggcgtcggaggagataacgcctgatttgtttgttctggggatttccgatcacccaacgccatttttgacgccacggaacttcgagagaactccaatttcaatgcggtgttgtgaatcgggttgatctaaaacccgagattgaaccctaactcgaaacccgatcataactcttacataattaagaaattgccctgaaagatgatttaaagtttattttattccctcaatgtttgacaaatagatatttggcccttcacctctcaggagagattttctttggaattaaattttcctctgttttaggtgatattttccttttcgttacctttagttccttgtgcaaaggaacaactatagtatgagtcttccgattgcaagtgattctttttaaattgaagtaaaaattactaagcaaatactatttatttggtgtttatttgcaagtgacatgtatgtatagtactaatatctgttttatcttatacattgggattctctaatattggagatcaaaattatgactagtaatacaataattacgcaatacatatgtagtactaaaacaagaatcttttcactatgtagtactactatgtcattgagaccatgagatattccaatattgcttcagtttcactcactctctctctttctctaaccattttgcttttaccaaattgagatccgagtggataattggagagagaaagaaccaagtcttctcaagatacctctcggctagtaaaaagttaagtttttaaggacaaaagagattgaaaaagtaagaaccattatgggtccatttagaagaagtagaaaagataaagtgaagagacaaaagaactaataatgatctgcacttgagtacccattatgttttatttcccatatgcaaccactaagagtactctctttggtttgaggtattagtatgaactaactagctccgtgattgtaggtgttttaggataagataattgaatgttgttagtacactcataacatgaattgggacagtttggttaggctcttgcatatgacattatcagtttggttctaattaaggagataaacatgctaaaactttgatgatctatgtttcttaggacttgatcacaattcacaatcactgcaaattgttgtaattgttctgatcaatctgtttatggttttgatttttggtcaaggtaaggaacatttagactgatcaaaagaaaaaggcaatggatggtggtggttattgaa

SEQ ID NO: 2685 - DNA, 3000 bp, Unknown
  misc_feature (1)..( 3000): cDNA_ID_3069140_gDNA_ID_1620575_Annot_ID_160944 3000 nt of promoter + ATG
gtttttatgaagtatatgaagaaattttggataatttttatacactttgtaaatattatattactcaagcggaaaatatagaaaatgcggatatctttgaattttttacccaatcccttacttgttaaacaaaaatttacattttaaaaaaggtaaatatttcaacggtaacatgccttatgggacaagtaattctcaatcgatacgggccattacgggttatccgtcccaaaatatacaaggataggaaagaaagttaagatcaaagctaaacacatatggcaaaatcctagcctttaccttttattttcccttacattgttcatagaacttgcccaaaacaatggaaacttacaagttacattgtttatagatcccaattaatacaaagttttattattcatctccttttcaagctttcttggaatgtttgttagcattgtaaaaacgtccaatgcctttgaaagccttagatagcttcaaaaggttaggcctcgcaattcccaaatgcatcttccctgttgagaacttcaaagcttgtaaacaacaaagttgctgatgatcaatcccatcatcatcttcctcctccactataacttccttctctatactctttgtcttcatcatcgacttcgtcttcttcttgagcttcttcttctcttcttcggtttgctgcttcttctctgtttgtgtctcgtaagtctcccacagctgatccatgccttgtccaacgtcagcattgtgtcgttcttcaaatagcttgcaagccaatgttctcctccattctttctcttttctcattgatccaaagctttggagagaaacattatcttcttcttcgttcttagtcactacatttcttttaccttctccttctccgagaaaattgctcagttttgggagatcataactttcattattactatctccgacaaggtcaactttttgagctttggattcttcttttgtcggctcttctctgttatcgaggacaacgtcacttttatgcttgactttttgttcttctacttcttccttttcacatttcttggtttcttcttctttctccaaaacaatcacatcctcaaacttcaacggttggatctcaacttgctcctcaagggtctcatcggtcaaagattccgacaccgtgctctcatggctacagaatttgtcaacaaacgtcaattcatccgaacatatctcattctcggacgcacattccatcgagcaagcctcgacgaccatcttatacgcttccaactcctccaatgacttaaaaccctcattgttgacatcaaacttgtgttccaagacacttccaagcttactacaaaaggagaaaaggaagcttggttgtgtttctagtgattcagagtcgagacaagtgtcttgaacatgtaaagtactcaataaggcaagaagcaagagtgtggtggtgacaaagagtggtgaaagaaaagagagaatcttgaagatgtaaggtgaaaagaagagcaagtaagaaaaatagaaagggtgagtgaggataaatgagcaaaagagatgaaagtcagagagaagaagagaagataaaccaatcttattactacttggagactcttcttgagatgacaatgcaagttcagacatgtttgcagaaaaaaccttgtggagaaaaactagccaagtttttttctctattgatctgctctctcaagagtggtgtgggtataagaaagagatgtgtgagaaagagaaagataaagaaacagtgacaagaaaaaaagaaagcaacttttgaaagttacctttcttttcatctgtttggccatttcaataaccaccaccatccattgcctttttcttttgatcagtctaaatgttccttaccttgaccaaaaatcaaaaccataaacagattgatcagaacaattacaacaatttgcagtgattgtgaattgtgatcaagtcctaagaaacatagatcatcaaagttttagcatgtttatctccttaattagaaccaaactgataatgtcatatgcaagagcctaaccaaactgtcccaattcatgttatgagtgtactaacaacattcaattatcttatcctaaaacacctacaatcacggagctagttagttcatactaatacctcaaaccaaagagagtactcttagtggttgcatatgggaaataaaacataatgggtactcaagtgcagatcattattagttcttttgtctcttcactttatcttttctacttcttctaaatggacccataatggttcttactttttcaatctcttttgtccttaaaaacttaactttttactagccgagaggtatcttgagaagacttggttctttctctctccaattatccactcggatctcaatttggtaaaagcaaaatggttagagaaagagagagagtgagtgaaactgaagcaatattggaatatctcatggtctcaatgacatagtagtactacatagtgaaaagattcttgttttagtactacatatgtattgcgtaattattgtattactagtcataattttgatctccaatattagagaatcccaatgtataagataaaacagatattagtactatacatacatgtcacttgcaaataaacaccaaataaatagtatttgcttagtaatttttacttcaatttaaaaagaatcacttgcaatcggaagactcatactatagttgttcctttgcacaaggaactaaaggtaacgaaaaggaaaatatcacctaaaacagaggaaaatttaattccaaagaaaatctctcctgagaggtgaagggccaaatatctatttgtcaaacattgagggaataaaataaactttaaatcatctttcagggcaatttcttaattatgtaagagttatgatcgggtttcgagttagggttcaatctcgggttttagatcaacccgattcacaacaccgcattgaaattggagttctctcgaagttccgtggcgtcaaaaatg

SEQ ID NO: 2686 - DNA, 3000 bp, Unknown
  misc_feature (1)..( 3000): cDNA_ID_2167652_gDNA_ID_1620576_Annot_ID_160986 3000 nt of promoter + ATG
gcttttaagtttttctgaaacagttatgttaaaatgtatgagaaatttgagcttcattatactctattttgaagacatttcttattgcctatttgagaattagctaaacattaatattgccttaacagtaatgttaacggtaatataaagtctaattagtctaagtgagaatcaacataaatagtcttaccttaagtaaatgttctcaaatttcagaaactggaaactagccgtttgattattggaaaagaaaggaaacgaaaaggaatacaaatagctaaatctttgtgtaagatttcacaatctcttcttttgtgttatttgtttatatttgtgtctgagaaaatctgagatgaatccaaaaagatgtgcagcttgcaagtatctgagaagaagatgtccaaaagattgcgtattctcaccatatttccctccaaacgatcctcaaaaatttgcatgtgtccacagaatctatggtgctggaaacgtttccaaaatgcttcaggtatatatatctatacacatctttgtgtatcttcttctaatatcctatttaagatcacactttatgcatatatataagtaagtgtattcatggttggattttggtgatctttttgacagcaacttcctgatcagacaagagctgaagcagtggaatctttgtgctttgaagcaaaatgcagagtagatgatcctgtttatggttgtgttggcattattcatttacttaaaactcagattcagaaaactcagaatgaattagccaaaactcaagctgagattgctgttgctcaaaccaaacttagccaaacccatatttctgattttatgtaatatctctcagtttcaacaataaattctcctctgcattttcgtttccgattgcttctacttataagatagtgatcttctttaactttaactatatcagactcataatcaagaggccattagctatactaaaaaagtgtttcataaaacacaaatgtaaacaagttcgaatcgagtttattattatcacaaatccataactaaagggtgacaattatacagtcttgagtctcttggccgatattttgagaatcataatgtaaaaagataaatgaatctgtttacaaaatacatgacactattacaaatcgaatttactattttccctgcttaagctcccattccttttacaagtacatgacattacactacttttgaaggagcttttcttgtatagttacaaagatgatcaatgaatctgtttaatagacgaaaatatatatgtcaagagacactgaaccttcaaaatcggcctgtatcccacttggtgaacataatttgatgttggctcggagtttcgttcgtttcattcattccatccgtgtattcattaccaaatgaagaattgaagtctggatcagaatccatggattcaaccaagtttgaagctttctccacctcaagggcttgctccaacaattggatcatacaagcattatgttctcgaataggtgagataccgtaaacttggatcatccgagtaaagtacctcaaaccatcctttacatttccagtattcgcacaagcggataagacaccaacgaaagtgatagcgtctggttctacgcttgcttcttcttccatctcttcaaacagagacaaagcctcttcaccacatccatgtacccctaagctagtgatcatcgagttccaagtcgctaaactcttaccctgcatcacgtcaaatactttccttgcgtcctgcaagcttccacatttgctatacatatcgatcaaagcggttccaaggaaacaatcaagcacaaaaccgtttttatgagcatagtcatgaacccatcttcccatagacaagcttcctaactgagtagaagcttgcaacaaattaacaatcgtaaactcattaggcttgacatcatcaacctgcattctcctaaagagctgaaacgcctcgtcgggtctacggttcttaacgtaagccgtaatcattgcagtccatgaaacaacgtttctcattggcatttgattgaatacaatctctgcagaatctaactgagaattggagacaagaccataaagcatagtagtccatgaaacaatacttctcccaggcattttatcaaacaccttacgtccactatctggtttcccacacttaaagtaaagatccatgagagtgttttggaagaagacatcattaaaaaacccagctttaatagctaaaccatgaacttgggtacctaaacgaatcgacgaagaagcgagacaagctttgataacaaaagggaaagtgaatttatcaaactgggattgatgagagatcatcataaggataaagagaagaagagcttcacgaggtttgtgattaacagagagagatcttatcataaggttccaggtaaaagtagaaggagattgaagttgattaaagacgagagaagcgtattgggtttctccgaaggaagaagaaacacttatgagctgacgaactagtaactgatcgttggtgagattgtgtttgatgattttggtgtgaatttgtttcaattgagagaaatttgaacaagttcggagaaagtaagaagcttcgggagatcggaatggtggaggagagaggaggtttggtggtgaagacggcgacggagccgccatggattaacgataaatcaccaaattctcacattcactctttcctcgattgatcgtgtgtggatgatgatgaagctgcatataaaccgaactaaaccgaagtttggctgatttggttcggattcggtttattgtgtagcaagaggaagcataaccagattgattcgactaggaaccactaaaccaaacgaaatacagaaatttcgaaccaaaccggatcgattctacgtgtattaaacgtcgtcgtttttgttagctaaaaagaagaaatagtaaatatccattagaagaagaagacgaagcagaggaatctagggtttatgctacattgaagcaaag

SEQ ID NO: 2687 - DNA, 3000 bp, Unknown
  misc_feature (1)..( 3000): cDNA_ID_2992438_gDNA_ID_1620576_Annot_ID_160996 3000 nt of promoter + ATG
acagtgagttgatctcttttcacaattcttcatgttaaactgatgaagagaaatttcagtattttaatttcctactttctagattgggcctataccagctgatgatggtattagcaaagagattatcactaaacttacaaccaccatgaagacaaatggaacattttacacagactcgaatggccgtgacttcatcaagcgggtattagatgcaaaattcatgtgaagtagtttatttttatttttgtaacaaggggtattttgtttttattgtaacatactttgttacattttcttgcagattcgggacttcagaacagattgggacttgcaagtgtaccaaccggttgctgggaactattatcctgtaaggcatcaaacccatctgagattccttctcgtggtgtactaaggtcttgtactagactgagctgcactatatctggccttttgtctaatatatatattttcttccagctaaatctcgggatatacatgcaagataaaacctcagagctatccgtgttggtggatcgagctgtaggtggatccagcttagagaacggccagatcgagttgatgcttcatcggtttgtcaactaactttctctatataaccaagacaagcatatgttgttttgcttgtatttcacctttttttcattcatgtaggagaatgcagcatgatgacattagaggtgttggtgagattcttaatgaaacagtctgtctccctgaaggatgcaaaggattaacggtaagcttaagttctcatctcatttttagctgtccaagttgcaacgtatcagcttttaagggaacatgtgacagagcttgtttccaaggtggtattaaatcgttatagttggtcttataaccgttatggtaactctgaattgttttgcagatacaagggaagttttatgtacagatagataaacctggagatggggcaaaatggcgtcgaacatttggtcaagaaatttattctccactacttatagcattcacagaacaggttgctcttaaaaaaaaaaaaatacttacttccctccagttctataagatagtgaagtgagataaggtactttttttgtaggaaggagatagttggattaattcacataagacgacattctcagcgtttgaaccgtcatattcattaccaaaaaacgtcgcattactcaccctccaggttagttggattgtgtactgtatacatgtcaaagacggttttttattagtttgaccacactcacactatgattaattctgacattttcaggagttggaaaatggggaagttcttctaaggcttgctcacttattcgaggttcttacttgtcctctctatgcgtttccaccgttaataatgtgttatagctatgtgctttttggttgtggaaatgtagtttaacactaggccgattaaactagcaaataattagagatatagaaaaacttgtattactcagaaaacccaaatcttgcagtgtcaggaaaccagacaattagttgtatagagttagttcataaaaccaaaccgtaacgtttagggtgtatttttcacctaaaaatcaaactgttttcatgtttatactcgtaaaaagctgactatgcggttgatcatcgtgctatgtcatttggttttccttaatagttccacatgtgaaataagatgagacctaaagtaatatagaagggagatggtcaagtccactaattggttttaaattgagaacccatgaacttcgacagtgttgcttttttggttcactaagcaacgggtaaaatctaatgtggaatttgataattattttctatctcttctcttaatggtttcatcgaagttgagtccttctgagttactgtcttgttaaccttgtgaaggttggggaggatagtgagtactcagttatggcaaaagtagagctcaagaaactattccacaacaaaaaggttcgccaaaaaaagacgacccttctcttatttgtctcactgtatgttaacaaaaacaactgccgttctgtttttaatatgttttgaacagataagggaagtaaaggagacaagtctttccgggaaccaagagaaggcggagatggagaagagacggctaatctggaaagtagaaggctcggccggggaggaagtgaagagaggagaggcggtggacgcagagaagctagtggttgagcttgttccgatggaaattcgaaccttgttgatcaagtttgatgatcaaattgaaatggttggtgataaagagcagcaacataggttatgaaataatacacgttgttgttgtctttttaagtttaatcggagaagagaaaaaagtttgaatttagtgtctgatgcgagtttaaaattcgggtgattgcaacagtcacgagtgcgatcccggtaggagtatcgcaatttctgcattaacatttacgtttgctaaggggtgggcattttaaccgaaccgaaccgatccgaaccaaccgaactcaaaccgacccaaactaaacccggattaacactaaaattattcggttaggcttcttctcaacccaaatagttcggtttaaaaactttcctatcacgacaataaattttgtttggtgtttacataaccgaattaatcgtaccgaatccgaacttaaaccgaaattcccaccgttaacctggctatactgaaactatatatatacgtatatatatatatatatatacatgcgatgttgacaaatgaacacaaaagtagataaactcaaaccggtagttattacattaactgtgtaataaagattcggtatatcccacccgcgaagaaaaggaatcatatcacgggttaacgaatccgggtcgggtacacggagcaatcataaagaagaaacaaaaactacgacgacaacttttttttggccttggttaaaaaattttcataagtgaacacagaagaagcggtggctctgagccggcgaaatctcctttctcatccctaaaattttc

SEQ ID NO: 2688 - DNA, 3000 bp, Unknown
  misc_feature (1)..( 3000): cDNA_ID_3069167_gDNA_ID_1620576_Annot_ID_160997 3000 nt of promoter + ATG
gactgcttcaagaggtgtcctttgtgctttgtgatgatttctccaagagagttatacactgtttatattgagaacgtcaagcagtattctgttggagatcccatcgagtttgtacttttgactcgcaagaaagattcttttgctcctacccggaaaaatgagcatgacttggctgttcctaatggtgaaaatgagatatatgatccgttctcaaagttcactttcacccaagatgttgatctctctgtcagacaagcagtttcagagttagacagttggattgcaagagcagatcctcagctcgttgaagacttggagaagcatctttatgtaaatgccgctttagagcgtttggagcagagaaaattgtactggaatgagcataagctctctatttacagcaaagtgtgcacaacggctagaaatcagactcaatcattgtcacctcctgatgtttctcgagttggttatcaagcacccatggggggccatggagcgccagatagcggctccaatgatcaagataaatcaactgaagattcttcagcggataagtcagatggagaatctcaatcaagtttggaaaagggttgtgataatgatcttggtcatcctctagaagatcaagacgcaccgtcatcttcctcatgcaatggaagtaaaggtttcctgtctcaccaaattgacaccaaagacctgaaggacaacgacgcgtacaacttttatcaggtaatcagtttctgatgcatactgttgtgttttcataaagtactaatgagctgcatgatgattgttttattgctatgggctggtcaatctctataatctgaaataaatgttattatctgttttcgataatctaggtgggtttattaaataattgtggtggttctatccatatatgcttaatttgtcttacctttgtgctcttgttgtgtacctatacagtctgttgatggtcagcacattatccttcacactttgaatgtgaagtgccttctgcatcactatggaagctatgactttcttccaccaaggtaagattccaggtcgtttatgcatcacaattctcatttttcaaagactatggaataagttccaatgggatcttcttcgttatctaatcatttctgcatgtatttgggatgctgattcaaagtgtgatatatggcacttttcgttgattaatcaagaaccgttcgtataaagatccaactcttatttagtatgaaaatcagaacggacaatacattcaagtaaaaacggttcagtacaagatgttatcatctctagtttgttgttctaatagacttctgattttgatccattaaacggcagattgagtggaaagatactggaaatggaaaccattacccaatcagaagcgataaggagacgctaccgctttttaagtcatttttctttatcaactacacttcaggtatattttctctttgttgctcctatcttctgcatgtgttgctatatcttgacattttctcatgaggttatccttggtttggtaatcttttcagatatgtgagattgatatgaaggaatccttgcctcctgatgcatttgctccatttatacatgaaattaagaagcgtgagaagcagcggaaagaacgtgcttggaaggtattctcgttctaaccataaaacacaaccccacggtctacttcatctaatatctttcagattccaactcctattggctttgtttgctttgtgtcttattctcctatgtattcctttgtttaaggaaaaatcaggacttaagatcatatgatgttcatatttcaggatcgaaaaaataaaatcaaagctgaagtagctgcagctgcagagcttgtaccattgatggccagttttgggcagtcgtcttctagtgatgactttcccccattttccttggatgactttgaaggtaaacaagaggaatctctcgtctcgtaattggattttaggtttattgatctaataagaagcttttgttgtgtctctcttaagctctgggaaactctgccccaatatcatcaagccctccaaacattggagagagaagttccttctcacatgtgacaaggctcggtttcgcagctggtcacgactccccaaacctgaataacgagccaacaaacgttcaaagcagcagcagcagcagtgaagtctcaaacgcaaccacaggtaaccactgtttttagctctgcaaattctaaataggattctcggatgacctctaaacatggtttcaggtgcaagaaacacaaacataacatcctttgcgagtgtagcttcaagaacaacaacaccaatggcaccaaccgtcaaagagcccggtaagagagggaagaaacagagccgagtacttctatcgacaactagtgtacgccgttactgaaaaggcctatggatttgtgtatgtataataatcttttcatctaagaaaaactgagtaaagaaagaaccagagattatggtgagtgagtaagtgtaaaactcaaacttgggctttgtttctttttgcaacccatgtgactgataatgaaggtgtctctcattactactagtctactatgccatttaggacaattattgagactcaatcatatgatcctcttgactcagagaactagaaaaaaaaagattggataaaatttcttccaagagtgattttcattctcacatgttacaacaaagcatgaaccttatcctttaaaaaatatcttcttccttttgttcaaacttttatcttctttgtcatagaaagtttggaccactgattttagtccgttggattatcaattattgacctcaataatatcaaaatttacttcaatgagaataagattacaattttttatttttttttgaacaccaacaaatctgcttcttctctggctataaataaagcataaactgttccaaaaacagaaccaaaaaatatctaaaatcactaaacctatcttcttaaccaaaagatcaatagattacaaaa

SEQ ID NO: 2689 - DNA, 3000 bp, Unknown
  misc_feature (1)..( 3000): cDNA_ID_3069169_gDNA_ID_1620576_Annot_ID_160995 3000 nt of promoter + ATG
ttgtttcttcttcagcaattcagattcatcaatggtgggaacaaaaccctaattcgttactgttaatgacggaggctactggtggttattcgttggctagctattatacgtctttgggtttgtttgttatctctgttcctggtctttggtctctaatcaaacgctctgttaaatcaaaggttcgaactttactaattacaaaaccctaaatttcacttccaattcccaatttcttcgattttgaaaaagcttgaatgcaatgttgaggatttgtagatagtgagaaagacgtttgttgttaatgacgtcaagaaggagccaaagcaagtagctggagagattctatctttcttcacaaggaagaatttcaatatcactgatcgtggagaaacaatcacgtaagctacaaaaagctcgaacttttcatttgggtttctgtgttttgttactgacattgttttgataaaaagatttgaaggaaagatggttccaagtagaggacaagctgctctgcttacgttttgtacatgtataagcttagcaagtgttggtcttgtcttaaccattacagttcctgattttggaaacaattggttcttcatcattctccttagtccactcgcgtaagctctctctctttaaggtctctgagactgtttttttgtcaatgaaatggtgattattttgtatgtgtgtgtgtgttgcagaggagtgtattactggaaaaaggcgtcgaggaaagaggagataaaagtgaagatgatggtgggatcaaaagggagattggatgagattgtggttcaaggagatgatgttcaggtcgaagaaatgaggaaagagcttcagcttaatgagaaaggcatggtttatgtcaaaggtctctttgagagatcatcataatgataacattttagcctcccatttttgccttttggggaatgtgtctatacttgttttattaaggttgagattaatgactttttaactcatttcccatacttcatactaaacgaatcgatttgaatatagttcatttgattgagcaattttgttattttgaaagtccaaatccattttttcattaccaaagacaacaataaagccacaaatttactaagaattagtaagtatggtcttcctgagtgatcggctagtccatgattcccaaagccaaggttgttcagtactatatgccatcaatgatgagttcgaattatatgtacatatgaaatgggagatatggatacttcgatgccattgagaacaactcaaaaatcttggtgatcgagacttgaaataatgacagcattaagtgtacatctaaaatgtgttttggaacttttcgagatccttcagatgctcgaggtttgacacattttcttgaacacatgatgttcaaaggatcaaagctatatcttgaccggagtgaggtataatgattacaacaatagtagagacgaatacgtggagataagtataagtttgttatggaggctaataagaggttaaaacacgattgaaaaaaagaaaaaagaatcatgagaataagacttgatcaaacataatacattctatgaaaggtaaaacaccaagatgtagagttggcaaaaagaaactagaaaaagaaagtggaacttgttttttttttaatattaaattatatattttttaatattaaattatatattgacaacatataactttttgttaatattaaattatagaatttattttcatctttatttgaaatgttaattatatattgaaaacataaaaatagttacattatttgagtattttattatataaatcttggttttcaaagttagtaactcgtatgatcttgatcagatgatgcacaaactttgtagacatcatggttaacctaacataaatttatctaagttaatcaaaagaatcttacaaattaaaaaatgattaggtcgaggtgaagagaacaaattaccacatagtgttgtaattagacggacatatatgtttaagttaataatgggctttacctctatttgggttgagctcaaccttactcgattaacaaaaaatctgaaggtcgcgtgtttgatctacgctcaccgcaccatttgttaagaataagaaacgtaatctctatttcttaacttccgatacaccgtttcacaaaagattgagccaccggcacatcaccgattcataactctctctcacaagcgacacatacgttactaaacattcatcaaacaatgcataaaactaattacaagtctaatctcagtatttatatacaattgtttcttaatttttcttctttcttctcttcactcacgtgatcaatactaaactttgactctctcttgttacgaccacaaatttttgacgtatcgaaatggttgtcagtctaataaaaaaccgtaaataaaatctagtaaaatctctgttaaattaatagtgttggaatcaaaatattttgatttatagtgataagttatctctaaatgaatatttattattttatgatataaatgaattgttaatttgtagagacatttttttatttttttattaatatacgtatatcaccttgaataattaatacaaagatacttaaatgatactgtgtttatataaaaaaaaaaaaaaatcattagcaatcattcgattcggcttgcaataatctaaatggaccattttatcacttctccaacaagcaactctacagtgtttaattttaaattaagaatttaattatctatatcgtctcttctttagttaggaagtggataagataaagtctaatccaaattaaatcattaatacaaataaagttaagacaaatatttaatttaaataaataatcagaagaagagtgatgatagtgattcttcacgcgcctctctctcttcttcgtcctctacaaaaacacttgtctctcttctacacattgttcttcacgaacctctctgtatcatcttcatcttcttctcccgtaaagctctcgcgtct

SEQ ID NO: 2690 - DNA, 3000 bp, Unknown
  misc_feature (1)..( 3000): cDNA_ID_2167656_gDNA_ID_1620576_Annot_ID_160988 3000 nt of promoter + ATG
attttcttaccaatatatcatccatcaacctagagttgaacctcagcgtctgagccattctctgaaacatgattgcattttctcgcgagttccagcatttccattgttcaccgtaggaataatcttatcaggccttaagaactgcgcaataacgaaatcagttaatgctaaaagaagtgaaaaacttatccaggacagatacggatagataaaataatgacattcctgatacatacttgaacaaactcacgaagctctgtgaagcttgaatgctcactatatggcacccctataaaagttacataatcacctgacagtcagacaaatcggcctccacaagtcatcataatataatgatgatatttagagctaagctcatagagaatgtgcattataaaaatcaaacgcaccataaatggtgatttttccccttgaagttggttttatcagatcaaggtgttcacctatcttctcggagtaagtccaacctaaaaaccaactttacttttcataccaatagtctaaataaaatccatataaaataacagcaagggaaaaaatcacctgtgggcctaaatgccaaaactgctccatactgttctctataaatcttcaagtgttcatcgagtctcttcagggaaataatcagaacagagttatgatcatgcgaggttgacatggagtctatatagaataatacttgagataagcatcttagatttagagaaatacttcaactttcaatgacgacataggcagaacatgaagacatgtggctttcccatctgtagaaagattcttcgaaatatcatcccaaccaaaagattgcagtattcgtcttcttgaagcatttgcaaatatcttaacctgaaaactccaaaaagttagaacatatagagtcccaaaaagatggctaaaacagaaagaaaatgtctccagcattttataccccaagagctttggcaatagcaagataaacacattcttttccaatgctgtaagaaccaaccacaatcagagtcttcggttgcttcctgaggaaatcctttgtgattctcacaacataacttaacacatcttctttagaagggaatctgaacaataacataaaaaagaatggatcaaacattacattacgagcacacgctccttcaaatccatcacaagttatactatttgacaaatttttgctctcacttgtatctcggattgcaatatgttgtatccaaatacagaacatgaactcgttggttaaagaggagaggatgcgtttgcatctgtttagaagccctgaaatctccggtatgcagataacatgttccatctaagagacgaaagtgaataagagcagcaccagggcaatgattagcttcaattaaagtgactttaatcccattaatagtgtactcaacgtctagctccaatggatgaatagacctacacacagaaactaataaatacataatttcaagaaggaagtccttagtcacagacagctttaacaaagagcttacgagggattaacagagagactaagtctaagaagacgactagtgagagaggagcagtaaataggaccatgagaccaagctttagtgagaccaatgtaatgatcagcgtgaaaatgagtaaggaaataagcagaacatccttgaacacaaccatagcgaaaagcatccacagtgaacggtgttcctacatacaatcaatcacaaacttcatgaaattggcaaagagagaagcacatttaggcatatgaattcaaagaagaagaagagagagagagagagagacctggaagtttcttgtaaaatggacatggtcgaggcgagtcattgctaaacgaagagtctctacgcctttttccaagagcactcgtcgtcttcttcgccgaattcgaagcaggtgaagtgaaaggagaaggcttttgtaaaccccaactctgaaacaaatcagtttgtttcatcttcttcgttgtatcaggagaattctcttgtaaaccccaaatctgaaacaagttcgactgtttcatcttcttcacagaagaagaaacagtctcttcatcttccactaaacaagaccaatcagaaccagccttatagaaatcagacgcaaaaccctcttcttcttcattctcttcaacatcgtcgttaaacacaaaaccctcttcgtcttcttcttcttcatttacaccgtcgttgaaacgagaaccaaaacagttttcgtcgtcgtcttcatcagaaaaatccatccttttctgtctatagaggttcaatgaaaatgaaaggtcaaaagagtcaattttgacccgcccgccaaaggttgctttttggccattgagtgtctctcaacgagagagagagaagagaagagagtaaaaatggtaaaaagcccaaaacaaaacgtgaggagcagcaagaagacagatttaacaacacaaaagggcccaaccactacgtcattttgtatcaatctaacatcgccatcgtcgtcgtcttcgtcaccgtcgtcttcaagctttatcggcgattgggtcttccttacgaaaaatcaaagcttttttagaattttcaatttttggggaaagatccaatttttatccttcttccttttattcgacgccattttgtttggtaaagcttaaatctcaaaaaggattctctttgttgggagagaacttgtgcaatctgcatcttctgttagaaatcgatctggatctgaagctcctctatcgtcccttcgcaggttttgtctcattttctctttctctatgctaatcatcgaaaacccttgtttcaattttgtccatttgatctctgtttcaatcaaaggtacaagcttgtgtttgcaatcaccatctaatagcccttcttaggttttatgcttcttctcttgaaggctaagattcatatgagggaggcctgagctagttgattggttcaagtttgcagctttagatgatcctttaactgagctatcttcattctttaattaccaatg

SEQ ID NO: 2691 - DNA, 3000 bp, Unknown
  misc_feature (1)..( 3000): cDNA_ID_1019757_gDNA_ID_1620576_Annot_ID_160994 3000 nt of promoter + ATG
ttcttttcgccgacattcttgttttattctttctctccagggttatcgcatggtagtagaagcttggagcatcggtgaggaaaagagaaagagagagagaaggcagttttgttttccaaatgtcagcaattcttgcagctgccattggtggtgctgtaggagctcttgcattgattgctttgtttgtttttctcctttggttttgtgtctttcgtcgtaagaatctgtctagaacttctgagactggctcttctgatccatctactcaaggtaaatcacaaatcccatcaattctattcctctctctctctctctattgactttcttggatgatatcaaaatgatttagacttttttttcttttgttatatgtttgtgtgagttcagaaggaagaaatgttgcaattgagttgtcaatgagagaagctagaagatttgaaatggaggaacttgctcaagccaccaagagttttaccaataaaagtcttattggtattggcaaattcggcgaggtttacaaaggtttgcttcaagatggtgttcttgtagctatcaagaaaagacctggtttgcctactcaagaatttgttaacgaggtttctataattaatcttgttcaagtgtttgcttttagtcttcttagaccaagtgtattgattgagaggatatggtttatttcttcaggttcgttatctatcgtctatccatcaccgtaatctcgtcactcttttggggttttgccaagaaagcaacacacagtttcttgtctacgagtatgttcctaatggaagtgtttccagtcacctgtacggtaactctctgtccttaatgttattttcatttggtatttaatcagtttgagaaatgagtttggacgatgtaagcatcgtttaggtcttttcctctgttaggtgctggtggtaaagtacctggtaatagactagagttcagacataggcttgcaatatctataggagcagctaaaggtaaatcctctacaaaatcctcattgaagccagctctagcttgtgtcctgatcttgcatatacccttttgttatctctaggcttggcacatcttcactcgttgagtcctcggttgatacacaaggacttcaaaaccgctaatgttcttgtggatgaaaatttcattgctaaggttgcggatgcaggagtccgtaacttcttaggaagagaggatgttggtacatcgtctcacattgttgcagaccagattttcctctccccagagtaaattaaaaagatttcaccttctaagctctcatatgcttctttttagtatcaaagtttctcagattgtcccctttttttttcagggttcaagagttcaaaagattttcagagaaaagtgatgtctatgcttttggtgtattcctcttggaattagtaagtggaagagaagcatcagaaccatccccttcaagctcaacgcaaactctagtcgattgggtatgtaatcacactcaaaaccgtgccaatgtaatctattttgattctcattttgtatgcattgggagttgcagatgcaaaacttaacggattacgcagatataccaatgatgattgatgagagactaggaggtacatacacagcagaaggagttgaggaacttattacattgacactaagatgtgttgatgtatcaagtgagaagagaccaacaatgagttttgttgtgacagagcttgaaagaatattggataaagaagtgagcttaacaacagtaatgggtgaaggtactccaactgttactcttggaagtcagctttttaaagcaaccaagtgattattataaaggaaccatctttttacatatatatacatatatatatatatattatataagttctctgagacaagaaccaatcagagaacttaaggaggaagaagaagaagactgatcagctgttttgtgttaagtgtataaagaacagctgaagcttattgtttgtttgttttttccctcctttttcacttcctttggaggttattattttcagcaattatttttttgacaatgagtgcagaaaagtataactttgtaaaaacattatttattgatataaaggaagcaaagagtggaatgttgtgtgattctttgttacattttactctctacaaaagctttgaacttagcttgaaagactttattgccaagttggttggttgaataagttttgatgaaaagattccaattggctaactgttgaactaacagaaggtgataactccctgtctgaagaactctaattattatgtttgtacagaaaaactcagagctactttttcctataaagtagccaattttgggaaagattttgacctttagcttcaacctacctatgctttgatagcctttattgccaaaggggagatatagtaaccaagttggtctctaaagtcttgatcaaagattccaattggataacaacactcttggtcttggactagtatagttcctacatactccatttgctactagtgaaaataaactcaatgctctgatttattactctgtccctagttttgctaaaaaacctttgtgggcacacagaactataaacaaacagtctttggaacagattgcaaaatcaaaatcatgtttggtctgattttatgtcgggagagattgaagatctaatgataaagactcttcttctgtagatagttaactcgttaaattggtgggtctcacatttattattaccttccagattttgacctcacagaagcaaaaacacagtagtgattgaaaagcttagaaaagaaattacaaaaccagagattgttgattcttagttcatacatagaagaaagaaacagagctaatgttttgtcataaatactaaaaaccgttaaaagtatatttttaaaatgagaaaaaatgtgagccattcgatttttggatagacccatcatgtaaaggtttaagctttttttttgttagccaaagagaaagcctttttagttctattgaca

SEQ ID NO: 2692 - DNA, 3000 bp, Unknown
  misc_feature (1)..( 3000): cDNA_ID_1818871_gDNA_ID_1620576_Annot_ID_160990 3000 nt of promoter + ATG
gaccctctcatggacaaaatctttgcccgttcgagtccgtttcctctaaaccctgtaatcttcgaagataccattggcatcactagaatcgcagatgcatttatagagtcttcaccaaatcctagtgctgctaaacaagcagtctgcaacacaatgaagtaaagagttttaattagtactgttgaataagctcacaaatgaagatggttctgcttgtgggtacctttgtcttggcaattaaatcagctgctttcatatacattccttgtacaactactcttgtgtctttgctgtgtccatcttcagatgattgtggtatcaacctgttattgaagatcaaaatagttatagtagctaaatcatagaaaacttctgaatttctaatgagaacacagttttttacctgtcctcctcagttggcacactcgaggacacgatggagtcaagagatgatgaattatcttttgtctcattgcctcttgtatcatcaggtgctagtaaagaaatgcctatgaatacacacatcattcctaatatgaacattgttgttcttagcgcatcgaaaacctgtttaaggaagaagaaaattatctaagcgactatccctaaacccacaccattctgtgacaaaatgatcaaactaatcatctagatccgtattagcccgaagataaagaaaagagaggaaaagcatcacaatgtagtcaatagatgaacctgaaactcttgaaagtaaatgcatcctgtacagatggagaagaaagtccaagcaatctgaaacattggaactatgagaattgcatcatatagagacaatccttcattcaatcttgtcatctgcaacagaagcacatgaaagacgtttttacttcagtaactatatagtctcaacggcacaacaaagcaccaaaatatttcagtagcttgaggtttttttttacccagaatccggctgtactaagaaataaaagaagcatagagtatgtgaaccagctgtgcagttgatagctactagacatggccaatctcagcaagttcgagctacaaaacgaaactcaaatttatcacctgaaactatctgattttcaagtaaagcctgtagatttgcaaactcacagtgacttggcaaataaaactgaacatgatcctatagcacccgagaccactgcatatgagaaaggaagcagcattttccaataagagctaatttcttgtccaggtgtagatatcaaaacttctcccttcctgaatatttcgattaaactaatcacaaaagaggtcccgatagttgaaaatagtcaaggaagaatttcaaatgcaagactcacctatagaggaaatggtgcacggctactattaaaatcaaaataccacagtagaccaagaatgttacattgctatatttctctgccaactgttcgggtgtgaaaactgagcacagaagatttttattaggccacgctttgtgaaaaaacgacagaacaatctgttcaagaatagttacctggtgactggtgattaccaaaagctacaaggaaaacgtttccaagaactataaaggctgtagcaacgagtactctgtgaccaaggcatactaaagatattagaagagcagagacttagtaaatcggtaatgcatgttaaagattgcagcgaggtagtttgcatacttgacagtaaccattttgttcaatacaacataagcaaatgctatgttggatacaaattgaatggatccaagagctgctagaagggactgcaaagagagttcataacggtaagaaaaccaaagagaaaccataatgaaacctgacaaatcacgcaagtaggcaatgtcgagcagatcattctacctgagcagcataaccaaacgaaatgaaattgaggcaattcccaagaagaaagacaaggatccctgtaagattccaacaacattggagactcagaaaaagcttcatataaacttcaacggggaaaaggtttaagaccaggacataccaactctccaagtctgattatgtataattggcttcaatggcatctttcctccgccatcttgtagggctaacctttctctctgataatacacaaagtaagacaatacgtttcacgtgacgagatcaaatgtaaccaaacagtagtggctgaggcaaatgcagacctcattatgtcccaatttgagaaggtttgtgccaaaattaatagcaacacttccaaaaatgttgatgaaagctccgatgacccactctcccattggtaattaaagaatgaagatagctcagttaaaggatcatctaaagctgcaaacttgaaccaatcaactagctcaggcctccctcatatgaatcttagccttcaagagaagaagcataaaacctaagaagggctattagatggtgattgcaaacacaagcttgtacctttgattgaaacagagatcaaatggacaaaattgaaacaagggttttcgatgattagcatagagaaagagaaaatgagacaaaacctgcgaagggacgatagaggagcttcagatccagatcgatttctaacagaagatgcagattgcacaagttctctcccaacaaagagaatcctttttgagatttaagctttaccaaacaaaatggcgtcgaataaaaggaagaaggataaaaattggatctttccccaaaaattgaaaattctaaaaaagctttgatttttcgtaaggaagacccaatcgccgataaagcttgaagacgacggtgacgaagacgacgacgatggcgatgttagattgatacaaaatgacgtagtggttgggcccttttgtgttgttaaatctgtcttcttgctgctcctcacgttttgttttgggctttttaccatttttactctcttctcttctctctctctcgttgagagacactcaatggccaaaaagcaacctttggcgggcgggtcaaaattgactcttttgacctttcattttcattgaacctctatagacagaaaagg

SEQ ID NO: 2693 - DNA, 3000 bp, Unknown
  misc_feature (1)..( 3000): cDNA_ID_3052046_gDNA_ID_1620577_Annot_ID_161007 3000 nt of promoter + ATG
gtatttgctaaaagaccatataaacataaactaccgcttcatattcgacattttcttcacaagttcaaagaaaccttcatctatggcgttataaagctagtctattagagttgtttctcttgagctgtgatggaaaaactcttgtttggagcatcctttataaagataagagttttgttaccgcgaactaattcaagtatctctgtaacatatcttgtatggttttgtcaatctttagtacattttagacctggtttttttctctatcaggatccgcccaaaactgtatccaaacatctttatccagtccattacctacagtgaaaacgagtactaaacgtttgcagtttggttcttgagtggcaaacactttgatatgttactatatggtccatacctttctcatcattttccacttccacaaagccaatgttttggggatgtaggtagatacaaacctccaaaagaaacagagagcatgagatctcaataaatgtcctttcacctaacttatcactgtctcccacttaattctctcatttataaccttcactttcacttagtgtctctccactatcttgtcttgtttcgcctttaattctattcctctcctctggctctcatttataatcttcactccaaatgcacctttctttgtactcccatcactttctcttcgatatggtatttactttaatccgattcgaatattgtaactatgaaaaacaaaatgaatagtaaaaatatccgtttcgtatccaagcctatttttaaaagacacgtttgtataactctctctatatatagaaaggaaccacgaagctctttcaagagagttctattcttgtctgaaaactagttccctatatttcttctttcttcacacacatattctccaattcttacataaatatcaaataaaccaaacttgaaacttgttgtgcttaagatgacgaagaaatcactgacaatgtttctttttatacttctgcaatttctgctcgtaaactctctatcttcaaagcattcatcacccaaaccaaaaccagatgcagaaatcactataatgggttttgtttactgcgatgtttgctccaaaaacagtttctctaaacacagttacttcatgtccggtagtaactcagaacaaaaagatctctttaattaattccctgcaaaaactctgtttcttaacgtttctttacacaggtgtggaagtgaggatagtctgccgattcaaagcagcttcgtcaacaacgacagagactataacattctctgcaaacagaaccaccaacgagtttggactgtacaaggtagccatatcttctctagattgtgctgatgtggacagtctcgcgagttcttgtcaagcgagtttgattggaagaaaaaacttctccgattcttcttgcaacattcctggttatagaaccactacggatcaggtcttgtttaagtctcaacagtctaattcctgtgtttatggattcaatgctttgaatttcagaccgttcaagagggatcttgccttgtgtggcaagaaataaggtttttagaactacaaattatcattcactattattgaaactctctgtttgctttctactcaaatatatatatatgtctttcgtcttgttctcgaccattggctttggttaaaaacaaaatttgaatttttatttcgtatgctgtaaactattagtatgaaaaataaggaaaatgaatcactttttatttcacaacgtaatgaacagaggaaaattttggcgaatgctagaaaacacaccaaaattttacgaacaaatttacacaatttctcctaaaacgtccggaaaaattgcacgactgttactagttttaaagcacgagttaccaggtcacctgttttcgttagactgataattcatatttctacagcaaatttagtatatcaatctgtgtaaatattttattgatttataatatataaataaagttgcatctagttatgtcgtcataagtttacgcatacgtatatttggagaaaatgtcaaaaaaatctttaattgtaaaaaatagcataaaaagttttaactttatctcgagtaaaataatgcgctaattttcattaactttttattttaatcatatttttaattgacttcgcatttttaatcgctcattttgttgactttacccaatatgtcacgtagttaagttgactaacaaaacaaatttttagagttaaattttcgttgagatgttatgttaaactacacaaaaaaacattgtttaactaacaaataaaacttaaaatgaaattcaatcttcttactacttagataaactcatggatacgtcaatggtgacatacaaaaagtgtatattagagagtaactcaattatattatagtgatttagccctaagtttttaattctagaaaatttaaaaattttaatgattaaaacaactataagtttttaatatattggatgtatattattacaaacaataatatataagataacttgtacatgattcaccaaaatagtctagttgaaacaactataatttgaagttaaataggctaagttgaaacaactataattttgagattcaactattcttgggttacggatttttacattcttattaaaatattgtgttattggtttggggggttttaaatttcctcaaatgaatatcttcttatacgaaaagattagttttctttgtaattttattaaaatgatgattatatttagatgtggtcatgtggatgaaccaccaccagtgcaccaaaaacagaaaacgacgcctaccaacttgatgggcttttaatagatatagttagttaggcccagtttagtgttaatacgataccgtttgacgtagtttaacggccaccgacacgaacgaatccaaaacggcaccgtgtcaatcgcatccaaagctctgatgtaagaaactctacacttgttcgagtttcggagaaaagaaacgatgaggaagagatg

SEQ ID NO: 2694 - DNA, 3000 bp, Unknown
  misc_feature (1)..( 3000): cDNA_ID_3069193_gDNA_ID_1620577_Annot_ID_161014 3000 nt of promoter + ATG
ctttcaaatatattaattataatatttgtggtaaaaagaaatagtttaataaaaaacagaattacctcttatatatttttaaaatttggatgtttgttaagttaaagttcatattcattcgaattttgattcattttgatcttatttataataggactctaaatcattgtctaaacattttagccgatatggaacgttaaacatatattttttcattagttaggtaatatatgtctgttttaaaaatttttgaatcaccatatatgcagaaaacaaaattgagatatttttaaacttatgtatcatatgattattcaaagcattttaaaaaataatcaaacaaagatgaaaggagaatcataaatttaaatcagaaccaaatcttctaaatatctttattattaatctagataagtcccgcctaaataggcgggtatagatataaatagaaaaatttaccaatgaaattagaaattagaaatttgaatagtaaatagtaatgcacacacttttcttaatagttaattttgtaagttttgttttaaattgtttttcaatcttacacattctatttactatatacttttaactatctattttatcaaaataaactgaactttaattgtacatacttcattttacggataatatttgaattttaaataataaccacacacttttttatatatttaatttagtatatttcttaaaccaaatttcaatcttacatattctatttttgtaatacaatttagctacctatttcatcataatagattggattttaattctatatttcatcataatagataagtgttaacaactttctataaaaataatatgtatatcataccaaatcgatatccaatatcctagttttgacaatatcatggacgaatcatatatataaaagttgtccaactctctccatccttctgacacgtcaacactggagagagtgatacatgtcacatcaatctattaattatatttataaatttattatttatttacgaatttaaaatcatgcataatttacttatataaaaatttgacttgttttaatttattaatcaaagaatttcaatttaataaggtacaaagtatttcaaactcatatatgaattaacttatttaaatttacttatataaatcatataaacttatgcataaacataaaatcaatagaattttaatgagattttaaattttattacagtataagaattaaataatatgatataagaatttatttcatgtttttatatagtatataggattagtgacaatgaatattagttgaatttacagtttattttaaggtaaatatatcaaatcaatactactttttcgtttatttaaaaaataacaatttttttcttaaaggtaaataattgtaaataagttttaaacaatgtaactaagaaaaaaatagaatgaatcatactataaaattacaaaagaaatgtggcactatatatagtagaggttcctaactctatcattctgtatcatcttcatcacaaaagaatctaaagaaaacgaaaccacatcgtgagaatcatgagtcttcgtaggttactgtgcacgagtaggaaagttcctcctccagttgtagctgcgagaagcaccttggatctggctccagttaatcctacgggaagcgacctagatccgcacgacgacaagtgtgatccaatcaccccaattgatgacccagaactttatatttattacaagagttacaattctgcgagggacaagtgtctcaacgacactttttacaaaggagggacaaccgaaccggatgtttagaggtttgtctcataaattgcgtccaccatacacgacgctgttgagataactgaaactgagaatatgaggatagccaacaatggagcccgttctgcacaagagcaattcagttttttacctcctaagtaagaactaatgcttagtgctataagtgagtgtctgattttttgttatgtcttgttttttaataaatgcgttttgcatattagttgtctctaaagtaaacttagccatcatgcaatattaatgtgcgcaaacattttttgtacttaagtgtcacaactaattcaaaatttgttgctgaaaattatgctatctatttatctattgtatggtatgttttatgatttaattagttttatttacaatcataataaattttgtttattattaaatgtctctttctataggtctaagttttgaaattttatcataatttatatatatatatatatatatatatatatataattatatgagagttttataagttactactaaaccgagtctaaagctaaaccagaattaaccaatatagcatcattcgaattatttggactctagtatacataagtgcaattaacaattgacattgccttagagatctcacaaaaatgatatcaacaaaattaaagtttgacaatatcatggaccactatattcataatttattactagatttaaacctcatgaacattattttaggtaacaacattcacaacttgtaaggaattcaacaatttcatccaatgtatattaatagcaaggcccagcccaatactaaacatgagcccaacaaacaaaaatagtattaaacgaccgttacaaaattttagttgaaaaaaatagcaaaaggataaatactctgaagtctgaaacactaacaaagaaaagaacaaaaaacacatttatggttatcaatccaacagaaatatttatcgctttgatgtaacaagattaacgtaacagactaaaattacacgtgtcactttcttattcgacctactcaaaatacattgcgtctaatcttaagcttttccataactaacctccaaaatccgtcaaactcaacattttctcttccgccataaccaattttctctagatccacggatccatttttctcgggaaaattcgaaatccgccggtgaaaagaaactcattcattgaattagctaaaacatg

SEQ ID NO: 2695 - DNA, 3000 bp, Unknown
  misc_feature (1)..( 3000): cDNA_ID_2168035_gDNA_ID_1620577_Annot_ID_161030 3000 nt of promoter + ATG
catgaaagaggattaagatgttcccttttattgttgttctttttgttttgtgtgtgttattctttgaagaaacaattaaacaaaagccaaattgtatagtttataataaagatgtcgaatcaaactgatatttttaacataaacgcatgtagttggatttttaaaaaagttagagaattagatacgaaagcaaatcttattttaaatatatatgtcttcttttattattacataaaaaaaattgtacatgttatgtatgttcagaattaatgatggttgatcaactataaacagattttgctacacaactctttcaattttgtatctcagtcggcaccataatcttcatagacatttcaatttcataaattgtcttactttttttttttccggatcttgattttgtttctaaatttatttatttcttatttataagaaagccttttttataaaaaagtgatataatttaattttgttataacgattatcacatgtgatccatgatttctaaaaagtaatgatcatgacatatctcaacaaagttaatttggttagtaaatcttatattgtgggatcatttctataacatcccttcgtaattttaaggatttattttctaatattttcactaaaattaagaaaaataattaatgatgcagtaatcaatttacttttgtactacgaattatgttgctttccaataattctaattacaccacatattaaatgcatcatttttgagatctttcacatttcctctaaaactaaaaccatactctttaaatttacaaatttagttatatgagtcacttatttttgttaaaagttcaaattaagagccaaaactacgtttttcaaaaactaaaattttagaatggaaccaagaccagtaaaattaagttccattaatttttttatatatattgacatagatttacaccatttacttaaaatcatatattgttttcataattttaatttaaatttaccgcctcaaaaacaaaagaagtagttagagtactatacactagagtatgacttttgaccttctcattctaaatgcctacaattaattatgtattgtaaagttaaaatgcattaatgatttagaaaataaaaatactagaatatcaatcttttgatacaatactaaaattctagaaaatcaatctttgaatttgggaggggtataaaactaaattcagtgataactacgtacactaattcatagtccaatttgatgcgatctggaaaaaataaaagactatacctagatcaataataactcaatccttccatccaatgataattacagttgggactggtagaataaaaaatttcaacctatgaaataagggatttgagccttaacatacatccaaatagtaacatatgataaatttcttatcattgtttgattgaatgatcaaaactattatgtagatctataaatgtgtgtttataaatttttcaagtgaaactggataaacaattctgtctgacacttttttttcttctgaaatgtgaagaaacaattccactattttagtttgttattttgggatataactagttcaaattttaaaatattattaaaattctattaataattttgtcattaaactcttttaaattaattgagttatctttcctaaataaatatctacataaaataaatatacggtcaaaaaaaccaaaaaatctattttgtccgaagaaaaatatcttcaacaaacaaaccatcaaaaaatggttgtcacaaaaacaaatatattcaaaaatggtaaagataaaatctaattggtcaactatatcagacggtgaagaataagtcagcaatcgtagaaaactggatccaaagttgagctttcaggaccgattcgtaacgactgttatttatggttgtagaggttttgggagttacgactttgactgtaaaagctttgactgcagagactttgtttttaaagactttaactgttaaaacatgattggtaacaataaaattgtaactatataattatgattataaataattaccaaatatataagaaactgaatcttaaaagaacaaattttaaaaataattctaaatcaattgaatttttttaaaaagcaattaataagtatatgttatggaattttagaatcatataagaaagaagaaaagaaaaaataaaaacttttattttgtttatttctaaagtcactaatacgggacttaaaaaaaatttgaaaacaaagagtaaataaaaaaaggatgggaaagctttaaaaatttttaaagtaaaaaaatcttgattcacaaaaaaaactttgaagacttctaaaatcattttaaaatcttaaaaacctcaaccaatcatccccttcaattttcaaaattgaaagctactgtctactgaggcaatgacgcgtgtttgctacggcaatggcagaacaacgtaaataattcaaaagatgagggggtatttgggtaaaagagtttctgataaaatctcacagatccaaccaaccattgaggaccatttcttctctctcattctctcttctgacgtgtttcccttcttcggtttctcatcctcacgtccgccggatttcgaggaaacgaagaagaagaagaacaacaacaacaaaaggtctctctcgagtttctatgtttatctttttctataatcccttagtctagtgttgtttagactttcaattctgctccaaaatctctggatttttgaatctaccgttcattttctagagattttggtttctctcagtctaagagtcgtcttttgaaatcttgaatgatgaatctgagagtttctatgaaatttgatggaattttgtgtgttcagttgttgattagggtttgggattcaataactttcaaatttggtttcgattaggttcgatttggttatttttacctgtgaattgatctcgattcgttgtattaacgtctctttgtgtttttttattctgtttatgctagccttttgagat

SEQ ID NO: 2696 - DNA, 3000 bp, Unknown
  misc_feature (1)..( 3000): cDNA_ID_3069235_gDNA_ID_1620577_Annot_ID_161033 3000 nt of promoter + ATG
aagagcttcaaatgtatccaagcaaaaccaacttctcaaacaaagatagttcacttgttaatccaattcagttaacagaacaaaagaaaaaaaatgaaaatctttgctttgcatcatcaacaacaacaactaaccaatttcaaaactcttatgcctcccaacaaaccaaacataagcaacaaatatcttatagtaagatctttagcttcacatgtaacaacaatcaaccacaatttccaaagtaaaccaacttctcagataaacatagctcacttgttaacaaaactatataaaagtttaaatcttttggtttccactcacatcaacaacaactaaccaatttcaaaactcttaatcctaccaacaaaccaaccataagcaataatcgatgatgcatttgcctggacaaagtatgctaaactctatacttaagaagctgtaaccaaaccctaattagtcaccagaaactgctaccaacttcagaagattgctctgaaccaaaacttgttctcaaaacgaatgctaaattaggttaaaaggtataaagaacctgcaagcaattctcatctcatctttccaaccacactccaccaatctatctctcacaagctccattagattctccttctctccactctccaccaactatgacgatttcaaatttccaaaaacctttcaatcaaaagtccacaacagtaactgaaatcgatttcgcattacaaaatctgaaaccttgacgttgatgatttctcgaagcgtgaccttgtctttctcgaaaccatccgccacatcgtcttcatctggtgtcggaggccgattcaccgaatgtttcctgatcagaaaaaagcgagaaatcgaaagatgaaattgaagagtaacgattcagaagaagggaataagattgtctaatacatacatgtgtttgaatcgatagattcgtttcaagaacacgaatcaattgtgatggatgaacttttttccagagtcttcttcagcaaacccagaactgtatcgcacgacgaaggagaaagcacacaacgagtcgagatcattaaatttcaatattataaactacgtgccgtttgttaaaatttgccgaaacaaacaggctgttttgtttaagtccactggatagaaactacgtgccgttttaaatggactctacaagtagggaaaaaaccttaaaaaaatccccatcgattttctattttgccgtttaatacccaattatttttggttggaaaaaaatacacaaagtagttaaactgtgtgatttaatactcaaaaaataacatattattattgtcatactcacaatttcataacaaaagttaaatttcaattatacccgtattgttgaattaactattaatttgtaaatgacatgacaatcatttttattttttcaataaaaagatttatattttgttttactttttcttatttatattctatgaataaaatgacatggtaactactttatttataaatttcaaaataaaaaattatagaaaatctggagaaaaatagaatttttagtaaaattagtatacattaatatgattctcatttttaaaaattagtatatattattgataactgttttatgatcttttaaggtacgcattcaagaaacaatcacaaaaaagagttatcgattctttctcacctcctctagcattctcacatcctcctagccttcttctttgtttccaccatcttctccgtttccaccatcttcatttcctcagcctttttcttgtcttccaccattgtctcatggatctacttacctctcagtctcataatagatcaaaaccatgtattctcatagagagttatcacaaatggcgctgtatgggatgatcttctcgtttgttattgccttcaactcgtggagcaacactttaaacctaagcatcattataatacatatgataatgattttcttcaagtatagttgaaaatgatttatgaagttcaaagtacataatttggcttgaattttacattttaagttagaaattttatggttattagttttaagttagcaaatcagagttctgactgatatggcgtaaacaatataattttatatttatgtcgcaaaatagtaagtataagatttgtttttaaggagaaaggggtagatagatatgtagataatataatacttttatatattaagtatgttttaataaaaaacatttaaaagattataaataccaattagagtagaacaaatatgaaaatattaattaaaaacaaatttgaactaatccactatcaaatttcaaagttattgactaaactttgaactaatccatatatgataaaccacttatgtcatgtgggaaaataataatatttggcaactaatggttcagaaaaaaatattttctcgcataacaaataattcacttaaacgtcaatttcctaaattttgagtttttaaatcaccagagtgttaggtgaataagaatacttaaaaatgttgtgctatgaaataatcaatcaaacaaataatccaaatttttagaattttttcgtcgaatagtgtataagtgtacgaaatttgcaaaaacccaaatgttattttcaagaatagtaagctcttatgttaaacttaaatgttttcattgtgagaacgaacgtcttttaaacataccatttaatagtaatatgtactaatgttattgaaaacttactttctgctaatattggaagcccattaaactaaggcccatgaaagaaaacacccacaccgacgtcgtataggaaagatgtagtcatgtgaagaaaaaaaattaacggtcaacgggaaaaggaaaacgatggcgcgtcaaatgctaaaccattaaactacggttgtggacggcaaacgcttgtcgtctccgaaacgcaaccgcagagaacccaaatttatatcattctatatcttctcttcttcaccggcgtacaatagcactcaactcttaacttacgcacctctcttctctc

SEQ ID NO: 2697 - DNA, 3000 bp, Unknown
  misc_feature (1)..( 3000): cDNA_ID_2167723_gDNA_ID_1620577_Annot_ID_161017 3000 nt of promoter + ATG
gattgaaatttggtttaagaaatatactaaattaaatatataaaaaagtgtgtggttattatttaaaattcaaatattatccgtaaaatgaagtatgtacaattaaagttcagtttattttgataaaatagatagttaaaagtatatagtaaatagaatgtgtaagattgaaaaacaatttaaaacaaaacttacaaaattaactattaagaaaagtgtgtgcattactatttactattcaaatttctaatttctaatttcattggtaaatttttctatttatatctatacccgcctatttaggcgggacttatctagattaataataaagatatttagaagatttggttctgatttaaatttatgattctcctttcatctttgtttgattattttttaaaatgctttgaataatcatatgatacataagtttaaaaatatctcaattttgttttctgcatatatggtgattcaaaaatttttaaaacagacatatattacctaactaatgaaaaaatatatgtttaacgttccatatcggctaaaatgtttagacaatgatttagagtcctattataaataagatcaaaatgaatcaaaattcgaatgaatatgaactttaacttaacaaacatccaaattttaaaaatatataagaggtaattctgttttttattaaactatttctttttaccacaaatattataattaatatatttgaaagcattagaaagtttataatattatgaacattagaacatataaaaataaaaagtaatatgggaatgattatattgaagaacaaggttttatggtgccacggcggaacgagttttgagtcaacattaataaaaaatataaatatcattaactcgctgctttaatacgggacggattaaaatcaataactattttgaaattttatgaacatttgagcatatttaaagaaaatagcatgggacgggttatatggcgggatggactatattaaaattgtattgaggatttaatgtcaatacaattgaatttatgtatactagagtctacataattctgttttatgctattttggttaattttggtttagctttagacttggtttagttaaagaactcttgtacagtccattcaattttgaaagaagatattttacgtttttgtttctctttcgacctcaatcttgagagaagctataattgtatcggcccaaatttcaaaattcataaaataagatacataccgacaagaaataaaacgtttatatatatctagtccaataaagaatgaaaattccaaaatgttgcataaattgtagcctcgggaaattagttaagatcatagctcgagtgaccggttattaaaaacaaagaatacttaagtcgaactccgatgactcaagatccataagagtttaaagatggcggagatagattcaatagcatcactattacttaggtagaaaaagaagatttagctagattcttatatgttgtctgcgttgatcgttttataaatacgttatgtagtgtcatatttgaaactcaattcgtatttgaatataccaatttgtggtttgatatatgagcattatgcatgacgttttaagttattaccaatatatcttcgatatcatccaaacatagatatgtttgggttaatgctatactttcgatttgtggacgtcaattcatttacggaataaccgaagagattgaaaacttatacgtagcacattcagcgatcacaagtcttggactcttggtggcacctaaaatttgcaaacctacaagaaatacacgatatatacaagaaaaatgggaccaagaaagaaaatgtgaggaacgttttacacttcatttgtcagtttttgcatgtgaaacagtgcgacgataatttagtgtacgatacaaaacagtcctcacgtgtatcgatccatcattataagatatataagaagaagaaaaattataaaccttacgcatgaaatagcactttcttcttttgtttactttgggtcacatgaagtacaatatttataatgttgcctcttgttactttgttcaataataaagatgccttacaacatttcaatggcaacattgcacaacatatcgattaattaatctctttttaaccaagaaatttcggatcaaagctcataatctcttcgacaagagaccagaccattttttcaagtcttcttctcgttgccgatcctcggattcaagacttcaagtactctaccctcttgtttgccaactagatactctggtttgttcatatctttccagtttttcaatggtcatatctataattgttccttataattcaacactttctaactaatgtcggtgacgtggcaaaggaggacaaaatagtgggattcactctgtgaactagaggcttccaccattgcttgcacgccttttatttttagagattgaaaacaacatttccttcgaagatgtatcactttccttttggaggaaaaaagcatgcaagaagaaacagtacacaaacaataatacgattgtgttatgttgtgtcatttcatagaatatcatgtcatggcgtacgattatacacgtgtcggttgtgaaagaaggttcacaaaacatgtcccaacaaattaaaaaagttgaaaaagttggagacccttctctagtctctacctcggccagagacttccgtatagccacacacaccttttagcttgagaacaacctttccttaattttgtaacgtcccatcttacgtacttattactatttcagacaccacacgtaaataaacttcgataaatgcatatctaacaacacattacgacagaagacggagaatgccaacaaaactgatcatgtactattctaaatactcaatcataagaatagatccttctagctcaaacttgacctagctactttatatctacaactatttatatagttataaaccacaaagagaattgaaaagaaaaaatagaagctgagagaagacaac

SEQ ID NO: 2698 - DNA, 3000 bp, Unknown
  misc_feature (1)..( 3000): cDNA_ID_3069200_gDNA_ID_1620577_Annot_ID_161011 3000 nt of promoter + ATG
ctgaagtccccacacaagcaagcttcgatggatcccaagaacctaaatcgtcaccaagtaccaaatttcttgaacccaccaccaccaccgcgaaatcagggtttggtagatgatgatgctgcttctgctgttgtttccgacgagaatcgcaaaccaacaactgagattaaagatttccagatcgtggtctctgcttccgacaaagaaccaaacaagaagagtcagaatcagaaccagcttggtcctaagagaagctctaacaaagacagacacactaaagtcgaaggtagaggtcgacgaattcggatgcctgctctttgtgctgctaggatttttcaattgactagagaattgggtcataaatctgatggtgaaactatccagtggctgcttcaacaagctgagccatcgattattgcagctactggttcaggaactataccggcctctgctttagcttcttcagctgcaacctctaaccatcatcaaggtgggtctcttactgctggtttaatgatcagtcatgacttagatggtgggtctagtagtagtggtagaccattaaattgggggattggtggcggtgaaggagtttctaggtcaagtttaccaactgggttatggccaaatgtagctgggtttggttctggtgtgccaaccactggtttaatgagtgaaggagctggttatagaattgggtttcctggttttgattttcctggtgttggtcatatgagttttgcatctattttgggtgggaatcataatcagatgcctggacttgagttaggcttgtctcaagaagggaatgttggtgttttgaatcctcagtcttttactcagatttatcaacagatgggtcaggctcaggctcaagctcaaggtagggttcttcaccatatgcatcataaccatgaagaacatcagcaagagagtggtgagaaagatgattctcaaggctcaggtcgttaaaaggattgggtttttttttgtatcttctggatttgaaaaagcttttggcttttgttttgtgataatattgttgtaatttgtaccaccatggagaagaaaaagaaaaggttatatactgagtgagagtgataatctatacttattgaaacctctgcaaaaacacaaggtgagttcaatttgaggatgatgatacaagagagtggaatcttcaaacctttttttccgagtgtttgtgacaattttttggcagttgttgtttgaacttgcaggtggagtttgttgaatacacacagccagagatttttttgtttggagtctttaagttgcagagaggcttgtttttacttgttctgagttttgttgcttttgaatatcaagaaaccggcttttttcagatagtacaacaatggtaatgtatacttgtcttccatcacatatttgtagaatgaagatttatagctctcttttgctcagtattcttctattgcatctccaaagattgttctctttcgttcgatctctctgaatgagttaaagactttcgtttagagtcgagtgtaaaacacttcgctgcatgttctgattcagtggctttgagctgcaatggatttcacaatgatggtaacgttgtattctttaactcttacttacattcatgttattgccctgagtgtgccgttaactgtgggaaggttttgaactaggtacaaacccttcgcagttgggaaccaaataagctggtattgcatttactctttgccttgcaagctttttcaaagataagtataaattgttcaacgagtcaaaaagtttatatcattttactcattttgacttgaatttgacggaactaaggaaagagactaagagagagagagagagagaggttaacgagtcaaaaagttgcttgatctctatgatttgtccaaccaatcaaaacaagtgaagaaaattcaaaaacattcacaaagctctctctttcccttttgagcaatgatctaactcaacactatggtccaaatacaactccaatagatccattccaaagcctccctcatgatgagagcgtgacttaagttgcttactcttttaatttccattctcttcgacacattgggcaaggagcttgacttgtctacgaattcttccatttcaatatacagaagtgaagatgaaacgcgtggttactttgaggtctaagacatgcagttttgttcttaccagaactaaataaagcagcttagcaatgttccagtaagcatgagagacagtgtgtgtcctaattaacctatataaaagtgaaaacatgaaagctgattttacatcgaacaagtcattggacttgtgtgtgtgaaactgtaaaagtcttatcttatttttactatattggtgactgatacataacatgttgtgacaggaacttaatttacaacatgttatgtagaataaattttagtattgagacaacatagagacaacaaaaaaacctagaagaagattgatatcccaacttcgtaccaaaaccctagtaacatctttctcgtaacataaccctaatagtgattgaaatctctgatcaagggattgcatgatgatcatttactaattcttagtttagatcatctagaagattgttatacaagtaaacagaattatctgtttgacctaatatgggcctgagatagcccatcaatacccacaaccaagttaactccatctcaataattcgagaaaaggggtaacgtatttaataattttttctatgtattgaccgtttgcactacgtgacgttttcacgtagagtaaacgacgcgcattcttataaagaaacgaggaaacagctgctttttgtttgtcgaagagcaaatatgttttctcgatcgcgaccaaacaagtagagaagagtgattcttcgcttcgattcaaagacaggttttttcttttgttccctgagagatcgaatcgaagaaatcgaaatttttgtacttcgataaaaatctgtagtctctatagaaatcggagaagatg

SEQ ID NO: 2699 - DNA, 3000 bp, Unknown
  misc_feature (1)..( 3000): cDNA_ID_2167698_gDNA_ID_1620577_Annot_ID_161009 3000 nt of promoter + ATG
gacaggtaaatggatccacactggagaaagtagtgtctgctgttgaagttcttcacggcgttcagattgatgaggatgctcttgttggaaaatctactaatgctgctggttaccttgagaaagcaacacaagaggttgaaagagatcttagttcaggtatcaccgtccattggctgctacattactgcaaatgtattgatatgcttttttcttatcaagtgacaagcgacatagcttcagttttctacattcgtttgttttaagaactcagctgtttggtctatctttaaccacacaccctttgtatctgaaccgaaatcttaaaatttgcgtaacaatctcgtatctggtctatgtgtgatcttaaaccactaccacgcttccaattcttacttccatgatgctcctctctcatttttccaaatagtttttgccaaaatcatcttttaaacatggtggctcttaccatttgataggaatattcagcatatctttgtgtcaaatcatttaatgataagagcacttacccccaatccgcaacgagaataaccagtgctacacattttggttaattttggatccctaatttttgtcactacatttctgattactgggactggtctttatattaactgcttgtagatatattacacttctttacttgtaggatagagaagatccaattcttgttcaagcatccatttgaagttgttttcactatcttacttcttgagcattgctttaaataggacacgcccctgggccagcggtggtgaaggagttgcagggacaacatgtcatattgagagactgcatcgaacagctaggggcaatggagacatccagaacaagtcttatctcacatttgagagaagctttacaagaacaggtttacatttatacattttctttcaaaacaacatctttcattgcaccggccagaaacctcaccttgtttttgtttttgtgtccaggaactcaagctggagcaagtccgtaaccaccttcaggtttgaatacttaccaacaaatgtgatatttgttcctcagacattttatacatttcaatttacacaatacatcataacgttctcaatagtactttccgagacatgctggtctagcttcaagcttgtttagtgaatttgttcaaggaagatagacccaaatctaattagggttcttggttgcctttccaaacagaatgttgccttgtctttatgctatttagttgaattgatttcatttgtgctacgatttcagattgctcggtttcaatcagaccgaactggtgatctctgcagacagcttctagaccatggtggtagttcacagcctcctgctacagaagaagaagagtcaaaagaagttatcaaagtttcatccactgcagcagcaccacaaagcttcacacacagcgatgtggaacaatctgcaccagttatgtttgcctcaaacccaactcaatcgctggaagacccaagaaaaactgctgctgctgcagtggtagctaagctaactgcttcaacttcctcagccgagatgctctcctatgttctctcctccttagcctccgaaggcatcatcggaaacaacaacccacctgctgtaacagaaactctatcatccgtcgatttcccaccagagaaaagacctaagcttcaaaatcatgaccagtcgtatctctcaccgcaccatcagaacactgcaacaacatcatcctccacacccccacaaccgcttccaccaccaccaccattccagcttcaacctcagtttttgcagccgttacagcctcccgggccagtaaaccacacaccattcaactacaccatagcaacctctactgcaaccactcagcaacaacaacaagaacaaggtccttgggtacctgggctcactcaactttcaacaacctctgctccatcggagaattcataccagaagtttcagggacaagatggtttctatggcattaactcatctgtgcctattacacctgtcactcgccagtagtgtaaatctgttcgtaggggttcatatagcaaaaagttcacttttttttttggtttttttttgttaaatatagtttcaatgggcttttgataattaggattttatgttcttaaaatgtgctttgtatgctttctaattgtgcgtctaatccaaggtttcaactctgtaaacatatcataaaaatcctttgttttgctctgagattttactattgttggaagattctatagattttcaaattttcttgttcctctctttgaaatttacatggaagtcagatttggaccaaagtgatttgttgctcgtcttttaaagtcttctggtcaaaacgccgacaaggctttgcttttgactaataaagaaacatacttttccacaattttcttgtctttttatcttatttccttactcgtcagggattccctgtaacgcggcaatcctgacgaaagacatatcagaaactttgatagaatcacatagcagcaatctcttagctggattttaccagcttcactttgagattaggtcatttacccttttaagggtttctctcctactttcttgattctcttcattcccaagactcaaaacctagcaaacttggacatttggattgagtgtctctagtccgggtaagatttgtgtgttgtggtaactttatctgacggtttaggagcttaggttgcttagatgagttccaagtttttatttttcttttgcttattgttcttcttgttcctttggtccaagttcttgatttggacagtaactgaaaatttcctaattgattcctttaagtttgactgtgctcttattactagtcttctctaaatatttttgttctttgcttcgacaatttcattgatgctttgaatttgagaatctctctgtcctcttattattataggtctcatttgggtggattctttctggtgaaatctttcttgtgagagttttgtattgggagaaagagataatcaaatg

SEQ ID NO: 2700 - DNA, 3000 bp, Unknown
  misc_feature (1)..( 3000): cDNA_ID_2167701_gDNA_ID_1620577_Annot_ID_161010 3000 nt of promoter + ATG
atagagaagttaaccgtcttcgcctcacatcttaggttccggtggttgacggctactcgttccctcatcttactaaaagaatgaatgttgctggcagacacataacagcatatctcgttgatctactatctcgacgagggtgagaaactgattcatagactcacattcattttaatgatgttgagatgttttaaattagctaaactaaaagactgtttgttcaacagatatgcgatgaacaaaacagctgactttgagacggttagggaaattaaagagaagctctgctatataaggcatgcaaagacctcttctcagctttcctctaatatctgtgtagtaatgcattactagaataggaaataaacacaatttgttttgtctttttttgcagttatgattacaagagagaatctcagcttggccttgagacaactatccttgttaagaattatactgtaagtctctctcctggtatgaacctgtcaggtgtgtgaattttcaaggtttcgatggcaaatagaggcaagaaacagaaactagtgtacgttaagctaataggaatccaaactcatgatcagaactaaatagatagcagattcttggcgaacttgagcctgtagagaactttaaagattcgtgccatcattcctttgttctttttggtaatgaaagaatgatattatcatcttttcttttcatgacatcgtttctctgttcttgggcgctgtgtttgggatttttcatccgatagtcgataaagtttcatacttgtgccagttgcagcctctaaagctgatattatcaccaaattattttttttccagagtactaacccgttgtgtttttgaactgtgatcagcttccagatgggagggttatcaaagtaggcactgaaagattccaagcacctgaagcgctttttactccggtaaaccttcatcgcgtcctctgctaatttctcttttggaatagtttcaaccctccaagaatctcgaggctgatcacaaccaaatattttttcaggaactcattgatgttgaaggtgatggaatggcagacatggttttccgatgtattcaagaaatggatattgataaccgcatgatggttcgtgtgactcttacgcttgcttggtatttcaaaagaaagatccaacaaaactaatcatttatctgtcttaaaccctttgctcttttttcacagctctaccaacacatagttttaagcggaggtagcaccatgtacccaggattacctagccggttcgtatattttttcttcatcataacccagcaagaagttccattgttttatgtttcattgtcttttattctctgtttgtttcagtcttgagaaagaaatacaggatcggtatctcgacacagttctaaaaggaaacaaagatggcttgaaggtaaaaaagatgattctgataatgccatgatcactgtcagtcattagctcagtttttaacatttatcttcgtttttcttatcaatcagaaactcagattgcggatcgaagatccaccgagaaggaaacacatggtatacctcggaggtgctgttcttgcaggaatcatgaaggtaagagaaaagttcaatgctattctctcttttaacacgaaagcatgaaattttagtctgtgttatgatgttaagagaatttggattcgatgttgcaggacgcaccagagttctggatcaatagagaggactatatggaagaaggaattaattgtttgaataaaatgagccaagcttaataactttcaaacgcagaactcatacttgtacttgtaccccttttttttactaccgtcaggatgatttaattccgtttgtgaattcagtattttaggtttcaaagtttgagtacaattggttgcagttagggatccaaaattcgacatgtgattggtgggatatacagaaaaacgtgtattaactaataatgttgagactaatatattgtgtaataaccaaagccaaaaggtcgagaagagacgaaatgcatatatcttaattcttgagtaagcaaacagagtcaaaacagtgaaagattatttgtaattttgaaaaggaaccctatttcttgccacacaaggtagatccctattgttttctgttaaaacccaaaagattgccacaactctgaattgatggaaccagcttccttctactgcatgttctgcagctagtctaagtacagcagcttcaagctagatcaaagacaaaatgattacctaacctgccatgagtaaaaaaggatttgaaaacttttaaattaactagaaacaaaaaaaactgatttacaatcccaaaataaaaaactgtaaaaactttttgaggtcttaatatgggctttggcccaataacggcaacaccgtgtcagaaacgttggtgttggtgactgttaaactacctcaacgacatataaaacattatgagcgttggcccaataaagagatataggcccataaagttatagagaaatcacccggtggttcatccaaatctaaccacgacgaagattatttccaaactgctcaaacttctccggcgagttttggagacattatcggaaaacggcgccattttattaaccgtgattttcgttggctccttcactgctaattgttagcatcatcgcaacaatctccttcttctgattgattctctctgtaatttcctcttcgcgcttgttttttccgtatttgctttctactgaaattggtctctggttatctctcgtagattagggtttatacaagctttgatgtctaaagccactaactagttttgtttatgcacgtacttgtcctattgtctagttctcgcttcgtcttacgagttccttgtcagaaagcttgaccctttttgttttcttttccattgctttgattgatgactcttagggtttttgacttgtatcttctttgtttctctatagattttgtgaaggcacactggtttttgagctggtgttgaagcaatg

SEQ ID NO: 2701 - DNA, 3000 bp, Unknown
  misc_feature (1)..( 3000): cDNA_ID_1379427_gDNA_ID_1620578_Annot_ID_161050 3000 nt of promoter + ATG
taaagagcttttttactgttattaaatttaaagtgaagaaatgagctaatcattgtggtgaaattgagcagtgaagttgcttgattggggtgaagaaggtcatagatcagaagctgagattgtgtctttgagagctgattttgctcaggaggttgctgtttggcataaattggatcatcctaatgtcaccaaggttcatatttcacttctgtttactttttaccattgttatatattgaggatataaataagatttgggtcatcaatgaatgtatattttgcagtttataggagcaacaatgggtgcatcagggttacagttgcaaacagagagtggtccattagctatgccaaacaatatatgttgtgttgttgttgaatatcttccaggtggtgctttaaaatcttacctgatcaagaacagaagaagaaaactaacatttaaaattgttgttcagctcgctcttgatctcgctagagggtacattatattctcccttctttcgctgccttctcaagtcgtttatctgctctaatggttattgttatgttgcttttaggttgagttaccttcattcgcagaagattgttcaccgagatgtaaagacagagaatatgttgttagacaaaacccggactgttaaaatcgcagattttggagttgcgagagttgaagcatctaaccctaatgacatgacaggagagactggcacacttggctacatggcgcctgaggtactatagtgataatgcatcatcaagattggtaacaaaccaactttttataacaaataaactttggctgcaggttctcaatggaaacccgtataatcgaaaatgcgatgtatacagtttcgggatctgcttatgggagatatattgctgtgacatgccataccctgaccttactttctctgaggtcacttcagccgtcgtccgccaggtatggttgaatagattaagcaaagaaaagttaatttaattgaaatgtgcatattggttgtttcacaattatattttgttgtaaatcttgaggaatcactgaagtaaaaaatgtgatctagagtagtgtaaccatttcatcatttcactgaagtaaaaaatctatatgcaatatgctgctacatatgatcaatgcagaacctgagacccgatataccgaggtgttgcccgagcgcacttgcagctgtgatgaagcgatgttgggatgcaaatccggacaagagaccggagatggatgaggttgtaccaatgttggagagtattgacacaaccaagggaggagggatgattcctaacgaccagcaacagggttgcctatgcttccgaaggaaacgtggtccttaattcccaaagaccaatctaagatcattcaaaactcaagattcgtgtccttgcttcttttctttttctttttataatccagaaggaaaaaaaatgggaaggcttgttagggatctaatggttgctaaaatttacgtaaagagtatgatttggtttccatattcttcaacatttcttgttttgctctatttgtgagagttgcttattaaatatttatggtcacgtatatcatcatctctaatcatatatttgatatagctagtcaatggtacaactgttctttttgtctttatgggttaaccaactacactcgacaggaacatcctatttgatatatatagtccaatgttcagctatgataaacctcacttcccatagaaggaccattaggttggaatgcatagtcgagaaacaactttgttgaagatattattgctacttcagtattgtcttttggtttaatagagtagatctagtcaatagctactaatcttagcttagtccacatttctttgccccattatggtctaatcttagcttagtcaacatttctttgccccattatggtctttttgtaaccttaggttatcttctctctttgtataactatgggtctaacgcctcattaacaataacacaagttaacaataacgtattattgagactagaagcttgtgctaataatgtttcttagaagtctagtgtttagtgccaaattgtatagtgtgtttaagaacactgattataaataataatagcagttggcgacaccacaatgaaactatatctatatcattcattcattaccaaacaaataaataagtattgtcttcattgtcaaaaatttagtaataagaaaaaagcgttggggaactactaatgacaaatgaattaagagtaatgacaggtaagaggttgttttcgtggtgacgtcaatcggtgcacaaagtaacgctgatatagcgaaacgtagacaactgtcccctctgctccttcctcatcaagcctcttctcttcactgcttcttcttctagtttactctccaattttcttctgctgctgcttcttcacaaggtttctatttcttctaatctgtgtataatctctcctctctgctcttcttacttaaacagaatcatttttaaaactctgctcttgattttagctttaaaaacgaggtctttttgttgggtttttgttctgtttcgccttctttcttcatttacgagctttttgagcttaaagttcgtgacttttgctgctttcgtgatttgggtttcagtaactttgcggtttattgaagtttttttggtgtaaagttacaactgtgggtttagctcaaaacgaggtctttacctctgtttttatgttttctacttattgagctcaaatttcgtagcttttgattcttctgtgatttgggtttcagtcacttttcgggttagtgaagtttttggtgtagagttttggtttttattgtttttgcaactgtgggttagctcaaaacgaggtctttttcttgttttctgcttcttgagctcaaatttcgtgagttttgcttcttctgtgatttgggtttcagtcactttctcgttatgtgaagtttttggtttaaagttttgatttttatttttttgttgcagaggttgaagaatg

SEQ ID NO: 2702 - DNA, 3000 bp, Unknown
  misc_feature (1)..( 3000): cDNA_ID_3069268_gDNA_ID_1620578_Annot_ID_161066 3000 nt of promoter + ATG
attaaaagagaaacgaaaaaagtatgtacaattaacgaggatttgaacggcggaaaatttttgtcgctaatccctcgcttatatacaacagattttgaagatagacatatcatatcattgcagtcttatgtccgttgcaaaattgtgatgactaaaaattggtaaccaatgttatagtctcttttatttcttactgactccatcaaaatcttgcttgtaaactttggacactatttcgaaaagcaaaaacgtattaattttggaattattaaaacattaatagaatatttaatatgtataaatcaatagaatacattaaactaataaataaataatacaaaatatgaattttaaccatacaaaaaatctcaactataattttaaaacccctctaatagctaaaactgtaaaacatatactgagttggtctctgatattgctcataaccgaccgacctaacctaaccacacacgggatacgctcgatgttcccattctccacggtactccaacactggcatacaatacaaaacattgaaggagacagtaatgccacgtgcacggctctgcaccataaaatttaacgcctctgatttaaaacaccacacattgacaaattgacataaccaaagctacatagagaaaaaacaccaaaaatcaaaattccatcaaaggggcttttaaaattttggacaagaacaaaaaaaaaagaaaaatggcaacgagaggagctgttgctgctgctgcatccacaatatggaagcaccgaagaaacccttctcttcgatcattatctcgccatttcaatcccaatttcaatcatagaatcatcccaacaggtacaatttcattacaattctgttctaagatagatacatgaaacataagagttgtgtcaaaagttcatatcaatttagggtttaaagtcaattgtggtgtatatgatttttccttgtagggtttaaatatcaagttagggcgatacaaggaacaagtactgatcctgtcattacaccattaaagaacagagaggaaccaaagccacaaaactggaaaatcaaaatgctttatgatggagattgtcctctctgtatgcgtgaggtctaagttagacctctgtttcttgtttatgtttgttcataaagtgtttttgatactgaatttttgtctttttattggtgaatgaaggttaatatgcttatggaaaggaatgaaaaacatggaactataaagtttgtcgacataagttcaaatgattattccccggaagataatcaagggcttgattacaaaacagtaaatttactgtcttttaatttggttcaattttgtttcatcttctgtttgatgttcgaactttcggatttgatcgagatctttattaggtgatggggcagattcatgccattcagtctgatggtaacgttgttaagggtgtggaggtaagcttattagcatcattgttttacactaaccatttcatatttatcattttggtgtaacgttttcaggcatttaggagattgtatgaagaagttgggcttggatgggtttacactatcaccaaatttgaaccagtaagcttttctctctttatctcctagtgatctcttccattgtgttaagttccgtattcatggataacacgcgattacttgcagatagggaagttagcagatgttgtgtatgatgtatgggctaaataccgacttcaagtcacaggtatataaaatgacctgaaaaatgttgtacaagcttacttgattatttgtgcgtctcaaaaactagatctctttgttgattagggaggccatctatagaagctattcttgaagcaagaaagaaagataaggtagggaacaaaggttatcgattttctgtcgtagtaacctttgctcggtaaaaccaatcaatgatatgattgtgtttgcaggtagagacatgtggtgaaagcaagaactgcaagatatgaattttctttatactctttgaattgttacaaaataccaaaaccagtttggagttacaaattttctttatgtgagtgtgagaatttgtatatatatgatacacagccccattacattagccaaatcatcctgatgatacattatacacatgaataatttcagcaaattttgaaactgttaagagttttatatttggtaatgattttgtaaaggttagcttactaatgttattgaaatatttgtttgaataatgaaaatgaaattcaacattgtagatttgttcccagtcaccaaagaagaaaaaaggttgtatgtgaaaaaaaaactttaagaatcaatagaatatgagatcaatttgttcatttgttgaaaacaccaaaaaaatgcactgcgtctcacatattctctctctggggcatttaatcaaacaccttccatgcaccaaatcgcacacatttcttcggaggagatttcactacaaagccctctctaatgccaccgtaagcacaacagcttcatgtttcaaaactctcagttctagccaacaggaccaaatccatctctacgttgatacacttctccaatggaaccaggtctctctctatctctcgacccttttgctagataaacatgttggaactttggaattattcgtgggcattatttgtttgaaaagattcgtgaatttctaatcaaattgaaagctttagaatccaattttgggtttaatggttggtttaagcttgttgcccaccaagtatttgttataagtccttactgggtcaaagcatgataagtcgaatgcttttacctgcacaatgaaaaaaattcaatcttgttgtcccttttttggcgcacttcactttaacatctgagtgtttggtttgttatatattcctacctcaaactcaaactgatgttactcaattgaaatcactggtgaatgtctatgttaccagtgggtttaaagtatgtttttgcttgggaattctatgtgagtttgagtaggccttgtgatttatgtgcagaaa

SEQ ID NO: 2703 - DNA, 3000 bp, Unknown
  misc_feature (1)..( 3000): cDNA_ID_2167903_gDNA_ID_1620578_Annot_ID_161055 3000 nt of promoter + ATG
cttcctcgctaacttctcttcgccatcactgaaactaatatctctctgcttcctccttagaacttctatttgcttctcttgcattccacttttgtgagtttctattatcttcagttttcgagatagaacttataaactctgtaataatatgcattgtgcatatttttctaggttaagttatttgttttaaagtgttctgtttcttgctagcactaaatctattgctctcgtttattttgcagattcatttgaagtagtgagattgactccagagataaaacaagaaagagcaacaaagcaacagcatgcggtggtggttgtgtctttctgcttatgtttttcgtacagtagtagtcttctgtcgtgtgattctgtaaactgcgatcttacttcagacatagcttttttatgtaatggggtcgtcttttttcttcacattcccttactttgtccgccaaattatttaagacttcgtttggatactctgttttgggagaaggaatcagttggggagaaagtagttatggtttgtcaatcagcgggacagacaagatttcgtacactcaaacacgaacacggtatcacaggaaacattgtagttagagtcattgcatgctttcaacctctccaagattgccaggttattttcttgtttgatgagtttatgttattgcaatatatttagatttttaaaccaccagaacttttttttattgatttcgttttagctttgatgttgtgtattttgcaggctgaatatttccgtcaattgttgaagcccgtcacgtagagtagctcgatacttatcgttcttgtttcaagcctagtttcttctatccatttagttggtaagttccagtctttgcacacataatcttttgacctcccattcttgattataagtagctgatttgtttgagatgatgatgtcctctgttttggatagttgatttgtttagtgttggatgggacaagatcgtgggtttgggtttcctactcagcgcttgtgttccttgtcttccctagctctgtctcatctcgggaagcaagacttgaatttagtatctaaaacctgcggcgacaccaccgacatgttttctactcgtggatcttatcaagtttctacccaagtctctcaatcctattttgatgggtattgtggatgggttcatgggtcatcccacctacagcagcagttcttgcctcctcaaaaccaatgtatgaagcaagtacctcttcaagtagacggtgttatatctaaagctgaggaacaatgtagtcagaagaggttcctagtgtttgatcagtctggagatcagacgactttgctactcgcttccgatatacggaaatcttttgagaccctaaaacagcatgcctgtcctgatatgaaggaagagctccaaagaagcaacaaagatttgtttgtttgtcacggaatgcaaggaaatagcgaaccggatttgaaggaggattcggaagaactaaatgcattgctttactctgaagatgagagtggttattgctctgaagaagatgaggttacaagcgcagaccattccccaagcattgtagtatcaggccgtgaggaccaaaaaacatttcttggaagctatggacaaccattaaatgctaaaaagagaaagatactcgaaacctcgaatgagagtatgcgggacgctgaatcgagctgtggtagttgtgacaacacaaggattagttttctgaaacgttctaagctgtctagtaacaagataggagaagagaagatatttgagactgtaagcctcttgcgcagtgtagtccccggggaggaactggtggacccgatcttagtcatcgatagagccattgattaccttaaatcattgaagatggaagcgaaaaatcgagaagcatgaggttctttgtttgtaggatacctaagacatattagcattggcaagtggacttggtttctaaacaaagtagtagacatattggaccgtggtactcttgtcaagctacaaagggatcaggttgttgctagttggaagataaaccaaataatgtttcggagttgcaagagaaggaattgatattaaaatgcaaattgaatatttcatattagttgatgattaagatggattgcgaaattttaatttcagtcgtttagctgtttgttatatcatgtagttgcttcttctttttctataagattttgtcggtgtggttgttattgttcatctgtgagtcgtgtggccgagagaatcataaatgggaaagttgaataaccattttcaatgataggccaattataatggtaaacacacaattaatttaacttttttacaaatgattaaagatgtttgttttcgtgccaaacagacatgtgatttggtgggatatttggcagtcttttgtcaatatggtagcaatttttgcctattgtttcatgattaagactcttatcacttgtcatttcctgacttttgtgcatagaactagtgacatgtgatatactgtagtcccatccagtttataagttttgaatacatgtctctagccattcagaataaatcttgcagctaaatgttttagaaaccggaccagataccggttcatcccaatttcagccacatgaacgattcttggtctgcaggaccggaccggtccggtttttaaaacattacaaaaataattttatatgcgtaataaaaaaatgaaggaacaaaactgtaatgttcgtctcgggagacacaatccagaaacgaaacgccttttgtgagagagagaagagaagagaagagaagagaagagaagagaagagatcgcaccacacaaaaactacaattttgttttggaaattactctcacccacctgaattttgttgctagagagacaacacttaggttttgggcggagttctgatgtgaaatgaatcggcgtagaaaattttcaggatcctccaattcgtcagagagtgtagcgaggagtgtctgatccgttcgctgattcta

SEQ ID NO: 2704 - DNA, 3000 bp, Unknown
  misc_feature (1)..( 3000): cDNA_ID_3409493_gDNA_ID_1620578_Annot_ID_161051 3000 nt of promoter + ATG
agtaagaaaagtagtgaaagtatccaatgtgaagaagaagaaggtccaatcatttctcaaatactctcgtttgcaatggcttgaccgttcaaaccccaaatcatttctacttttactttttacctttttgcaccctccatttccatcttctttgggtttcacattatgttttgtcttcccattctggttggtctattttcatatggatctccaaaacactttcgtggaaaatgtatctattgcacttatagtgaaaaaacgatgaaatatgtgacgataaatataacaagaagaaaggaaaatcctacaagacaattgattgctcttcatcttttctttattataatctcttccaaaatatgtatatttttctatatatactaaagtgttaagaaaaaaaaacaagcttcattatcattataagacttccgttttcactatagaagtaggaacggtacaagtcatactcactgacttataaaaatacaaacaaataatgataacataagaacattattattgagatcataatttatgaccaatccacaataatttatattatgaaaatataaattcaatattagatactgtaagataagtttcgaaggacaaaaaaggagataatttctatacagaaacccaaatgaacaacctgcatcaccaaaaattaccaagttagccaaaaaaagtttttttagctagttagccaatgacttaatcgtatattatcaatcataaaacttgataccaaaattatctaaacctaattaatcccccagaagaaacagacacgttctctcttgtcagaaaatggcactgactagtaataattatacccaagatatttttcattgacaatcaaagacatctgaaactatattcaatagtgatagatgtagaagacccatgatttagtaacctgaaccaaatctttgatgtacagataagagagatctggttgctcacaatcatacaagcagagtaacatttaatattaccacgccaaatatttaagttatacaaaaaccattaggataatattactaatccgtatagtatataaattaggattaattaaaagtggatacacttaatccttactggctttaatggtgtcaggggcccaaaacaaaccctccaccgtttctctctttctgtgtgtctctaaagcaatcatcatatcctaggtccaccatttttatacacataaaataacactcttctcattttgcgtggttaaaaaaaatacacatatatgagatgtttttttttgataaagacacatatatgagatgttgatttgctatcttttatgttcttcaattcaacaaatgttctcgaaaaatatgacataataaactggctgaatatcaagatcatagtataatgtgctccaaaatgttggaccgagagtacttatataacatctatatagtttacatatattcacaaaacgcattaaaaatgctacatatcacgacttcaagtcttctagcatgaccgtgttttgtaatgggtttcagagaatattgaaatttaatttccttctgagtaaaggaaaacacgcatgggagatgagttcacattctttaattcttagataaagcaactaagtgggtttatagtataatttaactatttaagtacacggaattagagttatagttgaggaagagctgatcatgttaattatttttaaattttaaattaaaaagaaatttgtacaccttaaaggcgaaaataaaataaaattgaggagcttctaatggccactcccaaatttcaaaaggtattcatttcccatattttcggcatagaaattctagcttttgttttatatttgaccttttaatttgatttggttaatatgtaacgaacatgcgattatacaatacatttaaaataaaaaaaaaaagagaaaagaagaagagcaccattgtgtatatgctttatttgagagaatatatatatttaatattgatctcaagaagaatagtgaaggttttggtagggacaacagacaatgcatggagccatttggtacgtggatacgccaacaaaatcatccacgcttcgtgcaatttaaagcaaccaatacacttaaccaccactctaagttccattcctcaatcttcaaatcaattgattatcatatgtatcccatacgtgtaagcgtatgtgaaaatagatttggttcaatttataaaaaataaaaaagtcaagagacatgattggatccacttatcattatactctatatgctgacaatagaacaatattttacatagtataactcgggagttggtcgagttcatagcatcaaagcgtacttcaaacacacactgagttgtaacaagcatgtccaattgtttagacatgccacaaccgatatcttcatgtcaatatcaaatcaagatgagaaagatcggcttagttcttcctaatatcttttaacttcgtaacatcaatttatattagtagtttatccatagtatgtgaaaccaagttggaaagaccaaaatcagaagtatgataaactccacatacgacgtcaaaaatgtagatgtcgaaattcacatactaatatttttgtatttaggtttacgagggagctcaaatctttgatgggccgaacatccagagtaatgggccaaacttttgcactcactattctcgtcaataaaatggttggtaccaacacttattttgataataagtgatgattattgtttttggaaatacaaaacaaaaaagtatttattttatgaaaggaaaaaaagaaatgtaaatacagatacattagcgtcgaggcaagaccatgtgctcactcacatgcggtcttctcttctcttctcatcttccctttttatgattttcttttcccattttcctctgcgtttgattatctgagagagagagagaagaaacttgttgaaacaaaatcaacaacaacttatagaagaccaaaaaaagattcataggatcttttgcttgacaatg

SEQ ID NO: 2705 - DNA, 3000 bp, Unknown
  misc_feature (1)..( 3000): cDNA_ID_2105578_gDNA_ID_1620578_Annot_ID_161053 3000 nt of promoter + ATG
gcgacggcggttgtgtcttcttcatctttcttcttgttcttctctaaagtcaaagctctgcttaagtgtctctctagttgctcgtctaagctttttagatcaatctgatctgctcgaacaaacccatcctttccttctttcattgtcaagcaaaagatcctatgaatctttttttggtcttctataagttgttgttgattttgtttcaacaagtttcttctctctctctctcagataatcaaacgcagaggaaaatgggaaaagaaaatcataaaaagggaagatgagaagagaagagaagaccgcatgtgagtgagcacatggtcttgcctcgacgctaatgtatctgtatttacatttctttttttcctttcataaaataaatacttttttgttttgtatttccaaaaacaataatcatcacttattatcaaaataagtgttggtaccaaccattttattgacgagaatagtgagtgcaaaagtttggcccattactctggatgttcggcccatcaaagatttgagctccctcgtaaacctaaatacaaaaatattagtatgtgaatttcgacatctacatttttgacgtcgtatgtggagtttatcatacttctgattttggtctttccaacttggtttcacatactatggataaactactaatataaattgatgttacgaagttaaaagatattaggaagaactaagccgatctttctcatcttgatttgatattgacatgaagatatcggttgtggcatgtctaaacaattggacatgcttgttacaactcagtgtgtgtttgaagtacgctttgatgctatgaactcgaccaactcccgagttatactatgtaaaatattgttctattgtcagcatatagagtataatgataagtggatccaatcatgtctcttgacttttttattttttataaattgaaccaaatctattttcacatacgcttacacgtatgggatacatatgataatcaattgatttgaagattgaggaatggaacttagagtggtggttaagtgtattggttgctttaaattgcacgaagcgtggatgattttgttggcgtatccacgtaccaaatggctccatgcattgtctgttgtccctaccaaaaccttcactattcttcttgagatcaatattaaatatatatattctctcaaataaagcatatacacaatggtgctcttcttcttttctctttttttttttattttaaatgtattgtataatcgcatgttcgttacatattaaccaaatcaaattaaaaggtcaaatataaaacaaaagctagaatttctatgccgaaaatatgggaaatgaataccttttgaaatttgggagtggccattagaagctcctcaattttattttattttcgcctttaaggtgtacaaatttctttttaatttaaaatttaaaaataattaacatgatcagctcttcctcaactataactctaattccgtgtacttaaatagttaaattatactataaacccacttagttgctttatctaagaattaaagaatgtgaactcatctcccatgcgtgttttcctttactcagaaggaaattaaatttcaatattctctgaaacccattacaaaacacggtcatgctagaagacttgaagtcgtgatatgtagcatttttaatgcgttttgtgaatatatgtaaactatatagatgttatataagtactctcggtccaacattttggagcacattatactatgatcttgatattcagccagtttattatgtcatatttttcgagaacatttgttgaattgaagaacataaaagatagcaaatcaacatctcatatatgtgtctttatcaaaaaaaaacatctcatatatgtgtattttttttaaccacgcaaaatgagaagagtgttattttatgtgtataaaaatggtggacctaggatatgatgattgctttagagacacacagaaagagagaaacggtggagggtttgttttgggcccctgacaccattaaagccagtaaggattaagtgtatccacttttaattaatcctaatttatatactatacggattagtaatattatcctaatggtttttgtataacttaaatatttggcgtggtaatattaaatgttactctgcttgtatgattgtgagcaaccagatctctcttatctgtacatcaaagatttggttcaggttactaaatcatgggtcttctacatctatcactattgaatatagtttcagatgtctttgattgtcaatgaaaaatatcttgggtataattattactagtcagtgccattttctgacaagagagaacgtgtctgtttcttctgggggattaattaggtttagataattttggtatcaagttttatgattgataatatacgattaagtcattggctaactagctaaaaaaactttttttggctaacttggtaatttttggtgatgcaggttgttcatttgggtttctgtatagaaattatctccttttttgtccttcgaaacttatcttacagtatctaatattgaatttatattttcataatataaattattgtggattggtcataaattatgatctcaataataatgttcttatgttatcattatttgtttgtatttttataagtcagtgagtatgacttgtaccgttcctacttctatagtgaaaacggaagtcttataatgataatgaagcttgtttttttttcttaacactttagtatatatagaaaaatatacatattttggaagagattataataaagaaaagatgaagagcaatcaattgtcttgtaggattttcctttcttcttgttatatttatcgtcacatatttcatcgttttttcactataagtgcaatagatacattttccacgaaagtgttttggagatccatatgaaaatagaccaaccagaatgggaagacaaaacataatgtgaaacccaaagaagatggaa

SEQ ID NO: 2706 - DNA, 3000 bp, Unknown
  misc_feature (1)..( 3000): cDNA_ID_2168052_gDNA_ID_1620579_Annot_ID_161086 3000 nt of promoter + ATG
catgtttgaatgtttcaaaatatatgtagaagcaaaactctgatagagctttaatgccaccaccacaagcaaggtttgaatcaaattctaggaagaatttatatgtacagaggaatgagatgccatcatcctcgagaaacaacacttcaaacagaagaagtgagtcttcatataatgcaagggcttctgcggcgaattcatatagcagtcagagtagcaacttgagctccaattctgatgctcataaacccaaaaggaagagaaggcctaagaagaagaagcaacaggtcggtttacttacctacgagttaatttgtaggaaacaaatctttgaatagcatctcatcaaatatcttgcgagctgtgaccatagtgtttgattcttctctttgctgtttttgcagtgatcggatactcggcttctccaaacactacacactcttcatcagttccaattactctactgggatctaatgcagatatatgaaatttatatagatttttgttgtggtcatggaattcagagagatatgtgtttgttgtttttagcttttgaaatgaaactctaaagtttttgggtataaactcccatttgagtctttcatggagcttttttaccagcacaattgaccattgataatttttttcccttgaatcagttttttcagttaagatacttgtcttttttagattgtccgaattaaatagtttttgaggaaaacaaataagtgaagaaatgataatttttgcacccaaaaaagcaaagaatgaaaactttattctaaataaaaaatttacaattagtttttagaaatgagaagaaatgtttgactgcaaaaaataaattaagttgttagcaagttttggttttgccaatcaacgtttttaatacaatgtacataaacaatttcattctttctaatgcaactattttttaaccaaaattttctgagagaatgaaattgtttagcgttcttgcggtaaaacaataaatttagagaactgatatatgttatattgaactgatcataatctaaaatctaatttattaataattcaagagaaatgaacattaactacaacgaacaaaaataattcaataattaatggctgaaaaaacaaaaataaaataaaataaatgttaagaaaaacccaaagatttattgatttgttgaattgtgattgaaggacgaggcaccgagtgacgcagttgaaaaactcaagaatctcctcggacaagagcagagatccagagtgatgtctgagaagattcattcaacacattaacgaaactccccaaaatagcttttattgatggactcaaatttcaagtggcttttgtttgccatcttgatctctctgacattttcgggttttgttcttcaccatggagttctcgctgaaagtgttaagcctgatgaagctaaacagcttagagacgaggtaacattcctccacagatctggatttcgattttggtcatcgattggtttatcagttgtccccaaattgagtattagaacaatttagtcttctgggacacttaaagtcttgatctttggatgttgtaattactcattgatgttaattatgtcgtaaaggtaagtcctttagccgttagagaagaacatttagttgttttgcacacaataactagctgagatcacttggtttgatagtggagttgcagctttgacctttttgttcgataattaccttatttgatgatgggtttgatcacattgagtgtaggtacgtgggatgttttatcatgcctttgatggatatatgaacaatgcgtttccactcgatgaattgagaccgttatcttgccaaggagaagatactcttggaggctatgcgttgactctggtaagctttaatatataaccttctcttgtgtaaggctttgtcttatgtaaaacttgacaatggttttggtggcatttgtgtagattgactcgttggatacattagctttacttggtgaccgagagcgcttcacttcttctgttgaatggattggtaaaaatcttcagtttaatatagtgagtaatgattggttttggcttctctagcaagatcaagttataattgttattttctcaaatactccttttagaacttttgtatgatgtagcctggcagtgaagttgatgaaatgatacatgtctttttaactgcagaataaaacagtctctgtgtttgagacaactatccgagtccttggggggttactatctgctcatctgattgcaagtgattatgcaacggtacgtttttttctgcgtggctatatctttcgtcatgattttatcttatgtgagggtacttgtatattcttcagccagaagagataagtatttttttgcgctctataatgtgttaggctttatatgagcttattctgcaaactagtcttaggattcctaattgtcttatcgggcttccaaagtctaaaaatctccttattaaagtggttttggttgtttgtcatgtaagattgaatttgaatctaatctgatgacagggcatgagaattccatcttacaacaatgaattactagttttggctgagaatttggcacggagaatgcttcctgcatttgatacaccgactggtatgctcttttagttatacacgtgcatatatgaaagcgagaattgccttgtcatctccttcttcacttgttattttctacaggaatcccatttggatctgtgaatttgatgtacggtgttgacaaacatgaaagcaaggcaaaccatcttcttttaccttctcatagctttcacatcttattcttacttatttaatttgttcatctgtgctattggtgccgtgactggagtgcatattaatataaatgataccgaaatgcttggttttcctatctttgctaggtctcaacgagttaaagagagttgagattaaactgctcattttctgcttgctgatcttatcttttgattcctatattggaaactcatttattcatg

SEQ ID NO: 2707 - DNA, 3000 bp, Unknown
  misc_feature (1)..( 3000): cDNA_ID_3069312_gDNA_ID_1620579_Annot_ID_161102 3000 nt of promoter + ATG
gatttctataaaaaatacattccttaatagattaacttaagccatataattataggccggtggtttgcatatctaattatcaacttcctcgtaccagaaggaaccttgtagcttatagagatatcattgtattcgaattgatcatattaaactattttgatatttacttatttttctaaagaaactaatttttgctaaatttattcaatgactagtattatgttttgaataaactttgaactgtatattctaacctgaaaaataagtggaattctacagatcaattaccaaagttttgtctttgtttttgtgatatatcgaaggttttagagccaagttcgtaaaaaaaaaacaatgtcaaaagttaaaatagctcgaatgaattttgtttcatgtaggttttttttcttatgatcggacgtttcatgtagtctcatggagtatgttataaacaaaagaaaaaaaaaaatagtggaagaaaacaaaattaatgaggttgtagtagagtcacgaaatggggtctgcagaaagaaaagaaaagactgcaagttcgaattattccttcttccgtgtgtgtaattatcatttgcttttattattttaaaaaatataaaacatttactatgtattttcttacatgtaaaccatttactatttttctccacgaatatttcttatgtaaatttatataaatgtatgtataaatacatacactacgttagtggtactaaacggaccacaaagaaagtggccatcaagcttaagcagctgcaataagctgacacataaagaaatctgtctatacatatccaataaaatctaattcaataaatatgtacaaatggtcacaaaaatagtaaagggtgtaatcatgcaaagtcgtggtctagtcgttttctctattaattaagcccaatttcgaagtatacaattaggagcaattgggaaagtagtacattttaatgatgatgctaatttgcagttgtaacactttatcacaaactagacaatccacattcaccggcggaaactaacctagactagtttccaacatcaaaagtccaatttttgtttcgtttaaatagatggcgcaaacgtacaactaagattagatttaagtatttaactctacaactaggttgagccaaatgacgacaatgacaatgccgacgactgttgatatacacaactaacgtttatctgattagatgagttcgtgaacggctacacatccattagcttctatttaaaccatttgttatgaaacaatgtttgacaactcaaatgaaaaagatgaacaatatttctataccaagtaccaagtgaaactttttgtgtttacatcaggtatgtaatcattttccgtgttcctttgttaaaaaccgtccatccttgattcttctgataatggtaaaactatccgtttgttaaattgttttattgtatttttatctattgtaaaaaactaattaaattttaaatttgctatgcataaacaatactgtatatacattttttataataagattagagaattatagtaccatcttgtaacaatgatgtaataagagacgaaaaaaaaataactaactgatcattaccatccataaataaatagttgctgccataaaccaaacacattgtgcttatcaaaaagaagaaatttgtacttaatgaaacattcattattagcaaagtgtaaaaccaaagaaaaacaaactttatttctcattttattagtaaaagtgaagaagagtaaagaaaaagagagactgagatgaggctgagagcctgagtctgcgggtggagagagagagaaagaaagcctctttacacgtgatttttaaaagagaccaaaaccccaaaagcaaacctcttttgcatgcgtccttaaaagacataaatttctctcaaaattttctacatcacaaaatcaatctttttctcttcttcttcgtcttcatcatcatcatcatcatcttcctctttctcttcctactgagatattttctccacattgagaggaaagctatcttctctagcgtcactcttcttcttcattggtcggtgagtgttttattttttttactgtatttctttttaatatagcggacgggtcattttctctccgtagcaataaattcacttatataaaataaaattttcattcttcttggagatattgatatttccactgctcttttcgatgtttattccttcactttgttcacttgctcttagtttttatctttcactctctctctctcacaccaaagttcacagcaaaataaaattaaaataaaaaagcttcgatttttcgattaaaatctttgtaattatctgtttgggttttctccgggatctcattttccggtttcaaatagagacaaaagattaaagctttctccggttttgtcttctgggtattcccaatttcccccatttcacttaaagctttaatctctgttccttgtttttgtctgtgattcttcttaatgaaaacaaaaactgtaaaaataaaaaaaaaacttctggtgattggttccttttattcttggtctttacagtgttttcttctaatttcatggtttcttgtctctctcttttttatcgagaaaaaaactacatctatctctgtaacactgtatgtatatacttcagactctgttttaatctctgtttttttttacctctctggtttctgaaactttgtaatagaagaaactagaacaacaacattttttacttcactgtttcaaagttttgatttttattattaaatttaacccaaaacaccatcatcatggttttgttttctggattttctccatttaatgcaatctgacattttcttataattattttttgtttgtacttatttttctttcatcctcatgattttgcaggtagaataaggccaaggaagggatcagttttaagttttgtttcattctttttgtagtggagaaaaagagtttttgaaaatccaaacaacaaaaa

SEQ ID NO: 2708 - DNA, 3000 bp, Unknown
  misc_feature (1)..( 3000): cDNA_ID_3069296_gDNA_ID_1620579_Annot_ID_161107 3000 nt of promoter + ATG
taactaattcacgatcatctccttccaaataagccttcaaaaatgatacaacaagtccaccaacgaatctcctcattggtctcctctcttcaccattcttacacaaacaataagaactcttccctctaatcccttttgtatcatcatcaagcatgtccaaatgcccataatccttcgcaacgaaatgccatgctggaccttgacattcccgaaagaactctcggtgattcactccgggaggtgcacacggtgggaataatgggttccgagcggtttcaccaagccccgaaccgatcacaagtataggcgttttgtctaggtcaaatgagtttggaaggtaagccaacaccggaggaggggtttgtttccctttccctgttccatcgactggatctataccgatcaatgtcgagatctttagattcgaggagtacccaaatttctttaaggcgaccgcaaacgcggttttgccaccgcggctatggccggagagggcaaatttggataggtttggtgttacttgcgctggaagaaagtgattaagtcctactgataaccaatccataatctccgccgttgatttaatctcatccattgtgtctggtccggcgatactatataactgttataatatcacatagccaagaaatttgatttacaaccatataaaataaaatgttaacatttgatattagaaattcgagagactctagagacaaaaacaggataaacacatcaagtggacccattgatatgcatttttgttcttacttttcttcttgtctaaggttcttataagagccaaacaataataaaagaaaagtttcagaaaaataactaatttaaacgtggcataatgtgttccatgcatccagctgaattatagatacatcttggttaaatcctaaatcctaaatcctataagtcctaacaaatcaatgtatatgtatttattatgatttttttggattcaactagaatatcttaatacatggacctacatattcatgaacattcacactaaacctcaaaggaccaagtagtcagtcacatgcaatatttgcacaaaatggaatggaacgagattgtagcgaatttacatttttctaaactctacactaatactaaatccctaaacaaaaactatacactggatttaacaattccgatagtaccatttccataaaaataactcataacattttactaattaaacaaaaactatacactagtttgaccccccaaaaaataatttctatactaaattactaatacacataggaatctaaaactaaacaagaatttcagtggctaattagttcctgaactaatgtaatgattggaaattgaaattgaacctgaggagcgatgaggatgaagccatgagaagagacatgcaacataagctgagaatagaaggagttgtagagaaggtaaccatggaggagcatcaccaccggataatctccttcctccaccggcgtagccaccaacagctgctttggcggagacggtgaagctctagaagacggtgttattttgcagcaacgagatgatgagtccaaggttaagagatttgatttgtatttgccatcttcaaaggcgtttcttgatgaagaagaggacattttttttgttctttattagtttttcttttctttactttttttgtttggtgggttcatgagaatgaggtgagtagagatattattaaaagttataagaagtatggccgttgaaatcttggttaattttaaagagcacataaacaaaatcaaatagaaaaaaattacttatgttaaattacttatattattggggttggtgtaatgataaatcttccagatgtagatattggattaaacgtctgttgaaaagaatctattttctaaagaatataaatttaacttgtgtcccatctctaaaaaatataagacctttaaatttaaacttctaaatatttttttttaaaaaacaaatcaaatagaaagaaattacttatgtgtgcatggaatataacaactacaatcataaggccatatattcatagtctattttcagtattgaaacctgattttttctaattttgggtaataaattttatgaagtctttttattatagtctagttaaatttctctatatttaaacaaagtcagatcctatatatatgagattttttggaattttaaaaaatatttaaattcaaacaaaataattggagatttgaatttttgtaagaaagttactttgtgtttcagattaaatttaataataaatggtcaaaagatttatgactaagaagtattaaaaattaaaatatagaagagaaaaaaattgatatgatatgatatgctcttagcaaaaaaataaattgatatgctgttgctgggtacaaggaatgggctttgtacttcatactagactactttttctctagtccaatttaaaaaaaaaaaaaacattatataacattcgagactaatttaaagtgttaaacggcccaatttgtattacacggcccaagttaaagtgttaaacattacctcattacctatgtacgatttgtggaaaaaaaatatatatacctatgtacgattttggattacattttttttttctagttaaaactaatttcaagtttgaaatataaattatatatctgaatatagatcattctagttcaaatcagatggaaatatatgaacctcagaaaatacaatatcatacaaatgagccaatgttttggtcttattcattcatgatcattgtggctcgaaaacggttgtttttttcgtgcaaaagaaaaaataacgattttttattattagaatttcgaaaccagaattaataaaaattaggagaaaggaaaataatacgaattaaagtgatcgtacacgtggctatcatcgacggaggaaatagccatttatttatctgatcttcatcactctgatgagtctgaaatcaaaaaagcatttacacaacgaagatcattaatg

SEQ ID NO: 2709 - DNA, 3000 bp, Unknown
  misc_feature (1)..( 3000): cDNA_ID_2109199_gDNA_ID_1620579_Annot_ID_161097 3000 nt of promoter + ATG
atatgaaagtaattataagtacaatttaaagcaaacaattatgggagacatgaacagagattttgggaataagcgatggagaatttgctcattgattgttattttctttctaattgggtcatcagtcatgtgtggagatgcactatagtgaagaagatttgatgcatcattttcactaaaggtattcaaaaagaattatcagtctcacatctgcatagaaattattgttataaaaagaatagaaccaagataaaaaggtggtattataatgctagtttttttttacttattttattggagctgagaaaaggtgggattgtcttgttgtagggacaacttttgatgtgttccaaagagacctttacatgcttttctcaaattgaagttatccaaatcaaaccaaaataaaacaaacccaaccaaacctaaaattacacaatttcataaagatttcttgtcgaactgaatcagaaccttcaaatcaaattattatataaccaaactgaaatgaaaccagttcgaaacttcaacatttttttctaacacttactcaactaatcactaacttcaaaaaaaaattatactctctccgttcattataaacaccgtttaaattttaaaatctttttacgttaataaaaatagcaaaaatatattatatcctttttaacaaattatataatatttatctcttgtattagtagttttgatcctttattcataaaaataaaaaatatgaataaagttcttatttgaaggaggaaaatacaagaaaattgcacattgacgattattaaaaatgttccaatggatttgatatatatatacacaacaacaacaacaacccaaaaaaaaacaaatgggccgtcctcatgtgaaatctaataggtctcattactaacgcaattgggcctataatgtttaaatttgcaaacaaatttaatcttcttctcaattacaaaatctgagcaactagaaacttattagcttccacatatgacatctccaagcacaagcaagaatcatcgatgcttaaacctaatctcaaaatgcaaatccttacaaaacctcaaacaaatccatgcccaaatcatcacaatcggtctctctcaccacacatatcctctaagtaagctccttcacttatcctccaccgtctgcttatcctacgcactctctatcttacgccaaatccctaatccttccgtcttcctctacaacactctcatctcttccatcgtctccaatcacaattccactcaaacccatctcgcgttttctctctacgatcagattttgagctcaagatccaattttgtcagacccaatgaatttacgtatccttctctcttcaaagcctcaggctttgacgctcaatggcatcgccatgggagggctcttcatgcccacgtcttgaaatttctcgaaccggtgaatcatgatcggtttgtgcaagctgctttagttgggttttacgctaattgtggtaaattgagagaagctaggtctttgtttgagagaattagggaacctgatttggctacttggaacactcttcttgctgcttacgctaattccgaagaaattgatagcgatgaagaggttttgttgttgtttatgagaatgcaagtaagacctaacgagctttctcttgtagctttgattaaatcttgtgcgaatttaggtgaatttgtgagaggtgtttgggctcatgtgtatgtcttgaagaataatctgaccctgaaccagtttgtgggaacttctctgatcgatctttactcgaaatgcggatgtttgagtttcgcacgcaaagtgttcgatgaaatgtctcagagagacgtatcgtgttacaatgcaatgattcgtggtttagcagttcacgggtttggtcaagaaggtattgaattgtacaagagcttgatctctcaaggattagtcccggacagtgcaactttcgtggtgacgatatcagcatgttcgcactcgggtctagtcgacgaaggtctccaaatatttaactcaatgaaagcggtttacgggatcgagcctaaagttgagcattacggatgtttagttgatctactaggccgatccgggaggttagaagaagcggaagaatgcatcaagaagatgccggtgaagccgaatgcgacactatggagatcgtttctagggtcatctcaaacacatggtgactttgagaggggtgagattgcgctaaagcatttgttggggttagaattcgaaaacagcggaaattatgtgctcttgtcgaatatttatgccggagttaaccgttggactgacgtagagaagacccgggaacttatgaaagaccaccgtgtcaataaatctccggggattagtactcttaattaatttacaaatgtaattgaaatttaatctccaaaagtaggaccaaagaagctacaacaacttgttttgtttttctaataaaaaaattgtaaactaatcaactataccacaaaatcatgtgtgattttatttgcatagaagacaagtcatatgaaattcaaatataatcttccgaagaccaaagctacaagtacaacaacttgtttttattaaaaaaaacatgttaatctctaataactcgatacgtgtataccaaaaactattacaaaaatctttatattaatgtcgatgtgacaaaatatcccatttcttaaaaatattttcacaacaaatcctgtcgttacactgttacacagaataaagaaaaaacagttgttagattgttgtcctttataccatagattagtcaaataattgaattaggtgcttattgacacatcaattaagaatggtattagaccgatgtccattcattatccactaactgagtatttttaatgaatatgtagtcctaattaatcatctatccactaattatgtcttaattacaaaaaaaactgattaatcaatgttctcttaaagattaagagagccaaaacgaagcaaattaatctgccttcaatg

SEQ ID NO: 2710 - DNA, 3000 bp, Unknown
  misc_feature (1)..( 3000): cDNA_ID_2168072_gDNA_ID_1620579_Annot_ID_161091 3000 nt of promoter + ATG
gaaaattctatgtcagtttggatttataaaagaatggttaagatttaaatttacaatgaattcaatttagtggttttaatgaattaagctttttatatatttagggagattaattgttttaatttgtttaaatatattatatggtaatttttgattggctaattaagagggggtgaatgagagaggttcactcctaaatgtgaacccaagaattattttaaaataatagaccactaccactaaagacaattcttgggttcacccataggggtaaatctctcttatttaaccaatcaaaatacaacaaatatgacatgttatactgtatttaaaaataaaatttggcgaaaaaatttcagtttctaattacatgttttcattagctgataggtaatttggtctttcaataaaaaaatattttttaaaaaggccaacataaaacagtattgttggaaatgtgatatagaaaatagtatttttgcaaatcctccattattaatcaccaattttgtgcctcaatagatatcttaaaatgagtttgagtgcaaaaataatacaaatagcccattttgatccgcattttcaggacccagtttaacatcaccaatattattggtaaggcaaaatgattaatgttattatatgcaacatcacaattaaaatataaaacataaaacactcaacaaaatagttgacagcatttattttgtgcaacaaataattgacaacaaaatgcaaatatatgtgtttataaaactcggaatggataaaaggtttagctatgaccttttagtgaacatatgagctgcacaggtttctatatgatcattacaaaaaatgtatataatacgttaagtcaaagacttaaaacttatgtataaaatgtgtaaagaagacatgaaaatcaagttcagaaatattgtaatcttttcacacaagagcaaccaaaacaattcaaccataaaagtgaaagattatgccctccacatgtgagtccatttcaacattaagatagtcacatgccaaaaacaatggctaagaaaaaacaaaacaaatatgggttcttacaaaaggacgaaataatcaaaatggcctagaaatattactatattattctatttcttagttacaatttttattctttttggtcaagctaatattttatccacaaagaagtctaactagttgattctgaaatgtacaaattgttaaaatcaaaattatgtgataatatagaataatataaattcaaaacaagtatcacattttttttccagaaaaatacaacaaacttttaggaaaatcattacaaaggtctaaacaccttccaaaatcatgttacacttaaaaaactggtatttttgtaagacacaaaaaatattcgtatgtctgtatacatttcatacatatttacttttgtgtaagatcatatagttcctagcttttcaatggtcaaattagtatgcaaaatccacattctttatgtctttgtctctctgtggtaatgtgcacgatcaaaactcgtttttcgtttggtaatatgtaattatgtaagtaaaataatttactattttttgttcttttcatttcaaccactattctcagttttttttttttttttgtttctgatatttatttaaagttttaaactatataggttgtcttattaacaacacattgaaaatgatatttcgggagccaattacgtccgagttccatcttgtggatgaggttttaacgatagaaacaaaattaaaatacttgtttaattagtattcgttatattatatctcttccaaaatgtatataaaaacgagagaagtgagtggaagaagaaaaaatacaaaaaaagtaagtaaaagagagtgacgtaacaaaaattggaaagcgtgatagaattggcaatgataaccaaaaaaattgaggtttccattgagattcacattgtggtgtacccacgtgctttgtgttccacttcttcttcctcttcgatctcatctcataactcataagtcatacctaatttaaacaccaacaaaataatattgaagtcgaatagtatatattaaaattttgttagttagttactatgttggtttcaattttatgcagcacgttctctaaggattgttattattcgagttgtgaataagatactttgtgtggttttccataaataaattaaattatacgagtgtgtttgagtcaatgttaaaggctttctcgcagtccatctttgataattaaagtggtgaccaaaagtaacaattgaaaaacaatgacttgacttagcaaaaagattgtaaaatagtactactcacccatgtatacgaaaatccaaatgtttgtaggattttgcatttgctcgtaaaaaagacatgtttatatggtctagggctgtgcccaaaatcttctaatcataagaaaaaaaattagacgcaattttttgatgatcagaaaaataaagtcattaacaagtaaaatctctatattttaagtctagtttcttgtatatatatttgatatgacaaaaaaaaaagtatatatatttgataactatttcatattatacgtgaattggatatttgtgctgtctaactaagtgagcaacttaatgatccagagtgacatataaaggtttgtttgcattagtactgcttttgtgtgaccaaattaggaatctctacttcatttttttttttctacatctttggatgtataaggcccgatctatagtcagtatctattacgcagaataatgcgatttagtagaatcgaactccggtaaaaattaggagtcaaatgaacttaactacttaactaaaggcaatatggtccaaaacattgaagtcattaacaacaaaaattgataattgactctaattaaaatacacatttctttccctcgaaaaggaaaaaggtgcaaaatgtaaagatcagcctcatatatatatttaagcggagaaacaaagagagagcgaggagaagagataaatgatg

SEQ ID NO: 2711 - DNA, 3000 bp, Unknown
  misc_feature (1)..( 3000): cDNA_ID_1028034_gDNA_ID_1620580_Annot_ID_161121 3000 nt of promoter + ATG
gaaaaataacttagcttataagatttaacttttcaattattttcatttattaattttaacttatttaatattaatttgcatgatgtaaaattagcttacgagattacggcatatatagaaaatatattttcaacaatgtttggtttctaaatatttttgtggatttctattttttctattaatttttaagcctaggcgtttgggtattcggatcggatatttcgggttcgggttttcgggtttagaagtttaggacccgttcgggtaatttaagatttcgggtcgggttcagtttgggttcgggttcgggttcgagtttatttatatattgaaatatcaaattttgtgtgcaaatctattaaattatttgaaaatttcaaaaatttccaaaacaacacgagtagttttgcttgaatatatctaaaaatacacaaaaataactaatatatccaaaaatatcctaatattttctatatataagtataaatgtaactaatatatatttatatttgagatatgtttggatacctattcaggttctggttcgagttttttggattttgaagtttagacccgttcaagtatttaaaaatttcatgtacacccgcctaaataggcgggccttatctagtgtatatattaaaagaggggttttagttctgatgtggtaaacccacaattattcttagcatttttattttttatttatttaattctactattcaatttaccaaacatttaaattagaaactatatcatgataaaactaattgccaaacatatgccatacaaattcaacaccataattactaaacttaccataattaaatattttgaattaaactatataaaaaatattaaatgcatttgaacaccatacaaattctcctaaattataatattgctaaacatatggataaagtaaatggtatcttatgtgtaaaatataatccatttaatttagttaaaattgttaaaattcaaacaacattctcttatagttatatcatattctatggtcatccattcatttaaccaatataaattatctttcaaaataaataaaactaaaatagatacatttttggtaaaatgcttatagatatatatatatattcctctatctatttctttatatatatcatttatttatttatttatacaaaaatatgcttataaaaaatgtgtatatatataaatatttcattaagaagttattatactattgatctgcttttctttgtatttttaatcaaattactattgatctgctatggtaccaattcgattcggagatccagtgatatggaaaaaaccttcggtttgatgtttgaattgtggtgaaatacatattataaaatcatacacaatcactaattcactatataatggtgaatgcaaggttccccctaaatactagctgcaatacgttaaatttaatagaataacaacaaatgcaaagccaagaacacttgtttaataataagatgctcattcttgccagtgtcttctatcaaagaaaaactcacaaaacatggtgtgtatgtggtttgtttttaagttttaaccaagaaaaagatcgttggtcttacggtagacacatgaatacatatgagtgggatttggtacaagaacacttgtttaaaaataaacaagtttaagcatgttattattaaacaagtttcctagatttggtttgttttagcgaagacaaagatcgctggttctttttaggtgtattataaaaatcttgggggaaaaaacctgaaaaaactctcatttattttttatttggccgtttaatacctgcattatataatttgcccaaataatatttaggttaattatttttctctttaaaaaccttcatttttgtttaatttgataaaatcagacatccaacttaactgctgttaactttttaacagactttctaactgtagttaaagtttaacccatcgtatttacaaatatatatacaatctatttccaaaattttacaattaagttatcttagtcaaggcaaaatatgatattcaattcatgtttaacctgggtacgaatctcgcttacgtctttgtattcgttttttttttttgggacttcatcttcttcgccaaatctggattcgtttttttttgctttctcaaatttaggtttgaatcccccaatcaaattgaccacacaataacaaaagctaatcaaattaataaacctaaaagaaatcgtcatgttgaaatcgctgtttggatctgaattttttttacagaaccttcgaaaaaaattaaaagtagctttgtcgaagttaagccgagcttcatcaattcgtgttatttgtctctcttgagaagttaaaaacatcgtaccaataagaagaagatgaacttaattttgtctggatgaaatctttaaattccgagaaagaagaagaaggaaaaaaaaaagagactataaacgtcgtaagaaagtttcgaacccaggtatatcagaaaattaaatctgtgtttaaccgctagactaaggtaacatatttatagaatatagaaaatagattgtatatatatttgtaaatatcatgagttaaattttaactataaacatctgttaaaaagttaacatccgttaagttggatgtctgattttgccaaattaatacaaaatgaagatttttaaagagaaaataattaacctaagtattatttggacaaattatataatatagatattaaacaggcaaataaaaaataaactaagattttttcaggttttttccttacgtatttgttcctcagaatctttagtttgttatgaaagtgagtgaaaacgcaaacgtgggtttgtggggagcgtttgcgttctaaagtttcaagaatcgacgcaaaacgtgagatgtgtttttggtaagcgtcgtgtctctctctcttatcctctgttcacgccattcacaagcctgtgtgaccacaaaatacgacagaattagagagaaaagatagagagatg

SEQ ID NO: 2712 - DNA, 3000 bp, Unknown
  misc_feature (1)..( 3000): cDNA_ID_3069341_gDNA_ID_1620580_Annot_ID_161130 3000 nt of promoter + ATG
tgaaggtaaccttaagaaccaaacgcatgaattcatatagaaacaaggatagtatataatatgacagtttggtttcatcttcttgttcatttttctaatttgcagctgctacaaatgcaaaggctaatggagaaaactgtaagaaagcttgttgatatttttccttatgtcattttctatcttttaagtttttgtctgagatgttttgtcacaacagctgcaaagaatccatcaaccataagtactacagtgcagaaatcttctggcggatacaatggtaatataatcttcagattctcacaaacaaatattttcccaaaaagaaacaagatctcaatgtttatatgttctttatttttcagctggtttagaaggtcttctaaagcctgcaggttagctttaaagcttattcattcttgtgaatgtttttaaccgaagaaagtcacaagagtgctaatcttaattgtcttctctctgttattgtttcttgcagatggtgtatgtggttgtttcaacaaggataaagatggtcttcaggcagacactgattcttcgattaacatagcggagatactcgcagaagaatccaaattacaggtttgttttatagatctttcttgaatagacaatggaaggctctcacatctaaaccaatctcatttttgtttatatcttttgcttttgactttggtagggctcagggacctctcggctcaccacatcattgaacaatcttgttgatactcatagaaaagaaacgtcctcaaaggtaggctcagtccttggctcatcttcatcagttacttctaccacaagcgaatcagcggctacatcagagagcatagagagcttaaagcaaacactaaggaagctacgcggtctaagcgcacgtgatctcgtaaaccacccgaatttcgatgcgattatagcagccggtacacgttacgaggtactcagctcagcttctattggttacatctctttgctagccaaatacaaaaccgtcattaaagaaggactcgaggcttctcagagagtccagattgctcaaacccgagccaaactgctaaaagaaaccgcaatggagaagcagagaaccgtagactcggttttcgcagcagcaaagaccactgctcaaagaggagacgcgttgcacatcagaatcgtagcgatcaagaaactgttggcaaagctagaagcagagaaagtggacgttgattcaaagttcacctctttaacgacgagtctgtcagagcttctcaaggaggcgtcacaggcttacgaagagtatcacgaggcggtgcataaggcaaaggacgagcaagcggctgaggaatttgcggtggagacgacaaagagagcagaacatatttgggttgagtttcttagttcacttaattgaactaatgagattcttgattgtggttaaagcacatgttcaattagttgtggttcttgtgttttattttcttgtgttgttttgtttgagactttgtttgttgcttatatcaggggagagaggttgaaaaacctttgagagagatagataaatgagagatttgtgaaacacaaataatgttttagtcgtcttataataaaacctttttttttcttatatatgctcattgataatactgcaaaaaggtaaaatcatgtttttttttttttaatatgaatcatgatattcaggcatgttttttccaagattgacaattatataggccagaactagcaagaaataagagttaaagtgctaaaatcagaaatcgagtgtctttatttcttgcaattgcagtttattagtaaataaatcacataaaacagagattagttcatctaacattttcctgataaattgacaaaaaaaggacgttgtaactacttcaatatttattttttgtcggctactaattttatttttaaaattcaacaaatttaagtaatattacatttgacttgagtgaggaaaatgttctataatgttgtcatttttttataaatcaaatttaaattatatcatgagttaatattttaaagatgtcctagaaaaattcacacgtaaaaataaagaaaagagattatcccacacgagtcgctaacacgtgtgacccaaatcatactcggaaaaagcaaaacgatcattatttgaaattaataatgacgtcatcaaaacaacgataaataaagaaggaataattggaaggaaaaaaaatcaacaaataagaatgagccatctctcaccgctctctcctcgtgcacagctctctgactccgttaacttccgagtctccgagcattctctctctctttctctttctccatcgccgcgactcggctcagctctgagaacggcgcaagcttagattgccggagaaaactttatgcaatgtaatgtcttcttcttctttttttttcgtttctttctaattcgtcttcgtctgcttcttctgcaagctcgtgttgttactcatctctctgcatcgacgattttcttctagttttgttgactttaggttttctttagatcgtgaatttctcaacatttctccttaatctgattgcgttgcttttccagtttttttgtacttgggagcagcttcaacattggagcatcggcgatccaagtcggaagttcacttaccttcggataacgcgactctgacctatcggaaatagtaagatactcgctaagatcttgatcttcattgtgacattggtttttctctcgcggctttttattttccataaccgaccaactttctttatttcgtcaacgcgatttcaatttggaattcgaaatccttgtaactggagcagttagggagtacttgatgaacttggatcaatactgtttctatatatagctgatgattgatttctcttcctaaattgcagtttcattgacctcatatggagtgtgtctaattgctagtggttttgtggcttattgaagtcttgggaatagtatattgaggatgctattgtagtaaagaaagtatg

SEQ ID NO: 2713 - DNA, 3000 bp, Unknown
  misc_feature (1)..( 3000): cDNA_ID_2168015_gDNA_ID_1620580_Annot_ID_161131 3000 nt of promoter + ATG
tggatgctgctggaattggtataagattttgtttcaaaatatttttttctactctaattctcgtacacatgcatatatatataaatatattgtttttggtaattattttgacgtgtttttgagtcagctgatgaaagaaggcaacggctggaagatattgaacgaaaactgaaaggtaactttgcctatatatcatatatgcataaattgattgttcgatgaaatgttttttgttttgatcgtatttttattctaaattatttttatgttttgcttaaaattttcttaattattattaaatttttcttaatttattattaaattttaaaccatatttttgctctgaattgattgttcgatatatgaacgtcactttaaatctaaagagtttttctttttatatctttaccgttggattctagccgcggctgctacaaatattgttgtagaagatggaacctcaaagagaaagagtaaggtggaggaaacacaagaggtcgtcaaatttgaaagtgaatcaagtagtgcatcatcggaaagtcgtcgtcagtcgtctagctcttataacagttttaataaaggcactggtggctcggaaatgttgggatctctaggaatttcacagtcaggtttatctctcaattctaagctttaatgtggacaccatgtcatgtaaaattcaatattaaattttgaagtaccttttctatctggcaggttcgtggcgttgttataaccaggacaaaaatggtgttagtgaagaggaggatacttccatagttataccaaagtatgacatagattcgatcatcaaggaagaatccacttcccaggtttcttcttaaacttggacataatttttatgaaatatagacaatgaaacttgtttaacacgtctttgactttggtacgtagggctcctcgtcaaagacctctagtcttatagcatctctgactaaaattgttgagaagcataggaaagaaaagtggtcttctggtgtaagtgtaagtgtaaccaaaggagcttcttccacacaaacatcagagaccgtagagaagctaaaagtgacattgaaaaagtatcgtggtttaagtgcgcgtgagctcgtggctcgttcagatttcgaagagatactggcgactgctgcacgttatgaggagctgagctcggcctcagtaagccacatttcgaggctgtccatgtacagaagtgtgatcaaagaaggaatcaaggcctctcagcgagttcagcttgcgtatgctcgtactagattgctcaaagaaatggccgtggagaagcagaaaaatgtagacgctgagttagcattagtcaaggctttggctgagagaggagacatgttgtacgtgaaaatatttgcgatcaagaaactgatttcgaaacttgaggccgagaagtatgaggttgatatgactttcgaaaagacagttgcgaatctatcacgcgttatagaggaggcttctcaagcttacgaggagtatcatgtggtcgtgcgtaagtggaaagaggaacaagcatctgaggaattctcgcgtgaggccattgagagggtagagatggtttgggttgagtttctcagcactctctagagacaagtcttttgttttcttctcttttaattacatgctttctctcttgtttatgtcttattccttgtcatttccctttctaatataaagcttttatgtgagcgccttgtcaaattgctctttactttaatgatatcagcagattatataaatacttcgtaaagaataataattaatttaccaattaccattaaaaaaaaattatttggggtcgaaagacatgactcagctttcattatgtggcccaaagcagtaatgaaatatgacactagacattatttctatttataacagaactataagtttttttgtgtagttatttttcttacttcaaatcagttttgttttattaatagtatccctctatgtagcacgttttaggaatagatcgaagagcaacgaaatggatgatacatgggcagctaggtcgcgttacttccggataaacaatgtcaatgtgtcccctctcaatattatattctctaatcggatcggatcgaatcgaatcgaatctgactcgtctatcgtcaagctgtcgtctactaattatctatagagacgttaaaatatcaatatttagagagagacttcaggtttattattttacaagattttttcatatttttagtattaggaaaaagtggattggttaaaaagtaaactagaaaattaagtcaagctaaaaggtttgatattgaatttactgccgaacgaaaatttaattatagccgatcattgagttttagggtcgtgacacatgtggttgtcagttctgtacaagtacaatcatatatatgtatttaattttctcatgtagcacgctaatattatcttatagtataaataaataccaagtctaacagatacgatttggtagtagtgtagtgaacatcgcattatttatttatatcagcaaagtagttcacaatacgtggactatggcctatgaggataattaattatactctaatgattatacttctatttcataatattgtagtaagttaaactgattaatagttggatttaccagcattagtggattccattatagatatatttcaataataaacttttcgttttttcacttttttaaaaatatcatttttcttagtctttcttttggcaagattaagagtgggataatcataatttataggcgtttcacatacacagaaactaatgaagacaagaataaaattaaaaatagcgttgaattctttgtaattaggaacgtggaatatatataaaaataaaagccacgtgaattctattattaaattaaaaagccacgttgagttattttactttggttttatttaaagtcttgtttttcctcaagcttcacaacacagtgtattttgatctttgtgataacaatcttccaccatg

SEQ ID NO: 2714 - DNA, 1320 bp, Unknown
  misc_feature (1)..( 1320): cDNA_ID_2168019_gDNA_ID_1620580_Annot_ID_161132 3000 nt of promoter + ATG
caagttgtatactctatttaattatataaaaaagttcttagtttcaatatttcattatttctccacatatatttctctcatgtttgttgttttgtttgtttattcattgtataatgatttatttacactaatatgtcttcgtcacaaaaaattcagagattttgttagacatatattatagactatcatttttttcttatgcttgttaccttaaaattcaaagcagactatgtacgtacaccatatgtattagggtttcaattttcagagtgatgtttatatgatgtacatctaaataatatatctctagacaaaattattttaggtgtcaacataaattaaagagtgattcaagggaggcccaaaaactaataataacctaacattaaaatcaaaccattacataaaactttccataatcacctaaatatttatcaaacatagtggataatactaaattatactatataattgcatgcggatcaacaatacaatagaacaaattaaatagatagttgattttatatatatttatcactattttttatattgactatagattgaccagcggtataatgtaggttgatatttttcgtttataaattaattttttttattttaattaatattctttatatgaataacatatttaaaaagtacactacgggcctatgttattataatcatattagtcctttttattgtttgactctaaactattattcaatttttttaagcaatattggatcttgtacatttaattattttcttcattgattgatatatgtctatttttaaaatttttgaattatatatacatgaaaaaaatctaatcctttattaactatatgtattttatatatgataaaaataaattagatataagaaaaataagtgaaaaaagaatcatatatatatatatatatagttatatatatttaatgtatatagatagattttaaaaaaatagcaattaattgcatgtagttaaatagtataatatttaattaaggatataaatctagcataatattttttgagatagattttatagagagtaaaaactaaatactatttattttagagatttttggaccaaaatctttaccataaaagtatatgtagatatattaatatttatatatttatgtttcttgatgtaattatgtattatttcttttttagttttcttattttaaaacagacattcggtctatttaaagacatcatgttctgcttcaaacatcaaacaaactcaattttaaagattaaggaagcagtgtgtataattttttctttgtaatgacaaactctgctatg

SEQ ID NO: 2715 - DNA, 3000 bp, Unknown
  misc_feature (1)..( 3000): cDNA_ID_3069346_gDNA_ID_1620580_Annot_ID_161126 3000 nt of promoter + ATG
taactgtgtggatcatatgaagcatgttggggctgttctcaatgtttaggcttggctctgagttccagaagcttttttggttattgaagagacatctcaggctcctgcagaggatcagaacttaattgcttagaaccgatcagagagggcgactgctgcaggtgatgctcagtttgtacatgtgagtgtcaagcacatttccaaaacaaggccacttcgcgaaaccagtttatgctttctatggggttggtccgcaaggtggttacctgactgtgctcttccagttctttgttcctgggtgtcccgacaatcggacaaatctgttagccacactgtaggcatcccttactatataactgaaccatgagctgtatcttatccactgcattagcaacaacttttactttgacaatctatggttctgttcacatctcacggttctctataatcgtgaactgtgtacctttagcttcagaagcaataacctcaagagtcacagctaaattctttacgaaaaattatcttacccagcctcgaacaataattcggaagtatcaggcaagtatgctgcaaatgtcgactcttgggctaattcttctagtttcatgtaaatctcttcagattgaagatgtgatttgtctccagcaacaaattcatgagcaaaaccgtttacctcaattaaactaaagcctggtgtcttcttaattgcaacgtccacgatctttcttctcacttctcgcaaatccttccatcttttgcaacctgcatatatattgcataacaaagcataaacagccccattatcaggttctaactcaaggattttcttagccgccaattcagccattggttcatcattatgaagtctagaagccccaagtagagctccccacacaatcgagtttggattcattggcattttccttagtatctcatatgcttccttaactagcccagctcgaccaagcatgtcaaccatacatccgtaatgtactaaacttggctcaattctatggtcgcttctcatcttggcaaaaaatttccttgcttggtctaccataccactatggttacaagcagagaggacgccaaggtaagtaatgtcatctggttgtattgacatgtcttgcatttgaaagaaaactttaatggcctcttgaccttgtccattgttggcaagaccaacaaccatggctgtccatgtgaatttgtctctctgatccatgtcatggaaaaccttctgtgctttctcagaacacccacatttgaaatacatatcgatcaaagcattccccacaacaacatcgttcttgatcttgtttttgtctatgtatgtcttaatccattcacctatctccaaggaacccagatgagcacaagctgtgagaacactaaccatggtgaattcatcgggtatcatacctgcactttgcatctctcggaatatttccagagattcattgaagcaaccagctcgtaggtaaccgtcaatcataatagtccacgaaattctgtctctcactggcatctgatcaaaatatgtccttgccaacttcagattccctctctcaacataccctttcacgatagatgtccaagaaatcacatccctagctttcatactcctgaaaatcctcaccgctatatccatttccccgcacgcagcatatgcattgaccagagcattttccaatctcaaactgggttcagtcttacactcactaacatactcatgaacccttttacagagatccttatctttcaccttagaacaagccgagagaacaagaagtaaggtaacagaagttggagaaaccaagttcctctccatctccactaaaagctcaatgctttcttcatactctttcatcctgttgtacccagagatcatcaagttccacgagaacacatcctctttgcatctcctgtcgaaaaccccacgagccatatccattagtccacataaagagtacattttcacaagagcattctgcacataaagattagaacctaatccaaatttcacaacatggcaatgcagcttcttaccacaagccaaagctcctccatcacgcttaagaccgttcaacaagaaaggaaacgtgtggctatccggagtcacaccttccttcaacatattcaaatacaatctaactccttcaccatcacaatccacctttgaccaacctttgatcatattgttccacacaaccacgtctggttcaggtattttcacaaacagcttgtatgcataactcacatggccacctaaacgactacaccagaagacaaagagcttcttttggaatgttgggtttggtgctacacctctcgtaatgctttgtgaatgtaattgcttgaattggtccgtcgttttgcaaactccaaggatagagatgaaacgagagtaatcattggatatagattctgtgatcgttgacatgagcagtgccttgaagatcgatagttcagagttaaaaggagattttagtgggtttcgcagaatcatctccaaaaacacataaaaatctacaataatcaaaagcgagctcggacagtgacgggaggactcggccgttatgtttattgttctgtcgtctcctcataatcggtcgaaccgaaccgggtcgcattaccggatgttcaacaaccaagtcactcaaccggaaccaaaaaaaaaaaagagctcagacggcacttgctatcgtcacagttggtcaggacgactgtgacggcttccgtcacataatttgttctatcttcaccgctcttaaagtcgatcgaactcgtgtcgcacaaattgattaatacgcaaaccactagacgagagcgacttgttgtgaaattactacttatcaaattacataaactaaactgagaaagcaaaacggagcgttttgactcggttgctccaagaacacagagagagcaaattttgtttgtttgatagagagagatcgagaaaggagaagaaggaatcaagagagtagaaaggaaatg

SEQ ID NO: 2716 - DNA, 3000 bp, Unknown
  misc_feature (1)..( 3000): cDNA_ID_3069406_gDNA_ID_1620581_Annot_ID_161139 3000 nt of promoter + ATG
tccataacaatatgcttcatcacgccgcgtatagagccccagcctcaaggcttaatctcattcctggtgcagctcttcagatgcaaagggaactacaatggtttaaggtgatacatagttgtatatatgatcttgctacacaagaaattaggcaataactgtttctgtgaaaaggaacctaggattataactctgtattatttccaggaagtggagaagttagtgcaaccgaagcatcgaaaaatggttaacttgaagcagaagaaaactccaaaggctctgtttacagaccaacacaaggatctcgtggagcaaggagagaaatggatgaaagaaacagcaacttcttgcacagtcgttgccgctctaatcaccacaatgatgttttcctccgcctttactgtccccggaggttaccgttcagacggcatgccactctacatccaccagcacagatttaagatattcctcatctccgacgctatctctcttttcacctcatgtatgtctctcctcatgttcctcggcattctcaagtctcgctaccgtgaagaggattttcttcgatcacttccgacaaaactgatcgtgggtcttttggctttgtttctttcgatggcgacgatgattgtgacttttgtcgtgacgctcatgactctggttggagagaaaatctcgtgggtttcggctcaatttatgtttcttgcggtgattccgctggggatgttcgttgtccttcagtttccggtgttacttgagatcttccgcgccacttattgtcctaacgtttttgataaacctcggcgagtgtttaagctttgatcgagactcgagaggaataatgttggtgatcaaactaatgatggtcttccacttcacttgtaattcttcctacaaacatatgaaaaagccttatgagtagtaggttcgagccttcaaaatcagagtttaattgtgttctagcattaatatatacttctgatttttgtttttagtaaataatgatgattatacattatttaccagtttccttttataattctctcttccatatgcaaccactatataatagatttttttaataaaaaaaaattatctactagagcaattcccatacgtacttgtttacgaaaaaggtactaactggctcactaaaattaacgttgatatttcgatgaaccattttttttcgattcaaaaacatatattgctatattcgtgcatgtgtttttaaatatctagacttaaactacaattgttagaactttgatctaagttattggtttgcaaactactactgtaaggatactttgaactttttagtgttagtttgatattgtttctatgtaacaaaatttcttcacctattatatatgtatatgtttattttgttggagtttcataagtctaaagtaaaatattcaggggaaaaaaaaaactatttggtgaaagtgtttgtccttggaaaggaaagatgtacaagatacgaaaatacctttgcttcgctttgcttccaatacactgccatttgtcaacaacatgctcaatcgaaaattcgaacgtacgtaaatgtgtatgtgggtgaagattattacggcccgaacataactcatgttcagtattgggatttttatttctagactaatactaaatatttcgaataataattgtgatcaataatatattttgaatcatacgtagcgatggttgcaagggtcttatcagaagcaaagttggtctctagagtccccaccttctcctatgtgcaatttagctactccttcagtcctctgattgacacatgttcccacctgtctttgtttttccaagtcttaatgaagcttagaagttaattaattaaatcattttaaccttgcaccatctctcggatcttattaattatgcatattattattccttcatctaaaccatataatatttcctcacatatacgagtttcttttactttattagattctgaattattatcaaaattaagaaaattaagtaaaataaaaaatgtgaacatttaatattttgttgaattttgtaatctggatcatatgctcaaatgtacataacccattttctttataaaaaaaagtcaaaaactaatatttcgaataatcaataaataaatacaaattcaaaacacaagtttggtggaagcagttcttgaaaagacctccgaactttgcaaattgcaagcgaagtttgaatcaatgtattgagcttacctgtatttttccaaaaaaaagaggcttacctgtcttgctatgttaccttatcttcaccttactttgccaccaaggttttaaacgttgtacattagtattgtcaattgttaatagtaacggttgctttgttactaagatactttcatctttgatgaatactattcatgaagaagtatattattgttaactaatcatagttattcatggatgcatgcgtacatcattttacctttctccagctgtacaatatgtacatgcaataaaacatagtaatatatttctttccactatatatatatattgaattcaatgacttaaaacctttcaaaaaaatatttttgcttatataatcaagtgagttattggtaaagtgtatctttattttgaaaaaaaaactcattattttgaaaataaattatggttctctttacaaagaaatgatcaaagtttggtggacatatatatgtcaatcataagagagtcacaaactgagaatggagtttaaactaaagagctacaatattatccacaatttaaaacattttattaaaatcacgataacttcaaaaagagaaaatcaaaaattaactttgttaaaaaggtgggtatgaaaaatacaattttcttatttcctaacaaaaacaaaaatagaaacaaaggaaatgtgatataagaagattaaaagagacgttatgtctcacctatatttgctctctcctcttccttgtccaattctactgtcccaatccatcagttttatatg

SEQ ID NO: 2717 - DNA, 3000 bp, Unknown
  misc_feature (1)..( 3000): cDNA_ID_2049150_gDNA_ID_1620581_Annot_ID_161151 3000 nt of promoter + ATG
ttataatcattacaaagctttcatttgttgtcaactaatatgaaagctttctacaatttcttatttcattttccaaatcaaatttaagaactctcagacaaaaataatatatatagcaacacgatgtcgttttcactaaaaaaaacttaacaacacgtcgccgtttggtaatgacccaatcggcgaaatctgagaagactaaaaccctaaggtaaacctgagagaacaagccagagctaatctcttgtcggaaggaagaaggatcaaaaatgccgctctacgactgtatgcttctgttcaagcctataatcaggaaggagggcctcatcgacctcgttgcgcgcattggtaaacacgtttacagcagaaatggcgtcctcaccgagatcaaatcctttggcaaggtcgaattgggttacggtattagaaagctcgacggaagacactatcaggtattcaatttcgttagttttcttactgaatcgatggtttatgagtccgtagagtttgtttgatcaggattttctccaggccgattcaatggtattagcattttagtttaggtttgtgttagctttgtctttttcatctttctgatcgattcttatggttagatagctagattttgggaatttatacagtcattttactcaaatgcttgctacgaccatggactgatacttctttcgcccagattacttacgcttagtttaactttcagttggattcttgaagcaaaatcatcatattgttactagtaaaggttgtttttgcgtgattttgtctacccgatttataaaatcctgatgaggataacagaacagtaggattctagaatggttcctatcttagtcaattgttcaaagagcttgattttgctttggatcttcagtgtggagtttgattattagtttgatgctataaccgtagatagataagcaatcttattattagcattatgttttaggttggcctttcgaaaaagctttgtgtcttgtaactttctgattgattcttatggttaaatagctggacttgggggaaattatgcggtcttgtacacaaatactggctacgatcctgaagtgatacttgttttgtgatttcttactagtcacaaacgttgcgtttagtctatggtattttgtagattttcatttcctcgacagtgtttcctttcgaacttaagattccagaaaatcctgatgagggtaatacaacagctaggattctagataagttcttatctactgaattgtccaaagaatttgattgtgctttggatcttcagtttgaaatttgattacttgtaagataacctggtacaaataatcgcagctttcgcttatacattttcttcaaactgtttctgttattagacaatttggctatataggaacagaaggagaatatataattcatacatacctaggaagtaacgggatacatttgtttcgatcaactatagatgtaggattatcatatgttttgagagtatcagtacaaaagctttaaacatcaatctcctatgtatttttgatagaatctgcagagagtgaaaattgaacatccacttttattagctttcctctcttactaatctgcagagtcatgcgtttgctaagtgttttctgccttcatatcgggtgaatgttttgcagggacaattgatgcagataacaatgatgacaactccaaacatgaacaaggagcttcactacctgaacaaggaagacaaactgctgcgctggctcttagttaaacaccgtgacatcaagattggacagtcggaaaaggaagatagtctgactgtgcctaacagactcactagtgggagcttatatgatggatcctcctcggacgaagatgacaacaacattttagggttatcacgatgaggaaatcaatttctttgaaatgtttactcagacaatttcttcatgggagtccccttcaatggttatgaatgtttttggttacatgaagtggtggtatgcgttttgcgtagacaatgaaataaattaattttatgtaataataatttttaggtaaattgaactaaatttcatgtgttttattgttttcgctattttcctagtggatattcaacgtcatcaattgggttgacaaccccgaattaaatgccacgtgtattgacacgtcatatttgcatggggagagcgtttctctgtttttaggacttggaaaaattatcatttctaaaaattaatattgggaaaaaagaaggaaattaaaatagaggtggtggttcgtaaatgagctaagaacaaacacttgttataatttcccgtgtcgctgcatcttcttcttcatccatcgatttctctcaattagggttctgatttttcttcccattgttgttctccttctccgtttcgtctcaattacagaacaaagcttcgtttctccaggtataatcgaaacgtcagaatcttattaatacaaatttacgcgattctgttgccttataccgtttttttttttgagagagaaaatcttttaatcgtgtgttttctatgttcatatgaatgtatgcattgatgtgaatgtatatgaatgtatactcatgtatgcattttttttttctcctctcaaaattatgaaatagttcatgtcaattgtttatacctgtgtcgaatgtggatattttgacagaatataatctgagaagaagagtattggattgttttttataaaaattatgtcacgatcctaaattttgacgagctttactttaattttgtttttgttctgttttgtctttgttgttgatatgagctggatagtaatcgaaggttaaaaagtttcacaaaaaattggatttagagttgaattagcgtgtgagtatcttgttgtccttgaaattctttttatttcaaggtgttgcacccaaaagaatctaaagggtttctatgatcgttctgtgtttttatggatttgttttctgttgtcaacttttgcaaggtttaagaaagaatg

SEQ ID NO: 2718 - DNA, 3000 bp, Unknown
  misc_feature (1)..( 3000): cDNA_ID_2031499_gDNA_ID_1620581_Annot_ID_161161 3000 nt of promoter + ATG
acttaccatttgtttcataaatcccgaaattgatttatacacaatcctaaccagttagaaccagttagctgccggtgtgcaactatgaagtccattcctgatcgatatttatatggttataggcttatagcctaagcttattcacctaaaaacaaatcaatggttagctctatagtcaagttttttattcatgtaataattgactaactttaataattcagttatgtcatccattatgtaaaagtgcatcaatcctcaaaatagaaaagttatatcggttattattttaattttcaatatataagatagttaaattttgtgttaaaaatagaatagaaaatggaaatttagtagagtgatattccatattactttattgaacggatgtcagtattgtttgtgctactgctatatatcgtctctaaagtttgtacggatcgaccagtattaatgtactatgtagtctagtatttgtgttagagttgttactgtatcaactatcaagtatcatcgctcatattcaaattcgtataatacatgttgatagaaaggaaaaaaaatatagatgattacttaatgtcacatgtatttcgaccaaatgttcttttatttataaacttaaacgttaaaagagttttcaaaacacattctacctacaatttttcttctttcacgttgttcttaactacagaagatttgatctctacattaaaaaatatatatataacgaaactctggaaacatcattgttcgattggtttctattgcaagttgcatgtagggtttaaaccgattttaatttatatggcacaaatccattattccaaaaaagaaatagaactttatgggtggattgtggtgtaccactactagtaaagttgagaggaaaaaagctagatctctgggatcaagcaaactattaattacataccaaatcaagaaaactaaccttaattgacttttctccaacaaaagatatgaacgtggcctgccatttatatgaaaactttataatataaaaaacatgaacgtggtctggcctgctttgcataaaccaacccatataataaatagtgagaaaattaaatgtaatgataatagtagcaatgtataaatcaagaagtagtttcgtaatgatggacacaacgttttcgtaggtgccagcttcatcaccttcccacattctctctctttctcacctggtacgatcgtaaccggcacgtgcgattcacgtggctcgcaaaaaagttgactttttagctttgatttaatctcaacaaacattaaaaagtttatgatgatgaatgattagtttgctttttcttttgtataacatgagaggttacatgttattgctcatatctttcacttacatagcgcatcgcacgatgatgatttgatctgatatacggtctgatggtcatatgttcagtttttaagctaactagatgagttcaaatacataaaatcataatatatgcgtatagttaaatatatttcaccatagaatagctagctaactaatacatggatcgatgccaaaagtcccaaaactatataagtgacgaggacaccaacaaactattcgtcacgtcgacaaaatttagaacgaacttaattatgatctcaaatacattgatacatatctcatctagatctaggttatcattatgtaagaaagttttgacgaatatggcacgacaaaatggctagactcgatgtaattggtatctcaactcaacattatacttataccaaacattagttagacaaaatttaaacaactattttttatgtatgcaagagtcagcatatgtataattgattcagaatcgttttgacgagttcggatgtagtagtagccattatttaatgtacatactaatcgtgaatagtgaatatgatgaaacattgtatcttattgtataaatatccataaacacatcatgaaagacactttctttcacggtctgaattaattatgatacaattctaatagaaaacgaattaaattacgttgaattgtatgaaatctaattgaacaagccaaccacgacgacgactaacgttgcctggattgactcggtttaagttaaccactaaaaaaacggagctgtcatgtaacacgcggatcgagcaggtcacagtcatgaagccatcaaagcaaaagaactaatccaagggctgagatgattaattagtttaaaaattagttaacacgagggaaaaggctgtctgacagccaggtcacgttatctttacctgtggtcgaaatgattcgtgtctgtcgattttaattatttttttgaaaggccgaaaataaagttgtaagagataaacccgcctatataaattcatatattttcctctccgctttgaattgtctcgttgtcctcctcactttcatcagccgttttgaatctccggcgacttgacagagaagaacaaggaagaagactaagagagaaagtaagagataatccaggagattcattctccgttttgaatcttcctcaatctcatcttcttccgctctttctttccaaggtaataggaactttctggatctactttatttgctggatctcgatcttgttttctcaatttccttgagatctggaattcgtttaatttggatctgtgaacctccactaaatcttttggttttactagaatcgatctaagttgaccgatcagttagctcgattatagctaccagaatttggcttgaccttgatggagagatccatgttcatgttacctgggaaatgatttgtatatgtgaattgaaatctgaactgttgaagttagattgaatctgaacactgtcaatgttagattgaatctgaacactgtttaaggttagatgaagtttgtgtatagattcttcgaaactttaggatttgtagtgtcgtacgttgaacagaaagctatttctgattcaatcagggtttatttgactgtattgaactctttttgtgtgtttgcagctcataaaaa

SEQ ID NO: 2719 - DNA, 465 bp, Unknown
  misc_feature (1)..( 465): cDNA_ID_2049105_gDNA_ID_1620581_Annot_ID_161168 3000 nt of promoter + ATG
caagtcgacaacaacagtcaacattcaacaagctcacatggagtcatggacaacaagtatcctttcgtaattacctttaggccctccaatttattattattatttgtggtcgtcctttttgttggtagagtataattcaataatacatagttaattacatattaaactgaaatttatgtatcattagttgccgtttgttctactgataaaatgtttttgttttgtctctaaacgaaacgtgcaaatgttctttaaccaagaacaaaaaacaaatgtaatgataccgatattttaggacagttttcccatactctcggacgattttgcccttgtctcattggactctgaatacacacacgtctgttctatataagacacacagctccttaccacaagttgttgttagtctactcattaatcctcacaactctctatctctctctcgccccattctctatcataatg

SEQ ID NO: 2720 - DNA, 3000 bp, Unknown
  misc_feature (1)..( 3000): cDNA_ID_3069377_gDNA_ID_1620581_Annot_ID_161166 3000 nt of promoter + ATG
cattagatcacaagattctaacagaggaaccattaatgtgatgaatatatttaaccatatgattacggacccaatcgaccaaactgtcttccatttcaccagtgagatcaacaggtctgcgtccggtaactagctcaagaagcatcactccaaaggagaaaacatctgatcggtctgtcagtttcccgcttgacgcatactctggagccaagtacctgtcgtttgattcacaatttgagattctttagagaaacagattttcggatgagattataaaacaagaatgtttttgatatagaagtaagagctaatgaaatttgcaggaacatttttcatcagctggtttcgcagtctttagtacccgaaagttcccatgatacgagtggagacatgcgtaacattgtcttgagatagcttcgctaacccgaagtctgcaacctgtagatttgagccagtccagttagagaaaaaataataccaacgaatctgaaaacattatgagtttaaaaattataagaacgtaccttagcctcaaaggattcatcaagaagaatgtttgaagctttaatgtctctatgaatgattctcggatgacctaagtcaacaaagtcaagaaaacaaattttgatcacaacctaatcaaaccactcaaaaagattgaattaataatttagatttttgttttgactcacagtcttcatgtaagtaagcaagtcctttagctgatcccaaagcaatcttgagtcttgtaggccagtcaagaaccttgccacttttaccatggagatggaactcaagtgtgtcattaggtaagaactcataaaccaacatcctctgtcctcctgcaatacaatatccaacaagagacacaagaaaccgatgatgaactcggctaatgatgtcaacctcagcctgaaactcgcgctctccttgcccgcttcccgctttcagactcttcaccgcaatctctttcccattgggaagtattcccttgtgaacatatccgaacccgccttgacctaacaatcttgattgggagaagccttgagttgcagcggctagctcgtcgtaggtgaatgtgctcttgttgaaacctagagccactgaagggtgaggtggtggtaccgacggaccatgtggtcctgagtagtttgagctaaagtcgctactgtttccattcataccgcctgagactggcggtggtggtggaggcggcgatggttgccagcttcctggtggtggtggaggcggtgaattcatccagttattattcccgttggatccaggatactgctgagacagattcattacgtgatcgctctggttattgtattgctgctgttggtattgatcacctaagataaaacagagaattgttttcaccttgtatcttggataacaagaaaatgaaagaaaatcatgataatgtttcttgggtaacaatattttggaatattatgaaactcaaaaactgtcatggtttttcaatcatatctcaaatggattgtggaatgtgattagaagtaaggttcttaagaaaatgctagtttattgattagcttggtgcacaagaaaatgttctaaagtagaaactaggttaggcaacggctaggtttgatgggttttgtatttacctttgccggtggcgtagccgtttcctgcataatagggcatttgatgcttcttttttttcttacgacagcaacagacgcagaacaatatcataacaagaaacaacaatccagcaccagccacaattcctacgatagcagccgtgtttggttcattgttgccggaggagttggaaccaccaccgcttgatctaggaggagccagcgctcttggtggggaaggagagttacggtcagagtttctggaaggaggcggaggtgaacgattgttgcttcctccgccattgttttggttgttgttgtcattgttattcccattgttgttattgccattgttgtcatttccattgttgttattaccattgttgttattgccattgttgttgttgtctttgttattcccattgttgttgtcgttgttgttattaccattgttgttgttgttgttgtcattgttgttattaccattgttgccatcattgttattgtttccttgcggagatggtggtgattgtgagtctgaagaaggcggttgaggtgaaccatttgaggaatcatcgggcggaggaggagctggtggtgaaggagaggaggaatcagaaggcggaggagaggattgttgttgattgtcggatgatgacggagatggtggtgtaggggacggcggtgaattctccggggattgcccctccgccataatctctctttcggtgttttctttttgtatatgattttatttgtaaagctctctcctttttttgttttttacgagaaagagatagagagagagatgaacagagagaaaacacaaaaacctctttgtgtgtgttcaaatcctatttttaaaagagatgctttcaaatctttgttgttgctgttgtttctgtattggtattgtcttctttttgtagggtctatatttgggtattaatacagccatgcaaattatgtaccttcaactaaatttgtaaaacaagaaaaagaaaaattacagtctagaatttgattacttggttttaccaaaataaaaataaaaataagcatgctctcgttgagagttgaactcaagacctcccgcttactaaacgggtgctctaaccaactgagctacgagagctgcttgctgatcaaaaccaatgtacatataagtttggtaaagtatagtttaattattagaggaatgattcacttttagtaagaagacaaaataatagtcacaaaagaaattagaagacagatcaggaacagctagaagactcttcagggcacagagaaaacacccaccacatcaccgtcttcttcaacaaaatttaccaccagagatcgcagatatttcttcattctatctctctcttttagatccgattcg

SEQ ID NO: 2721 - DNA, 3000 bp, Unknown
  misc_feature (1)..( 3000): cDNA_ID_2049142_gDNA_ID_1620581_Annot_ID_161153 3000 nt of promoter + ATG
ctttactgatattggaatgatatctcaagatctaaaccagaaacttgtctgcctgcatatatgtgagctttgtattatatagtttttaattcatattttttgctaaaaaagcaacaatataaaaaggaggaaacaaaacagattaaagagaaaaaggaaaaaagaagaaggagaaaacgaaacagatgtaatctgctcaatatcgtctactccacaaacgttatcgtctggattttaagttttgtctttttggtggacatgatcttcccaaaccttaatggtcccgtacgtgtttactagcttttaatcaactgttttcgtttcatgttttttttattctttcttttatgtagttataaaaaccgaaacccaattctccagcagcctgagccctgagggtcgtcctcggctcactaatttacttgcagtgcttgttaagatgttacaaaaaaactttaacattgataattaagcatatactacataccattatatatattcctcttacttaacagtaacacatcaaattttgagtaaatattcataacttttaaattagaaaggggctttagtgtataaatagctttataatttgtgtatttatatgttgatttaattctagatagagacttggagagatatggttgaatttgtggttgtggacatggattagaccaccgccaaaaatgaaaaatcacaagtgggatattttgctttttaaccctacttttctatcattttttaattcttttttgcctcttttaattaatttaatgagcaattgatgagaaacttatgagatatataggattcatcatttatctctctagtacttggtgcatcatgggaaatattttgcatgtcaggtagtctaatgataagttattgaatttaaatattgaaatctcgtagtgatttacccattaccaaaaaaaaagaatttatttacaagaaagttcaatatgatactagtttccacgtcgaaattaatagtcatagttttaaacatccttaatttagaatacattcccaaagggtgaaacaaatacatgcagcatataatatgtttagaaagatttttcttgcttcataaaatcgatagtatagtatagccttagagttgatattttgtttttaatggatggaaagagaaacatgtgtacaacatctattatttggatccttagtgttgatgtgtttgaaaaatattttatgtttgaaacatcactttggctcaatggaggattatgttttaaagtgatctttctattaagattaatcatccaactctaacatctattattgtgttctggtttcgaagaagtgcgttatagagccaaagactaccaattagcaaacatacaaaatttcgtttgaaattgtatatgggctcaaattcaaattcatattagcgcccaattcaattgggcttatttttggcccaactaaaacctatttgtggctcatttttatatgatcgatccaacacaagcacatatgaaaatgtaatagacgcagatattaatgttacaaaaattgtttaaagtatctgttttttagtttgcatgtcgtacttattcaatgtgtgtgaagttctcacgtcatcatgtctgttaaaaactaatgaaatctgttttaaaaatttgtgttgtaaattcaaattatattgaagttcatgagggtttaagcacagaaaaaaattatgggtatgtatgggataaaacaacttagttcaagaagaaaataaacagttttcccaaagttaaacaaaagcaaatatagagaaaattatcaaagattttaggatgatttaatttaaaatttacaaagattaacattttacatacacaattgaatagataattttaaaaattgataaatctaacttttaatcaaattttaatcagtcttttttttttttttttttttttttttttttttttaataaaactttatccgtttttgctttacatagtcatcttttcatgatttgctgttatctcatatcttagacttatgatttttttcttattaatttttttttttcattgcgtatctacatttttataactaaaaaaaaaaagttgtatatcagaaaaatcatatttttttatattatcacatcttatgatgcatatccaataaacaaaataaataatttgcatcaatttcttttgttcagttgcaacaaatctttcctcaaaaaaaacatttagctaattttaattgcagaagccaaagagtaaaaaatttataacattcggtcacataaataaataaactgaaactatatattccaaacttcccttacctacgaaggacctagtttatgggacccactaacaaaattaaaaaatatatatataataattttcgaaaaaaaactaaaataaaaaaattgaaagtatttaagtgtgtatcgaacgagtcacgaagaagatatcaaatcgtctctggaaaaataaagaattttagaatgaacgaattagtattacttatctgataatgacgataactaacttgcttgatttccagatattcctcatggttttgattcaatttcgtctcccatagttttgaactcgcaacactaactttttgtaatcgaaagttttgtcctttttttttaacaatcgtcgtttagggttctttcaattttgccgataaaatcttatataaaaaaaaaacagtgaagaataagttcgaagaagaagaagaagacttaaaaagcagcgacacaagtcggtggtgactcggtaaggtactgatgtttactttttcatgagttcgtgagttttgtattctacttgctctgttctgggttgagtttttcttttttgtttctactctctgatttttgtttcttagatcatcgagaactatatttatgattctgggtttttactggagattatgatcggtttgatcaaatgtggaattagtagggttactgattttgaactattctcaattgattggtttctcagaaaaagaaagatg

SEQ ID NO: 2722 - DNA, 3000 bp, Unknown
  misc_feature (1)..( 3000): cDNA_ID_2049183_gDNA_ID_1620581_Annot_ID_161140 3000 nt of promoter + ATG
actctctctcctttgattgctttggcgatgttcccaggttccgaaagattgaataccacaactgcaaattgacacagaactaaataagcattcttgttgtattttagatgatcatgtatgcatgtggtcaaggtttgagagagtgttatagaaaacaagcctgggatgttattttcttggcacaaagtgatagcagtcatatccattacagagaggtcctttgaggtgacctcttggtaagttagtgagtcaagcagacgagcgtttgggtttcttttaggatcatcgtcgaacacgccatcaacatttgttgctttcagcactacttctgcattaactgtgtccaatgcgaaaagtttttttttagtgttgcgaataatcattggagaaaacttaaacggaaaccacctctttacttactttcagcacatcgaagagccgctgcagtatcggtggtgaaaaatggattgcctgttccagctgcaaatattacaacccttcctttttctagatgtctgattgctcgtcttcttatgtaaggctctgcgacttccgacatgcggaaagcagtttgaacacgggttgggatgccaatactctccattgtcgcttgaagaaatattgcattcatcacagttgccagcatcctatccaatttcagataaaccaatgagaccaaaaacctccagtagaggaaaattctggatcttctccgagtaagaagaagaagatcctttgacacaaaggcgtatgattacccgatataatcagcagaggagcgatcaaggccactgcacccagcccaggtagatccacgaaagatatttcctcctccaacaactatagcaacctattgtaaaggcgtaagaagatcagacagagcacacacaacattgcaatgattcttaatgacccagacacatgatctgttgccgtatagtatgtttaaatcataacaaatttctaactttaagttgtgtaatgccatatatctccaccccttaacttaagctcccgtttcttgtaagtttgagctaattgatttccagcatatttggttacatctacacaggcaattatcaaatacttcgggtattatacttatgtataggaagaactcaaagctgaatacatatccactaaaaaattttgaatccaattatcacaatgacaactagaacaagaatgtttgaatgaagcgtttagagaataacctcaatgccaagtcgagtcactgctgcaacttcccttgcaatcgccatagtaacctaattaacgggaaactggatgagacttctgaagtaaggaaacagagaacaaagaaagcaaaacaaggagggttcttttggtatcacaataaacctttgggtcgatattttgctcctcgtctccagcaagagcttctccactgactttgagtaaaacccttctccatttaagcggtggtttggatgttccatcaaaggaaggcagtcgtgggaaagatgattgcccgtttaagctactgaaaattacagatgatcgcaacagagtattaacaaaatcagccaaagttccaaacattataaatgggttaagttttacttcaaccaaaacaataaaatcagatttgcaatatattttaataaactcttaaaccctaaacccagaagtatcttcattgacaaattttcacaaacatctggtgggcgtaaagattaaaacttgaagattaataatacctcccgttcccgttcccgtttccgttcatggagtctggagatgaaccattgtctgaggacaaagaagaagagcagctgataagtacacgcctactgtaattctggttggagaagaaagtacgattgcgaagtgtaagagggacgaaggaggttcgggaaatagacgaagaagttgagattggggagcaagaggtaagaggcaacggaattgccattgccggagagatctaagaagagattatttactgaaatattcagtagagaagtgtcgccggcaaagacgggttttaagtctgagaagataaggtctggtttcaatgtaatttactaattaatcaaatgaattgttgtgatatttaatgtgtatatatatatatatatatatatatatatatttgaattatatccccaataattcactatatttaatcttatcttatcatacaaaaacgaataactttcattaaattctgaatatatttagaaaattttgatatatgtcaaaatgtcttttagagttttaacatacgttatacatatacttctataaaaaatgtaatttttaatcaaatttaattgaacaccaattttagtgcactacatataacaaatagctacaaatagatagatattttcttatatctaaataattcacactattttatgtgtacttattattgaccaatggttttttttctttttttataacaattgattaataggtttgaaataactacatttgcatcctacaagagaagtgaagaaccacaaagcattcttattttcgtttcaatgacttgaaaaatatgagttttcttaccaagttcaagttttaaaagtttactaattgcaaatttacaagtaacattgtttttgaagagtgaaactaaattctttgctttgcaacgacgtaaatttttgtaacactaaagctcgatcttttaaatattcccgggaaaagtaaaagtaacaaacacatataagaagaaaaaaacactgataatgatcttgaaatctttcatggtatgaatagtcaaggattattcgtattacagtttattataatgtttaattacttgaatccttgtctcttttctttgtccttgaaaccttgcttcaaagataagccaccacaactcttttaacactttactcatgtgcctctgttcgaataacggaaagatatgttttcttttacagaaaaattataaaagaacaattttacacttaaacaaacacataccaccacgtttcttgcgggagaagcaaccgacaaatg

SEQ ID NO: 2723 - DNA, 3000 bp, Unknown
  misc_feature (1)..( 3000): cDNA_ID_1010815_gDNA_ID_1620581_Annot_ID_161150 3000 nt of promoter + ATG
atgtgtgtataaattcacgtaaatgtatatgcgatgtgtttgaatatagcagaagaaagtcacagaaaaaatattttaagtgattgaaaatgcaaaatgtgctataattatccactatcatgagaagtactgattcaaagtacattgtattatttattcagaagccatagtgcagtaattcgtgaacttagtcgaaagggacaaccaacaagcagttaagtactttatagcacattcacatttgctctgcttcaagtgttctttccattttaagaaaaaaatgagtttcatcgccgtcatattgttcaatggaattatcagttctctcaaggaaaattaataagtagatttactaggactgaatcacaaacataaccaaataatagctcaaatgcgcagtttgataaagattacttataattggatctacctgtacccctcttcatatgcctgaagtgctcctgtccattccccaatacagtccaaaccattaccaatattaatcttcgctagtgcttgaccctacaagagaccaccataagtgaatattagaatcaggaaagaagaatagctataatattgacaaatccaagaaaaggtataatcagttttccacagaaaatgttcagtagaggcctaatgaattatttctggttttgtgaatcaaattctgatgacagtagtgaacataggtttttataattaatcgtgcaagcaaacaaatctcacctccagattaccaattgcttcatgtccctcataacttcttatgaaccacttcagggactttctgaaatttctgagattttggtaagattctccaacaatcatgaaggcatcactcagcttttccttgtcacagagttcatctgatattttcttcttcctttttgaatattgaagatgctaagacattcaaagaagaaatagcaaccctttagttgcatgcaaacttcaaatggcagcctcctacttaactttcaaaactatatcacaagtcattgaaacagtgatgcagagacttggatcactcagtatccgtatgatacagaataatcatcgttttgccacataataactttactttgcaagttcagaacaaagatattatcccagcattcaaaagataggttttcttgagagaacaagaatcatgtaattctttgataatatagtcttcctgactgatctgaaaagacagtgtcaatagcagaagttcacaaaacttaaatcaaatctaagaaaatagcatatttttcctactccatactacctgatgaaatctcacaatgcttattcatcattaaaaacccctacgatggacaactttaacttctggaaacttttcaaataaatgcgaacatggggtggagtgataggactaaaaaggaaggagtgtttaagttataaaactcaccttcagccatgcgaataccatgctagatttatcaataagacttccaagacaagcatttacttggagcatagactttcgttcctccgaagtgcctttggcatcagtcatttctgcagacaacttcttaagcataagctcttcttctctcaattcttccataactttcatggatttcttgactatcttggtattatgctctatctgttcaaccaatgcactctcgtcttgcatagatttcgctagactagaagctttaccataacataaaagagcatcaatgtacttttgggtcttgttgtgtaattcagcgagattgatataccccttcgcttctccttggacatgattaatcttatgacagatattaatatccatctcaatgtgtttctttgcttcatcccaacttctcagcgccataaaaacgtttccaaggttatgatgaagcctactccgagcagcatcatactctctcacctcctcttcatcgcaaatctgcagccctttcttaagaatagtacgggctgcttcaggattatcaagatcaaggtcaagcataccgatgttgttatgtgcgttaatatactcctcaaggaatccgctagattctccaggaggtggtttctccttgagaatctgtgcaagttccatggctttcttaaagtactttttagcactctgaatggcttcacaatcatcctcagacttcaagaacatttcatggtaagtacgtccaagttgagtacatgctctttgcttctccacagtgtcattagcttcttcagctagctgtaaatgcttcttctgcaaccaccagaaaaaaacacaaattcaaaatgaaaaactcaaacaccaaaattattcacggaaaattcaggaagccaacaataaccaagtaggaaaaagcaattgattcaagagggcttacctgataaatcaaggcttcttcgaaattttcgaggcggagatagatctcgccaagagactgacaagtaggtaacaaatctttcccaggtaaatacttgacggagatatcgtaatcaatcctaaaccacttgagagcatcaacgtactctccatgattcttaaggatatcgccgacattgttagcccacctcgcctgttctctccggtcacccacttcttctgctttccggtacgctctcttcgccgcagctacatctaatcgacccatcggatgatgatttctccgttcttcaattgaaaggtttttgttttcttccttccgattttcagatttctcgaaatttctttctcagtgattttgattttctcattttctccagtcgccaaatttttggtcccatcccaaactatcccgccaaaattcaagggtaaattagaaattttcataccctaaatcctgaagttataggccttttagtttgggccttgggtcgagtttattttgggcttcttatatcctcctgtctcctgacaagaaaacaaaaaaaccctaagggttctaaggcactcgctatataaactatcattttgcgccgcccgaacccgaagaagaactctctcttgtaaacctgcgatctgaatcttcccggcggtgaaaa

SEQ ID NO: 2724 - DNA, 3000 bp, Unknown
  misc_feature (1)..( 3000): cDNA_ID_2168375_gDNA_ID_1620582_Annot_ID_161189 3000 nt of promoter + ATG
cgtttcaccttcttccaccttattttgattgcagatagaacacctctaaaccacataaaacatatacacacaaagactcgacacataatcgaaattttatataacgaaaaaaaatgtagagctttaatttattattgaatttcaagttatcgtatgtctcacgtaattcgacatataattccatggggagaaataagtttatcacgtctctttgaaagttcaatggtcgtatcgtttatctttttgtcccaataagctatctaactaatctaagtgaattaagtctacttaagacaactcctacttagttctccccaatttcttcaattaattaattttcctaatcacatttccaacaatttatgcatgcgtataaaatacaattatatattaatatgtactaatacaaaattttatgatctagaacatgtataagttttcttttttttttagaatatctaaaagtttaaacccaaaaactcaaaaactttacgttttttagagacagaatctatactaaattaaatttatttctctaatagacgtcgaactcattatctctatatttgaaagatttaccactgaatcaacatcatattagtatttgtacaattatatagaacgatatacatttttgccaacttttgaaattatactaaatgtctaacctttaaaccagtttactgtacaaatacctatgtaaaaagaattctgtgtgatatataattgtaaatataatacgcaaagagatcgtcaattttgaaaaacactttaaatagtaaatattatatagaaatttatctccttaaattagatgtctatatgttcagaaaaaatattggtatattttaaaaattacaacatggcatctgacctgctcagaattaaaatattaactgtagaagatattttgatacaacataatcatatattattccactacctccaatagtccaaatatatagcaataattttctaaagatacgtatcaagaatggtttaatatgatatcattgttacatgcatatgcgtaatttttttcatagttaatatattctttgtaatatggagccgactgatgaatattggtgagttctagtgtgtgacaaagatgccattgttgactagcaaattctaaatctgaggagaataaaataattctagaaattgaacttttgtttttaacaccaaaatcaaaaccaatgggcccaattctttgctgacttggccaaatgagagccgtccatatgtcagtcgacaactgccaaacaatcttgacggtttgttagtttggctcaaaagccaccagtaatcactgatcagtttgggacttgagtaaatgacttatttacccttagttcaataatacggttttgtgtgatttaatttgctagttaagttaaaccatatttaaggatggtttaattacatttcaggtggaaaaaattgatgagagaatctagctagaaaaagatggacacgtatggaccgttgaaagtaggaatacaaattatttaaggaatacaatatttaatttcaacaccaagtgtcgaatagatacaacaataataatgatgaacaccaagatttattttatattctctattttgaatattgattactccaactttttcatgatttgtttttcagcacttgagattggaatagacacactgtgatatcgaccataaaatattttcttaggaatatatcgttgtgtataaagtataaagttaagtgtaatgctttaaacaagaaaaataaaagagttgagattgtaatcatagcaaaaggctattttatagaccttttagcggatggaaaaaaaaaaaaaaaaacaccttttagctacatgatgtagcctacatcatatataaaaaagataatagaattatttaagaaatgtaatgtgttataaattaataaccaacacatacacaataagattcatataagtttatgaaatcaaggttgtgatattgttgttattgagatccaaaacttaaaatccaaaatatcagaacttttggagcattggattatataaaatatatttttctcaatcaaatctttttttagttaacaactttaaattaatcgcaatagaattattcatgaaaaatgttatttacatataacccaatccaatgatttcaaaagagatattatagaattttgtaaagcattaaagatttaactacattttgttacatagacccataatcataaaacctttgattcatagtttcattcttataatggtctcttaagtatgaaggtgttgtagcggagactagaaatatatatgagggtaatgtttgtctgttgagacacatttttacaagctattaaaaaaaatgattccaacaatatttattgaaagtaaatgtattttattaggagattttaaaattaatgtcatattctaaaatgtacaatatatacattattttttgaagattttacaataaatttcaaagtgaaactgaaatgattttattaaatttatatacataactctttgtgtttttttgacagtcatatatataactcttaaacacaagcttttacagaacatctacagttattttaggtgaataaacactccaatttcaaacaatttaaataaataaatgataattatctgtcaacccataaactttacattgtaagaccattttattttatttattttgactatttatggatatgtgatattattgagaaaaaaaacactattactaattgacagaaaaaatacacttaatattttctcctaaattttctcaacgaattaattacaaaataatgtgtataccaagtaaaaagattctacttctcagtgacagcagaactaatttattcaagggtagtttcggaataataaaaaagcaataaatctctttttcctataaaagcaaagagacactcaccaaacaactcgtccctgaaacctctcttcagaaaactcaggcaccattttctccttccgccgccgcc

SEQ ID NO: 2725 - DNA, 3000 bp, Unknown
  misc_feature (1)..( 3000): cDNA_ID_2168401_gDNA_ID_1620582_Annot_ID_161195 3000 nt of promoter + ATG
tctcaatgtttgtgtcatattctagttaatctatactcgaataattatagtattcccgatcgttttatagaaatatataaccaaaaaccaaggtcaaacgtgcaatatgataatgactttgaaccaaaaaaaaaacttaaaacaaattgcaacctcatgggtcctaattaagtaattatacaccaacaatatagttaacaatttaattattcttatgtaaagtaagaataacttttgatttgaattataagcttatagagccaaatataattaagtataggccaggtccattgaaaattcagacatattaattattacaaatgaagtcgagtaatgtagagtttaagggtacggttttttggtagtgaccaagctcgacaatgcaaatctatttttaattctatatagctatatttataaatgaaataatgagtgttttgggatcactaaatacaaactttcatgagttttgatgattgtaatacccaaacttttttcttggatccggtgcaacgatagaacttaatttcataaaattagccaagtgatgaaaaaatgattaagcgctactagggacatgcatgcatgcgtttgcaaattctaggtcaaaactaataaatttaattaacaactatactatcttaatgatttgatttccaaaacaatgctaaatgcaaataatatatcaaacagaaaagacccagattacacaaacaataaatattcaaatgatctggactctggagataatacgtgtttagttttgaaaaagcagtttaagaaattatagtagcatgtccaattgtttactaaattaaaaccacaaattcgaaatgtttatgttattatgatatttgaactgctatatatgggagtttggactcttttatttctgtttctgtttttgtactagactttaagtttctgagttcaatatatatataatcagcatattaacaatcattatcatgtacgtgaagtttcattccaaagatttatttttttgacttaaatatctgttttcttaatttcgtacgaccattcaattcttgcaatgtctaagagagtggccataggaattcaaaatttgatacatgatgacactttacaaataaatccaaactagtacaaacccaaaagcctcatgaggccataatatgcaaggcctagtttacatcttttagaggttcgtttattatagtttactttccaggaaggcccttttatttacacttaagaaaataaagcgaagggaatatgttgacacacaaaataagaacaaaagataggtgaaaatgtttttcttttttttgaaaatctacattgcactatttttgttttatgataaattagattttagacatgaaatatctcctcatatatcaaacacttcacaaaaaggattcacaaatattttcacgtagtattctttatataccaatgttttgtctataatacatttaatgtgaatttatacaggactaatgtaaattctataaaatcttatcataaaattcattaaggagattcagaaatattttccaagagacattgttcttgtactacacatttcaaaacactaataaaagtagcttaaacattatttttacgtaaaaacaaaaaccaattcctaaaactgtattcttgtaaagacatgtaggaaatatttataaatattctctctaactcgtcaaataatatatgagatcatttttacacatgtagcatcagtttaggaaaaatataaattaaacagtatatctcgcataatacagaaatttggtatggtccaatatgaaattcaatgtatatacatgaaattgtttagaaagatttggaattttgacaagtatattacatgcggatatttttcttgaaattgaacaaacatagaaagaaatttacagtgtatttagagattttaagtcagaaatacgcatttaatttaattttacttacatagtaagaaatctaaaatttcatttgttaaatacgtaattgctgacgtcaaaaagatgtaaattttatagaagaatttaaaaattttgaacacgtaaactacatgtagatatttttctcgaaattgaacaaaacgtacatagaaatttacaaaatatttaaagattttaagtcaaaggataagcatttaattaaattttaaatagtaaaaaatctaaattttcatttgttaaatacgtaattggtgacgtaagaaaatgttgtaaatgttttagtaagattgaaagtttttgacacgtagatatttttcccgatattgaacaaaacctacatagaaatttacaaaaatctttagagatgttaagtaagaaatactcatttaattctatactacttaaatagttaaaaaatctaaatttttatttgttaaatacgtaattgcttacgtaagaaaaaatgtaatttccttataaattagtaacggccaaaacataatgattataagttaacaaaaagaaaactaaagagcctgaaaaataaatataaaaatatatatacaatgtagaccttttatgaacaaatttgtaactctatatttgaaaaactttgcaataaattgttaaatataaattaaacctaatgcatcactcatgtaatcattggcataaaaactataatatattttctttgtgagccaccgaagtttagctttctgtcactttgaccctctctaattattcatagttttaaaaccaaccctctctaaaaatacttaaaagcaaactcttccaaaatcaaaacctcttcttacacagattttttttttctctgagagagacagagagagcgaaacttgagagaccaaaatccaatcttttcaacaatcgattctctctgagaaaaccaacaataaagctagacacttttttttgtgggtttgtcttcttcttcgttcatgcaccatgttgtgttacgtgaacgaagaagctatataatcaataaatcttatcgatttgttgagtttgggaatcggagagaaag

SEQ ID NO: 2726 - DNA, 3000 bp, Unknown
  misc_feature (1)..( 3000): cDNA_ID_2168409_gDNA_ID_1620582_Annot_ID_161197 3000 nt of promoter + ATG
gaagttagtgaatgtgtcctaatttatacaaaataacacaacagattactccatttattctaaagaaaaataatattaaattaaactaatataaaaactaacacaatatttattaatatatacaatattaatttttgatattttttaatactcgacacgttattttaattaattaagcgctgttagtgatgttaatgatgggttaaaacccactgagtacccgaaacccatctaaaatttcaaaccaattgatctactttttgtataaaataaaacgtgggttttaaacgggcaggtcctatttcgttaaagtcttacacgggttttaccctactgggttatggatacccgtaagttttaacttattattttagtatattaaaggcacaatagcccaattgccaattctattgagaaaccctaaattccttttcttccccaaaattctgccaccaccacaacagtctctctctcttctctcctcttctctccgtcggagtcaccgtgagagtcaccgccggagtcaccgccgtctacaccgccggagtcaccgccggagtcaccgccgtaagtctctcgtcatctccttgaaaaatcaaactctagtttcacttgatattagatgtcctttctctcctttgattttgtgtttttctcctagctttagaatatgacgaatctcatgaataatctaatttttagacttggtgataagtgtatctttcattctttttttaaacgaaacaattcggtgaaaaaacattcacgagagacacatagtagtgctatacacttctagaaaaggagagaatttaaataaacattatcaagtaacgtcatgagagtttttctatagaggtcatgatcttgtgttttctttgaaaatctgaaacccatttgggaatttccaacattgctttttttaagtatttaaatacgttacttgctcttaatcagaatttgttacttatatgatttaattattgttcattgatggtcaagtttattctctaattaaagttcatgaggtttttttgtagaatggattcacaaactagagaaacattggcacatttggaggctgagaatgagtatttggcaatgaatgaggaggctgaaactcaaggagaagcaactcaaagtgcaacacaatctactcaagcggctacaacggtatataactctaacaaacgcttaaagtctgatgtttggaaagagtttagacccatcttagaattagaagaagatgggaaacagagaggtcgttgcattcattatgataagaagttaatcattgaaaatagtcagggaacatccgctttgaaacgtcatttacagatttgtcaaaagagacctcaagtgcttagtgaaaaaattgtgtatgatcacaaagtagatcgtgagatggttagtgagattattgtgtaccacgatttgccatttcggtatgttgagtatgaaaaagttagagctagagataaatacttgaatccgaattgtcagcccatctgtagacaaactgctggaaatgatgtgtttaagaggtatgaattggaaaaaggaaagctgaaaaagttttttgaacaattcagaggaagagtttgttgtactgcggatttgtggacagctcgtggcattgtcacagggtatatctgtttgaccgcccattatgttgatgatgagtggaggttgaataataagattctagcgttttgtgatatgaaacctccacatactggtgaagaattagctaataagattcttagttgtttgaaggaatggggtttagaaaaaaagatattctctttgactttggataatgctaggaataatgatagtatgcaaagtatccttaagcatcgccttcagatgattagcggtaatggattgttgtgtgatgggaagttttttcatgttagatgctgtgctcatgtgttgaatcttattgtgcaagaaggattatcaatagctactgagcttttggaaaatattagagagagtgtcagatttgtcaaagcatctgagtctaggaaagatgcatttgcagcatgtgttgagagtgtagggattaggagtggtgctggattgtctttagacgtccctacacgttggaattcgacttatgacatgcttgctagagccttaaagtttcgtaaagcatttgctagcttgaaagagtgtgacagaaactacaagtcattgacttctgagaatgagtgggatcgtggagagaggatttgtgaccttctaaagccgtttagtactatcactacttacttttcaggtgtcaagtatcctactgctaacgtgtattttctgcaagtgtggaaaattgagcgtcttttgaaagactatgcagtttgtggtgatcttagagtggataagacagaaatcaaattgggtacccacgggtagtttacatgatatatttacataccagcttagtttataagcaaaatatagatataaaatatatataatagtatagtatattagtagttaaacataaacactaaacaaaaaagacagaaatcaagttggatacccacgaatagtatcagaacaatcgggtttttttcgtgctttatccactaatcaaaaacccatttaggttttctaaagttgggtttttggtggacgggtttattttgaattcaggtcaggctgggattttttatccaccacaacatctttaagcgctgttaaaataatgaagagtagagattaaaaaaaatcactatgtcagtacacttaatcttatcttatcttatcttatccacaataaacgcctaaaaaaatgaagcgtgagatttggttatataagtttaacgactaaagccacgtcatcactactgtccctatcactacccgccaacgtcttttcggtacagcagcaatataccacattaatcatttttttattctctcttttggatcgcttccgttcaatgtaaccggcgaaacagagcaatctgaaattatcttagggctatagttatg

SEQ ID NO: 2727 - DNA, 3000 bp, Unknown
  misc_feature (1)..( 3000): cDNA_ID_3069423_gDNA_ID_1620582_Annot_ID_161200 3000 nt of promoter + ATG
ttttatacaatgacgtgattttttttatgtataatgtaaaattaaaataagtaaaacttctataaattaacagtcgctcatcaataactagagtcttgtttcttaaagacgatgacgacctattaagttatcttaatgagaatgtggacgatattgagcccgagtggtttattcttgacatttccaccattcgtagtgctatgattggagcagcgggttggccttcgtccatccccaactacaatcccaaacatatcattgagaatttggggtgtagattgttaggacttcaattaaagcagctacatcattaatacataatttgaacggatcaattgaggagaaagctgaaggatgtggttacacaatttctagagttttcacacaggatgaggatacaattcatataactaaactctgcaaaacaatacaaaaaaaattgatgtagtaaaataatataattgaactctgcgtaaaaaaccaaacaatactaaaatcatattttactaaattttcttacatatattgatattaataagtttatacaattcttagtttatgatactaatgaaaccatatatttctataggatttttgaataaattattactttatttattttatcaaataatgttaaatattatattcacttgactagaaaccaaatttttttattaatttatagtgattactaatttatcgaatattaatcaatagatgttttttgtacaatttattcacatgttaaatttaaaattacaattgtgctcacttcatttctttacttagtctacattatctggatatcgtataattattaaatcgtgttcatcatcactgtaaatatactattttagatttaactttagtgaaatatgcatataaacattaacatgttttaagttgattttcatatttaaatttatcttattgtaatgttgattttttttttggcaaattgacaaatttattttgattgttcgagcataagaaaataactggttactattataaggtacatgttaaactattaatgatgtcacagaatcttaattaacaaatgtatttgtcgctaaagacttcagacttctagttgtctttttggtttgtaaaatattttgaaagaaaatcatgtttccaaaaataatttgatacaaaatcaggtttcatttgtgctcggaaattttgtaaaaagattcgttgttgtgatcatttttaatacacggatgaaagaaatatcaattaaacaaaaacaaatattagaaaacgtcaaaccctatttgttaattcactttagctaactacgacgtctatatacatctcccaaaatataaaatattattatatatttgtgaaattaattattgtttttctgtaaccatttttggagaattattattgtttggctatactcttatagacaaatgggaccgacccacttattcgttggatagtctttcttttactccactcagcgcataacctctatcacacacagctcaatcatcccacgtcttcttttctaaatcccctattttacccttgaacctatcaccgattcgatttcgactcttacttacaacaagggcatatcaggtataatttaacataatgagagatgcttatcttaaaaattaaatatcaaaccagggtggtgcaatgtgtttttcaataagagtttaggtgtgggataatcaaaatcaatgagcaattaataagattggatgctatgccaataaggatgtcatgtcttttctataatcactttatttttattttattttctcttatttttttagtttatttattgattccttgctaaaaagtccacaaaatcacgtttctaaaccaataaaaatcatttatgttgaaatgtttttagtttattggttggttaaatgatgattgttgaactatgttgtaattcatgtgtgttttgtaatgattgtagtcagtagattgtaaattttgatatatgtatatattttttttgtatggagtgtatatataaacaaaatataacagatgtattttgactaattggacagaaatactatagttaaagccaaatttaaattggagtttggaaataatagtttgatatcttgtccctttgtgcttgcataatgattgtctgattatattcaatatagttcacaattcacacttaatcatatatataaagaagttttgcataattgcaggaaaaaaagcttgccccacactagcctgaaagctattataatattacgattagaaaccaaattgttgtagtttagtgagtttgttatatatcctgatgttggtgaagacttaatagattataaattacattttacctctcaaaattcaaatgatttatgtggtatagtgacgctagtttcatcttagaaactttggtttacgagtaaaggataagattaaccggagtatatgtatgtattaactaatattatgcattgaatacaaatgttttagggtttgatgtaatcgattgaaaaccaaattatggtgtgatctaatgataaaaagatttacgccaaggttggaggatcaaaacacgaagttatcttctacgatttcaatcattattgaccatgctataaaactaataagaacacttaattttttccttagaaaacttatccgaatttcacacactttgaaaataagcataatcttactttcgactataaaagaaaaaaaaatgtagttaaaaagggtaacatttactggtatgttataattggagtttgctaatcaaaatagttcaacaatcattgaaagacaacaacaacaagtatgctatttcttgttttattaaccaaaccattaaaccaacctataattgataaataaaaatagtagtaagtctataaaaattaatatccagtaaacataattcatttgtggagcactataattatagacggtgtcaagtaacggcgttagcaccgacgaggaaggcgatggtataaaaggcacaccccaacataaatg

SEQ ID NO: 2728 - DNA, 3000 bp, Unknown
  misc_feature (1)..( 3000): cDNA_ID_2168405_gDNA_ID_1620582_Annot_ID_161196 3000 nt of promoter + ATG
tgaccctctctaattattcatagttttaaaaccaaccctctctaaaaatacttaaaagcaaactcttccaaaatcaaaacctcttcttacacagattttttttttctctgagagagacagagagagcgaaacttgagagaccaaaatccaatcttttcaacaatcgattctctctgagaaaaccaacaataaagctagacacttttttttgtgggtttgtcttcttcttcgttcatgcaccatgttgtgttacgtgaacgaagaagctatataatcaataaatcttatcgatttgttgagtttgggaatcggagagaaagatgttaacaaaggtgcttagtaaggaggttaagccatgccttgcttgtccaatctgcactaatccgtttaaggatgccaccacaatctccgagtgtctccacacctgtaagtgtaacccttcgattgttttttcctttatctttgtgatttagattctgattttttgtttgtgactatctctctgtttattggttatattaattagtgtagactagagattatatcagattgattctgaaacttggaagttgaaaccgatgttttgtttagctttttggtgttgttgtgtgtgtttcaacatgtatctgtgtaaatattaaggtaagcagataaggactgtttttttttgtaagtggatgattcagtgtctgtttatgtctttgtgatttcaaagttgctgtttctttagcttgttatgtttctagtcctggctttaagtattggtatatcttgtgtctttatatgaattgggacttgtggaatttgtggtaacagtttgcaggagctgcattcgtaacaagttcataaatgagagagtgaacgcttgtccagtctgcaacgttaacctcggtgtttttcctctagagaaacttcggtatgaacttgtttgattcttagcatttgcatctatctttatgcttttatgtgatttgaggtatctatataagtgcaggtcggattgcacttggcaggatttgaagctgaaaatctaccgagcaatgatggaaagcttaaagaaggcaggacctaaaactgttgcagcgtctgtgaaatcttcgaaaaagaagagaaaatctcgaacttcactgcgggtctcttcatctagagtatcatcctcacctgatactccattggaaccagccaatgtggttgtggaaccacctaatgtggttgtggaggagaaacatagggagaccgttctagctcttcaaagcactagaaaaccgataatcacgttccagaaacgtgggagaaaagcttcactcccgaagaagattgattcgaaaccagaacccgaactgcctcctaaggagcctaaaattaagaatctatttgacctgaacaacgaacctgaagacaatggattggtaagtatgtatatgagtctttgtataactattgttctcctttgttaactatctgtttgcaactaatgtgtttatgcatcttaggacgaagctgaaggatcaacttttcaggaagtcgtaccaaaggagaaagatctttgtaaacctattttctctctctctgtcactctaaacatcaacgatactcctcctgatatcgttgagcctgagataagttcggatgacgacacagaggaatctgttgaacctattcagaacaagtgtgttgtgaatagagaaacaaaggaagttcctgttcaagtgaatcaaaacagtctccttattagctctgatagggatagagaggacaactctggtcagaaactgaagaccaatggtgctgctacctccagatcaaggaagaagaaaggtaagaaaccggtggaaaagagctattctttgagaccccgaataggcaggaggacggttaatccagcagctggtactactacaccagaagctccggtttccgtggaagaggagatgaaagttgaagaaggacgtaacaacaatccagtttggttttcactaaagccttccaagactcagtaaaactttttttctatcttcttttttcatgtctttaacttatgattctgtttatatttgaaggactcggtttcttcggttttcaggaacattgaaatgctacttccaccgatcaccgcttgctgcataagagtaaagtaagtactaattaaatttcaactataatctctgttgttgttgtagaatgtgtgatattgattctttgatttgtttttatgttcacagagatagcaacatgactgtctcatatctcaagaagtatctaatggtgaagctcggtctcgaaagcgaagaccaagtaaactaactcttctctctatctatgtctcactctctcttgtcttttaactctaatattttttgatgttcttttgcaggtggagatatggttaagggatgagccagtgtgttcgtcactgacactacataacttggtggattggtgggtccaaacaactccattgcctgagcgacaaagcgcgatggtcggaagctccgctgctgaattcatcatggatctctattacagcttcaaatctgacgcctctgactctggctctgcctctgaataattcttctcagaacttcaaactttactcttcttctaaactcatttcttgcagaataagtttcttttgaaagacttctagttttagcatctttctttatttaataattgctgagacctaaatatggaaaactctttatttatttgatttgcttgctttttgaggactcaaacggtatcgttttgtactaattaaatagaagctcattttagctagcttgagttatatttgataagatgcgccggttttgtgctctgtttggtttaaggtagggttaacgaaagatctgtatccaaacagtcttcttttttgcccgccatggataaacacagagccaggagcttagtgacgaactaaaggtgaaatttttattgaaagtttcaatttttatatggattggattacagaaacatttctatgtgaataaaccaaca

SEQ ID NO: 2729 - DNA, 3000 bp, Unknown
  misc_feature (1)..( 3000): cDNA_ID_2168390_gDNA_ID_1620582_Annot_ID_161192 3000 nt of promoter + ATG
attggcccggtccctacgttgcctttggaacagcttatgttatgattaatgcttcgacgaaaagacagtgaaacatatccagctaattagggttgctcttgtttggatcgtttaagccccacgaaatatgtactaaagcaaaaaaataaactcaaattcttgtgtggagatcctgaataatcggtgatttcgtgaatctaaacgagtcatgtcattatttcaaaccctagcgtttatattcgaattttggatctgagaaaggggattttggattcactcaaccttttaaggtttttgttttgtttgcgataaataactttgaaaacaacattttatcttctggacggttgatttgaagacatgatgattgaaacaaggctaaataagtaaaagtgagatgttacattaatagttaataaaaatcaatatatatatatatatatatatatatatatatatatgaaaaataaaaagagagaaaatggagataagatgatagggatgagtcgaaaaaggaacacacaaactttaataatttaaagagccaacttttttgagctacacacgaatgtgatttgcaaaagacacgactctttggagtgtagcttgtgtatgcatcacaagacaagttgtgtgtttcgacatatcattcctcttcctcatctttaacttactcgttttctttcaaacgtagcattatattattatttccatcatctttataataacatgttttttttttgttttgggtgcctatatgtgttttgaattcgttagaacattcaaattagtttaatgttttggaacgaaactatagtcatgtcaaacatactaaactacgttttacagatattaaattaaaattctcaaaaatattttaatgttttggtatgaaactataatcaagtaaaacatactatatttaaatttcaaaattgttcatatatgacatactttttttttttgaataaacgagaaattaaagtagaaaataattaacatttttaccatgataattaaaacacggttaatatttctaaccaaaaaaaattaagaatctattagctagttcatatagttattcacgtacctcttcaagatatgtacgttaaaattgtcatcagaatctgtagtccttgtagagtaaaaaatatcaaatattaacataaaagaacaaacaactgttgattcagtacataaattaatacattaaattgaccacagagaccaaaataatctaaaaatgatttatgtatttggcttaagttcaatattgttttttaggcaaaacttaatgttcaatatatattcatggaattaactccataataaacagtaactgaattctcttgtactttcttaaatggttttcagtaaaaaggtttagtttaaccaacaaataactttagcaatcatctatataagcataaagcatcacatagatctagtagttatgtttctataatacattttcactaagactaaaacatgcatgaacacacaaacaggaaaaaactattctcaagaagtttgtttcccaccatgttaagtgattctagaaatctgtaaatggttaacctttagtattcattcgtgcaatatttaacagacaaatggtattcattcgtgcatctctcagtttgtgagaaaatacattgcatgagttcgttattaactggaaataatacataaaactctgacaatcagaacctctaaattatttacttataagaagagaggcaacgtatcttgcatcgcttttacttatctaatcttttggtgatggaaggggcaagaacatagaaggaatctttatcttaaaagaagagaaaacaaataatatccaaaattggtaaatccattgaataaagcctaacgttaacatcaaatcgcatgcggattagaagctaaatgcacatagttaagcgtaatctatggggagaaattaattaccactttttggttcattcttttaagttttatgattcaatgaatacatagcacgtggaacctctctcccccacaacccattttgaagggaaatgaataattaaaagagacatacacataagaaagcacatggctttaccattcctctatcaattaccaacacatttgacccttatccacatgggtcttcgtctcctattataaaatcaaaatctacacacaaaatgttataacattttccaactcacaatatacaaaatgccacgcataaatatgtcttcgcaagacaaatatgtaacgtttaatattcgatattatctgagatttaaccataaaactaatatttctttattaatcaaattacatctacgagcaaaaatgataaaattcaacttatgcacattcaatagttcgtaacacataagagtacttggaaactctaaataatcttcattttggaatcaggattcaataaaatagtactttatttgacataagtgtccttttaaccattttttacaccatacgttttttcttctgaatcgaaatttttacatcatactttcaaaacatctattaatcttttaagttaaaaattaataaatcaatagaagtaaactaaaaataataatcaactttcacatcaaattttaagacaacacattatatttaaatatatattaagaatatctattatgcaacaaatggattaacaatcattagcacttgatattttctttataacctgcactatacactttcaaaaagagaagaagaaacctttaagaaacagtaaataaatgttattataatacacctctttagtctttactttatttatattttctctgtttgcttttattccgggtcggccgatagaattctcatcatttcattcatttttatattctttcgttataattattatacatcctttgaaagaaaaagaagaggcaatagagatggacggctaagatgttaacgtaaacaaagttggcggagggaaaagaggagcgtggaataattaaacaaaagagtcgtgtccacatg

SEQ ID NO: 2730 - DNA, 3000 bp, Unknown
  misc_feature (1)..( 3000): cDNA_ID_2168397_gDNA_ID_1620582_Annot_ID_161194 3000 nt of promoter + ATG
tcaagtagctaaaaattagacatacggaatattaaaaaatggttttggctcaatttttgtacaatgctcttagatttttcatggatttatggtcaagttttgtatgagtgataacaaaaagtcagatctaatgtagtgtataataatttttgctctataaaattgattataaattgaaattaatggtaagtcttgaaatagaatatttgaaagaaaccgacaagtctacgttaaatatcaaagttttgggggtgcaataattaagagcgttttggtgcagtctgttcgtaatcgtagtgacggttgggaactatgatattaatatggtgtctattttttgtttagttaatttagatttcaaatcaaacacttgattaatagaatgtcaagaactcataacactctaatcactaaaggcaaatatagctaaaaacatgtcaatcttgccggttgaaccggataaaaaatcagtggtgggctttcaattcataggattacggccactcgtgaaagaatatgacactaattcacgaaaagatgtttcgtctaattttatggtggttagaagaattccagatgttttcaataatgaggctttttcccataatcattgttttccccccaaatgacatataactcttttgtataaaaaatacgtaattttatgaaaggtacaattatctccttcgttagcaaaatccaagtttctacaatatgtgtatgtgcacgtgtaactacagtttgagttcataaaaccacgtcccacttactgtaaaacgttagcgactacactgctaattagtaggattagacaaattatatgttccctgtgttttaattttgatattcgtttcggttcgtttagcaaaatagaactaatcataaatatttaagtttcaaaagcctcgattcttaagaaaactacataatttcacatattttcactcgattggttgcgcatcaaatgtatatataaaacggatcacaatttttttttttgatcaaaacggatcacaaaattaagtgtaaaaatacaggaactttcctcagtctcgtcagccatgatgcaatggcccttgatttcatctgtaaaaattacaagtcttttcacattacaaagaagcattaagttcattttttatgttgggaagaagaaaatcgatgtcagtcttcactcagtgtcctcactaagaacatgtacctagaccaattaatagattctctgtttatataccacaaatgtctatgcttattaatgagtagtactattcttttatttttaattttttagtaagacacatttaataaccaagatgatacagagaaaacgggagaccgtaaacaattaaaataatatacgtgacttgtatagttgtattgcttgacacaaactaattagaatgttgaccaaatttggttaacggaatttcaccgcccaattccacttgctttatatgcgatgaacagttgaccagaggagacaaagtgtaacaaataggctattaacaaaacatagaagtaattaatacattcatagtttatatatagacatgttgtgagaacttattcttttcttctttaacaaacaatctgaattcgtttcatactatataagtattatatactacctagttatatgctagctttgtattgactcatagagtcatagtacaaatgctaaaatactaaagctacacagagtggtagaaccagctgaaatatgtttaaaactacatgacctaacccaaccattacaaatttataaacaaactacatcctgaaactccagaatagacgatgtagctcactatgaactataatgtatgtttaatgtcagaaccaaataaatttaaaaaaaatgtcagaaccgtacgagaagaacaaacaaaactttttgtagtttgtttgtatatatttctaagtaaaaatgctgaacacaattatacaaccaatatatgtgatctaatgtgctatttaggaaaatttgtcgatgataagtactacgtcagagtcaaaagacccatattggtttagtccgactattagatacgaaaagtcaagcaaacattacatgtaaattttggtaagatgtgagagatatatatgtctttttttttattttttgataacaaagatgatgctaaaatacttttagatccaaacaccaattatgagattcggaaaaactaatgttagaattcgaaccatgatggccaatattacatgaactcaagtggcaaattttttcactcttttactattggagcaagatgacttggttatgtaagagatatgttgctctcaatattctcatagatcatctctttcttcaaattggtaagatatgagaaatatgtcccatctttttattatcataccaaagtcttttataaaatatatcatatatgtatatatatatattgtcaagaataacttgacttcatacatactatttgaattcggatagtatcacaaaacatcactaccacgtaactgttggaacttcaattttacaaagtatttccggctaacttttcggcgagtttttcagtgaagtttgtcacaaaaataagaatgatcatatttttggaatctttgtaatcgttttcaaagttttctctccggattttcgcggttctacaataattacattacatatcatgatcaatatgtgacctgatcctcgtagttaattaaaacataatttcccggtcaccattcaaaactttctagatggaagattaacaaaacaaaattatcttagcttaattttgtagtaacagagaagaaatgattaactaacatctaatcaagcccacgtgtcataaaccccaccaatgaagaaaaaagagcaaaagacatgcacatgcaattacacgaatacatacaccccaccaccatcctccctccttatattattattgccccttcctctcctttcttcttcccctcttaccttttcagagagagaaacaatatttctaatctattacaagtaac

SEQ ID NO: 2731 - DNA, 3000 bp, Unknown
  misc_feature (1)..( 3000): cDNA_ID_3069456_gDNA_ID_1620583_Annot_ID_161211 3000 nt of promoter + ATG
aacaataattagatatgaaatcggatagtaaacaaaatacactatatatctcattgcagaataaattggggatttaaatcaaccaactttgaaaattggacatctaataggtattttttcccatgacttttgaaaaaacaacattttgaatagtcctaacgattttataaatttgagcttgtagttcaagtcacttgtgaaagccaacttagaggctgaaaaatgggcactagcggataacatgcctagctttgaggagtatatagaggttactggggtggggatcacagcaatgacgactttaatgggtgctatgatgtgtatgggaaagatagttccgaaggaagattataagtggctcaaatccagaccaaaaattatccaagctttagctatcaaaggtcgtctaatgaatgatatgaaaggttacaaggtacgaattcgcttaaatcatttcttcacatccggtttttgtctactatatttttgtccctataccttacaaacttacactgttacttacacatacatttatcaggaagatatgagtagaggatatgcggcgaatgcggtcacctgttatatgaaacaatatagagttacggaacaagaagctttaaaggagtttgaaaaaatggttgcggttgcaaataagacagtaaatgaagagtttttgacgacaatgggagtgtcacgcttggttcttaagctagcaatgggcgttggactcatgatctctatcacgtacagtgaagacgaaggatacacccatcccgaaggaaaaatcaaggagaagatgactacactgttcgttgatcagatccctctttgaagtcttgaaaaaatgttttggcaaccccatatatgttcaagcctttgttcttggtttcttttacaacaccatgtttttgctttctacggtctaattaattagatcagaccaccttaaattcacaagaagctgtgtatgttttctaattaatgtgggttagatcagaccaccttaaattaagatcctataatatttggtcaaaaacaagaagttaaaaagctatacacatgaaatcggttcaaatccttgcaatttaaatggtcttgtttctccctatatttctacgttttccctttattttggtttaactaccggcataaccttggtgatttataaagttttcaaaaataaaaagtagtttaggtaagattctttagaaaattaataactttatttttattacaatattcgttatttcataataaaaaagtgtacatgatttcatggataatatagaaaaatgggtttctgcgaaaagtggatttcatggataatgtggtctacaacaacagtccaatatcaggtttttattaatagataacctagaggcttgatagtaccggggagagattaaagacaaggaaatccgctatcttcttacatatttattctatgtacggaggtgcttattgcgaatattcgaaaagctgaacaacgaaaattgattactggtatgaaagtagatacggcaagctcctctgtaactcatttgttatttgcagatgatagtttattcttttgcaaagctagcaaagagcagtgtggagtaatcttggaaattttaaagcaatacgaagcggtttcaggacaacaaataaatttttcaaagtcctcgatacagtttggtcataaggtagatgattcacttaaggcagaaataaaatcaacagggaatcactaatcttggtggtatgggctcctgtcttggtttaccagaaagtctaggtggatctaaaacaaaaatgttctcttttgttagagatagattacaaaataggataaatggatggtcagctaagtttttatcgaaaggaggaaaagaggtgatgattaaattggtagctacggcattaccaacttatgttatgtcttgctttacactaccgaaaacaatcacatcgaagctcacgagtgcaatcccaaaattctggtggagttcaaatggtgaatctagaggtatgcattggatggcatgggataaggtgtgttatagtaaatcggaagggggtttgggttttcgtagtgtagacaattttaattcggctcttctagctaaacaattatggcgtttaatcacggttccaaattcactctttgcgcgggtttttaaaggacgttattttcggaaatccaaccctttgaataatataattcatactctccatcctatagatggagaaatatttgttcaggtagatctctagttaataaaggacttattaaaagagtaggttctggagaaagttatgtctagatctagttgttaacgatcccacaagtcacatatacaagtaacgagtaatatgacaaatatcaaaatgaggcaaataacgaagcaactatcaaaaatattatgatacttgacttggacttgcaagtaataaaattaaccgacttgttattcgacttgcctataacggatacttgaattttcaaggctagttattgtcaaaatctaaacagacattggttttactcgatttacaatctaaaccgaacaacaaaccacataagttctatatgaaaccaaattaaaacccgacttgacccactcgtaataatacgacccatagatgatcttccttgatatattaatcttcgtcttcacccaattcttccagcaaaagaaaaaaaaactttttgttgaaatttgatatcaaaattaccaaagcttatttctgctgcttcgctccctcgttcaataattttttcctaacaattctattttctggctaattaattgtctataaattctattaaatatttcaaataagctctacaaaattcgggttcagtttaaatccggttcggtttaattcagatttggttccgatttccgacatttcgatataacttcaaatccggtccggttttattgccagtgtcgtttgtagataagatacattcacaaagacaaaatcactcactcgctcaagagctcctccatg

SEQ ID NO: 2732 - DNA, 3000 bp, Unknown
  misc_feature (1)..( 3000): cDNA_ID_2168208_gDNA_ID_1620583_Annot_ID_161228 3000 nt of promoter + ATG
ttgtttaaacatgacctaccaaatttaaaaattgtttccgcaatataacatatctcatgttattttaaactgtttataaatattaatcatatcttaaacttttgattgattttaaatatatatatatatatatatatattatattatttaatcatttttaaaaattgaaacttaatatatccgataaaaattaaacttaatatagaacttttaaatttggatacttaataagtcaaaattctttttcattcatatttggattcattttaacttatttataatataattttgagtaattttttaaatattttagacgatatgagacattgaacacactttttatttaattgattgaaaattattgggtcatttctagggataaatcctattattcactttttcttaatctaactaaccagaatttgccacctaataaaaagagtatttttgcaaacttaattagaaaagtagtacatatactatttataatatgtaatatagtcatgatacgtttttttcgtgagagagagagatgtaagggagacagaaaaaacgtgcgagagagagaaagagtaggtcatagtttttttttgtttttgtttttctttcttattacatttcattccttaagattttaagaactaaaatacttgtttgtaaattttatttttttaaaattgatcatataaataaaaatctatgtttttttctctatcaattgatatgcattttgtttaataatttttaaattttattttactgtaattgtgaaactagagatataaatacaatctttacagcttaatctgtacagcgcaatcagtacgaagcaatctatgcggttgtatctatacagtgctgaaacaacccgacccattttttagaaaaaaaaatataattaaatattcccataaatatctaattaaaccgcaagtcaaaaatactattttatgaataaataaataattcgtccaacaaaaccaagaataactaacaatcctaaccgggttccaataatcaaaaacaccaaaaataaaacaaacgagttcctagatcatcctctcttccttgccatgattccacgatcacactttatctttacctgcatcaacaaaacaatgagatgcgtaagtattatcataaatatttagtgaggcgatcctcccatctacgagctatacacacaagcaaataaaaaggtataatcacgaatacaatacaaacaaaccagtcattgaacaattcacccaaaacacattcaccacacctacatatcatcacacaaaacaaatcacacaaccttatcgctcagataagttcatggtcacgcactcaccttaacaaaatgattctaatagcaattaaacccaggagagactctccttgcgtctgagacagtccagaaacgtcctgcaacaagtccacaaccaaaagcaaccttgaagcaaactggacaggaaaaaccagaaacaaaccgtctcaaagatgaaaccctaaaatacaacctaaccgttaactattcaatcgttccggtgaaatcctagctgcagacgtcacaaagctgcccaccaaatctcgtatcgatcggaaaacagacgagaccacgatctcagtttcaatctccgctggtcctaattcgcgtctgagaaaacgtatttcacgaaactgcgaataactcaaccaattttaatccaaatccaattctgtaaactggaggataacgataaaggacttgggaataattataccaaaattcgttacctttaaccacgatttgatatgacgaaactgatttctcccaaaccctaacgattctgctccttctccttttctctctttttctcctttataaaacgaaaagtggctaaccaaagccctaatttcgagtttccttcttttataggcacactctagggttttcaattaacccaaccaattaaaccggatgatttaaaaaacaaaccctaaccgattttccggttcacgggcgttacaagtgctatctgtacagcgttgtctgtacaaagctatatgtacagcgcaatcgtaaagaaaaacaaattttttagagagaaaacaaattaaataaaaacacataaccaataatacttggataatacataaaaagagttatacattcatcagtaatacttgtcactttgaaagaagtttaggtaatctgtacaatgctaatgtaaaatactaattcatataacaattaacacaatactataaatattagaattatatgtcggtttgagtttataaataaaactaatggttagctatatgaattatcaccaatcgcataactaaataatttaacaaagaaagttcatgtctgaccatatcaaccaaaacaaataatcatattgattcgagtagttgatggatctagggttactttctattaagaattcttcttggacatctttcacttaatgaattgtagttagattcgtgatatagctgctgatctaaatgggtaggagtggtattcgtgcaaacctattttcggaactaaggttacatatcagccttgcgtcataacgagcacacaccacttagttatagagctttgcaaacagaccaaattcgctttagttgttggtcgagatgcgatgttacatgcgttagttaagtaacgtatcatgcatgactttaaacattcagttttacgattacatgtgcacttgcagcttaactttgtgtaaatataaaggtgaaggactctcgacatcgatgaagtttctacaaaaatatatatatatatatatatatatatatatataagagaaattaagaaaacgtaagatagaaaaaaggaaaaaataaaaagaaagagacggtttgacagtcacggtaaaacattcaaagaagggttcaaaccggtctagaaaaatggttgacatctaaatctaaccacaagaaaaacagtgtgtcctagtcgtatccgtgcagatccaatctacatagtgaccaacttcggaagtgttggat

SEQ ID NO: 2733 - DNA, 3000 bp, Unknown
  misc_feature (1)..( 3000): cDNA_ID_2168212_gDNA_ID_1620583_Annot_ID_161229 3000 nt of promoter + ATG
ccagcaagtaaagatctcttaaccaaaaagttcattcgtctataatattgtcaaaatcttaaatgatgttatcaaataaatattattgtattttgatttattaaaagatgatatgtatatttttttagacataagagaatatcatgtttgttttaaaatagcattaaaaacgtggtacagtagattgcaaaattgaaatgatgaatcaatataattaaggtatgatatcatatattacattaaaaaatgaaaataaataaattcatgtatacttttagcaactaaattaatttgaaataaatataagcataataatagaaaacggtcacacaatcttgaaatttttaaatctacactagcaatttttataaatttattgaaggtttttttcattagaattttttagttgagaggtttttctattaaaaaataagttgaggattttaaaatggatcagtcaaaactttttgtcattaaaatcccaattaattgatgttctttatataccataggatcaaaacacaaatatactcctactgactatcattatttctagaaattttcaaaatttttataatcttttaaagaattgtatacaagagtgcctagcattaaatgatattggtcaaaactagctaaaagcaatcacgatatccacatttctatcagttaactgtaagtacgacacatgcccaacccagacgcactttagacatcaaatatatctataaaataatttagagatattattttccagactttctttctctcctaaagcatttatagtattttttttttatgaaaatattatttttttctataaatttggaagttcaacttcgaaaatttttatatctgtaagaagtaagatttatatcgggttaaattcatcttttgaaaaaaagatttccttcggtcaaactcaataattttattttataaaaaatatttagttgtaagttttatgatgggataagtattttttttttttgctttgggccggccttacgacaagtcgatcattgacgtatcactttttttttgttaaagtacattgacatatcactttcggaagagtttgccatatataagcagtgtcgaaattattagatgttttcatgacttggtagttgcctctagcgtgacaactgcctctagcgttgcctcaagcgtgacaactgccgtgacagtgacctcaacaattgctgacagtttctcaattctcgtagttatttcagttcgtgtttgaatattattattgaaatacgtaaacatagatggatccgtggaaggcatgcacatagatggatccgtggaaggcatgcaaatgtaatattgtaggctgcttacaataacgtagttcattatagtatcaataatatttacttgtatataaatatacagcagattagatagcaatatcgtaactatatgtctatataacaggtgagtattaaacgtgacaagtgttgttaaacttgttttcgacatgaaagtaaagtaaattttagaaacttgtgatttctttataatagagtaaccaaacatagctagtaaaatgatcgataccctaaaatgtatataatattgaaaaccattgaaacgaattaatgggcgaggtacactccatacatgagagataaacaaggccgtgaaaagaactaattactatagcttaagaaacccaaagttagtgtttcttattgtttgaacaattgtagaggaaggcttgcaagcattgcaaaatgataaagatgaaatagtttttaaatcaaatggcaagcaaagagaacttaacaccatcaaaagccgatggagatctcgctaaggaagaactaggtcattgccactcctatatcccggcactagcggacagaatctgttaactatatatagcatcgttagttataagccatgcgaaacttttacttaaccttatatttaaaggttttcaatcaaaataatcttgaaaaatacttgggtttatccctatgggtaaactcttatattcacttcttttattttaagcaattaaaatctgacacctaataataataaaaagaatttaatttaattataaaacctaataatttgccattaaaacgaaaatatgtatcggtttgtgtttattagaaaaggttagggttaaaattttatgattaaacgaggttaaatatcggtttgggtttagaaagtacgattagggtttagattttataattaaacgaattaaatattggtttaggtttataaacagatttagatttgacaattaaacgaggttaaatgtcggtttggatttagaaaatacgattagagtttagttttttttacgattaaatgagtttagatggtggtttgggtttacaaaagagaattagggtttagattttataattaaacgagattatatatcggtttggatttataattatagctttaatttattatgtaatttaaataggatttaacatgacatgtttttattggttaatgcaaaaggaggtgaataaaaggattcacccctaggagtgaacccaagtttcgttcaataacctttaaaatcgtcattttctacaattttacctttcatatctaaaagtaaaaattaattttatgaagtaaaaaaataataatacgtaatctaattgtttaaatatttttataagtttttaacgattatatacgttatactttcaaaattctaaaggtagatttaaactcttcattgtttattgtgaaagttttgttttgatataccaaaagtttcaaacgatcatgagtactatttatcaaacttttgcaaacttactgtgatgataacatgttatattgcatattattttgattttgtctcattgatttgtattttttagcagaaattgacaagttggcttttttttggcagaaaaccctatacttaatgatcatattattattttcatgcttttgtgctcttgtcgacaacagtatggttagctggagtttgattcgacaatg

SEQ ID NO: 2734 - DNA, 3000 bp, Unknown
  misc_feature (1)..( 3000): cDNA_ID_3069452_gDNA_ID_1620583_Annot_ID_161213 3000 nt of promoter + ATG
catctttgtgtatgattaagtcctaagtgctaacaagcaagagatcatccttaaggatccgctcaactcttttgatccttgaggatgatcacgaccgaatgctttgaggagaagagtggtttatttttgttgtattgacaaaaacttctacaataactttgttttgctttgacatttctcacaatttttatctgtctagattccaaaagcgatttttaagtgtccttgcacccactcaaattctgatgattttctatccacctaatgtggatttcactttaattctctttttctaattaaaataagctactgtattttttttccttagcttgaggacatttttaaagttttttattttgaaatcgtcactttctaaaatttatgatttgtagtttcaactaaaagcggatgacaaaagaaaattgtagttattttcccaatttttttgaatccatagttagttaattatttgggtaatattacaaaataatcaaaatttgaatcaaaataaagtaaataactattgtcagttttttatcggtaaatgaacatatgacgtcacaataaaagacaaaaatgtcccaacaagtcgaaccaaaaacaaacacttcagagaaaaaaacatagatgtgaaagattttaacaaaagtaacattttataacgtactttttgaaaattagcatgttatattaaaaataccatttcactttaaaaaaagtacaatgtgaaataaaataataacatgatatgtattataatagcgtgtcaaataaaaaacaaagctgattaatattaaaaagtaacatgaaatcttaagaaactattcattttcaaccgtcgattagtattgtaattaaaaagtgtgtaagactcaaagaatactattggatcaaatggttatgggcttcgtttacgagagagacgtgatgggttgagtcctttgttttagcaaagaaataagaaaaatttctaaaaatagcactaaaacaagttttatggacaataatagcacacattccatagacctctaaaaatagcattatttgacttactatgaagtttttgttctaaaagtattatcactaatttattttttcaataatatcacaatttttatataaaacctattaaaccaaaataaattagaaataaatttaaaatattatatttgggttctgtatttccaatttatggtatatatttcaaccatttaaaagaaattttgatcattttaatattactttatggcattatatttgggttccctatttctaatttaggatatatattttcactgtttaaaagagatttttcattttaatattagtttgtggtattatatttgagttctctatttccaatttagggtatatatttccactattttaaaaaaatgtgattcaatttaatattagtgtttgctctcatttttatttgggagattgacacaaatgacacttaaaaactttattatttaattaatttttagaagattaaaaactttatgtgctatttttgaaagtttaaaaaaaaagtgtcatttttggaataataaaatttttaatgtcatttgtgtcaatttcacaaaaattaaaaacttttataccaacatacaaacgaagtcattttgagtagacacctcatcatgcatgtgttagctgactcaacaacctattaattacacaaaatttcaaatcgaaaactatactatacagattgtatgagcataaaaatattaattcaagacgaagtcattaaaatatcgaaaactatactatacagattgtatgagcataaaaatattatatttttatcagaaagaattatctacagtaaaaacgtatatataatagtttttataatcatatatatgaaagttgaccaactctctccatatgattgatatatcatcactttaacatttgccatgtgtccactgaataattaatgtaagctcttcaacttttaatttctagattaatgatgtatttattatttaattttactaatacataatttattttgttattatatgttcttcaataaaattattttattggttttctcatattcgaagaattttttctgtaatcttaactcaaattatgagtgtatagtagtcatggattagttaatagtttgaatagtttgcatattgttatatatctatatagtaaatcgccaagggtgaagagtatgtaagaagtttaatcatcaaattcttaggtttcgagaatttcaatattaccttctatttaattagtttaagacgaacattgtttaggaattgtgtgtataatgcattgttgaaaatgttgttaggaaaaaatattttaatactaaaaataattacttattacataagtaaatgattatataattaaaaattatatttaaattaaacgatacaaaaaatttgaaaatatcccagcgtagcgcgggtgattacctagtttgtaataaataataattcaagacgttagaaaaagagaggataattcactgctcttctatacactatttgttcatatttaaattctttattcttttcatatcattggtagtttatatatatattatgtagttatttaatccttgtttgattgtttctatgtatcgaccaaaaaaatatacaaagttgaatcttaaaatattgttttcatattaatattctaaactttggtaaagttgtaagttataaaacaacttgaacataaaaataatgattgaaattaatgagagaacacaaaatagaaaaaaaaaggtcatgagaacagaacagaaacacttttgtggctttcgtgggctaaagacgtgcacgcagacacaaccctacacatctctccctctctcaccaactctttctctttacccactgcacctacccccaaacaatcccttttaacatctctcattcctctgctcatgattctttgtctcttcctctgatttctcaatcctctgttttctccgtctcctctgtttttttcacatcaatg

SEQ ID NO: 2735 - DNA, 3000 bp, Unknown
  misc_feature (1)..( 3000): cDNA_ID_2168193_gDNA_ID_1620583_Annot_ID_161223 3000 nt of promoter + ATG
tcatggtttttaaccgtgatataagcatttgtttgtagaatcttttctctcttttgtatcttttcgagtctttgtaggttcaggtacgctattggcggactttcgagtatttggagcattgtagctatgaagagcacctctggacgtatcagaggtgattttttctatcgacacccttgtggtgtcgttcgacacgcattgcgaacacaagtctcccacgtgttataacaagtcttgaagagttgtatatttgtcccaataaatctactatttgcattaaaaagtctccggaagtattttagactatatttaggatttttatggttattgtttagagctatgcattattttggagaaagattttgtacaaaacttggagagatgaatgagactttatcacagaagatccttaactcctttactctatctttgaatctcttgatgcaatttattcagattctgattcgtgtttcattgattatgtctgagtaatctacttgttaggtttatgaattttccaaggttttgaatgaatggttaaactgaacaacctgttatcttcaccaagatttgatttaattatttgttctagattgatcatccagaatattgcctatatgataattagttgatacgagagtgtaattgattcttcaaataatcttaggtaagaaaaataactaatcgcaaagagatatggtttaggaattttttgaacaatcaaacttgattgttaatgcttgtctagctaatctattaaattttcaaagaaatttggaattctagtttaggcataaattatttctgcaacgaaaattgattaattttacaatttaagtgtatggtctattaggtatattgttgcacatcggaagttgaataggatcttaagtggtatatataagatatgggcatctccacctatcgccaattgattttaggttggaagccaacaatctaatatgatatcagagcccgatccgcacatactcaacctaatccacatcggtcaggctcaatattaggcccgctgatccatgcccgaacatatcgagatcaatggctagaagaaccatcatctcgaaggggcgtattagagatattgtctcacatcggaagttgaataggatcttaagtagtatatataaatatgagcctctccacctatcgtcaatttgttttaggtttttagaaatgttgctctgataccatatagaggctgaatatttcttatatttgatagagtgtgaaactacacatatatatacagaagcgatgaagtaattagggtattagtaaaataattacatttaaaacccttatatatctaagtacagtataacctccataaattaatactcgataaattaataacctctataaattaataaattcttccggtcccgagttgggaccagtgtaaaaattgatacaaatcgataaattaataagataataactttttcgaaaatcttatataaatatatggtcccatcaatattataaattaataattatgtaaatttaccaatatatacatatatatatatatattaatattatatgtaaaatatttattgaaatatgattctagtattattttttcttcaatttctattaattatttgtagagtttaattctaatatttttattacgtcgaaaaaactttttattatttttgaaacttaataattgttttttccttgtaattagttttagaaaaaatgattaattataaagaaaaactacttttatatcaaagttttgtaaaaaaaatacaaaatttataaaatctctttataaattaataattattaatttatcgataaattaatacctctctaaattaataaattttttcggtcccaacattattaatttatagaggttttactgtattaacgtatacctttatatggtccttaattaaaacctatctgttgttttatttgcaactctgatttactgaaagaatttccttaagtctagcgccttcttccacagaaccaatttaattactttattattgtaattttaatattggaaatttttgtttagttttattcgaaagccaataatttgttgtatgaactatgtaaaatttgattcctaaatattacattcgatcttttttgattcctaaatattacattcgatcttttattcgagagaatatttcatagggataattaaaacccatatcatacatatagcgtcgtgacaactaccgtgacagtgacctcgacaattggtaacagtttgattctcataattagggtcaatgactatcaacccaattattattcttcaaacacgtaagcttagctggagccgtggaaggcacgcacaaaagatattgtagatgttgacaagaacgtatcagtacaaatcgtgccaagttttgttgaatttgttttcgacatgaaagtattgaaatttgagaaacttttgatataattctttcttttttaaccaaaaaagaaaaattttgatttcttttaaatagagtaaccaaatgtagctagtaaaatgatcgataaaattatgtaattttgtaaccaataaggaagaagcagatcatggccactcgcatatcccgtcaatagcggacataatatgttgacttgactatatagcatcgttaaacccatgtgaaacttctacttaaactatttatgcatttatacgatcatatttgtgggctcttgttttatagtaaaactatatattatagatgctgacaagtgacaacaatatataaggtttgctggacaaggatatggagtttaattattaagagcgtgaggaacgttgaattatatttaaatggtaaatgccaaaactcttggttatatttaacattatatatcctttgcaatccctcaagaaggatacattcaatttttggtggtcttttcaaaagtggaaatacaacaaaacaatgtcgggacttaggcaagtgtttcatctcttacaacttcattttttgtttggctatg

SEQ ID NO: 2736 - DNA, 3000 bp, Unknown
  misc_feature (1)..( 3000): cDNA_ID_3069492_gDNA_ID_1620584_Annot_ID_161253 3000 nt of promoter + ATG
caataggagtaagttgttgtttgatcacatctgagataaatgaaaaccctctttatgcagtttgctcttgaggaaactggtgacaattgggaaggaaaatgcatagcagagaaacaaactgagcgtcttgaactcaaattatcaaatgcggaagctaatcagattgatgagaaaaagaaaaaaaaaggtggtatattgagttcaatcacttgatctactatattctacctgtggtttttggcttgatgagtactataccagtctacctcttactagctaggcattatttttcaatcttttgtgtgtttcacacaggtagaatataagacagaattcctgtagatgtctatttggtagactctgcatcgagaaagagacgttatggctggtgattctgaaagggaacttgtctttgaagaagacaggaactaaagaatcattctagtatcattccctgctgctactgtatggatctcttttttatatacatttatttgcacagctttaagctaaacaacaatcaaagagtgaacataatatgtgtttagcatagctgtggttataagtaaattgtagagcttgtttagtcgcttctttatgcttgaagttttagacataacacttgttctctagacatatactgtaccagacatgttttgatcataaaacttaaaaagaaaaccgtgtttaaacgggcggcctaacgtggcactgaatgtaatgtaagattgtgctgaatgtatttatgacaattcaagagtacatgatgttttcttgtttaaattttacaggccaggcggcctatatatatatatatatatatcccatcggagaaaaccctaactggaaaaggaaacttgtagaaaaggtaaactgcaagcaagatttatgtttcacaaatgagattgtatttgttgctgtaagaacaaagggaactccgttgttgggaatgctcctcgtgtatagtcccactttaccattgaataatttgatcacatttccaagcttttggatcagccacatctaaggcttcaccttcacaaatagctaagatcaaacaaattgtaatcccctgaatttggaatgtaagtgtttctttacatgtagttttgaaaattatatagatattttttatgaggaaaacacttgcttttgtgtggtcacaaaggattgtttgtaccacttatatttaaatcagtaaggccaagttatatgtaatgtatgtctcctcgatcaataacacctccaaattgacattttttctttctttcttaaggtctttttaaaacaaggccataaatcatgatgattcgtactatttggtgtttggtattggacagattaaaaaaaactagaatcgacatttaataaatgcattcagcgtgatggtttggaaaattagaaagggatttgatgtgaagctcactggttttgacggaaggacctcctcattaaataaaacgaacaagacgtccataattatagggcggtgcaaaatgactcttctttacctgttatccaattcgtattcattcaataactgatttttttttgtttggtaagaaacattcaataaatgtctgaagttatttatggattttgatcattttgagtccgataacgaatactatcatactagatgacgtcaatagaaaaacgaatatgaatacatatattatataacaaaaacaaaaaccaacaattccaatgaaacctaatccttcaaaccaagttttcgtttttttaaattacgtcttggatatgaagtatctggattttagaatttaattttctcaacctcttttttttttttgatcagcatatctcaaccatttaattaatttcagaaatttggatacaaatatttgaaaattttgggaaattgacatatgcaccatttaaagggttcggatacgaataattaattatttgatctaactacgcaagtaaaattgagcaacatttaatttcaatctgaaaaagctagaggatattcattcaattaggtctcatactctcatctttgaataataagctcactactatactatataagtaaggtaaggaaacatatttagaaaattcgttatcatatatggaataatcagaagaagaacctaaattaaaaaaaaaattacaagaagaaaaagagaaatcattgacgaagaagactgtaaccaggataaaaacaaatgtgccgatcagatctccaatcatcacgcgtctgttaataatctgaatagtcaacgctaaaagatgtcttgagtctgtctgaccagtgaagtaaactactactacttgtcaataagaggcggcaagcacatcggacggtccttgttttccctgttaattataaacggtcaccatctctttagacataatatatactactagtagtggagtgtttttgttaattaaagtgattaaacaccaattctaggtgttaaccaaaagataaaacgatacagtaaatatattcttgtgaattctatagtatcataatattattccttttttatttcacttttgataactataaaatctttggcaaactaaaatatcattagattattcctttttaaatagctaaggtataatttctgatttagctttgctatcacaatgttcaatttgtctaaagatccgttacctctctatgcgagagaagctgtgagagagtttccgacaagtaactaggagatcgtaattcttgtctgaaaaacaactttttttattcgaaacttctctcacagatttttctcagtttttccagaaattttgttcttcttcgtccactcaccgtggatctctctagtttgttgaagaaatcaaattgtggaataaataaaaaaacagagaaataaatactgcaaggaaagtttcttacttcgtcactttgacccagaaagctttcagattttcccggaaaagaaatctgctggagaaatttcattgactgacttatggatttgtgaagaagcttgaaggcgaatcgaagag

SEQ ID NO: 2737 - DNA, 3000 bp, Unknown
  misc_feature (1)..( 3000): cDNA_ID_2168290_gDNA_ID_1620584_Annot_ID_161256 3000 nt of promoter + ATG
aaggcactaattaaccaagacattaaccaatgagaaccaaatacaaaaccaaaggaatcgaataatacgcttcagcaaatcatccaccattaaactcaccgtggagcgaaataggacgatgatcctttccccaaccgacgccgcgagtggaatcgagatactgctgaacaagatgacgacatttctgatagtgattgactccttcgacgcggtaacaccatttgaccttctcacgcaagatcttagccttctcgatttggatccatttctctcgaacgatgtgctctctcatttcaaccatcgccaccggatccttgtatggattttccggatcaaagccatccggcgccgactcttcgaactccggtaatcccttctttctccccattgcttcttcttcttcttcactcgtcgtcttcgtgattatctgagttaggggacctttctcttcatgttaacaaataattgtgggcctattctctggatctaatgtatgggcctaaatctagcataacgtactcgtactctgtggcctttttatgagtgagtgatttttgagtttttttttaattcttactcacagttttattgttacattcagacaattttagacatctaattttattgttatggacgagttcattatattagctatctagctagctaacactaacaaatttttgacaaaagtaaggatttttcatgatatttataaaaactgtagatgagatatgttcattttggttgaaaatataattacattacatatattatttgaattttatatttaatagaataaataaaaaaatgtcttagcaaatcgtaagtttaaatattttcactaataaatgttatttgcttgtttttcttgtctacgtacgtaaaaagactatttatttacgtagataatgacaaaacatttgacctagcacacaaactttcaaggattacggaaaatctacattagaaaagaaaaatctaacgtgtagacaaatttgtagattatgtggactccaatcttacgattttatatcaattataaggtgatatttcctggtgtcacttcaactcgattatcatattttaattttttaatgtttattaagttagtgtaaataatataccagttgcaggttatgactgattcaagtagctattatataattgcatatataacactgattcaaataaaactgataatttcaaccatttaactgaaaaacttgacaaatgaaacaaaagaaagtacattgttaattagaatcttgaaactcataagctacacagtaaaaaaaaaaaagtaattattcaatccattatccatattgatttttggtaggaaattctctattagtgcattcatataaaaaaaaatattaacatgtggtgtgattctagaaagcctagaaacaaggacgagaaaagtatggagatgaattgaattaattgttaaagttttctaatggtaggattgacaatctagttacatgcatatatgacgacccaacatatccatgtataaaaattctcccaataactctgcctgctactgaacatatataatacacacattccattaggttggtgggatttattaaccactcttccagagtaattattttaaccttgtatatatgaagaattaaaatgactaagactcatttaggctgttttattcaaccagaaaatccaatgtgaacaaatttgagcttctagaattggttaaaacttaaaaacacaatcttaaggaaaacatatactagactaaactttttctccgtcctaagcatcccatctttttggtgttctctacaactattagaaattgagtttatttggggaaaaagcttttgaaggtagacaatttaccgagagggccaaatacagtatgtgattttcgttgattattttctgtgatagaaaaatatatgatttgtgtcattttatttatctacgtatcaagaaataactgggtccaccaaatcaatatattggttcacacccgataatcgaggaaacatttgcacgaaacattttaacgtagaatatgagttatacaattcgagttacgtataagagtcgcaacgcaatctgatctcagaaaacccaattcgagcgtataattataatataaacatattttcgttttgaacattgcatgtgttttttttttgtatggatgtatatggtagtgagataagcccaaaagacaagtgtcaatagagtaagatggatgcaaatatgcaatatgtgtcaatagagcaagagggatattatgcaataataaaacgattcctttataatcgcagatagatatataacagttatgaatttggacgactagtcaagattatagaattttgatataatttaaaaaaaaacaagaaaaaaagaagaagctgaaatgaccattgagaagccatgcatgcatgttcacattacattggacattagggtttcatggtgggtagaatttggtgaagttggttggacaaatctcacataaatccatattatgtttctataattatatttatgcagatattaagacggacgctagttttataaacatagtaatgtaatctaaaaggaacattaatatatacgccgacaaatattttattacacactaccgataatataaggtcatatttacatacacatatgttttataaaagaaaaaaatagggtacgtatgcgtagagaaataccttgaatcgtcaaaatgttagctgtaattatcaacagttgaaaaagactacccgtggccgcttctacctcaagatcggtatttggtacacaaatcattatttattttaatatatagtttagttatataagtgaatatataaaccccatctatgtcacattaattattgaaaagcttttaagcagttaatctccttcgtcctcttcaagagagagagagagcgaggagaaacccttcttcttcttcttttgttgtcttgaatttagatttgtaagagacaacaaaaaatg

SEQ ID NO: 2738 - DNA, 3000 bp, Unknown
  misc_feature (1)..( 3000): cDNA_ID_2168302_gDNA_ID_1620584_Annot_ID_161261 3000 nt of promoter + ATG
tttggagaatttcctcgaacatctggcgtgcgttttcgggacgacccatttcgcctaacagcctcgccattaagaacttccactctgtttcttctggttgtgcagctactagtctctctaatagcttaagagcttcttcatcttctcccttctctagcttctgctgcaggagtgatctcagcgtctcgacggcctcaggagtggaatccaaaagctcagataatggcgtgatctcagacagtttctcttctttcacttcctcgtaggtcttttcgatagtcgtaaccggagactcggctttaaccggtaaagttgaaaactttccggtcattgaaacagcagcaccgatgagaatcgctgatttggcaaaagatttaaacttttctggaaaacaataaccagaactattctgattcgagctagctctgatacgaatagaaagaagatcgcgacggggaatcagaggtccggtgaccggagtcgctttaacggcgacgaaagaagaaaccaatgaagaagaagctgagagagacgaaatcatgtcttcctcagagcttcagagagagtatcaaaggttgcagaagcacaatcaaaatcaaaagagatgatgaacaaacaaagcactaagccatggcgatatatcagacacgcgtagcttgtgtgaagtatatttgggcttggtttttatattatgggcctttaaataattgggtctttggccttttagttttcttaaggcagatctccggcgaaactttagactgagatacggaagaatcagatcaacgcatgcgaccaagtaaatcaaaatcgggttgaagaagaaagagataagctttcacatcagtaagttgataaattcatgttttggttttgaaatcagtatcatcttctctgaatcaactgtttatccgtattaatcattaaatttcctgagttagggatttcatcgataattaaatgggttgtgatgattcatcagatttttgaaggcgcgaaatggggaatacttcatcgatgctgactcagtacgacatcgaagaagttcagagtcattgtcatgatctatgtgagattttccgacaacttgtctctgtctttttttctatctgtttcaaattttaatgcttttgttttgtgtgtgttttgtttcagttgagcagcaggagattttatctctgtatcaacggttttgccagttagatcgaaacgcaaaaggatttatatctgctgatgagtttctctctgtgcctgagtttgcgatgaatccactctctcaggttttttacaatttctttaatcttaaatctatgcaatcttgttgaattgaattagctttgtattgattgtttgctggatattgataacagaggctgcttaagatggttgatggtttgaactttaaggattttgttgctttcttgtctgcgtttagtgccaaggctagtctaagacagaaagttcaatgtaagtaaatgagtttcctttaaatcgattttttagtggcaaatgttcactttcactttattgtatggaatgatgatcagacttctttgtttctcagtgatctttaaagtctatgattcggactgcaacgggaaggtctcttttaaagatatcatggaagtgttgcgtgacttatcgggatcattcatgtctgatgagcaaagagaggtatgatttatagaaagttggtgacttttaagtttttgaaaagtgattatggacatgttaacaactaactaaataatgaaacatcattaaactactaaaaccaacatatcggtgtgtaatgattgttgtgtgaaaattctattcaactaaaatgtttctgatattcgatcatctaactgttttggtgtgccattactcatctgacacattgttcaaactttgagataaatgctagagtttttccttttgttcttcccatgtgctccactcttatcatattggatgaaatctttgctttaacctctatggttatgatcatgagaagtgtataaagtcggtaaacaaatgaattcaccatgtgtcttgtgttttacttttgtggtatagcaagtactgagccaggttttgaaggaatcgggctacacgagtgactcattcttaactctggaggatttcataaaggtacaatttgtgcttattgtaattgttatcatcaaaattgcagtatttaacttgtcacattcctagaatctgaaactgcatctcctttcttgtttcttcaatctcacagatctttgggagtagtagaccggagatggacgttgaaattcctgtggattagactttatgatcatatatcatcaaacacaacactcaaatctcatcttgtattttgtccacactgtttctagaataatccttgttaattgatcacatcattgcaggctttttcagcacttgttaagtatttgtcaattgaaacttgttctactaaaggaaattacaattgtttcctctgcttagctttttgcattaccaataatggcatatgatagactttaaatcctaatctcaaaaagaattttttttttttctgtgaagaaaaagaaaaagaaaaagtggaatggaatgaataatcacgaaatctccgttttttaatttaaagttgattgtatttaatgaattgtcaaagaagagtcttaattacttgcatattattaaactatgggttaaagaaacaaaaatactaattatggtaattagattgacaaatggtatgtagacaagaagcttattaatgtgacgtaacgtaattaaagtaaagtaagcattcaattctacttaatattgtccacacaagtcattatataaaataaaaaaggaattaaaacgtcgtcattttgcttcataatagaccactttattcacctaactaaggtccaccaccacttcataacagtttcgtttcgcgtcagtcaaataaaaaatatcttcaccattcttttttcaaacaaagcttaattctctttgagaatccgtctagta

SEQ ID NO: 2739 - DNA, 3000 bp, Unknown
  misc_feature (1)..( 3000): cDNA_ID_2168328_gDNA_ID_1620584_Annot_ID_161269 3000 nt of promoter + ATG
ctgagtccgacgtagtagaaagtgtcgatctttttgttacgtagaagcggcgccgtcgcgtctccgccaccgagttggaccgagttgaaatcaagacttgaggactttcccgagtcacggtcaacgaggcagtaagaaaacgacgtcgctttcatttgattggttatcgataaaacaccaccgcctaaaccgagtaaaccggctgctccggtaaagagaccttcgttgtcgtgaccacaacccaaagcgacgttgtttattttaccagagttaccaaacgtcaccgtatcggtagcgagttcaccgacggtgaaagatccgtctccgtaactaacttggtagagacatttgtttgaccgacaagcggaggtttcgagaagagagcactgtggagcagagcaagtgagagatttgtatgtggaagacgaagtcgggttaaaaaccgggtcggactgttggtaacagtcggcgcaaggttcacactggatccaatttacgtcgcttccggtgtcgagaaccaagtacatctctttcgccggagttccgacaccgattcttgagaaatactcgccgcttccttgagaggctccggagacgacaggtgtcgttagatcctcggtttggtatcgtgtatcttcgttgtaaacgggtttgagatcggatctatcgactccttcgacggcgaaacggatcttcgcgacgattccggcgactcgggatgagtcgcgctcgagtcgactgagtgttaagcttttgtagtctttgtgctgtgacgcgacgaaagtgtctcgagagtgaagctctagagatagtggtgaagatgaattgaagaaaaccgggtcggatagggattcgggtttggtggtggtgagtgaggaacgagtcgggtcgagtgagaggatagtttgtgtttgctggagagatgaaacgacgtcgagtacgttcgttttaggtggagtggatagagagcgagaggaagcatcagtggtggtgaggaaaagagagagagtgacgacggcgaggagagaaagaaatcgcgggaaagccattatttccggcgaaggttgatatgagttaagtggaagagagaaagagtaagtaatgtttttaatttatagagagaaaaataaatgctgcggagagagtcacgccagaattgctgcggttataaaagccacatcaattatttatcatcctgttaaaatatttggattcacattatcatcgatcggtaaaaaaactttatggttggatattatattttatatatacaaaaataaattaaataagaagtcttaatctggatttatcatatgattcccaacatagcgttacatttataccgaatcaaataaaaatttagacaaatgtaatttgagaattgtgtttatttgttattggcaccgaaagaagaatttgtactttgtagaattcaacacaaaactatagcatagtgtctgtagtctgtacggacgagagtagaaactgtagaagatagggatttgacctactaaatattttaatacaagtctacaagcgattatccaatattaagctcctagagatgtgtgactacagagtacttaagtgtttatttattgcaatgacctttggatacaaagtactcctatattgttaaccaattcacttttaattttttttacgtgaccaaagctaagatcttatctagaaaactaaaagctttctgtccttttgttatattcgggcttcaaaactttgtaccttcttcttaccatcgctgtcgagagaaaagtcagcagaagttttggaaactattagttatagggatcgaattatcttaatcatctacgatcatgtcattttgtgttggatatttgttaatgcttgtacatttctaaaaaaacatgtgttgtatattagctaatgtcaatatgtggtgcatatttgctaagttgccgtggaaataacaaaaacttaaaattttgctaagtactgtacttttttttttttgtgattgcaatttgcttaaggtgattgatgaacgaaggctatatgtaaaaactggaaaggagtgaatcaatgtgagaagtgggtgagttgttacttcgttagaagagagatttgggtttatttcgctttccctgaattaatggtaacgcacccttttggctttggttgttgcgtgtcatttatttctcttttgtttttaatcttgttatatccattttcttatacctactttactttttttccataaaatgagattatgcaattcaatcagtaatgttttaaatcgcatacacttttatatttaacaatatgccttcactaatttgtatttcaagattagttagtgatattttatagtaaagtttaaagaacattataatgtagacgcaatcatagagtttttctttgtcaaaggcaatattgcaacaaaaaaaaaggtagaaacgaagacatttttttttttgtgtgtgtaatcagtaatcgccttacacaaaaagacatatacttttttgtgtaaggttttttttttttgagctactatcactaaatttgaaatcaaataattgatactccaataaaagtagaaataatatcatagtatatgaaaaaacaaaaaaaaattacaaggacgatgaaagaaaaaacaaaatctcataactcaaaatcaaatatcatctccaagttcttaacatgataaaactagactaaaataaaaactgacatcctactaaaattagaaacaaaatgacataaattgaaatcaaactcacaaaaaaaaacaatagacattaaaacaaaaaatccgaataacaaaaaacaggatctcagctaaacaaggcctggtgtagtatactagtattggcccatggcccatggtttggtatttttttttctctgaccaaaggaagaaaaaaaaaaagatatttatccgtatggcgccaagaggtttgtgtggttttcgatttcatccaaatttctgaatttcgtctctaacatccacaaaatcga

SEQ ID NO: 2740 - DNA, 3000 bp, Unknown
  misc_feature (1)..( 3000): cDNA_ID_2168317_gDNA_ID_1620584_Annot_ID_161265 3000 nt of promoter + ATG
tcggctgactacctggtcgacccatatatatatagtattaatttcccggctagatttttgcaacacaaaacgtttgcttcttcgtttggtctttaagttttttgttataacgaatagctcttatcgttttttttgtgaaagttatggatgaaggttaggtttatataaactaaggtttgaattagtttaaactttcttgagatgctctacttttcttcgcatagttatttccatcttgtatataattaactaaattcatttgtatagttactactttgaaacactattccccaaaaattgtttggctgtcaccgttcttaaaaaaaaaacaaaaacaattgcgtatattgtaatcaaaatagttgaaatccgatatcataagtgattataatggaaattaaagtgtatatacacagattcagatgatcgattactgaatgtgggcataaccaaaaatatgattaatatacatatagtgactgcaaaatatgtgtgaatgagtgtgtacaacttaaacttcaaaacctttttgatatcacaaaacttgaaatggattaaatctttatatcatgtaaaatttgttttgggatattactggcttctatattgcttatatttgtggttaaccagctggtggtatttctaaatatatattctatatgtggaaacaaaaaataaaactgcaactaagttttgaaaattattgatgtaatgataaatgataatggtaaacatgatttatgcactaatgggtattgtttaatttgcttggtcaaaactcagaactcgaatgaccttgacttgtgcaattagttgacgtttttaggtacagattatttttgtaccaaagccagacaccaaatatatcgaataagggaaaaaataagccctcttggatgaaaaaatacgatcttccaattcttttattttcacatatcaaaataaacaatattgataaaatctgaaaaagaatttaaaataatatgctagctcaatataaaactacacttaaaagtgctgttttcgtgaaccacttatttaattcaaatcatattgcaaatcagaaatcttcttaatcaacccatcatctgctgactcataggaggagccatcgtccgttgcatatttccactccaccctatcacataaaaataataaagttacatcaaataattaatcaaacgtatgaaagacactaattatttcaatagaaagtgagtccacaaaacaatgcaatttaccaatagaggggtcaagaccacgggttttgagttcacggtgttcttggcaaagagcacaacattcacaaaagaagtgagtgacgcaatccgaagttggagactccggtaacccgaatttgcttcggatcttggtccggtaagtgcatgagaacaagcaaggtaagccgaccacacaacatattagcccgtaaaataccccacatctcccacaacctacgtacattatatatacgacgttacgtgaattcacacacacacacattgtttagatatgacatatgtgaatgtatggcttaccggtccttccttcgtcggaaatgtccgcgatccgtccgaaagtgacgcatgggcagaaacatgtgaggcaagcttatccagcacaaaccaaaaggaacaaatcattatacaatcctgacaatagatctatatatgtataaagattaaaggacaacttgattaaatttatatagaatttctaccagtttcactgtcttccatgcagctgaaaagaccagaagtccattgcttttccattgtaaagtagcttcaaccaaatcttgcgtcaggttttaaccagttttgtgttgatcgatcttttgataagcgagatcgtaaatcaattaattagggttttgaagatagatttttgttgttagatgctttaagaatggagggtgggtgggtatatatatggttgatggtggatcgcttcgagagatctacaaatgtttaatttttagtacattgcactttgggaaaaatcataaaagttgtaaaaaagagtaaaagacttttaaaactagtacgttgcactttttgttaaaaggaggaaggttttttgaaaattgatttttgtttaaggaaggtgagagattttactgattgtgagagattttaagctacttaaaagtaatatgtaaacgcgtttttgggattggtttaatccacacatatatacaagatacaaagaatttaatttaatgactaagaaaattaaagaaattatgaataaaaaagaaatatacatcctaaaaatgcgaaagtaaaataaaacaggctatgctaaattttaaaatattaaattcaacatttttctattcataaaatttctattaaaattatttgtagataagagataatatgttcaaacattattcctctatataaggaatcaaacttgcaaactttaaaataaaattttgaaaaatatatctaatgtaatattctggttttattagtaaagtaatattacttaatactaacaaattacaaagaaaagaactgaaggaaaaaaaataaacttttaaaattttctaaccagtgaaataaattagaatttaaacttaaaattttattaattaataatagtcataacaaaatttgacaaatgttttcaacttagatgtgcaataaacatgaatttattctactaaatcaatactgggcctatgaatggcgcaaggaatagcccattggttattctatatcttttggaccttacgtttttgaagcctgtttaggatcacactcataacaaaaaaataaataagaattacgcttctaccaccattaaactctaatgtatctgaactcagaagatccgatcggagtagtaaaaattcaacaaaacaacaataagaaaactcattaattcattcgtcggattcgaagaagaaatcacttcccagaaactttcttcgtatcgaagtattgcttgtgttcttcggagaaacgagatcgggatccgaatacgagtaca

SEQ ID NO: 2741 - DNA, 3000 bp, Unknown
  misc_feature (1)..( 3000): cDNA_ID_3069488_gDNA_ID_1620584_Annot_ID_161255 3000 nt of promoter + ATG
ctaggctgatcagtcatttacagaagcaaaatagttcttttgacctcaagtgttatctagtctcctcagcacagtgagatatttttcagattaataattggttaatttctcatccccacaaatgttgtaaagctaaatgactcgaggtaagattcctaacttgtaaacttaagccttgaaaagaataaatccacatgattcgagcatgtttgttcaaaagagtaaaaaaccggtgaccatcaacagatgatgaataaaccggactaaaccataaatattccatcatacatgaaggatcaagtaacatggcatgatacagctttagatgactaattcattgtgtgagagtacaatgcatatgatcccaagttaacctctactagtaactgtgaaaaatggctgttacaaacggggatagaaattacatggcctaggctgaaccagcgggaacagtagctgcattggagctaggctgaaccaaagtggctggagtggcactcaggctcggatcttttgactcgggtgcaacaatgggaactgtagctccgggtagtgacagaggggtttttgcagccgcatctagagcgggtatctgatgctgatttgagttagccaaatcgtttacggcgttgtgaagttgttgtagcctgtaatctgtctcgggccgccgacaaatcttcctcaagggaacgatttcctgctgggataacggaaaagaaatccaaaataggtgagtgaggagggttttgctttatggtctaaaccatgaaatggagctgacgggtaaataaaaccgcaagggatagagagagagagagagagatgatcgtccaacctcggactggtcgtggctgtaacgcaccaagaacctacaacgacaacctctgacatcatgtcttcttctctgtgcgtcaagaacaatggcgtcaaagtaaagagcttgatcttttccttcctgaagatgttataacatagttctagtcagggataaactaacatgacacctatcactaaatgcttagagagcgaagttctaaacctggaaacaaaggacgagatctccagcaagaactgcaacacattctgatgcttcacatgggagagaccgttgtcttacatgctttttgacatttatccattcatcttcttcaacttcgaaacccgcaaatcgaacctgcacttcctgaaatacccaacagaaagattgttgttagcaaaacaaaaaaggggaacaaataagtcaacaagaggttggttaggaattaccggatcaccaatctccaagtttctatgagctaggaaagcttgcacatcatacctgtaagtaagcaagagagttacatatcagagaaaaccagtggaatgtaatgatattgttacaaagtatcataagtcagcaaaaaaaatactgaagattgaatgcaagggaatcaccatgcaccatccctggcagatttggcttcaaattccaagtaagagttgtctgaaccactcctcatgacaccgggaactatgaggaaaagcagtaaacagttacgaaaatggcatctgtgcaatatcagccatactgatctagacttatggagaaaaaactaaaactgaaaaaaccaatgaaacctattccaataaataaccttctcaacctattttactgagagtagaataaataaagcacctaaactaccagaaggggcaggcgtcatgccgggtaaatttccagtcatatgagtggttttaggaactgataatggttgaatcacacttctcatctgatttggtaaatccatacgcggcatggaagatacatttagcttcccaggagctttgtttccccttgctcgtaaagcatatcgcctattttgaaaccagttccagatctgtgatgcattaaaacaacattcccattaacttttaaaagcaaacccaacagactctgtctgataaaacttaagaatcaagaaggaaaaagccagtacttgcttgaactgcacaacaactttccccttccgctcaggtgattcactgagacaacagataacaaaaagtaaccacattttagatgataaagacacaaaatcactttcaggccaaggaattgagcaacaacaagtaaaatacctaaacttatcagcaagagcttcaagaatatgtcgacctggcattgctgtattatgctgtagcaaaattgcttccatctccgttaccttcataacaattgaagattagctataacaaacaagataaaacctcttcaaaagaagtcacaaaaccatagaacaacagatagatagaaaaacttatgtattatcaaatctaaactcttaaacattacttaataaagtaaagccaatggatttcagaacatacatcgaattgtcttcaagtttctactagctaattacaaaaattcaattggacttcaggatctaaaccctatcatgaacccaaaaagaagacctaaatcctaaggaacaaaaccgacacaaaaatcagatttttcagctctgggagctcaaaatccgtgaaagcaacacattacaaagaatcgagataaacctcaggcaggataaatcgaaacgccggaccgccattactgggaggtcgacccatggtatcttcttcgtctcaccgaagaaaaaacaaaaattggcggcagaaagtgaaatcaatcggagcttctctcacttaatattcgaattcacggtgaatctctctagtacggccggtgacccaacgacaacgaaaccggttttactcagacccgactccgtcgcttatataacttttcacctgtgtaatttttttaaacttaacatgtagtaatgggcttttaaaacccattaaaggcccattttcctaaaaccgatacaaaaatcttatccgtatggtcgagtaaatccagcttatccgcctgaaacttatttctcagtatccaaaacgatggcgaagaagacacttcgctgaagcttttttttccaaaaaaatttcttagtgtcgtca

SEQ ID NO: 2742 - DNA, 3000 bp, Unknown
  misc_feature (1)..( 3000): cDNA_ID_2168447_gDNA_ID_1620585_Annot_ID_161282 3000 nt of promoter + ATG
gtggactatgttctgacatttgggttgtactaaagtagagtggataataaactaatcaaacagaaattaactgaaaacaagtgtacagtatatgacatattattggaaataaagaacaaaattactgtaattttttttataatatgcccatcataattgaattattttggctgactttagtgaaacaaaaacaaaactggaaagaacattaaaatattaaaaaatattaggtaaacgaatttgcgtgtagaagttgttttgattgataataaatagaaatctctatcattatatttataagttacaacaaagagatctaaaccaaactctaaactagtttttttggagcttaccaaaaaaaaaaaactagtttttttggacataaaagaactaggtatttttgctatttaaagcattcacaactaccaccaataatgattaatctcattgtaggaacactcgaatctttaattttcacgataaatcttttaaccattgaatctctatgaatttgttaagaaaataatataattaagactttgagaggactcgatctaaatctaagagtaaacctagaaacttgtataaaaatggatattcttaccatttaaatgttaaagcatccttagtgacagtgtccagctatgatttaaattgtaatgaagaaacttagaaaccttaatccctcaagtatcatggtaaacaaaacattttaataaactaaaccttttattttgttattattgcagtatttttaacctaaagaaatgggattataatgaagaaagattccccactcgcgtttcacgtcacaagccgatcgtgtagcaattgtcgttattggatctgagcttctcgattaaaaattgacgcagtaattggatctaataagagcatgaggttaaaatatgaattatttgagatatgaggaaatgaacaaattatacccacttgtgttcttttatgttgaacaatcttctggtttgtcaactacctgttgaaccatttctaaaaaaacattgtttctgttcgatttaaatgtgggggaaaaaaaataaaatacatgaaatataatcttagaatctaaggaaacttattattgggcaataaataagaatttgctgaaaagttttaggggcatcttttggaactctcaagtttcaaacaatggtgagtctaattttaaataattgtttggtgtgtttagtaaaaaaataaaataaaattaatacacatgaccaatttacgtatttgttattagggaaattttttaaaggtttatacaattttggaatgtttagttatttttaaaaacttaaaagatttttttttattgattttggtaaatgacaaaaactttcactaaaaatttgaaaacagaatgtttgacggatgctaacaagcttttagaaagtattatttcgaccataaaattggatgaacactggatgtaaatggaattgataacaaaagaaatcgagatataaaatatctattgttatgtcttcattcagcttataagatttatcatctattggcaatccgaaaagatgcaaaactctttgtgatatggtatgcgctaatgttcatttaatgcctcaagtttcacccattagaacacaagaagaaacttccgaagatgctgcatgatgacgaaaacatacgcttaggacgatgttttccaaaccgcataaataaaacagaaaattatagtttggtggcacgcatatgggattgtccttctaacaaaaatgtgcattcacaatagttcttacttagaattgctaaactgaaaaactcgtgtgaaaacttaagctaaatatgtaaaatccataaatttatgcatagaggtaaacatcaattttttttatcatcaagtaaaaggcacatgacagattcatgagaatagatgaaagataagaatgttgaattttaataatttaaattgatgtgtttaataatttaaagaatcaaaaaggaatttttttggtaaatatatataaaaatttctatagacaattatttagaaaatcaaaatataaagtaaacatgtaggaaatatacaataacatgtatcaataaaaatttggttgccctaaaaagcctaaaattattaacagctcgcgagagcattcttgatgtaaacatatgtcttccattttggagaaaacaaaaaaaaatacattgaaataattgaaattccctcaaaataaaaaaaataaaaaaaagtattcaactttttatttgaccctctctctcctcttccctcttttcatggtagacccaattctctctctctcttaacaacactctctcctctctctccctctctctatctatccccatttccatggaagcaagcagatgtgttcttacatctctttctctctctacagccttacatgaacagtgactgttctctctctttccctctccttccttttttcttctacttctccttccctttgcttcgaaaagggtatctcgtgatctttatcgctcaaaaatcttcactttcaggtaacgatttattgggtctctctctctctctctctctctctctaaagctctgttctttttatttcttctttttctgggttttattctctgattcttgctagatccaaaagttctttattttgcctcttcttcttctttactttaacgagatctgtttttacccttaaagactcaaaataaaaatccaaactttttgcatgaagagctttaattgatttgtcacttagatttgatatttcaatttgggtaaaattttgtgcatctacttaaactttcatctgtagtaagatccgtgattgttgtttctgagtcttctcaatccagctttaaactgatgctattgttttgttttgatgactatagatcaggccactcgttgatggaatctgtgacagtattgattactagagagtaaagacaagttctttaaatctcagggaagaaggaattggtgtttaagattgctctgtgttaatgatg

SEQ ID NO: 2743 - DNA, 3000 bp, Unknown
  misc_feature (1)..( 3000): cDNA_ID_3069522_gDNA_ID_1620585_Annot_ID_161284 3000 nt of promoter + ATG
atgtatgtagctggtcccgataattaagaagttaagacgtatcgaaatctaatatgcttgaaacatgccatggtcatgtcaattacgtttgctagtgatatttgaagactgaattgggtcattggttcagctatatttcaacaattcagatttcgttaaaaataaactaacaagtagaataaaaaggttatctatctacttactaaaaccagcatttaggtttagtggctttcttgttcaattatctgcgtattccatattcaacttaaatttttcgttgccaattcatcaccatattgaagtactgtatcatgctattaagtttaaacaatattttgtagaccgacttttaaaatacaacaaaattgaattaaaaatggattagaaagtcctaactaattatataagatagtccagatggaagaactcaattcgatctgagttttagtaaagtaatttaatgaatcgtaaatcttaaaaatcatgaaaaatcacttgcaagaaagtgagaaacaacctatggaccacaataacaagaatttgtcgtaaaacaaagaaaaggttttaagttttgttggaaacttacttggtcaattctactcgtggtaatgtggtggacaagccttaaatcgcgattacaagcttagagaatgttgtaaagaaatactccaagaagatggcatatttataggacgagaagaacaaaaataaaaaaatttggatatccatcgcagttattacagattctttatttctataaatagattcctaaatcgttgcgttttgattctatattctatttttgtaaattaaaagtccatgcatggttagatattgcactgtcgtctaggttcatttttacgtttctattgccagctctaacgattttgactgtgattcatctttaattagataattaagatctattgccagctagctctattgccatattaattacataattatctctaagactaaaagatcatgttctgatgaaacttgtcaacttgacatgtctctaactgccaaaacttatgaatttaatgtacgtagaactttttaatattgactccgatgacttatttgatgtttgaaatcatgtgtaacaacttttggctcgataggcctaatatatttattagcttttcacaaccagattcttgaatgagacttttctagccgtcatgtgaaaatgatgtagctaataaatggtcttctttttttatgaataacaccgactcaaaggtaatttcaatgagaaaaatatgagcattttaggtatgtcctcaaacaaattaaaactgtattcaaataattgatcatcttgctacattatataatagaggtggtgatcaaacatcatagcatagtcatattgttaagatgtctcaaacatcgtcgcattaggtctgaatcggcagggccggtccatatactaataagtaataaccaaatgttatgaactacgcgagtgtaaataacataagatgttaaaatggttggtgaacgtgcattaaattgttctactgaacgcgttattggttttaagcatgtcgatatttgtagagattgtaatatgttgtacgtattagagattaatataaacgcgttattgatatgtatattacatttgatatcatgcgtttgcggacaaataaatatctttattatatacatcatatcgtcacatgtaatgtgtcactatatataatagaaaagaaatcaacttaaatgattgtagtccaatccccctatatagtcgtatatatctcatcggtcaagacacatatgacataaccaatttttagtttgagtgttctacatgcacgcatgtattcaacgaatgggttaaacgttaactcgttctcgtaagattatttttacataaaacagtgaatctttttattggtaaatatacataaaactgataatagtaataatctaatttagcaactagtttatcctcagaatcattagatacgttactgatctattatgattgcttagtgattagatagagccgatatcaactcagtttgtacgcacaagacagaagactaatgaataatgacaatatatattctcgacccatttcacacaatgctagtacaagataaggtgctttcgtgtcatagagattttgacaaattgattataacttccgttgactgatgggagcgaaattgacaaaaccattaacagattatgagcaagttctcaagattttttagttttctttctctctcggtcccaaaagaaaagatgacaatagctagcatcaacttgttagaaaaagacgatgaacaagtttgagaattggaccactgaaaatccaatttccacccaaccaattattctactattagtggaaaaacgtggtcaaccatctttgtcaacttcgccaatatgcttttcaacttcttaattaatgcctcaaatctcggaactacattttgtcacaacgctaaagataaaagagaactaaaagtagaaaaacaagagtttgtgaaagtttacaagttttttttgtagagagaattttaaccgtgttaatgttttgttccaaatgtttttgtttgttttggaaaaacaaaaatttggttgtttttatttcacaagttcaagagcacgcttgtaccaacaagatcgatgatcgtgttgtttcgattcgtgtcgaagttgacaccgtttcgttgtcttgtttattgatcgagacatatttgtttttggttgtggaacaaaattttaaagtatattgcgtgttcacactagtttgaaagttgtgtgcgtatgaataaacatatcgaataatcaataacaaggcaccatatagttattgggctcaatttgttttaaattgggccgataattatttaggcaaaagcccaataatagacaccagtcaaatatacctttgtgtactccaacaatcatcatcttctacttcttctcttaaaccctggccgcgcgagaaaaccctaattcaaacctgtagccatg

SEQ ID NO: 2744 - DNA, 3000 bp, Unknown
  misc_feature (1)..( 3000): cDNA_ID_1664939_gDNA_ID_1620585_Annot_ID_161286 3000 nt of promoter + ATG
atgtacaatgtcattattgtgatcacaaaattggtagttagttaatgtcatatatatatatatatatatatgtgtgtgttttaattttgttaggtacagaggcactcttgtaaataaaaactaccactaaaatctgaatgttttgtgcattaaaaaagaaagaaagataaaacctcgtaccgatctgaataattttttatcaatgaagtcacaattttgtacgttgatgaagtcaacacgtggcaaattacaaactcgacaatttcctcaagagaaacaaaaaaaatccctgaaaaattcctcaaaattttcttaattttcgagataaattgatttaaaataaaataaaacagaaagatacgcaatgaaactgcgttttcaagcaaactgctaaatttctatctttttttctctctctctctctctctataagggctctgcttcttgtacaacagccgaaacaattataccatgacattaaaatccagatttttttcagtcattttcgtattatttgtttaaaagtaaagtttttcttccatcaaaatggaaaatgtgatctggtttttttcttagaagatattaaaacaatcggagagaggattgcaaattttttatttttgttaatttgctgtgtgatgggtctggttgattctttgttaggaaaagatgcaagaaaatttctcaaaaggaaagatagtgatgctgcagaagcaggtacgtcattattataacaacaattcatgaatctgcctccatattcttcatttgatttgcctcatcataattcagatttctcatgatcaaaaatgatgctttatttattcccacgttgtctctgttcttcaccgtttaagttaaatggttttgatcggatctttaatggttttgatcggacctttaggcttttttgatctgtttgtgaatttgtaggacgagctttggaagaactcagaagttctttgtacaatgagcttaaaacatcagaaggagctaaaaggcaacaacagagattttgtggccctgttgttgcaatgtcctttaatttcgttgttgctgttggaatcatccttgccaataaattagtaatttggtttcttcaatctcaaattcttctttctcttttttttatttaccatgtgaatgtaattgtaaggttgaattgtgcaggtgatgggaagagttggattcaatttcccaatctttctaacattgattcattataccgtggcttggattcttttagctttcttcaagtctctctctttgcttccaatgtctcctccatcaaagacaacacctttctcatctcttttctctcttggagctgtcatggcctttgcttctggactcgctaataccagtctcaaacacaataggttcatagctcaatcgctaaagtttgaatcaagattcatagcttaagcttgaaagcttttgttcttctttgtttccagcgttggattctatcaaatggctaagatcgcagttacaccaacgattgttcttgccgagtttgttctcttcaagaaaaccatttcttccacaaaggtttcgcttatatcttttatgacatgtcaacaaaacaatcaagaattcattacatgtttttggtgcttactctgtttttgcaatttgtcctcttacaggtcatggcattagctgtagtatctctaggtgtggcaatcgcgacagtgacggatctagaatttaatttgtttggtgcattagttgctgttgcttggattattccaagtgccattaacaaaatactctggtctaatcttcagcaacaagctaattggactgccctagcgtaagaaataagaatctctctcttttacttttacttgaggtgtaagcaatacaagtctcttaaaataaaggctttattgaatgtagattgatgtggaagacaacaccgtttactgtcttcttcttgttggctctcatgccatggcttgacccacctggagttttgcttttcaaatgggatttaactaactcttccgcaatcctcatctcggctcttctcggctttcttctccaatggtctggtgcactcgctctcgggttagtctttttgttctcttgctttggttggaagttcagtcttgaggttataaaatgctaactaaatttgttgtttcttacagggcaacatcagcaacatctcatgtagtattagggcaattcaagacatgtgtgatcttgcttggaggttacgttatcttcggctctgaccctggtttcatcagcatctgcggcgctatcgcagctcttggaggcatgtctgtctacacgtggctcaatcttccggggaaatccatcgatcacatgtcaaacaagcagctgccaaagcaaaacgtcaccgtttcaaaacctaaagccgaggctgacgacggaggaggagagaccggagtaaccgtagtttctgttgacccacttctctccaagacgataactgcaaatatcgtatagttttacaatttgattagattgccaaagagaaaaaaaatgagttttactttttcttcttcaggttttagtttgtaaaattggttcagttttgatatcaaattagtgtagtaaagtatactaataaaaatattttgatatcataatgtgacaagagggcttggtgggtttatttgtacgataatgaaatagatggtgtagtttagaagtaatgtaaaacttgatgtgtatttttttttttgtcgtcacttgatgtgtattatgaggtgcaattagtaaatataataaacctttttgactttttctataatttcaaaaactttaatgtagtaaagtgaaaacttgtggggaatagggttttcggtgataaaatcgggctgacccgaacccggtttagtgcgagattccactgtccgtcgttaacaaaggagctaaatctcagaacgatttctcgatttgcttttgcgacattataattttcctttcaattgactcagtgagtcgccgatcgagttagaaatg

SEQ ID NO: 2745 - DNA, 3000 bp, Unknown
  misc_feature (1)..( 3000): cDNA_ID_2168459_gDNA_ID_1620585_Annot_ID_161285 3000 nt of promoter + ATG
acaaagatggttgaccacgtttttccactaatagtagaataattggttgggtggaaattggattttcagtggtccaattctcaaacttgttcatcgtctttttctaacaagttgatgctagctattgtcatcttttcttttgggaccgagagagaaagaaaactaaaaaatcttgagaacttgctcataatctgttaatggttttgtcaatttcgctcccatcagtcaacggaagttataatcaatttgtcaaaatctctatgacacgaaagcaccttatcttgtactagcattgtgtgaaatgggtcgagaatatatattgtcattattcattagtcttctgtcttgtgcgtacaaactgagttgatatcggctctatctaatcactaagcaatcataatagatcagtaacgtatctaatgattctgaggataaactagttgctaaattagattattactattatcagttttatgtatatttaccaataaaaagattcactgttttatgtaaaaataatcttacgagaacgagttaacgtttaacccattcgttgaatacatgcgtgcatgtagaacactcaaactaaaaattggttatgtcatatgtgtcttgaccgatgagatatatacgactatatagggggattggactacaatcatttaagttgatttcttttctattatatatagtgacacattacatgtgacgatatgatgtatataataaagatatttatttgtccgcaaacgcatgatatcaaatgtaatatacatatcaataacgcgtttatattaatctctaatacgtacaacatattacaatctctacaaatatcgacatgcttaaaaccaataacgcgttcagtagaacaatttaatgcacgttcaccaaccattttaacatcttatgttatttacactcgcgtagttcataacatttggttattacttattagtatatggaccggccctgccgattcagacctaatgcgacgatgtttgagacatcttaacaatatgactatgctatgatgtttgatcaccacctctattatataatgtagcaagatgatcaattatttgaatacagttttaatttgtttgaggacatacctaaaatgctcatatttttctcattgaaattacctttgagtcggtgttattcataaaaaaagaagaccatttattagctacatcattttcacatgacggctagaaaagtctcattcaagaatctggttgtgaaaagctaataaatatattaggcctatcgagccaaaagttgttacacatgatttcaaacatcaaataagtcatcggagtcaatattaaaaagttctacgtacattaaattcataagttttggcagttagagacatgtcaagttgacaagtttcatcagaacatgatcttttagtcttagagataattatgtaattaatatggcaatagagctagctggcaatagatcttaattatctaattaaagatgaatcacagtcaaaatcgttagagctggcaatagaaacgtaaaaatgaacctagacgacagtgcaatatctaaccatgcatggacttttaatttacaaaaatagaatatagaatcaaaacgcaacgatttaggaatctatttatagaaataaagaatctgtaataactgcgatggatatccaaatttttttatttttgttcttctcgtcctataaatatgccatcttcttggagtatttctttacaacattctctaagcttgtaatcgcgatttaaggcttgtccaccacattaccacgagtagaattgaccaagtaagtttccaacaaaacttaaaaccttttctttgttttacgacaaattcttgttattgtggtccataggttgtttctcactttcttgcaagtgatttttcatgatttttaagatttacgattcattaaattactttactaaaactcagatcgaattgagttcttccatctggactatcttatataattagttaggactttctaatccatttttaattcaattttgttgtattttaaaagtcggtctacaaaatattgtttaaacttaatagcatgatacagtacttcaatatggtgatgaattggcaacgaaaaatttaagttgaatatggaatacgcagataattgaacaagaaagccactaaacctaaatgctggttttagtaagtagatagataacctttttattctacttgttagtttatttttaacgaaatctgaattgttgaaatatagctgaaccaatgacccaattcagtcttcaaatatcactagcaaacgtaattgacatgaccatggcatgtttcaagcatattagatttcgatacgtcttaacttcttaattatcgggaccagctacatacatttttagtatatgtcatcattatctttacttcttttttgtatcatcacaattatttccattttatttttttgttcttcttcatgtgcaaaagaagaggtactttgataagattccagtctataggattcaattaagatactaattaaatacagtatatacagaatcttgagttgtccgctttcaagattccaatacagtttacaaaattctgaattagttattcttgttgagtcaatacttttgaaagaatgttgaccaaaaaaaaaaaaaccaaagaaaacggatccttatttaacggtctccttaaccttaataatagtaaaacggtaaaaaccaaaattcatgtggtgtaaattgtctaaagtctgtatttttttttattgacatccattttttttgtgtcgaaagtctatatatgaagtcaaattcatgaacaaatgcttctaggctaaaaacgttatcgtaatctttaatcttcaggcttcttttctaaaattccgactggttaccgagggctagaaaatccggtcaccgtcgccggagacaacctcggtttctaaacgaaaccatcgtgaaggacggaaaaaaggagcttgaagacaaaaca

SEQ ID NO: 2746 - DNA, 3000 bp, Unknown
  misc_feature (1)..( 3000): cDNA_ID_2168478_gDNA_ID_1620586_Annot_ID_161297 3000 nt of promoter + ATG
accaactttttgatttttgatttttctaaacttcatcatataaacaactttactaaagaggacaagaaaaaaaagaagaagcaaacagtcaaatggaagaaaccaacattagagttgttctctactccattttctctctcatcttcttgataatctctttcaagttcttaaaaccaaagaaacagaatcttccaccgtctccgccgggatggttgccaataataggccatctccgccttctgaagccacccatccaccgcaccctccgctccttctccgagaccctcgaccacaacgatggtggcggcgtgatgtccctccgacttggatcccgtctagtctacgtggtgtcgtcacataaggttgcggcagaggagtgctttggcaagaacgacgtcgttctagctaaccggccacaggtgatcatcggaaaacatgttggttataacaatacaaacatgatcgctgcaccttacggtgatcactggcgtaacctccgtcgcctctgcactatcgagatcttttcaacacaccgccttaactgctttctttatgtccgtaccgacgaagtacgtcgccttataagccgcctctctcgtctcgcaggtatatatgtattaatgtatatgctacaagtgctttcatcattcgttgacttttcatttatgtttgtcttatcttagtgttatagtgaccacaaaaaattgaaatatgattatatgaaataatgatgatacgaaaataaggatgagatagcttgtggtggccgtaattgatgaatagaatgagtttcttttgcaaagtcgaaatactaaaatgtacgtattacgaaaataaagtttttattaaaaatttaaaatatgttacatagtaatgactaatgagaaaagttttgtcacatgtgtttttttcatcgtcgtgaagtttgttgataaagactagtcaacttttcaattttttttggtgttatttaagtgctaattatattgaccactgagtctttgtgggcgtcaatcgtaccatgaagatttcttaaaactcttttacttttagaacgttttacgtcaatatttttagaatagagatttctaaaaacattttacaaagtaatgaagaaaagctcgactactctatttttggttctcgtttggttctcgattttcctttttcttttaataattgcaggaaccaaaaaaactgttgtggaattgaaaccaatgcttatggacttgacattcaacaacataatgagaatgatgaccggaaaacgatactacggtgaagaaacaaccgatgaggaagaagcaaagcgtgtccgtaagttggtagcagatgttggggctaacacgagttcaggcaacgccgttgactacgtccccatcctcagactgttttcaagttatgaaaatagggttaaaaagttaggagaggagacagataagtttttacaaggtctcattgacgataaacgtgggcaacaagaaaccggtactacaatgatcgatcatttgcttgtcctccaaaaatctgatattgagtattacactgatcaaatcatcaaaggcatcatactggtttatttcttcttcctttattttttctattaattattagatcttttgttaactttgattataagtaagataaattgtctgatgttattatgttaatgcagataatggtaatagcagggactaacacatcagcagtcactctagaatgggcactttccaatttgcttaaccatcctgacgtaatatctaaagcgagagacgaaatcgataaccgggttggtttagaccggcttatcgaagaagcagatcttagcgagctaccatatctaaagaacattgtccttgagacccttaggctacacccagctacaccattgctagtcccacacatggcatcagaagattgcaagataggatcctacgatatgccacgtggtacaacgttgttggtgaatgcatgggccatacatagggatccaaacacgtgggatgatccggatagctttaaaccagagcggtttgagaaagaagaggaagcacaaaagcttctggcgtttggattaggtagaagagcgtgtcctggatcgggtctggcccaacgaatcgtgggactagctctcgggtcattgatacaatgctttgaatgggagagagttgggaatgtggaagtggatatgaaggaaggagttgggaatactgtacccaaagcgattcctttgaaagctatttgcaaagctcgtccatttctacataagattatttcctaaaattgttgaaactacgaataaaagatgtgtgacatgttaatgcaaatcaatgattctctctacatgtaaaatcttgatggattattatggctatcttaattatttttaataagtgttactagcagatttatagaaaagcaatcgagtattataagaaaagtaaacggcttctagagggactatgaccgtttaggccaaggaagtttgaggcaataacaggtctgtgatgtccttaaatgttctgagtcacacgcgcgctacactaatgtattcaacgagttcacactttggccgacagacccgggtaacttttgaaatttcatcgtaatgaggatagatcattgtaattgttggtttccaacgaggaattcttagtaagcgcgagtcatcagctcgtgttgactacgtccatgccctttgtacaaacagtccgttgctcctaccgattgaatgatctggtgaagtgttcggatcgcggccacttggatgacccaaaaaaacatataattcaaaaacctatagcgaaaacaagcaaagagtggatgagtaaataaatggcattgttgttgttgacctcactcaatcacctagtctcattctcactcactcgcttgccttcttcttccgctcacaatctcttcctttctcgttccttctcttcttcgatcagacgattcaatcgcttctcactcaaaccacttcgctccttcgcatccatg

SEQ ID NO: 2747 - DNA, 3000 bp, Unknown
  misc_feature (1)..( 3000): cDNA_ID_2168497_gDNA_ID_1620586_Annot_ID_161303 3000 nt of promoter + ATG
aataatttttgagggtgcaataaagcaatagtactctttagcctaattgattatttgattgttcacttggtttgttgggttacttagcttttattagatttgaaaagtttcagttattttttagaacgttttgcttcgagacaaaattacaatatgtattcaggtaaaagacaataggagatttgtcgaagaaaaaagaaaaacagacgttacatacagattggggtttcgaaatagttactataaaacaagtttttcttctgtcttgcgcgtgaaatatgttcacgtgatttcatgggtgagagaagaaacgtgttgacgggcatttaatgctcgacaaatgaatgatgctcatacagcaagaaagattgagttgacttagtaacggtgaaacttaacattaattattgttttctcaaatttgagaaatttttaacacacttccgacatatactacacgattttaacatttgtacacatataaacacatataaaaagcattaaactatatatatatatatgtatatacacatatagataacattattaagatttgtatacatgtaactacacatagagggttattaacatttgtatgtatataaacagatatgtagaaagttattacatttggatatatataatatatgtaaatatattgagcgttattagcatttgtatatatgtaatgtaaacatgtatatagcactttattatgtaaacatgtatatagaacgttatcaacatttgtatatttgtatgcatgctacaaatcaaacataaattacaaccactatatctcaaaccgtcgaatagagctagtgaacaatgcattgcagtgagaaattgaaatatcattatcataaggttcgtcaaattttcgatggatttttactaattttgtcgagttgtgattagtttttgttgagttgtcaccagaaattaataaatttgaaaatatgattttgtgcaaaaaaataaaaacctttaaagttgcctatttttgcaattttactctccacattcaaaaaatgcaaaattatcctatgaagtataaaataatacgcaatataacccatatttgcaactttacatatattataatcgttttcacgatcacatacatttgtttttgaaaattctaaaaatataattgaagtcatcatttcatagaaaaatcgttagtttacattaaaaatttgagcgtgcaatgaagcaatggtattctttagcggtattctttagcctaattgtttatttaattgttcttttggttttgttgggttacttagcttttattagattcgaagagttttagttattttttggaacgttttgcttagaaacaaaattaggatatgtattcaggtaaaagacaataggagatttgtcgaaaaagaaagaaaaataaacgttacatacagacttgggtttcaaaatagttactataaaacaagcttttgcttctgtcttacgcgtgaaatatgttcatgtgacttctttggtgaaaaaagaaacgtgtataaaacaagattttgcttctatcttgcccgtgaaatatgttcatgtgatttctttggtgagagaagaaacgtgttgacgggcatttaatgttcgacagatgaatggcgtacatgcagtgagaaagaacgagttgactagtaacggcgagacttaacattaattattgttttctcaaatttgagaaattttaaaacacttccggcatatattatacgattttaacatttgtacacatgtaaacacatatatgaagcactaaaaataattatagtgttaaattattggatctaaatacacatatagataatgttattaatatttgtatacatgtaaacacatatatcgttattaatatttgtatgcatgtaaacacatatatagaacgttattaacatatatatatatatatatatatatatatgtgtaaacatgtatattttgtatatatgtaaacatgtatagaacattattaacatttgtatatcggtatgcacgctacaaatcaaacataaattacaaccaccatatctcaaaccgtcgaataaagcaagtgaatagtgtattgcagttagaaattgaaatataactatcataagtttcgtcaaatttttgataaatctttttctagttttcgtcgagttgtcaccggtttttgttgagttatcaccggaagttcattatatttgaagatatttagagtttagtgtttttttgggaagtcccgttctcatctcatctcgtctcgtcctgctttcataagtgtagtatgttatacgttataaaccaccatattgataatgttgttataaatcataaaatattttcttctacaatacaatttataatttagtgaattctgaacaaatcttctcaacgaaacgtaagatcatcatatcagtaattcaaacttgtaaatgatgtttcttatttgcattggtttgatttataatcgaggtttcttaagttttttgttacaagattagatattatcgtatatcaatgaagtaaaaagatattattaccaaaaaatttagtcctcaaatcgaaaccaaatatatatgaacttcacagaaatattccattcttcatacaactttaaaataaaaaaagaaacacaatcagacaaagttcccatgcactatactacttatgttcttaaaagattaatcttttggagtttcacaaaaattaagaaaacagttaatataatgtaatattttcctacaccaaaaaaatgataattatgaacaaacagtaattcataaatttaaatatccgcaatcagtattttcaaatctaatgaaatatatgcacattaattaataaaaattgcaattaaaaacataaaaataaattatcacaaccctaacactcatcttagcaccgtattcgaaacttcagaaccaaatcattcgaaaccttgacatgattaagctacccaatccgatttctagggtttgtgatcccttaatcatg

SEQ ID NO: 2748 - DNA, 3000 bp, Unknown
  misc_feature (1)..( 3000): cDNA_ID_2168501_gDNA_ID_1620586_Annot_ID_161304 3000 nt of promoter + ATG
cttatgaaagcaggacgagacgagatgagatgagaacgggacttcccaaaaaaacactaaactctaaatatcttcaaatataatgaacttccggtgataactcaacaaaaaccggtgacaactcgacgaaaactagaaaaagatttatcaaaaatttgacgaaacttatgatagttatatttcaatttctaactgcaatacactattcacttgctttattcgacggtttgagatatggtggttgtaatttatgtttgatttgtagcgtgcataccgatatacaaatgttaataatgttctatacatgtttacatatatacaaaatatacatgtttacacatatatatatatatatatatatatatatgttaataacgttctatatatgtgtttacatgcatacaaatattaataacgatatatgtgtttacatgtatacaaatattaataacattatctatatgtgtatttagatccaataatttaacactataattatttttagtgcttcatatatgtgtttacatgtgtacaaatgttaaaatcgtataatatatgccggaagtgttttaaaatttctcaaatttgagaaaacaataattaatgttaagtctcgccgttactagtcaactcgttctttctcactgcatgtacgccattcatctgtcgaacattaaatgcccgtcaacacgtttcttctctcaccaaagaaatcacatgaacatatttcacgggcaagatagaagcaaaatcttgttttatacacgtttcttttttcaccaaagaagtcacatgaacatatttcacgcgtaagacagaagcaaaagcttgttttatagtaactattttgaaacccaagtctgtatgtaacgtttatttttctttctttttcgacaaatctcctattgtcttttacctgaatacatatcctaattttgtttctaagcaaaacgttccaaaaaataactaaaactcttcgaatctaataaaagctaagtaacccaacaaaaccaaaagaacaattaaataaacaattaggctaaagaataccgctaaagaataccattgcttcattgcacgctcaaatttttaatgtaaactaacgatttttctatgaaatgatgacttcaattatatttttagaattttcaaaaacaaatgtatgtgatcgtgaaaacgattataatatatgtaaagttgcaaatatgggttatattgcgtattattttatacttcataggataattttgcattttttgaatgtggagagtaaaattgcaaaaataggcaactttaaaggtttttatttttttgcacaaaatcatattttcaaatttattaatttctggtgacaactcaacaaaaactaatcacaactcgacaaaattagtaaaaatccatcgaaaatttgacgaaccttatgataatgatatttcaatttctcactgcaatgcattgttcactagctctattcgacggtttgagatatagtggttgtaatttatgtttgatttgtagcatgcatacaaatatacaaatgttgataacgttctatatacatgtttacataataaagtgctatatacatgtttacattacatatatacaaatgctaataacgctcaatatatttacatatattatatatatccaaatgtaataactttctacatatctgtttatatacatacaaatgttaataaccctctatgtgtagttacatgtatacaaatcttaataatgttatctatatgtgtatatacatatatatatatatagtttaatgctttttatatgtgtttatatgtgtacaaatgttaaaatcgtgtagtatatgtcggaagtgtgttaaaaatttctcaaatttgagaaaacaataattaatgttaagtttcaccgttactaagtcaactcaatctttcttgctgtatgagcatcattcatttgtcgagcattaaatgcccgtcaacacgtttcttctctcacccatgaaatcacgtgaacatatttcacgcgcaagacagaagaaaaacttgttttatagtaactatttcgaaaccccaatctgtatgtaacgtctgtttttcttttttcttcgacaaatctcctattgtcttttacctgaatacatattgtaattttgtctcgaagcaaaacgttctaaaaaataactgaaacttttcaaatctaataaaagctaagtaacccaacaaaccaagtgaacaatcaaataatcaattaggctaaagagtactattgctttattgcaccctcaaaaattattaggatgatgagaatgtaatatatcctatatatgctaaatcaccaagtgcatgtttaagtttattaaacataatctactaatataaacttctattaagaataaaatatttagttgatcaaataataagtatctccatacaaattccagctgtaaaaaataaaattaggaaaacgaaatactaaaataataaagtttggagatatatagaagaaaaagaaaacagagcgccattatcggtgaaagctgtggttgttccttgaaatccgattctgattccttccttttggatccgattctatctccaccttcaagcacaatattcgactcggtactctctctttcttcttcttattgcaaaaagattctctttttatctgttttgtggatatagagattctggataaaaacaatcatcttttttctctcaaaaatctctgcttaagaactgggattcttcaaaagctcttctcttgtctgatttcttctgaatttcccctctaagtctctccaattcttctccattagctataaagtcgattcctttatcaccgttctgaagaatttggtcgaaagttttggcctttagtacccaattttcaatcctggcgataactgaattgaaaagggttccaaaagttacatcacctgaaaacaacagtgcttttgattgtgttggtggtttggagtgcttgataagtttaatcagggcccttgat

SEQ ID NO: 2749 - DNA, 3000 bp, Unknown
  misc_feature (1)..( 3000): cDNA_ID_2168505_gDNA_ID_1620586_Annot_ID_161305 3000 nt of promoter + ATG
ttaagaaacaattattgtttaattatttgccaatcatttttttaataagtttgaaccaatagtagtataaaacagttaaccattacatcttgaaatctataatttatcaataaaaaatttaaaaaataaaataaaaacctaaaaaatcaatctttgtggaacaaactcaaaacactaaaacatcaaatctaatatgacataatgttcggctgtttttcaaaaaaataatcattgattaatggttaatgcttctctgtgaaagtcaccagttcacgggtttgagacttgggagcagcttagacaagttttcttttattttaattacaaagaacagtcattcaaaaaataatagttatgcagcctatttttttcttcttgcttgtagccttgtcaaattcagggacggcttgatgtctcaactaatttgcaacatgtcttcaatcattaacatggcccgtttacaagccggtagccctagttgtccccatcaagatatagaccaatcccaataacacctttgaatcccaacataccatgctatcagcagatatgtcttattgccttattgcatgatatctaatctagttatactaaatcaacagtcacttttcccaaaactgcaagtctctccttttgccacgtatgattaagtttaaaattttggtctttcacattcgtaaaacaattcactgctttctactattatttttcaacacaattttttttgacaaaaaataaataaaagtctgaccacttttttagcaactgctccttccacgatcttaagattcttcactttctctcccatctttcaatccctttgccagttaaattacgatctaaatggcaaccgtataagcctcttttacaaaaataaaaacaggttcatgttcttcttcttctctcctttcttataactttagatcgtccattctttcttcaaaatttgtataacagagaaacaaaaagatgacataaacaatgaaagttgagacttttgtgatgcctaatgtgatggacgatgttaactccccacgacacgttgagtttggtccacctaatcgctgatatgaatatcattaaaactttggctatttgttgcgatttacttggtcttatctttttacattttctatgcaccctgctcgacaaaatgaccacatgagtttgcgagaatcgtatagaaacaaaatggatgcaaatgttttgggggtttcaattcaaaagaagaaaaccaatttgagagatgggtggcatgatttgacatcttcttccacgatgtagtctgcaaaatgattttaatgtgaaaccttcttatatgttcaagttttaaaagcgttttgattcgaaggttattcatttctccatcattattattgttaagcttttggagaagaaaaaatagctccgtatatcttttgttttcttcatctactctttctctttttttttctatgcctgagacagttagtgtatttatgtaagatactttgttgtttctaatgaaagtttctttgattttgacacacacatacatatatatatatatatcacgatttgggtgaagttgagaaggacttctattgagagttacagagcaatgtgtaatacatccaatcaatgtatttcgataaaataaaactaaacaaattgtattttgtgaggctgtgacattcatcattagtgtaatagttgtagatttcaaagaaacaaaatactatactatggatattgttattttcccgtgcaaagcacgggctgcctactagtattctatagatcccaatggcaagtgtccgaataagactccatcattcgttctatctaactcgggagatgatctcatacctcctatatcatcaaacgagacccaaattgtcctctacatagaaagaatatggatttcgtcgaatatttacagatttatcattagtgttactcacacatatttcactcaattaattatataaaaaattacaattaaaatatgcaatttcatatataatctttgttatttattgtaggaaacatagttttcttcttctaaacatcacatgttcaagtctaaaaccaaaaaaatcataacattataattattaattttgtttatattaaatttgtttaatacatattttgaagaaaaaaaaaattaacactcaagcatttgtagtctagtagtaggggaagttttagtaaatggtgaaattcctaaaccaaattcgattatctttggaaacaaaaacacatttgtttcagaagtctgtcatttgtgatttgatttaattagtttatatggtagttagaatgcaggcggtctaactactccttgaaataacttgaaaaacactctaaacttgggacatacagtgtggtgggctttcaggaagatgtttactgtgaagcacttcggtgcgtctctatcgaagtttaccggatcaaccgatagtttttatataaaacaaaaaaaaaaacaaaaaaaaattaacaactaaataaagctatttgcaagctaataaatatcaatttatctaaaagtaatatttaccactataaagtcataaaatatcttgttggattccaatattattgatttatagaaattttactgtagtttaaaagttaattttgttattacctctttttcctattggtcaaataatgaataaacaattaaaaaataccaacaaaagacaaaaaaaacaaaaaacaaaacaaaaaagctaaaaaatcaccgttgaaaacgcgtcgctttctcttgcgtttccctctcttctcgttcccatgtctccctctcttcctctgttgctttctttggtttatctttcaaactcaattctcatcatcagaaatacataaaactcttttttaaaattccaaatgaatttcaattcaattcgattcaccatttcaaacaaatctcaattttgattttcccggagatttggatcggagagataatataatttcttgacagtgaagacattgatggtgacgacgatg

SEQ ID NO: 2750 - DNA, 3000 bp, Unknown
  misc_feature (1)..( 3000): cDNA_ID_3069542_gDNA_ID_1620586_Annot_ID_161310 3000 nt of promoter + ATG
ttgttaaattgcttaaaaaatactcgattgatttagttttcatgtaaatgcaaattaaacaaattctaaccaaatttgtttttttccctgattttattagttcctattctttttttttgtgcaaaaatttgattggttcctttgtggctatgtgtggtgcgtggcatttcgttaataggctcagaatcgagagcttaatacttacaataaaacgacatcgtttaataacaaaatcatcaccatcgatctgaccagagctccttctttgagcaaggtttttctgggtgcttttctacagcaatggcggcgagaggtgctctgcttaaatatctcattgtcaatgtcacaccttctcttcaaatctcaagccgtatcacttcccctcctttgtatgttcttcttcggcgtttctctaaagaagttagagcattcctctacacatctgaagtcacatatcgctttctctctatcgtcaaaaacttccaaaaatttgagccttctaaagtattttcagattcttacctctgatttggtgaattcagttatgatagatagacatttgatttgattatagaagctagagttatgttgtttcttgaacattgatatacctcgattttcactcattttaactatgatttaggtatagtttttagagttcttttgttatttttagagtcttgtatagtttattcaggtctttacatgtttgggatgcatttggagaatatagagtattctggagaaaaacataaaacttatgctacaaaagcaatccgaagaccaaacttcacgtaggtgtcaatcgacaccacccttggtgtcgctcgacaccaatatccgacgccaattcaattgcgcaacttattgaagttttgaagatttccaaattcgcttcagaacttttccttattttcaaagaagtccctacacaattttaggaatttatacaatagaaactctataaattaataatgttgggaccatgaattttattaatttatagtgatattaatttatcctataaattaataaatattaatttatcctattaattaataaatattaatttatagaaatattatacataaaatataatattatattcttcttaaaatgtttcttaatttaattttccatatattttgttgtttagatatataattatgttaggttttttatttttctttgacttctttaatttatttttctgtaagatattgtgtttgtatatctaagatattaacgtgaagtaaagtaaacatgaattttaatccaattttttttacataaatcttagcaataccttctcaaatacaaaattaactatgacggatcaaatactcaaaaagttatgtgagtacaatagagatcataccagttgtattttaaaaagagttgtaattatagtttgaacaaaattttcatataaatattagtcttaaaatgtatacttaagatctatgattattaatttataatattattgggactataaatttatatagggatttcaaaaaaaatattatcttattatcttatcgattttagttaatttttacattggcctgacttgggaccggcaaaatatattaatatatcgtgtttattaatttatcgagtattaatttatagagtttctactgtacaaagattttaaggtcattgtttagatctaacttttgataacttttctttaccctttatttcactttgttctctagagccaaaaccctctagagccaaaaccatatgaagctctctctagagaagatctttctaaactatattctcttcttgtttcttacattgatttctaccttaaacatgttttggtctttgataatcatgtatgaatagttctcttgttgggtttagggactctcaatagggatttagatgaattagtataccgaaaatcctgttaggataatatatttagaattcttcatctttgattgttcttagtgctagttctagaattactagaacttgattttaggttaataggtagtactcaaaaagacttctattactagaactatcttagatgagcctagtatttagatgcggactagcgtcgatttagatacttaggtgaacttatcaaacatgattataatgcttgcttagttctagggatttacaaaagagttagaatcaatactactaagcatagtgagtaatgcggcgaaccatcggttactctataatagtgattagagttctagaatggttcgatcgtaattctaatttattgctagatctactattctgatatttcctgagaatttccctaaacccaacgttttaatcatctgaatctacaaccaattttaattgattttctgtcttttattcttataatattttcagtttagcttcatttgaaactgttagtctattgtgtaatctgagaactttgtggaattcgatccctaagtgctataacaacctctttatttgagagagtaatcaatacggtaatttgactcatatcaatttggcgtcgttgccaagttctcttcgattcaccattagattaggtgtagaatttagtcttaatttttattttactttgttactcacgcgttctttttcttgtgacaagagctaataggaatttgaacgcaacaaccggaaagttagcaatcagtggatatgttgagattgattatcagacctgatgctgctggagtcttacgagacagagatggtcaggcatacaacgaagagggccagaaacttgatgaagagggaaacgtgataccagaaatcgcagaggatgtcgatcggcaccagctggttgttgatcgacataagaagaaatcagagcagatggtcgtaggatgactcttgatgactacaacagacaagatctcttctattccaatcagtctgcaatccgaccacctacatttgaaagaagagatttcgagataaaacatgcatactttactcttgtgagtatgcacccttttcatggtctaacacccgatg

SEQ ID NO: 2751 - DNA, 3000 bp, Unknown
  misc_feature (1)..( 3000): cDNA_ID_2785775_gDNA_ID_1620586_Annot_ID_161302 3000 nt of promoter + ATG
cttaaggtccatccgcctcagagaatgattgacttaagaccaataagtctttgttctgttctttataagattgtggcaaagattctagtgaataggctaaagaagcatttgtctctgattgtgtctcctactcaagccgcttttgtctcagacagaatgatatctgataatgttttgatagcgcatgaagctatacacagtctgaaatctcatcctgttttttctaactcatcgatggttgttaaaactgacatgtcaaaggcctacgacagagttgaatggtcttttctcagagaaatgctacaactactagggttcaataatatatggatttcttggataatgggatgtgtgacatctgttacatactcaatcttgattaatggccaaccttttggttttatcagacctgaaagaggtattcgccaaggagatcctctctcccctttcttgtttgtgttatgcacagaagctttgattcatctgtttgatcaatctactagagcaggctccttatctggaattcagtttcatccttcagggccagtaattaacaatctgctgtttgctgatgacagcctctttatgtgtaatgctgataaagatcagagtttggagatgttgaactgtttagataagtatgagaaaatctctggtcaaaaaatcaacaaatcgaaatcagcaatcactttcggattaaaaattgatgaggctacaaagaagtggattaaagatacaactgagattcaaacagaaggaggaacagggaaatatctaggattcccagagtgttttagtggatctaagcaggaacttttggattatattaaagtcagattgaaggatagactaacaggatggtttgcaaaaaatctatctcaaggaggtaaagaagtccttattaaatccgtggctatggctctccctgtgtatgcaatgagctgtttcaaattaccaaagacttctatcaagaacttaacaagtgcaattatggagttctggtggagcaattcaaaggatcacaaaaaaattcactggttggggactgaaaaaatgactttacctaaaacacttggtggctttggatttaaagatctggaaattttcaatcaggctcttttggcaaagcaagcttggaggctattacatgagcccaattgtcttttttcaagattcttcaagagcaggtactttgtgaattctccatttatagatgcgtctgttggaagtaaaacatcctatgcgtggagaagtattttgtctggtagggatcttttaattaaaggactgaaaagaatcattgggaatggaaaagagacattggtatggattgataagtggatccatgatggaataaacaggagacccacaggaattcaatccctccaaaacattagacttcgagttgatgctctgattaatatggaaacgggatgttggaatacgaatctgttgagagctttatttcatcatactgatgttaggattattcaagcatcaaagccagtagttgggagatcagatttcttttgctggacagaaactaggaatgatatctattcgattagatcaggatatgatttagcttacaaatttcatcatttagatcagattacagaagctacaaatcgcccttcaaggaccacaattgtagaggcctgctggaagattcccactgttccaaaaattcaggtgtttctatggaaactactaagaggtgcactggctgttacagaacgtttgaagacaaaaggaattcagagttatgatggttgttggttttgtgatgcagatttggaaacaattaatcatatgttgtttctatgtccatatgcaagacaagtttgggctttgtctaatattccatcaccacagacaggtttttgcaagtcagattatgagaatttccattatttgatgagtttgcaatcacaacaaaaggatattgcagaaatttcaaaggtttttccttgggttttatggcgcttgtggaaaaataggaatcagctattgtttgaaggatctttttttccgccaaatgaattgattataaaagcaagggaggatgctactgaatggtttacagctcaagaagctcgagaatcacctatgagaaagcctaacctcagccatgatttccggaaacctccagttcagggagaatttaaatgcaacattggatattcttggtccaagttgcataggcttgcgggtgtatcttgggtacttagagattctctgagtaatgtagttctccacagtcgtcgatcttattctcaagttgtgtccttgtttgaagctaagatcaagagctaggaatgggcagttgagagtatgaagagtttacatgttcaaaaagtgatttttggagccactacaatggagataatcaaagccctgcataaacctaaggattggccatcaataataagtcacattctcccaatgctagttatggctgatggaatgactgattggttcattttatttgaacctaatgggtgcaacaaaggagcctataaaatagccaagagtgttacctctgacataagagtgaactcttatgtagctcaaagctatcctagatggatgaaagatttcttcattaaggagaaatgtattgtcgatagtattaggtcctaagttttttttagttttaagttaggagttgtaattatagagtgtattttattaggttctaggtccttctttttatttattccagtaattttctagttagatagatttttaaagagattacttcgcaatgatagaaaaaaaacaaaaagatttagtccttctagacttaagcggtggattaatgtttatagtcttttctggggtttgaatctttgactttagctttcttacaattaaggtttctccttctcgtaattgatcctagagtatataaattaggaagtctgctttctcttagtcctgtatctttaagctttcataattaggaaaaaaaaaaaaaaaaagagagaaggggtagcg

SEQ ID NO: 2752 - DNA, 3000 bp, Unknown
  misc_feature (1)..( 3000): cDNA_ID_2106220_gDNA_ID_1620586_Annot_ID_161298 3000 nt of promoter + ATG
tgttccagaatgaggttgatttacttacagtgttgatgcgtgttttatttcacctcaagcttttacctgaaagaccacacgactactgcaaatgcacagtatataggagtagtactttaggattgaatccacaaggagagaagtagttcagagaaatccttaagaagagagtgaagctaggaccaaataaaaagagagggggttgttgtatgcaataaaccaaaataaaagacaagtaactaaactaaacgataagcaataagagagaagcgttaggctttcgagggtttctccggatgtcatggttcaaacaataggatatagatctcaatctaggtgataacatggttaggtttgtttacttccaaattctcggacatacgaaactctatcaagaccagctaaccctaacggctggtaggtgaaagccggctattctcacctatatcttgtgtactcagttgccctaacggctagtaggtgcttacatggtttcaaaatacaagatcaaagcattaagttaaaattcgattctactccataagtccctatcactcggcgggcgtgcaacggttatagttttttattcagttgagctatttcaggcaattatacaagattctgtcaagtataaaatatctaagatcatgtactaggtggtgttctggacatacatgcattaagattaaactcaactagaaagaatagtgtaaacgatcaaacaaagccatagaaaccgccaacctagactttcgatctaaaagtccccatgaattcccctttgaaaccccctcaaacccaactagagatctactcgctcatggcaaaggagctaatcaaaagttggattgagtaaaccataacaaaaagatgaataaaacttagaaagggtttagagattacttctttgaatgtagaatacaagaggcaaagttccatataaagagtcttacacaaaacgagaaagagagagatggtgatcttcaagcttcaagaggtgcagctgcgagttggcagctctcggcgacggctagggttcgtttgtgatgaaggcacacctagagttagggcttagaacaagtatttatacttgagggccaggaattaggtttaggggtaagaacgtcattcccccgggtaagtaagtgatcgggccgaatagtgggcttcaggaaaggagcctaatgacggtggcgcaaagagggaaggacttgggcgtgaactagtgttcggtggtgagtttctcggagctgcccaggttcaagtctccttggccagatgctttttggacttattatttctaaacggccggttcttgacatgtcttcactctttgtgtcatatcttccaaacggctttatagattgttttgattcgacttctacgttaatcttgactcttctatcattccatacataccaaaatatctcgtttccgtgatagggaagacctcagacagatgctaaacttctgaagtactggaatgatcaccttttgatacttttaggttcaaaactcttaaaaaccttcttggcacctagaatacgtgtttctcctcttattggttctagaatggcatcaaatgctctctgaaatataagaaaacaatagctaaaacgggataaaaagtcgtgttatcaagtgcagagaagggaacccttacttttcaataattggtttgttgcaactcatatatgggagcctgctcctgcctttaattttgtgactaccatagacctttgggtgcagatgaggggcattcctattctgtatgtttgtgaggagactgctttggagattgctcaagaacttggagagatcatcactttggactttcatgatgccaccacgactcaaattgcttatattcgagtccgagtgaggtttggaatcactgacagacttaggtttttccaacgcatcatttttgattctggggaaactgctctcatcaggtttcaatatgagcggctaaggaggatatgcagtagttgttttagagttacacatcacatgaactattgtccatatcgacaacgcttacctaactatggaagggaaagacctgtcttccatgatgaaaggttcagatcgagtatgaattctcagtctcaaatgaatgataattcctttccagttcctatgaccccacctccaaggattgctacaccacagttgaatcatggaaagtttgttgcagcgcatccgtattttcctactacaagagaaggacttaaccaccatggtagaggcactagtcaacatggtctctgtcaaggacaacaagtctcaatagattctaatatcactccatcagtgggaacaacaatcacagctggaactcaacgtgtttatgaaattggccaatcttcaagaaggtttgaaacaagggaatcaaggaaacgtcaagaggagaaaggaccttacaatgaccaagatcaagcgcacatgaagagagggattctgaaacctccaaagaaaagataagcactctactaattctgtcaactctttttggtttaggacagcattggtttcaacaagtgcatatccaagctctgaaataatgcgtcgaaggggtatggccttcataacactttttgggttaaagagtactatatggctgcagttagtgtttttacgttcgctctgtaactttttgagtatacaacatggttaaccttgttggtttctgatgccatggttgttagtttacttgttttatgtgtatgtcttcaagctgtaagtggtagatctactattgtacaattatgatctaaaagaagacaacacttagtgaaaaaaaaaaaaagttcatacatcttatttagtctcatcccgtcacgatccttatttttaattattaaatcctaattaccaaacgtgtcgaaattcgaataatataaccaactttttgatttttgatttttctaaacttcatcatataaacaactttactaaagaggacaagaaaaaaaagaagaagcaaacagtcaaatg

SEQ ID NO: 2753 - DNA, 3000 bp, Unknown
  misc_feature (1)..( 3000): cDNA_ID_2170845_gDNA_ID_1620587_Annot_ID_161324 3000 nt of promoter + ATG
tcataagctgtcgaaagtctctgtttaggtaattgggattaagaaagtaatgaaacctggccaaggactattctgtgtttagcttttatgatggttcctgcatattgagctttgagtattgcagcacgaagagctttctcaggaggtaccggcggcagagcaggaaaagccgttttcaactctgtagcaattataaaatggtattaagaaaccaaactatacaaaaaagaggaattctacagattcgattaaactcataagagaggaataataacaacttaccattacccaacagatcactgtttgaaggtttatcaagctgagacttgagactaccatttctctccttctttgaagtgtcagacccttcattgatatagaatttaaaagtaaactgttagaaagaagtgataatagaataacaagtgcgaatgaaactatgaaagatagctttagatttcttaccattagattgaggatctaactcgctcgcttgtgcacctgaaatgttctttaattgacaatcctgtttgacaagagcattgaaacataaatccctattgttagtgacaagactaaaaggaaattaaatttgacagagatcaagaaagaatctgtatataccgttaacgaacaaacgtcacttccaaatgagctacaggacttgaggcatatgcaaattatcctaccacatttacaggttgctaatgctttaggcgtcacagcaggagtattctttttgctctgcactttcactggcttggacgaaagagaacccttttcggagttctctttagctggtttcgtcaatcccaccccagaggaagctgatgttccagtgctgctccgtctagaacaatcacgttcaactggctgtctcttataaccttctctaacttcattccaggataacctcaaaacctttttcttcatgagtgattcccatctaacctcaaaaatctcattaatctcctttgcaatcgtgtgaacctcattccacagaggattataatgcatcgcattggcaaaagttaaccgaacatccgctgcaaactcatcagcattactgtagacattcttcaaaagtttcgatttgacagtgcctaaatccattggcttttgtatgacattgaagtaatcaggaatctccattttaacaggatcaacaggctccttaaagagccatccaccacggtgctccatcaaaaaacgtaacaatgccaaacattgactagaccaatcacaatccagcctctgcttcttcttaggttgaacttcatctagctctttaggcccaccacgcttctttgatttctccgaggattgagataaatcttcagtcactacatgctcaattttcttcgaactatcagacaacgtttggaatgttctgacagaaccttgaggaccaaactttatcttaatattgggtatcgcaaccattcttacaagaacaaataaaaacctgtaagcaaacataaaaagcgactgaaattagggtttatctacgcgacatcacaagactcgaaattagggtttatacgtcaaaacgaacaaatcgacaaaacaatcagatacccaacaaaattccgactaaataccgactaatttcgttacaaatttctaacgatggaagaagatgaagaaggagtgaattagggtttatcaatttcgcgatcgattaacaaaaaaacttgaaaaaggtactttgagaaacgaattcaatgaaatatatagcgaaaagagtattattttacagagataaaagcttaccagaggaagaatcaatggaacagtatgagagattttggagtatcgagtgtgagagtcagagtgaggaggaggaggaagccaaagcggcgatagaagtttcttttttcttattgagggtttgtgtgttaaaaatacttgagataaaacgcgtattttgtggttaaaaacacttatatatttcactattttgaaaatactacttaaaattatctcaaacgatgtcaaaattaaaatatgacaacaaaatctgttgaataaaaagtgatttaataaaaaaaagctttctttaataaattatttcctatttttttttaataatatatacacggatttttttctctttttttctttacaagtagcggtatttctcgtactacttttttaccgttaattttttctcgtatcatattttttatactcactaaatcttaaaactttgcgaacctcatacttgaatttctttttcttctctttttcttataaacctgttttttacgtaccataaaccattgatggtttctaaacatcgacaattttaccttcaaccaatttttttttagatcgttaagatctcttttaatttaccaaaaatgcggattgagaatgaatggtggtcaaaaaaacaactcttttataaaatatcagcaaacaacaactcaatgataggataagcctaagaatactatttataataacatctcgaaaccctaaatttttttaataatatagattatttaattaaaagataattacataagatatttggataatttcgaaatatcatatttttaggttgccaaaataagacctactctttatattagattaggtctaccatcaaattctttttgcaaatagaaacaggaaaattctaacaacttaatattttctttaaaaacttatctcaagccaaaatccaacgatatctatcgatatggtattatcaatcaaaagattaatattgcataaatgttttgataattttgttaacaatagaataagtgtgaaattatgaaattaactggattctaattctatcccttgtaacttgggaagggtgttaagtgttaacacactcggtaaatcactcatggactttgaattttatatttgggcccataatggatcaatcgtaaacccatcaaagaagctcaaaacatctaattttattccatttttggcacctcaaaatatataaacatttatattattgcgaaatttccgatc

SEQ ID NO: 2754 - DNA, 3000 bp, Unknown
  misc_feature (1)..( 3000): cDNA_ID_3069556_gDNA_ID_1620587_Annot_ID_161329 3000 nt of promoter + ATG
attctcactctaccaaaataataaggtaacactttcatagaacgagaacctatgttaccgtcaactcaagtaactattttgagctttttgccacttggatttctcaattacgaacaaaatcaaaccaacaaaaatgattttacagattaatacataataacgcttcagtatcttttttctttgacaacatgcattatctgagtttaaatttggttagtactacatcgataatttacaagtacctatgctaatagtcaaaattcaaattaaaaatctaatatccgaataaatggaaatcacgtatatataaccaattacaaatagtttataaaaattcaacctttcgtgaatgattttgctatgtatagactaaaaccgtgtcaaaccaaatatattagttggcctactgttccaccaatatggatgtcgggacataccataccatccctttctacatttggtatgttttcacatttcttttcatgggaagactaagaactggattacattttatttttaatataaattagatattttatgacctctaagtaatagttgaaacctggattctatcgaggatgatcgatctttcttttctattatattttttgttacaatttttggttttacttcttaaaagaaatgacttacaaaaacagagcatcaaactttcgggtttggcaactctggtttttagcaattaaaacaacaaaattaccgagtgaaagagtctcaaaaccacgaaaagaaatgtctcgcagagtaattgttgcgtattactcggtcaacttgtttcaacaaataacacagaagattcggttcttacgttcttgccattaggtgtaactataacagcttgggttgcaataagacgaaggatggattattggttatcatgtcgaggagactcgaggcaagttgagagtcccatgatgtggcatctcaatcatgatgtgcaccatcgtcacaattaagtcatagctattgggacaacgttgaaacaatttgtctcttgttttcacatatattttacaaagagggaaagtgttatcttatctccaacaattcccaaagagcataaacgggagaggaggggtaatcgattcaaacaggcgattcacatggtgaaagcatgttttgggactgaatccgagaaccatacttgatgataccaagggatcggacttccagaagtggctgcatgttgtttgtgagacatggattaatgtcaagtagcagaggaaaacctcaacattgtggatttaagcaccagaaaactgccaaccctcttcattagtagcgttagctaaacactagtcaatgttagaagctgtccataaggaataccagaaaaagcatatattaccgtctttaagcttgaaataaaaggaaccataaaccatttctccttaggtttaggagttgttgccacatggagagctccctaggctcttcttcattagtggccaaaaacatctccatttctttttttctttttttaagttaactatgaaattttaagattatgtgacgtatcattcgagaagtcatatggtttatgttgactgcattagctaataaaactctacttaagattcatgttagtgatgtggaaattgagtcatcgtgtataaaggcatcccttttccgaatgctatgaaaaaacctaaattgatccaactaaatgggaaaccatgaactgcaactttatattatcgggatattttaggcgaaataataaactaaactcgagaatatgaagttactatgtaattccaaaattgttaaagaagaaactttatatctcaagcatatgacaactaacttctatataagtggctctttggtcgttcttaaagacatgaacatataaacaaattagaaaatgttaaaaatatgttttggtccgattaaagcagccgcgggtccactagcttgttccgactcaaatagttttcgttatcactttcttctctccatttttttcatacgacataaaagtgatatagttacactaaaaagttgttttgtcctacgcatagtgacgtgtaacaatattttaaaactcaatatcacagtaatatatgactgggaaagttacaacttgaggtgtaaaagttgcacacattaacatatctataggctatagcattggtacattttaaaaaactatagcattttttttacaaaagattacattgaattattagtaaatatataatatacataaaaactgattatgttgtaaatcacataataattgtatgattgaagattgaaatgataagcctattatcgaaaataaaattagtcaaggagaaaactttgaaagatatatgaatgagttgttaattgcttgtgcataagtgtgaacatgtaaataaacttttgaatctaggtaggtccatttactttggaattgttacatagaacacttcagacaagttatgtcttaatcactttatcggtcacccataattttgtaaaaaataaaagccacattctaacaaacttttataattccattttacatttatatacaaatcaatattctaccaactttgtgctataaatattcatcacaccacaaccattcaacactctaccaacctcttctaatttctacaatcactctcttaactctttgctaagcacttcttgttaggaaaaatcattccttaatcactctcgaagctttcacaccaatattacttccttactacatctcttcattttaaagatttgttagttactttttttttttgttattgtacgaaataatttgttttctttcagacaatgttcttgtcacacaaagaatacaatcgacttgacttgcaattttttctaaacaacaaatccagcatcgagaaaagtttctatttttggattttccaaatattaacagttatagcttcgtgacttcaagaaatatccatttcaagattatttaacctttttttgtctagcaagtcatcgtattctactttgttgttgcaa

SEQ ID NO: 2755 - DNA, 3000 bp, Unknown
  misc_feature (1)..( 3000): cDNA_ID_2170848_gDNA_ID_1620587_Annot_ID_161326 3000 nt of promoter + ATG
agagatataatctctcgtaagattatatgattttggtagtaatctctctttcaagagatcataaaaaaatatcttgtaaacactaaaccaaagagatataatctctagtaagttaatatgattttggtagtaatctctctttcaagagatcataaaaaaagatcttttacaagatacattccgcatcgaacaacattttctatacgtggtttcacgcacaaaggtcgctcactagctggagtaatgtggtttggcaaaattatgtcagtgagcaacttcaccaggagaccatataactgcattaccatttcctcaaagcccctatcccaaaaatagctgtaaattaacacggtggagtaaatatgttgggacaaatattgcatgaaaccaaaaaaattcataatttaccataaaaattcttttaaaaaaaatctgagaccttaattttttcgacaatccaaacacaacagagacagaagtaatgttttagtatgggcatttttgttgttagcaacgctttgtcatgtaaacttttgctacaatgatcttcatggatgtgtgaaacagaggctgatttggtaaacctttttcaggtatcccacgcctcttcaatgagccaaatttatgttttcacacaatggtgagtcttagttttccattcctaatgagtataactctcttatgttcattgatctgatactttttctattatgatgtattgatgttcaaagataatcccacaatgtcttcattaccaaagctgatatttctttggacgtgagaaataaaagatcgccgacatttctactgaacacgcttcttgcagatcttattcagtaccggtaaattctgttgtgtagttctctagagaatagtaattttcttgaccatgcatctaatgagaataaggagtttaggttaatactaatatcattgtgtatatacttgtctcttctattggggaagcaggtgagaccttacattttagatcttggcagcaccaacaaggcctacattagtgagagtgttgaattgcatctcttcttaattgttttgttttcgtggtttagataaaacgtacgttagtagtgacctttgtttttcttttttcagaaaatacatattgaaccacaacgctactatgaactttttgagaaacaggattataattaagataaaagaattaaaaaagtgtgaaggaattaaaattttaatttcaatgaaaataaggggccaagttgaaatatatagaatatacaaaaaagaaattgtacaactattttccttttgtatgaaaataaattagttttttcttttagcaaaaaattagttcatgtatttgcattgcatcaactaaaatagttatattaaaaaaaggatttttgtgtagctgtgatatttggaatagaaaatccagaataataatatcgaaaattgtttgctttatccccctttcttttgtagaaattctcatatgattagtggatgattcggtccaagtactatcatttaaggatctgtgtagtattaaaatctcgaaatctctattcgttattaactttgtcggtgaaggggttgatatataataaaccgaagactttttgtgtgaaaagaatcatgtaataacggtacttattcattttgtacttatactaaaataaataccgattatgttggtggtagacttctaaattttaattagctttttaaaaagacccttaatttttaataaaattgatggaaagaggaatagttactttctatcttcggtaaaattcaggacccaagaaggtcgaggcacgtgccccatgatagacttgtcatgtgatgtgacctattttctttgtccaacaattttttaaaacaaattgtcataggctagaagtcgtcaaaagttaataagcaaaaaacgcaatatttcaaaaataaaaaatttaacaagaatgaatgacacaaacctaatcgtcttgacattttatctcatatatcaataatgctcaatcgagtgtaaatactttttttacatagtaaaaggcgaataagagagcagatcatgtagcaattattttcactattattgttattgtgttgttgactttgatttttagtttttaatagcagggtacaaatttgtaccttcaattatgtcaccaacgagtgtttgagataagattagacaatagtaaacacaaaattgatgtaagctatttaacatgtttattgaactgtaaataattatatctgttttaatatattttttaactattttttttcttaattgatattttattgtattaacactccttcttattaactttgcaaaataaactgtcatcttgtaaattattaccaaatcttaacactattattattgactttagaatctaagatatacctaaataatttcttaaggccaaaaaaaaaattatcatctttttatttaagttaatctaagatataaacattaagagaaagttgcaaaattaaagaaaaaatatctatctttacctggatacaaaacttatacttttggataattcatatgaaagtctctcttctaatgtagtaaaaacttctacatttcacagctaaaaactgaaacccaaatttaaaatttcgtgtatagtaccgaggaaaaaaagtatttgcaagcaaaatctagagcagaaaaatttaaagatcttttgcttcacatgactctattgtttttttcttacctctattttttcaagtctgcagctttttgaagctatatttttcagatctttcactctctctctagctacttctttttgtctttaagttttcaaattttattaaatttttatattctactgcctcctcagcttctctcacaaagcacaaatccaagccccaaatcaaatcccaccattgttttattacctcaatccaagaacactagacacaacaaaaatctctgtttcttatccaaatttctgatctttgtggagaacaatattttgattggatgtgagacaa

SEQ ID NO: 2756 - DNA, 3000 bp, Unknown
  misc_feature (1)..( 3000): cDNA_ID_2171070_gDNA_ID_1620588_Annot_ID_161338 3000 nt of promoter + ATG
attgtaaacgctgtcacaaaaaaaaaaaatgtaaatcaaaatatatcatatcatgccatttctttccatcttaccctttgtgttttttctaaaatgtttcaggattaactgaataaaatatacaacgagctgcacacttataattaattaacatttttattcacacctactaagttgaccaatctggtgagagagagactctgacagccgtaacagatgttacgtagtggttcaaagaatcattaatgttaacgtgaaacgttattcacgtagtggtttaatcatgcacatgataacgtgtttcacgttgcctatatattcatcggtcaaaacaaaatatgaggaaattttcttccaaaaatgataaaaaattgttaacaaaatttagaaatcgtgggcccagaaaatcttgaagtataattttgtttctccaagttaaccagtcataagttgtagtatatatagtttcgttttttgaaaaagggtttactaaactactgatttctttactacctaaaatcatatatttgatcatgcaaatggtctcgtaaaaacaactggatattaaatacataataaaaatagcacgatttatttttattaattttaaaatgaatgttaatttcaaaattatgaatatggagaattttaattttgaaataaatttctgcaaagaaaaaaatgaatgttaatttcatttagttaataaggggtgattgggtttgtaaataatttataaaatgtttagccagctcaaaggtctattacttttggattggaaccaacacttataaatgtttttttcttagaaagaaataacggtagaaaaatagcttatgagtgtatatggtaaattaaaagttcatgtgataatttagagctccatatgtaatatattagaatcttctgtaataataaaaattaatgtatataataaattggatgtctacatcacaagatatttgcaacgagaataaattacttctctcgtaatagttaaatgaagttatatgcataatcagattaaaacatgataagattttcttaaatgaagttaaatgcaaaatcagattatttactgacaatacgtcacatctaccactttcttgattttaagttatcatttcttatagtttactcaatacaacgagctgcacacatacaaatttttaattcattaacattttaatccacacaaactcagttgaccaatttggaaaacaaaattcttgataatattttaattgatatatacaaaaataacattaaataataatgtaattatctcagacaagatcacaagtttacagaataatgagttcatactctattttagactaaacatattttctagtacatgaacaaactaacaaaatcgggaaaattcatatgatgataatgtttcaattttaaatgattaaagttcattttcaatctttgttttcatgatactgttggttagaacatcttcatcctttagatactcaaaaggaatattttaccagccataaaatattattattttaatatatttcaaataaataattaaattttaatattaaaatcatattaaggtaattctttgtaagtataagaagtttctaaagaggaaccaattctaacttctcttttcttgtttttttttttctactattttaatacaaagaatctaaattagatactaataggggcaggggcagctactaagagcatcctcaatagaggactcttaattttttttctaaatacctctatattattattttaatataatatatttagatgattaattttttttttttttaaatgaaatcaatataaaagagacatgtgtctcattagactcttatataaatcttcaagtctcttagataagagtttttttctctctcttcctaatctacttttatatacataagaactatttaaaaaccctccattgaaaatgctctaagaactaagaagttctcttcttgatgtccatatatataaagaaattaattcacctaatctaagtgtcgtgaaattcttcaccattttcattgaacgtcattgccacagtcactgagcattgtcaccaatcgattctgccagatttaattagtttgttccaattgtatcatctacaacatcaatagaaaataaattagtaaaacggtgagggccaatgtacgaatttacctgattttattataatttctctatgtgtcttcgacaaagatgatttcttaaactataaaattagcatggtgattcattttggataggaattgtcaaactgaacatttcaggattgttagagtaaaagattttgtagatccctaaaacaatataataagtcatttaaatagttatctagggtcctaagtcaaaatgttttttttttgttatttagagtcctaaataataaatacagtataaagtatatattaatatgccataaatgaaagtttttttttagtgaattcgacgcctaatgataaaataacaaattacataaatgaatcatgcatgttgcaatattaagttacaagaatagaaacaataaatacttgttttctttcattttggttattttgacaagaaaattacattaatagttattaatttccacagtccacgtattgcaaaataattttgactttttttttgttggtatcgcaaatactctcacgtacaataatactttttttttcttaattaacattaataaatttgggaaggtgagaaaaaacaatgaaataaattttaatcatggaaaatcccacactcacactctctcacacagtcacacacatgccatttgttgcaaaatgaatgatgattagatttatgatggtctatatatatggttctagatagatctaataatcacacttcatcttgcaaaaatataattcacacaaggtctttgttttttttcggcatcacttttgtgtttgatttagtatataatctaatcaagtcaaattattatgtattatagggactttaaacatg

SEQ ID NO: 2757 - DNA, 3000 bp, Unknown
  misc_feature (1)..( 3000): cDNA_ID_3069566_gDNA_ID_1620588_Annot_ID_161352 3000 nt of promoter + ATG
aattctcttcttgtatatttgatatattttgatgattatcatttatcagagcagccgtttgaatatgaattctcctgttcgttataaattattgtaacaaagacttaaagagtgatccagcttcatctctttatccaccacaaatgctatttccgtcacataaaaataccaaaaaaagaaaaaaaaaaagagtgaaaatctaagtgaaaacagatcacgatcgagttagataagaatagagagatgcaaaaataaaaatagaatgatatttgcgagacgacacgtaaacaataaaaagttacggtaaaaagttacggtaagatccacctcgctaatgtctatgtataaccagaactagaatctctattgggagtttctagaggagagactctctattaaaacaaaataaaaaatttagaaaaaggaggagagagaacagagacgtttttcaacgtgagaaactttaagaaactcatttctacttttattttgttctgattggttcaaataataattaaaaaattaaacaataaaaataataataaaatttatattattttataaaattgaatttctcagtgatggagatggtcttaataaccacgattctacgttcccctcgaggaaagttgtcacctaaaaaataatttattatgttaatttatactttatataacttaaattctaaggttgatttaaactgttttatatcttctgttctcatttctttatgccgactcgttcataattatttcttacttaaaggctaaaaaaaaagattatgttggtatgagcccacatcactctatatctatctagaattggctctgatatcattgtaaaatcatgactatcaaattgtatcatcatatatctgttggctcccaagcccatggaaattgaaccccactctcgtttgacgggcattgagcaaatttaggagtgtcgaaagacttctttactaacttaatttgcaaatcatcataaatttttcctttgatgctagttcatgttttcaccttacatacacacaattagaatagctgcaaacgcacgtgcatgaaattagctgaaccttttaaggtatcgcgatcccgcagaatatgtagctaagcaatgaattcagaaattaaaatctagctcagaagaaaacaaaatggctgttttttttttttggtttttatctaaaggattaaacaatcaaatatgagttttgatgtttttattggattctaaaactcgagacatttttttataaaggatatactttagcatgaagcatcaattatatatctctaagatcacttctcgtaagccttgctcaatttctaccatgcttgacattgacttatacaacaccagggctcgctaaacctagttacctgattacctgaaccacttgaatcatgttatcttctaataacctggtttaaccatggctcaacccatcttgtcatgtccgaccatttctttaattttgcttgatatccttgattgtttttgcccatctgtccttaggtagtttagaacatttattgtccttgagactaagtcttcatttcgaccacttttctcgtcaattattaaatcataaaagatcatgtttttattttatttttttgtcaaacaaatttgtattcacttaaagcctcataagaggaaagttcatacaaactaaaactgaaataatacaatggcaataaagataacgataaaggctccatgagttttctaaagagatgctcaacttagagaagcttgcaatgtttgaaaagtcttttgaaaccatagcggattcgaccatggagatgaactccgcgaaatcctcgaccaactggtggtcataaacagctcgcgctaataacgcatacgagcttttggtacaatgctctacggaggaggctgcgagataagaaatattgaagaagcttcggtaaccatcactccttggaggtatggttataatgccgatcttcttcaagcttgtagatgcttggtaattacccctgaaactgagaatgtgcacttgagagagcttggtaatcagaagaggcttagacaaaatgtttgagaagtttcggtaaccatcgctccttggagacgggatcataatgccgatcttcttcaaacattcgggaaactttagcttttgagttgtctcaataatcgtgtccgagagagtttcgattactatgcatagtatactacattaaaagatcatgctttaaacagctaattaatgacgccgcatgttatcacgttttcagtttgttttttaagtttcatggtgtccaaccaagtttcgtaatatgttgcttgtttgatccacatataacgaaaaatacctaaaacatagtatataaataaatataacagttaattgatattttaataaaataatagaactaattttccaaattcttatatcaatctttcatttacagttatttttatttttctaattcttgaatcaatgtacttaattataatattttcttacggaatcagatttaaatttgaataccaactattgtaaattttgcgtccaaaacatcaaaaatatcctaaaattaaattccagaatatctaatctctttttgccgcaatgccagatcgtagacgtgaaagcttcgatgtctctaacctataaattaacaaatattattttcaatatcattgaacaaacgaaatttttgagctaaaataattaaacaattgttacccatgtgagcaatgagggatgctcctacattttttattttatcttttggtttggtcaacttctgtgttactatcagttatattttttaaaactcccgataacaattaaaatttatttaaattcttcagcaaatacacactattaattgtcttactgaatgcttagctgtgtccaacctttaaaaaatgcaatttgttttcaactctttctttatatataaacagaaactaacgttgtaagagatttataagttcacaagtcataaatacgaagcaatg

SEQ ID NO: 2758 - DNA, 3000 bp, Unknown
  misc_feature (1)..( 3000): cDNA_ID_3069588_gDNA_ID_1620588_Annot_ID_161339 3000 nt of promoter + ATG
caactttttcagccttcatcaatgttatgcatccctttatgacctttaaaatcccattcttggatttaaaccagcatcccttgttctcaagtgtccctaaggatatgagattctttgacatgcccggaatatacatgacgttagtcaacaagactgttgttccatcgtcattcaagatcctcacacttccaatccctttaacctgtaaagtagtgtcatttgccattgacacatttccagattcagaaaataccaagtcctcaaaccattcttttcttgagctcatatgagaagtacaacctgtgtcacaaatccattcttcagagcttcctttacttgctcgagcagcagcttctgaaaccatgaacacagacccaccagaaacaatactttgcgctgatgattcttcatatctaactgacttcttccttgacttgttctttttctcttggaagcactctgtcttgacatgtcccttttgtccacatctccaacatggacctttcttttctcttgcctcagatctgaccttctcttttcccttagcttgttcttctctgtaatctgacctttctctttcccttaaagacaaacgcttctcttcttcctctgtttgtctttctatttgagcaacctcaagctctttcttgtatattgcagtcattactctacccaaagttaagggttcctcgcaataatctaaagagtacttaagctgttcaagctttctagggagagacaaaagcaacatgaatgctttgtcttcatcagacacataaacatctaacttttctagatcttcaactatcctgaagaaatcttctatattctcttctacagccttgttttcactcatcttaaactcaaagagcttccttttaagagatatacgacttgatagtggatcagacaagtagagtttatctagaacacttatcatacctgcagcagtctcctctgttctgattcttcttaggatattgtctgcaacactaagtatgataacagatctggccttgttctccttctcttctcgtgaatggtctttcttgtgttcttctcttcttctttctgagcttgaagacacgaccttcaccctttctgtctcaacagcttccttcttttcttctttctcctttagagcatctgagatacccataacttcaagctgagcaagaagctttcttttccacagtgtgtaatctcctctcccgtcgaatctttcgaatctaggttcttgagaggtttcctccttaacctggagctctgataccattttgtggagattttgggtgttaaagtagcgacctttatcaccataaacccctctctttctctccattacactcgtgtgaagaaacttagaaagaaagacttgaagcagagtagaaactgagaaattgcagagaaagtaaagtgcaagagagagttttacgtgttcgggtctcagtgtgaaaccctactcacgccgggaaacttattgtcccggaatccactagaatcagtccttatatacagttggctcttactagagcttgtacatacacaactcattaactacattcaaccaaacacgccattccatctcatctactctctgcatctttgattctttgtcccctgtttttcatgttttgttcgaacacttctacaaagaacaaaacgacacagaccttttaaaggaaacaatgctgcaggcgtgcttcctcttcaacgacttgtacgagatgggcttcttgcgtatgggcctgaagttttctaactttgaatcaaaccttctgattctttgagagtcttctcttgccttctcttctcattcatgaaactcgaagacaaactctcacagtctatattcgttgtttatgttttaagttttaactaaaaatgttaaaagcgttcagtcaaggtttaggtttggtttgggcctagtcttaagatttttgtttcatgaatataaaagaaagaataaaccaaaagtaaaacctacattcaaaaaaaaaaaacgatgaaaagtccatacttgtcgtgtacgattaaacccaatgacgtgttcgtattaaaattttaaactgaaccaccaattttaaaccttacttgcgctgcatcaattttatcaacacatcaatatttcttaacattaggaaattaacttattaaacagaaattattttctatataattcatgtatgactaatcccaagatgctcactctttggtctttagtcttttacatgctttaatctttccatctttgtctctatctcgtggatatggaagaagacaaaattcttacggagacccttctatctgcggcggaagaaccacctgctcttcctttctcatccgtggaagatattcctccgatcaccaccgttggtggcttcgtcaaggagttcaacgtggaggtcaaaaagctatggtacttggcagggccagccattttcatgtctataacccaatattctctcggcgctgctactcaggtcttcgccggacacatcagcaccatcgctctcgcagcggtctccgttgaaaactcggtcatcgctggattctcatttggtgtcatggtaaattaatatccccttgttgacctttttggtttgcgtttatcattcaaatgtgctgaatttaatactattagtttgggagatatacctctaaatcattcaaaatgttttttttttttaaaccattcaaaatgttttgagctagttctaaaatatcattttcaataatataaatcaaaatgttgcaaaaaaagatatttaaaagatcaaaaataaatatgatagtaaatgtataacacaaacaaaaaaaatgtaagcacaaacgccaaaaaaaaagaacgaaatcttgtgcgatttttcaatttgtagtaagattataatagtttttattaccatataaaccatatttataagtaagatattctaagaaactttttttttttgagttgtaataataattgtgaatgtgaccattaattagcttggaatg

SEQ ID NO: 2759 - DNA, 3000 bp, Unknown
  misc_feature (1)..( 3000): cDNA_ID_2171107_gDNA_ID_1620588_Annot_ID_161350 3000 nt of promoter + ATG
cgcaacacacacatatttacaagtgcttttgtttcctttgacaattgaagttactcaattactgaaagaaaaatggaaaatggcttgctgtatcaccaacatttacggtatcaccaacatattagctttcagtttttttttctttttcttttagtttttgtgaatgatttcatattgtttaatgtttctaaaatggttatattgagttttacttacatgtttttgttttgttctaaatgtaaatcgagaaatttttgcatctttttttttttttttgtagtagtaggcatcaaatgcactttaaaccataaatggatatgaaagaggaagcaaaacgggcaagagtctcaaccttatcaatttgtaagtttttgtaaatgattctacattgtttaaagtttctaaaatggttatattgagtcttacttatatatttttgttagttgttttttttggtaggcatcaaatacactttaaaccattttttggatatgaaaaaaaagctagcatactatggatagtagaatcaattgcaagagaaagcaagaatcaaagttttgatcattcataaaatacaaaaattgaggcaagtgttttagttagtctcaaaaattgataataacatgtatgaccacaataattatagaactatttatttgtctttccaaattaaatattttgaattaccccttaaaataactagaatatttattatctttgttaattaaattaaattcaaattatatataccttttatttatattttaaaaattttaaatcaaaattatcattcatttacccaatatcgctataaatagttaccaaattttgttgacttatatgctctgtaaaacaaaacttatttttttttctgatttttagtataaggaagctcaattcttagtttctgaagaaaacatgatcaacattagttcacacatattaggaaattgtttaattgtttttttatcattacttacatttaatgacctttccaatcattgttgttaaacctataattggtttctaaattcttttatatgagtgacatattaaattttaattttttttatataagagtatttgagaagtcatcatgtacagtcttttatctatatagacactatatccttaattatatttaaaatttaggttgtttaattttttctatcatttatttaatgaccttttcaataattgttttaaaacctataagtcaaaattattgaaaggccctataatacaaattacaataatctatgttatatacacattaaaaaacaatttaggaccaaataatacattataaaagactttattatattgatgcaaaaaaattagattctttaatatgagtcacaaattgaaatgatttaatatttatgttttccaagtttatcttttcttaaattttaagattttttatatgagagtatatgagaagccatcatgtgcggtcttttatctatatacattgtatccttaattatattttaaatttaggtttaattatatattttatcaagattaaataaaatgtatctttttacaaaatatgagacaaacattttttctatatttttctctagattgggagtgtagttacagttacttttgggtaaacggttaatgtatagtggtgtgcttgacatgctaaaaatgtgtagaaatttcttcagtatatattatttattttgaaagtaaaaatgtgatgatctcatattgacatgctaattgaaatttaattttatatttattaataattattatttacaccacataattcatataaattagaacaaaagaaaaaaaaatgtagtgagttcaaaatcaacaaaacaacacttatttcaagctagccatattccataatgaaattgaaatttatatttaaaataaaattaatttgctctctttaattgaaagtaattccaaatatttttttgagagctttacaaattattcattataaacaacaaatttatgtaatatgatatacacaataatgatttttttaaaagaactaaacttattttaatatatataaattcaaaaaaattatttaaacaaaataacaatgtaaggttcataatctaaaattaaagtttagaattaagcttttacaataatatttttaaactcataacaacaacaaagaaaaaaacttaaaagtaaacaaaacaatatgaaatatgagaatggaaataaattgtgggagttaatttttaatttattgtgtgttgaataaagtagagtggaaaaatataattgatacatatttttatgatttcagttttatattaaactgtgtgttcaatttttattatttattaagaattttaaaaaaaaaacttatattgccaagtggaccaataaggaaagagtgaaaccttacttttatatatacatgattcctaattttttggtttcattttttaaaggttacctaaagtatagctattattgtggtcattacatcacatataaataataacaattgttatataatcttaaattaattatatataaaaattatggtttcaatttatcaaagcttataacatttaacttagagatatattttccctacatcgcatttggctaaacaaatttgcatgttttggtggatcaactacacaaatattgcagtcgtaaaacatcaactctatctttctcggctaccgagtaaaattttattctatctgaagccatgactaatacaattaatatcgttaatttaaacaattatagtatttattactaatataaaataaaattcgtataatgagattatcttaatagaattataaaataaactccttctataagaataatcctttttcttttagaatatattaacaaattggattaggttaacatacaatacagatatccagagacttatatatataggcaatagggtttaacaatggagcaaacccacattataaagttttcttgcgcatctttagcatccaataaattattgaagaagccatg

SEQ ID NO: 2760 - DNA, 3000 bp, Unknown
  misc_feature (1)..( 3000): cDNA_ID_1537188_gDNA_ID_1620589_Annot_ID_161363 3000 nt of promoter + ATG
tgcatcttgtattttaattaattaatactatttttaaaaaatcaatcaaagcatgaatactcatggaaaaaaatctatgatcaagtccttagttgagtgattttcacaatttaagggtcggaaaaatattttataacgtctatatcaatatgtgatctgcttttatacaaaaaaaatatataatggattagttaaaacatggtggagtcaattatattaaaacattactgataaatatgctttttaactcaaacatagcaaatcaaaaatagtaaaccttcacatacaaatatttatacatttataaacgcatgaatatacatttttataaatattaaaaggtttctgagtttaattcatgattaattataactaaagatactaaaattcataagtagattgaagtagctcaattgaacaaatctcagcaaaatacatagtatatatgagatgtaaattcgattgttcaaatgtcttttcattaggacctgtgtaaaaagttttcgagagaagaattatagcgaggtttgtttcaagtttcaacaagaaaaaacagaaaagaatcatgtatataaatcaatcaagtactgataatatagaagtattattggaaacaaacaagaagagaagtaaattcaaagacaaaatgatttagaattcttggagaaggaaaaagaagaagacagcgtggagaaagagcccagaatgttgaacgtcgtgtgggcttcactctgcaccaccaccccaaaaccctagttcataccctatcctataatttatactcaaaattttctcatttcttctattatttatcaccattcatatggaagtatatatttaatgaagaattttcggatctatagatcattatatgtaaaatcagtttttgataaaacatgtgacagtttcacaaaaatagttcatctttcacaaaaatagtactcgaatccggtagcattttagtatcctactatttagtttttccactccttttcattatatatataatgatataagtctttttacctctttttcataagtctttttaactctttttttctttaaaaatgattatatgcacatctacttgataaactggcggatggtaaacttgagttaggtttgagaattttcactaattattttaggatttgaatcttctttagtatgagacaattaagctaacacactcgaagatatattcagatcataatcaaaatttatccgttggatatgtatgaatagattaaataaaagagagaatctcttcggtgcacttgagacaaatctataacatagaaaatcttgattagattaaaaactagattaaagaaggaaagaaaaacaagaaagtgggtttggctatacgaaacgagtgggattattaatgattaaaagtaaaagtctttttggtctctggtcggtcgacaatccgtgtgtcctgtggtcagtgtttgttttttattcttttggttaattttcgagtattattatgctttccactgaaaaaacaaaaacattaagcagccaaatgaaattcttttaacgcgttgtttcagaacctgatgaaaaaacaataatcatgacctctttcttcttcccctttaaatgcatgtcaaattgtgtaggagtgtttgattatataaattaaatctactttagtcttctcttctttgtagaattgtagagtcgtggtataaactcgaaaatttcttattatacttatagaaattaggcagacgaaatgctcttgatttgcttacaatcttagattaggtttaacccaagataaaaaaaaactttgttttgatgaagaaaaacaccttagttacaattttggacatcatcttttattttcacagttagcatctgagacttttttttcttttcttaaatagagttcttagacaatatcttttgggtccctgatcatgtcaaatgccaaaaaaataaataagtatacatgattgtgtctatttgaccattctaacttctaaaagtttcaaatgaaataactttgtcaactattatttttgcctatgaattaggtgctgaccagaatcatcttgctaaaatcatgattttctactattgcatattattcttgatcgcatttcacagatcttaatatatacgaaaataactgtatatattatcaactgttacgattaatatataaccatgcatatcgaaatattttgaattagtattttttttgctaaataatattttgatatagtggtggcgtggtattcctcatttacaaatcgcatgaactttatcctaaatacgattaacttaagtagaaaaggcacaaaaatcttctattcattaacatgaaatcaattcttaagaacataaataaataataatattcataggaagccaaatccatcagagaaatccacaagatgatgacagctccccatttagaagtcgtaaaagaaaagcaaagaagatgtgcagcacttgcagtttcatttgttttgttagatataccagaaaaaaaaaaagagtggtcccataaaaacctgtaatatataacattttaatcaaagaaaatgatagatttttttattaaacaggaaaaaccactaacttttaattaaaaaatttggaatacagcaatacatcaaaaatccattaacggtacattatagttgaaaataaattcaggttacataatattttttgcgtaatcactatactattctgccattttatatggaactaagttcatacgttatttctcacaattctccttgatgtgatcaaagataatggcggtctgattgtataacccggtgaaaaaggttttttggaaagaattctttaatattaaaatatcaaataaattttgtttaaaaattaaggacacattatatagcactatatatacacatgtgtatgcattatcaaatgggatgtttgtgaccttttgtctcttcttctctaaaattctctttctcccaaaaactaaaaaaccaaaaaaaccaaaaa

SEQ ID NO: 2761 - DNA, 3000 bp, Unknown
  misc_feature (1)..( 3000): cDNA_ID_3069616_gDNA_ID_1620589_Annot_ID_161381 3000 nt of promoter + ATG
ccagagttcatgagaaaaatagtctgtcagataatattgatccaataaaaccatgcacatgtcagttttcccaaaatatttacatgtgtagtaacaacttttgtaattaaaaacgtcaccaaatgaaacgttaataatgacgaatactttaccacatatttgttctcgatggagaggagataactatggtcccatgaagaaggttgatagttgcccgagcgtcgacggaggtcaagaggattagcatccggcatcgtttttgtcatggatttggatatgaaacgacgaggacgttgaagacgaaaattatggatacatgcattttggtaaataggagctgaacctatacacaaagtagccattgaattagtataagattctcttctttctggctgaatatattggagaacacatacgtttataactttatatagacagagtcagaatgatgacttagaacactatttcggtacatgattttgtttctgttttttttttttttcaataggttgtccaatttggtttaacttgaagtttatttttgtgtatgtgccaactacaatatcttatttaccaaatttatttctattttcaccatataaaattataaatcatagtcaattatttaaagatatctattattatatctttatttacaagattaccagataaatagttatttttcaagtatattcaattaaatagtgtgacaaactttacccaattttgctgcatgtcaatactcttttcgcaatgtctaatatccactttttgtaactgaaatttatctaattaaaatcttctacatgattaaatatagaagttataaaaactgcgtacaaagattaagtgatggagacagttcaagtttgattacaagacagttcaatctgatggctatgagttttgttggcagacatgccaaaaaaaattaggttgtcgtcgatttcatttgttctttaggagaaaaacattgataatcgaagaaaaaaagtttgtaactccgttttaatgattcaaataacttatatgtgtagaggattttgaaaaaacaatttccatattattttaatacgaatttacgtgttggtttttaaatgttgtagagagatataattaaataatatagaagtaaacttatttgattcaacttaataaaaaaagttagtttgaaaaaaaggttatgtgattctcttgttttgtgatcgtaatgtacacaaaacggtttaagtatttttgcaaacaatatctatgattgatgagatatatcagtgattaactaataaaagtgagaaaaagaacaatatttggattcacagttcacacataatggtttaattcttttattaattttttttttttttctaaacaaccagaatcatacttcaatcaattcaaaaactcttttcaatttactcatttcagaactatgttatcctattgtaaaaaatatagttctaatgtatactcaataagccgtatgaaggaaaattataggctttattctcaaaatcacgctattgtatttttaaatttgataaaattcatcaaaaaaaatttaacaatatagtctacgctactgtgttttatatttgataaaattcatcaaaaattttagcaaaaatgaaaagcaaacaaataaaaactaactaacttactttcatcccaatgtagtagaaattcatgacatatgaagaatcattaaagaccttttagatccctttgaatttggcaggaattcgaagccacatcgtacatttgatatctccaatatatcacgaatcgtctagtttttttgtggattagtttggatatgtcttgttaggatatgtattatcttttcctttttcaataaaccctactgaatctagggttatgattccacaaaaagatctataagttttttctactccaaagacaattggttttggctcatgggattcttcccattagagagtatcatatgtattctgaagtgagtaaacaactttagaagatggcaaacaattttaatgtattgaaaaacaatatttaatcgctttaaccattttttgtttctccaaacgagtttttatttttgcgctaactaataaaaacttatttagatgaacaatgaatcttaatattgctatattaaaaaccattaaaagaatacatacgtataaaagaaatatctcttatattataagcatgtgatatttttgtacagaccataacaacataaataattatatagaatcccaagaaattggattacacgtatacacattacatacaacagaaatttaaatgtatctcgatacatttttatttttttaaaaggtataatttcttcaataatttacatatagagaaataagtcagttctctttgtatttggttctttcttgattgaatgaatacaagtattttgcacacaaaaaaaaaagagaaataacgtagaagaaataaattatgttttggtccacacttaaattatatgataagatattctaatgagattagaaaactatctacatgaataaatcatacgttccacaataattaaatgaaaataaataataaaattaaccaaaatagttgaaattgaatcttgcctacatgattcaatgttcttttaattttgaatttatttatttatttaactaagcctctagatataaagcaaagttatataaccatgattttggggttgttaaaagaagttgacgaaaattgaggaatgtcgaataataatgatgaaaaagatatttggcttagcacccataataatgatgtgactatccaatttcagtgtctcaccgaaacggcgttttataaggccgtgggccaatggcctgtttaaagccaactgtaatgtgtaattcgattcaattaaaacgacgtcgttgctttcaaatttagataaccaatacgctgccgttttagcaagtctctctcagataaataaaaaaaattctccgactaaacggtggataatgcagtgaagggacgacgatg

SEQ ID NO: 2762 - DNA, 3000 bp, Unknown
  misc_feature (1)..( 3000): cDNA_ID_2171213_gDNA_ID_1620589_Annot_ID_161383 3000 nt of promoter + ATG
ttccttgtcacatttccagcaatttcttcccattttaagatgaagatctgtcaaagtatcatttatttctatctcaaaatgatacgaaaccccaagtttttgcagatcatcgatgagctctaattgctcgagacggctcttcttctcatcatcaagcatgctcttcacttttttcttcaacacatctctagttattacttctgtttcactctgtatatacatacatatgtttaaacatgcacgtagtaacaacttgttaataaaagaattcataaataaaagtgaaacttaggtgcaacaataaaaaattatgaaaatatagtacaaaactttaccgcatatttattctcgatggagaggagataacaatggttccacggtgaaggttgatagtttccggagcgtcgactgagttcaacaagagtagtatccggcgtcgttttggtcatggacttgcatacgaaacggtgaggacgtcgaagacgaaaatggtgggtgagggtattttggtaaataagagctgaacttatacgtaaagttgccattgatttagtagactattctcttattcgtggctgaatacatgcactagacaacacatatggttatatagacaaacggtagaagaaaatattttatataattaggagatcaaaagatctaagggtgtaaaatatttttcaattaatagctaaaaaagcttttataatatattgaccgcaaaaatgcttaatctatatctgttacaatattttcaacttttatacattataatcatttcaacttttaaattattaaataatggtacaaccgtacaactaatctaactaaatctaaatgaaaaaaatatcatttaactcatcaattattatttttttgatgatttaaaacatgaactttggatctgataattgtacacatttgtataattgtcatttaaatcacacacttctttttctccaaaagctccttgtgtaattatacccacgaggccactatatgtatgtaaatttgatatcatagcttatttgattagataatgtccaagcctaaatgatttgtgtacctcgtgattctcgtgttatatttggtgacgttattatgtacaaaaaaattatactaatggccccttcaggtagaacagccattcgcacaaaaagtgaagtcaaacaaaatgtatcttctccaaattctaaatgttatgtgtatctcgtgatcgtcgtgttatgttggcaaacaaacatggcccttttaggtagagttagtcgtatggaaataaattctccattcgaagcttggagaaagtataaaataaagtatataatgttcacttggcttaacaatcgccactcgttcactgcacattatcttaatttatatcaaattactattgaaagataatagaagataacgtgcgtgtatctccaatatataagacgtcacaactcatcacttgctctgtcttattagaaggaagacaagaagagttctttgtgtcgtttgtttatgcatcaaattttgcagcagaaagaaaggatttgtggagtgatattaaatatcatcatgattcccctttgttctataacaaagcttggttaatatgtggagactttaatgagatattagaaggagaggaccattcactctatgaatcatctccattcgttctccaagggatgagagattttcaagacttaatcagacattgtgaattaacagatatgagctaccaaggccagagatacacatggtgtaacaagagaaaggaaggagtaatatgtaagaagctggatagggtactgattagcaagcaatggatgcaatagtatgaacagtcctacagcgtctttgaatcaggcggttgttcagatcacctaagatgtcgattctatattatggagcaggaacaacgagtcaagaggccttttaaatttataaatgctttaatttcgtattcggatttcagaagtgagacagaagagctttggaagacaactcagcctctctttcattctacctcagccatgcaccgcttatcaaaaaaattaaaaggtctgaagccacatttcagaaagatggggaagcagttacttggtgatatctcaaaaaaagcaaaagaagcctataaaactttatgtgaaaagcaagcagaaactatgacaaggccatcttcacaggcagtggtagctgaagcggacgcatatgagaagtggttaaggctgtcgggtattgaggaaagctaccttaggcaaaaagcaaaactgcattggatgaagataggagaccaaaataataaaactttctacaatgctgcaaagattcgggaggttcgtaacaatgttagagagattaagtgtgatgatggacatattgcatcaaatcagcagcaaataaaagcagaggcagttcgatacttcagagactttttaacgctcaaaccgccagactacgtggattggtcgcgggaggaactggaaactctactggattatagatgtgatgagaatgacaagacaagctcacactagaagtcactgcagaggaggtgcggaaagttctcttctcaatgccttcaaataaatccccaggccctgacggatatacttgtgagttctttaacgagacatggtcgatagtaggaaacgattttgtggtagccatccaatctttttttaagacaggcttcctacccaaaggagtaaactccactattttggccttgatacccaagagaaaagaagctgtgatgatgaaggactatagaccgatatcatgctgtaatgttctctataaggtgatatcgaagattcttgcaaacagactcaaaatcattcttcccaagttcatctcttcaaatcaatctgcctttgtgaaagatagactattaatgaaaaatctcctcctagcaacagagattataaaggattaccacaaggaaacagtttctcctcgatgtgccatgaaaattgacatatcaaaagcttttgactcagtccaatg

SEQ ID NO: 2763 - DNA, 3000 bp, Unknown
  misc_feature (1)..( 3000): cDNA_ID_2171209_gDNA_ID_1620589_Annot_ID_161382 3000 nt of promoter + ATG
ctcaggaactatgaatacgaatttttgaaggtattatcactcacaggagcgtaagggagaagaaagagccatagtatatacacagcttcactagtccatagaagataccgaacaattctccttatagaatcatcttcaacctctaccgtcgccgtctccggtttccggcgagcacagcataagaaggaactgtctcgtgttcgtaatttgaaacgattcgtagactgccatggattgtagcagcgatcgactgtggagatttctctactccgaagaaaatggcggcgaatttgtggcgatttgatttgggaactgtggagacggtgacggagatatgtcaacgtcggtgaggttatcagaatcatcgtcgtcccttcactgcattatccaccgtttagtcggagaattttttttatttatctgagagagacttgctaaaacggcagcgtattggttatctaaatttgaaagcaacgacgtcgttttaattgaatcgaattacacattacagttggctttaaacaggccattggcccacggccttataaaacgccgtttcggtgagacactgaaattggatagtcacatcattattatgggtgctaagccaaatatctttttcatcattattattcgacattcctcaattttcgtcaacttcttttaacaaccccaaaatcatggttatataactttgctttatatctagaggcttagttaaataaataaataaattcaaaattaaaagaacattgaatcatgtaggcaagattcaatttcaactattttggttaattttattatttattttcatttaattattgtggaacgtatgatttattcatgtagatagttttctaatctcattagaatatcttatcatataatttaagtgtggaccaaaacataatttatttcttctacgttatttctcttttttttttgtgtgcaaaatacttgtattcattcaatcaagaaagaaccaaatacaaagagaactgacttatttctctatatgtaaattattgaagaaattataccttttaaaaaaataaaaatgtatcgagatacatttaaatttctgttgtatgtaatgtgtatacgtgtaatccaatttcttgggattctatataattatttatgttgttatggtctgtacaaaaatatcacatgcttataatataagagatatttcttttatacgtatgtattcttttaatggtttttaatatagcaatattaagattcattgttcatctaaataagtttttattagttagcgcaaaaataaaaactcgtttggagaaacaaaaaatggttaaagcgattaaatattgtttttcaatacattaaaattgtttgccatcttctaaagttgtttactcacttcagaatacatatgatactctctaatgggaagaatcccatgagccaaaaccaattgtctttggagtagaaaaaacttatagatctttttgtggaatcataaccctagattcagtagggtttattgaaaaaggaaaagataatacatatcctaacaagacatatccaaactaatccacaaaaaaactagacgattcgtgatatattggagatatcaaatgtacgatgtggcttcgaattcctgccaaattcaaagggatctaaaaggtctttaatgattcttcatatgtcatgaatttctactacattgggatgaaagtaagttagttagtttttatttgtttgcttttcatttttgctaaaatttttgatgaattttatcaaatataaaacacagtagcgtagactatattgttaaattttttttgatgaattttatcaaatttaaaaatacaatagcgtgattttgagaataaagcctataattttccttcatacggcttattgagtatacattagaactatattttttacaataggataacatagttctgaaatgagtaaattgaaaagagtttttgaattgattgaagtatgattctggttgtttagaaaaaaaaaaaaaattaataaaagaattaaaccattatgtgtgaactgtgaatccaaatattgttctttttctcacttttattagttaatcactgatatatctcatcaatcatagatattgtttgcaaaaatacttaaaccgttttgtgtacattacgatcacaaaacaagagaatcacataacctttttttcaaactaactttttttattaagttgaatcaaataagtttacttctatattatttaattatatctctctacaacatttaaaaaccaacacgtaaattcgtattaaaataatatggaaattgttttttcaaaatcctctacacatataagttatttgaatcattaaaacggagttacaaactttttttcttcgattatcaatgtttttctcctaaagaacaaatgaaatcgacgacaacctaattttttttggcatgtctgccaacaaaactcatagccatcagattgaactgtcttgtaatcaaacttgaactgtctccatcacttaatctttgtacgcagtttttataacttctatatttaatcatgtagaagattttaattagataaatttcagttacaaaaagtggatattagacattgcgaaaagagtattgacatgcagcaaaattgggtaaagtttgtcacactatttaattgaatatacttgaaaaataactatttatctggtaatcttgtaaataaagatataataatagatatctttaaataattgactatgatttataattttatatggtgaaaatagaaataaatttggtaaataagatattgtagttggcacatacacaaaaataaacttcaagttaaaccaaattggacaacctattgaaaaaaaaaaaaaacagaaacaaaatcatgtaccgaaatagtgttctaagtcatcattctgactctgtctatataaagttataaacgtatgtgttctccaatatattcagccagaaagaagagaatcttatactaattca

SEQ ID NO: 2764 - DNA, 3000 bp, Unknown
  misc_feature (1)..( 3000): cDNA_ID_3069612_gDNA_ID_1620589_Annot_ID_161385 3000 nt of promoter + ATG
ttccaacaagggcaggaaatctgaggaggtcattcttcttgttagcagcgggagccctaagtagcgaactggaagagagccatactcgaaagggaattgttgtaggatctcatctctctggtgctcttgtaaaccagccatatataaggtggacttttgaagacttatctttagccccgagtgaatagcaaagtcttcaaacacttctaaagtattctcaatggattttttgtttccctcaataaacaccattaaatcatcagcaaaacagaggtgagttaagtttaacgtcttacaattcgggtggtagtctattcttttatcacttgcagccttgtctattttcttggacaaaacattcatgcatatgacgaacaatagggactaagagagcagccctgtctgaatcctctctcactaccaaaatagcctgcgagttcaccgttcacttgtaccgagaaagacgctgtagagatgcatacctttatccaattaatgtagactccggaaaatctagagcttgtagagttgtggtgagaaacccccattggactgagtcaaaagcttttgatatgtcaattttcatggcacatcgaggagaaactgtttccttgtggtaatcctttataatctctgttgctaggaggagatttttcattaatagtctatctttcacaaaggcagattgatttgaagagatgaacttgggaagaatgattttgagtctgtttgcaagaatcttcgatatcaccttatagagaacattacagcatgatatcggtctatagtccttcatcatcacagcttcttttctcttgggtatcaaggccaaaatagtggagtttactcctttgggtaggaagcctgtcttaaaaaaagattggatggctaccacaaaatcgtttcctactatcgaccatgtctcgttaaagaactcacaagtatatccgtcagggcctggggatttatttgaaggcattgagaagagaactttccgcacctcctctgcagtgacttctagtgtgagcttgtcttgtcattctcatcacatctataatccagtagagtttccagttcctcccgcgaccaatccacgtagtctggcggtttgagcgttaaaaagtctctgaagtatcgaactgcctctgcttttatttgctgctgatttgatgcaatatgtccatcatcacacttaatctctctaacattgttacgaacctcccgaatctttgcagcattgtagaaagttttattattttggtctcctatcttcatccaatgcagttttgctttttgcctaaggtagctttcctcaatacccgacagccttaaccacttctcatatgcgtccgcttcagctaccactgcctgtgaagatggccttgtcatagtttctgcttgcttttcacataaagttttataggcttcttttgctttttttgagatatcaccaagtaactgcttccccatctttctgaaatgtggcttcagaccttttaatttttttgataagcggtgcatggctgaggtagaatgaaagagaggctgagttgtcttccaaagctcttctgtctcacttctgaaatccgaatacgaaattaaagcatttataaatttaaaaggcctcttgactcgttgttcctgctccataatatagaatcgacatcttaggtgatctgaacaaccgcctgattcaaagacgctgtaggactgttcatactattgcatccattgcttgctaatcagtaccctatccagcttcttacatattactccttcctttctcttgttacaccatgtgtatctctggccttggtagctcatatctgttaattcacaatgtctgattaagtcttgaaaatctctcatcccttggagaacgaatggagatgattcatagagtgaatggtcctctccttctaatatctcattaaagtctccacatattaaccaagctttgttatagaacaaaggggaatcatgatgatatttaatatcactccacaaatcctttctttctgctgcaaaatttgatgcataaacaaacgacacaaagaactcttcttgtcttccttctaataagacagagcaagtgatgagttgtgacgtcttatatattggagatacacgcacgttatcttctattatctttcaatagtaatttgatataaattaagataatgtgcagtgaacgagtggcgattgttaagccaagtgaacattatatactttattttatactttctccaagcttcgaatggagaatttatttccatacgactaactctacctaaaagggccatgtttgtttgccaacataacacgacgatcacgagatacacataacatttagaatttggagaagatacattttgtttgacttcactttttgtgcgaatggctgttctacctgaaggggccattagtataatttttttgtacataataacgtcaccaaatataacacgagaatcacgaggtacacaaatcatttaggcttggacattatctaatcaaataagctatgatatcaaatttacatacatatagtggcctcgtgggtataattacacaaggagcttttggagaaaaagaagtgtgtgatttaaatgacaattatacaaatgtgtacaattatcagatccaaagttcatgttttaaatcatcaaaaaaataataattgatgagttaaatgatatttttttcatttagatttagttagattagttgtacggttgtaccattatttaataatttaaaagttgaaatgattataatgtataaaagttgaaaatattgtaacagatatagattaagcatttttgcggtcaatatattataaaagcttttttagctattaattgaaaaatattttacacccttagatcttttgatctcctaattatataaaatattttcttctaccgtttgtctatataaccatatgtgttgtctagtgcatgtattcagccacgaataagagaatagtctactaaatca

SEQ ID NO: 2765 - DNA, 3000 bp, Unknown
  misc_feature (1)..( 3000): cDNA_ID_2991451_gDNA_ID_1620589_Annot_ID_161380 3000 nt of promoter + ATG
cttgattgaatgaatacaagtattttgcacacaaaaaaaaaagagaaataacgtagaagaaataaattatgttttggtccacacttaaattatatgataagatattctaatgagattagaaaactatctacatgaataaatcatacgttccacaataattaaatgaaaataaataataaaattaaccaaaatagttgaaattgaatcttgcctacatgattcaatgttcttttaattttgaatttatttatttatttaactaagcctctagatataaagcaaagttatataaccatgattttggggttgttaaaagaagttgacgaaaattgaggaatgtcgaataataatgatgaaaaagatatttggcttagcacccataataatgatgtgactatccaatttcagtgtctcaccgaaacggcgttttataaggccgtgggccaatggcctgtttaaagccaactgtaatgtgtaattcgattcaattaaaacgacgtcgttgctttcaaatttagataaccaatacgctgccgttttagcaagtctctctcagataaataaaaaaaattctccgactaaacggtggataatgcagtgaagggacgacgatgattctgataacctcaccgacgttgacatatctccgtcaccgtctccacagttcccaaatcaaatcgccacaaattcgccgccattttcttcggagtagagaaatctccacagtcgatcgctgctacaatccatggcagtctacgaatcgtttcaaattacgaacacgagacagttccttcttatgctgtgctcgccggaaaccggagacggcgacggtagaggttgaagatgattctataaggagaattgttcggtatcttctatggactagtgaagctgtgtatatactatggctctttcttctcccttacgctcctgtgagtgataataccttcaaaaattcgtattcatagttcctgagattgagacattgatatatctgtgtgaatgtttctaaggtttatgtagaatcaccacattgattaatcttgaaagtatttaggataattttaggaattgagaaccatttcaatttctctgcttgaatgttttgagaatctagtaggtttgttctttttgaatcatactcatagttcctgatatagccatagttctatgtggctactaatttatctatggattatgtgaatgtttggaaggtttatgtagcatcacattgatgaatcttcaaaagtaatttggattttggatgattttaggaatgagaactttttcaatttctctgcttgaatgctttgagaatcgaatagttttgttgttatcttcaacttattactgagatttgctcttctctctatagattatcatgatatgtgcttgtggttagcattatcttagattgtgtaatcttgtatggttgcttaattagaaaataatctctatgatcaacagggagatccagtttgggcaattagttcagagacagtgaattctcttttgggactttctctgaatttcttctttgtcttgcctcttacaaacgccggtatgttcagccttaagatatatcgatttcgtttacctgtttgatctttgatgaaagtttcttgcttatggactttgtgacagaacagctggtattcacttcttacaagctcctgttcttcacccggtttgtacctttgagctgaacaggtttttgtgtattagtgaaagtaaatcgttctgaaattgtttttttttttttaaattcaacagatggctgaagggttattcaactttgtaatagcttggacactcatgtttgctccattgctatacacagaccgaaagagaaatcgatacaaaagctctcttgacgtcttatggagtctcatgatgttccttacaaacagtaaatacaactttagtttttatttaagaagttcagtttctctggaaagcaaccctctaaactagattattggttctgttgatctcatgttgcaaacagcgtttctaatcccatacatggctttacggctcaatgacgctgacccagatgataaaccaagcaaaaggtctcaacttggtgaagtgatgaccaaaggtgcaccaatagttggtctgaccggagctacggtgtgtctgatatcagcattgtggtctctctacggtcgagcagatggtgatttcggtggaatcatggacagatggcagtatctgattggttatttgggatcggagagactagcttacgcgtttatatgggatatatgtctgtacacaatctttcagccatggttgattggagagaacctgcaaaatgtgaagaagaacaagattgaattggtgaagtatctaaggtttgttcctgtttttggtttacttgcatatcatttgtttctcaatctcgaagatgaatcaatttaatttgttagtatacacacatattgtcgttgtacttataacaaatgtaattatattatggaaattttgttatgtcatttttagaaaattctatcatttgtatcggtaatgttttttccacatttgaatttatatttcacgaaggaatagtgaaaactctataaaattggtaaattgcaagaaatgaatcgcaaaagtaaagtcctgaccgaaacagcataaacgtcgtgggccaaaaggcccgttaaagcccatttaagaagggtatggttccaattaaataaagacgtcgtcgtttgctctcaataaagaaaagagacatttcgccattagatcctcttttttttcttcgtaggtcgaacgaaattttgtgtttcgttgaggagaaaattgagccgtgtttgtgttgaggtaagacccaatttccgatttgattgttggtctgtttatcttttgatagaaatggtaatttagattcgcctaattgatcatctcctgagaattgggctctggaaattgattttacgatctcgttataattatgctgtaattttgttgttggtgttgttgaagatg

SEQ ID NO: 2766 - DNA, 3000 bp, Unknown
  misc_feature (1)..( 3000): cDNA_ID_2171164_gDNA_ID_1620589_Annot_ID_161369 3000 nt of promoter + ATG
aacagcatacctttaacggagacgttattattacctaacggtaacggaaaatgtttctccgcttggtgttttggtataactaaacggtttagtttcccgacgtcacttggcgttaccgttttctcaaacagtaactccgccgttttaaaccccgtcataaccaccatcgaagccaaagcaaacgccgtcgtctcttttccgttaccgtcacggttacgtttcctttggtctaactcttctttgtaagtgtgttttctcaacatatctacgatctctgatttcgaatgcgcgtttaagaactcaacctcttcttcgaacgtcgtgtctttgaaattagtaacggcatcgcggccacggaaacggtgagccgcgacgtcgtaagcacgagctgcttcgtcttcctcgttgaaagtaccaagccacacgcgttgatgtttctcgtaaatctgagctccccatcttccatttggttgaggaacaacacctttgaatcttgaagaaggaagctttcttgattcggcttcgacttcgacttcgacaccgttctctgaatcaagtaccacgcttgttccgcttcccattctatatagtaaactcgccggagacgatgactttctcgccggaatggaatctgtagttgtagagctctcgtctacgctactcatggcatccatgttatgaaacgaaataagaaactgagagaaaatcacaagaaaattgtgaaatcttgagagattagtaatgtgaatgtatatgtgtgaacgtgtgtgaatgaatgtgtgtatatatagagagacaaggggaaataagaaacatcaagtgtgcatgtatgttattaaaaaaaaaagttccgtcctttttattacttgtagtgtgttttaaggagatggtataatatatgggtaggtgtatcggaataatatgggtttgtgtgtgtatatgttgtgggtcaacttaaatacaaaggaaggttcatgcaaaagataaagaatacttaaaaaaagaaggttaaattcgcatttccatattaggtttatgtttcaattaaacaaataattatatataaaataaattaactcaatcaatatatatctacgatgcatatattaaaactatagctaaaagtacccccaaaaaatcatgaatctaaatttattttatattttatggttattacttattaatcagcaaaacttgtttgatcttaagtttctttaatttttattttttattttatgattgctctatatataccattcctttcactgtttgataccgattatcaccaaactttttttatgatattcacgacgaaaaaaggtgatatgaatatgttgtgggctgcatggggaagtggggtcggcaagtggaccataagatataaaagagattcacatgataaatagaatattatttagttaagttcattccccctgatgttatatacaatttgttaatttacaagcatggtgattaaaataatataatgattagcaaattgttgtaaaagaaaataaataaaaaagttggagctgaaggaattcgatctattttcttactatagagatgcaaattaactgttacgatattattcctttctcactaaaaattaatatgtttttctccaaatctcaatgaattttgttccgtgaggatctttttgcaagcatgaatccttcatgtatatacaaatgcaatggttcaatgctcgagatcataccttttcgttattctatcttttttgtatacatagcatcagatccgtgcttacataaagagaaaataaatcatcgtctatattcaactttttggtctatatatatatatatatatatacacacacataaatttatgtatataacaattacatatattataatgagcacaaattttagtattaaaacatatttttaaattttaggcaacactattcatctctatttttagagcaaaatataaggaaaaagccaaaaaaatcccccttttttatttggatgtttaataacattatttttgattgaaaaaaatatatataattacattgtgcgatttaatactcaaaaaataaaatgttgttactttcatacacatgatttcataaccaaaaacaatattctaattttagctttagagttgaattaactattaatttgtaaataaaatagcaatcactgtttaaaaataaaatttaatttttattataaattgttttactacaataattttattttataaatttcagaaaataaattagagaaaatatgaaaaagatattttcttagtgaataaaaatatgaagtatatattaatatgattttttttccccaaattttctttaattttttattttattttctacttatcaggattttttaaacttttaatataaaatataccgctttaatagttaccgattataaaagcgaatatcaaaaaatttatttaaaaagttacttttaactttttttgtatagtattaccttatttagtaaaagtttactgatgaattaaaaaaataaaaacttagtatagcttcgtatcatcgatcaaaaacgtgataggtggaaaataaattttataagctttgcttacgtcatcttactttccatatttaggtcggtcgcttgtatggccaaatcccatataacaataattttaatactattacaggtaataacgatcatatgtcaacactcaacagtaccaccctttgtttttctttttctcaagtgtacttttataaaacaagctattatcaccttttttttttctttatcaacagctaatatcactttttgaaactagttttaacaaatacggaatataactctatgaaacaaagaaatgagaaatgtcatgtttccttatgaaattgggttccatttaagagtacaaacagaaacataatctgaagacaaattaagaaaaagaaaaaacttccaagatgatggggaatggtggattaatagaagtaggaacaggaacccaattattcaaatg

SEQ ID NO: 2767 - DNA, 3000 bp, Unknown
  misc_feature (1)..( 3000): cDNA_ID_3069624_gDNA_ID_1620589_Annot_ID_161373 3000 nt of
gtctgatttacctgaagaactcctagatttaattgcaaaccgttattcctccaacattgacgtcctacgtatccgtagcacctgtaaatcctggcgttctgcggttgcgatgtctaaagagcgtcttcagtttcgctttgaacgctaccttcctacctccaacaagaagataaaggctcatctctctcccaccactttcttccgtataactctcccttcttcatgtcctaacaaaggatggctagtaagaactagacaagcctccaaaatgtatcgtaagattactctcttgtgtcctctctctggcgagcgcatcacccgttcccaccaaaccctagaccttttgaaggttggcgtttcagagattcgccaatcttacgagattcaaatattcgatggattgaaggacgaaaagataccattagattcagagatattctctaattatatcaagaatagtgacaaaataccatcaggtgtattctttagagttgctttcctagacaatattttttttgcagtcaattaccacgataataaaatatggtgttgtaagactagagaaggaagtagaagttggacaaaaattaaaaaccaagtcgaagatttctcggacattatacttcacatgggacgtatctatgccgtggacttaaaaggagcaatttggtggattagtttatcacagcttaccattgttcaacagacatcttcaactccgttggactactataaatatgatagttgccaagacacgaggctcgtggaatattgtggagatctatgcattgttcatgaacttagcataactcgaaatcatatccagaggaccgttggttttaaggtttataagatggacgaggatttggcaaaatgggttgaggttagttgcttgggagacaacacactcattgttgcttgcaacagttgttttactgtcgtagcctctgagtaccatggatgtttgaagaattctatttacttctcttattatgatgtcaagaaggccgaaaatataaaagtgttcaagcttgatgatggtagtatcacccagaggactgatatttcttctcagagttgttttcacatgttctctcttcccttcctcaactattaattacctttaatttaaaaatcttgattattaaattaaagatttttttatttaatttaagtatatttcaaatatgaatttaatgcatatctatgttacttataattaacagaaaatttaattaaataaaaactaattaaattaataaattaaatttaaaatcatgaaaataatattgtattttttttctcaggaataatactataatttaacttttcacaaaatgttttttgaaacgatcatatttcgaaattttgaatgtggcaatgaggtttagaatggaaggaaaagtaaatacatggtaaagtaaataacaatgtatgtgactgcatttataaaattataatctaataaataaaatttaaagtgaaacattagttcctaagaataatacattagagagagttgttatttattattaaatttttacataaatgaaaataaaataataccaaactcaacaatgtaattatccatcttctaaaaacgtaaataatcaagaatcattattttcatgagttataaaacaaaatatataaaaagtgatatgtaagctgttagaaaaaattctatgtaatttatgtagcacaactctttaacatgatcaaaatgaagaaaaagtttgagatttcattacttgaatcaaatgttgaatcaaaggctgactttaaacaaaatatttaaaataagtttttttttctttgagaaaaatgatagtccttatgtttttagttgatatttgaggataaatttttggaaattcacatgtctttggaatcataagatcatatgagcaagaagatttagatttcgaacctatttgaaattcccttttcaaaagtatgatttgatatgcagcggtgagaaaaaaacagagaagtagaacaaaaattctattttgttgaatagatttgagaattaattataacggttaatttacttagagaattaggaattcaaaagaaattgagccgttttataattaagttaccactaaaatccgctaatttatttacaaatatttgcttaaacacacacatgcactcgaggaaacgataatcgttttgaaatcaaatgacggggtttcagccaataatacggcgtcgtttaaccgtggagaggttggaaatttacacggtggcgtttaaaggttagttaacttagcgaaaggatttagacgatgttgttttggagttttatatgttttcttgtgtgtcaagctttgctccttaagtctgatttttttgtctaaattctcgagtttcttccatacctgtaaaaattcgttatcctaatagttttagaagaactaaatttctacagcttttctttgtgaattcgatttagtacagaataacatacataataaaagattttaaaaaaaaatcatgtctaacagagaggcatgttcatctaacaaaactattatcttttattatacacatacatatataagatgccaaatattttattttcatctaagagatgtctatctaattaaataatgtgggacaaatatgtagttagaataacgaattcaaagcttcacaagtcgcacgtttttcatttttctttctgtagtttagggaccggccaaaagtacatcaacttagacccaagctaagacccaaaaatttggaccattttctaacaacttgccgtccatggaaaccgaatcaaaaatagcatcattcgttggtgacccatttttgggatatttagcattatcccattcaccatttatcagccatcaatcattcatccaatatatatacacatagacatttcgtaaaactcaaatcactcaccacataaaaccaaagtcccatctcttaaaaaactaatcatttcaaagttttgtctctagtctttctttttattgagca

SEQ ID NO: 2768 - DNA, 3000 bp, Unknown
  misc_feature (1)..( 3000): cDNA_ID_3069608_gDNA_ID_1620589_Annot_ID_161375 3000 nt of promoter + ATG
catcctacctgatataaaaatcagtgttctatcctttaagttgttcatgtattttcattccaagagcagccaatgttgagacagattctcttgctaagcttgccttatccgtttatgctgaaaacattgttagttaatccaagtattggcgtttcaaaaaagaagtgattttggtgcaaatatcttttcacagaatataaaataatttttaatcaattttacatacatgtatccgggacaaaaatatagttagattcattacatttagaaggttttttattttatttttgtagtttagggaccggccaaaagtatttcaacttaaatccaagacccaatgcttagatcacgttccgaccatggaaaccaaatccaaattcctcccaaagcatctttttagtttgagacccacttttggtaatttacgcacgtgctacttcatcaatcatccccattcatcactcatccaacatgtctatctataaatagacggagatatttcgtagaactcaaatcactcaccacataaagtaaaagtctcatctcttcataaaatagctttaaaccaatcaagtagagtttcttctcaagtctttttattttatttttatcaatggcttcttcagcagtgtctctccaatccatctctatgacaactctcaacaatctttcatgtaatcaacaatttcatcgaagctctcttcttggttcctctaaatccttccaaaatcttggtatctcatctaacggttcagatttctcctatccatcaagtttcactgccaagaagaacctcactgcttctcgagctctctcccaaaacgggaatatcgaaaaccctagaccaagtaagttaattgatccttttttgtcttccaaacttgattaaatatatgattacagagactcaaaatcaagaacacaattcacaaactgagtttgttttttcaggcaaagttcaagaactgagtgtgtacgaaatcaacgaattagatcgacacagccccaagattcttaaaaacgcattcagcttaatgttcggtctcggagatctcgtaccattcacaaacaaactctacacaggcgatctcaagaaacgcgtgggcatcacggcaggtctctgcgtcgtcatcgaacacgtcccagagaagaaaggtgaaagattcgaagctacttatagcttctacttcggagactatggccacttgtccgttcaaggaccatacttgacttacgaggattcgttcctcgccatcactggtggtgctggaatctttgaaggtgcctacggacaggtcaagcttcaacagcttgtgtatccgacaaaactgttctacactttttaccttaaagggttggctaatgatttgccgttggagctcaccggaacaccggtaccgccgtctaaggacatagagccggcgccggaagctaaggcactggagcctagcggagttataagtaactataccaactaattcatgaaattaaaatgtttctcgtatcgctgtgtaatgatataaagatttgtagttttgtgctcttatctgtaataaaatcattgaggaataatatctcgagtatgttttaagtcgtttggacgttggtacacgaatatatgaaaagtctttgtaatcttttggtcactctcaatgattttgaattaaaaatagttttagttatagaaatgattttatgtattgcacaagaaaatcaaataaaaagaactattaaataatgaaaatatatatcttaaataaaagagtataacaattgaattcttaaaaatcatacagtatctcaacaaatccaagaaacaacgaaacgaaaaattgatgtatcatttggtcgagttaagatacaaaatgaaaaattacatttttttttgtagccatcatcgacaaaaaaaaatgtcttagtcgcagattaaatgaaataaggacaaatgatggctacaaaaaaatatgtaatttaaaaccgtccctaaaggtaaatctgactcatcttaagagattgtttgatttttgatatataagtcataagtggttgactaatgtcaaataagtgacgccttttgatgacatggagaagtatgcagatgacattgattgatacggatggaatggagaagttaatgatctacatgtcacactcctcatttcaaaaatagttaacggtgattatgagtcttcatcgaatactcattttaaaggagttgctgataaaaaaaaaaagagtggatgttatgggcatgtatttaagggcatgtatttaaacaagaagttaccaatcgtagcctatgactaggattatggcatgcatgattaccatgatgtggatcaggatatagagtagagaatgttaacgcaagagacattgctagatcaagaattaactcatacaaaaatgatgaccggagattgatgatatcaaattaaattaagtaacatagactcacaaacgcatggtggtaatttgaagcctatgcattcaaagaatgttggagtcatggatccgaatagaattgttgatactagtgggaccagtccttccttgagaaaaaggatgcatgaaccatctcgtgattgtagtgctattatgtgtgtacacggcaaattgacacaaccgaaccgaccaagttatatatatgtcactaaaacagtctgaccaacaagagtttgaagacctgcaggctacgtttatatcttttgactattatagtatgttcccattactttgagatctcgtagtactcaataaatattacacggttttaagtcgataaataataaatacataaaattctctagctaacgcttttagacaattcgaaaccgagtggaaactacacaaagcatcttttgacatatacgcacgtgttacttcatcatcgtccaatataaatagactcattactaaactcaacaaccattaaaaccaaagatcaatctcttcttaatagtcaatcatatatcaaaaaatttaaactcttcttgatca

SEQ ID NO: 2769 - DNA, 3000 bp, Unknown
  misc_feature (1)..( 3000): cDNA_ID_2171183_gDNA_ID_1620589_Annot_ID_161374 3000 nt of promoter + ATG
gcttcttctacaatctctctccaatctatctccatgacaactctcaacaatctctcatatagtaaacaatttcatcgaagctctcttcttggtttctctaaatccttccaaaattttggtatctcatctaacggtccaggttcctcctctccgacaagtttcacgcccaagaagaaactcactcctactcgagctctctctcagaacttgggaaataccgaaaaccccagaccaagtaagtttattttcttcttgatcttttcgcttaagtttcgaaaaatcatataaacagagctttttccaaaaaaaatgaaatacttttttttttttttgctaaactgcaaatatcatataaatgaagggaaaggtttacatgagttagaacctaaacaaaaaaatgaaatacttacaaaacattttctaaatacattatctttatattaaaatcagtttttcatttcataatttttctaactccattaaatttatatgattccagagccttaaaaccaaaaatttgcaaacttgataatttaaacataatatcagatctcaaaatcaagaacgtataattaattcacaaattgagtttttaatttttcaggcaaagttcaagaactgagcgtgtacgaaatcaatgatttagatcgacacagcccaaaaattcttaaaaacgcattcagctttaggtttggtctcggagatctcgtcccattcacaaacaaactctacaccggcgatctcaagaaacgcgtgggaatcacggctggtctctgcgttgtgatcgaacacgtccctgagaagaacggtgatagattcgaagctacgtacagcttctacttcggagactatggccacttgtccgtacaaggaccatacttgacttacgaggattcgttccttgccatcactggtggcgctggaatctttgaaggtgcctacggacaggttaagcttcaacagcttgtgtatccgacaaaactgttctacactttttatcttaaaggattggctaatgatttgccactggagctcataggaactccggtaccaccgtctaaggacgtggagccagcaccggaagctaaggcgcttaagcccagtggagttgtaagcaactttacaaattagtgaataaaattagtcttatctttctcgtgtcctgtatatataataatctttttcatagagaattttatattcttatacttgtaatcaaataatttgtatggatcttagtatccttgtgaatgcagtatgtttgagttgaaaaatacttgtaatcgaatctttagttttgagttgtccccttttggggagtaaaatatcttcttcttatttttattgggttgaaaataggtttttgcatagttttttttatcgacctttcaaatacgtcacaattacatttataggagttagggttggtgttgtaatccatatacattaccactatgaaactttcagcgaatacaagcatatactatcaaactccaagcgaaataaatactcacaaaaggctcaccatggtcgtaaagtgaggattgaagaaaaatgatcatgttgatggatcaaataaatcttccatcgcctgatttcatcatgatgtacactcatctcaagaacaagaaaatgatactaagaagaaaaaagataagctggattaggcacgaaggtttggaagaaacccaaactctaacccaaatattgtggataaataaaaaacaatcaactttcgagttccttctccagccaacttatgggttgcaaagatacttttacatataaaagggatgctgacctagtgcgaatatcaagaaattgtgtgtgttttatgtgctccgggttcaatctctatttggtatacaaatgactgttttttaaatccggatatctaaagtctaactttgagtactaggaagattataaggcaaagatctagaactcttatagcttaaataaaaaatgattttacatgtaaaagacagaaattacctaatattagttaagagatgatatattttcaagaaataatgattctagttgtataaaatacctagttttttttttgtatttttttttgaatatttagaagtgcaagtccgaaggccatacatttcctagagatatgatccacaccaggttaaattcatttcttttggagaagagatccctcccaacagacttcgaacccaacacctctacctgcgagattttttttttgttattcgtattagatgtgattttggtgcaccacgctagcgttggagatgaaactcccacattttcgcactgaatcgactattaaagcttggtctaagctatcaatttattacagtctatgccagaaatttatggcatcctacctgatataaaaagctttatggcatcctacctgatataaaaatcagtgttctatcctttaagttgttcatgtattttcattccaagagcagccaatgttgagacagattctcttgctaagcttgccttatccgtttatgctgaaaacattgttagttaatccaagtattggcgtttcaaaaaagaagtgattttggtgcaaatatcttttcacagaatataaaataatttttaatcaattttacatacatgtatccgggacaaaaatatagttagattcattacatttagaaggttttttattttatttttgtagtttagggaccggccaaaagtatttcaacttaaatccaagacccaatgcttagatcacgttccgaccatggaaaccaaatccaaattcctcccaaagcatctttttagtttgagacccacttttggtaatttacgcacgtgctacttcatcaatcatccccattcatcactcatccaacatgtctatctataaatagacggagatatttcgtagaactcaaatcactcaccacataaagtaaaagtctcatctcttcataaaatagctttaaaccaatcaagtagagtttcttctcaagtctttttattttatttttatca

SEQ ID NO: 2770 - DNA, 3000 bp, Unknown
  misc_feature (1)..( 3000): cDNA_ID_2171160_gDNA_ID_1620589_Annot_ID_161368 3000 nt of promoter + ATG
ccaagggttttgagatgtcttatgaaatgattttggcagaagaggatgtaaaaaatttcgaataaaaagtagtcagcaaaacatatgttttttttgaaaatttttagataattaaatcagagaatagggttggacatatgagtaacccattcgagttcggatagaacccgttcgggtttgagattaatggtatatgatttactacccaatagaataattctaaacatatgttttgttgatattatctatattgtttagtgtttaacattatacacttgtagtttgattgttaatttaagagtttcacatgtagtataccatcttgtattaatatcgatctaaacccgtcaattctaggattttccagcttgtattaaaaattgaatcacatctaatatgttattaactattgtagtatataagattataaattttcaatataatatgtatgaaattgaatataaatatttcaaatttatgtcccgttactcagtagaaagttttcttaaatctatttttcacccgttataatattatttcatgtattgaacaatttatattcgtttttaaaaattcaaattatggcatatgcggaaaaactctaattatttttttataatgatgatattattattccgtaaaaatagaatcatataaagatgagaagtgaactataataattaataaaaaattaagatgataatttagataccaaatataatttgttgattttaattagatacttttttggaaattaataatgtatttcgtttttctaattaaattaaattaattaaaatttagatatcaaaccttatatgttgattttgattggctattatttttggaaattaataatgtatttcgttttttaattaatttaattaattaaattagtatttgatttttaatccttaaagagataaattaatttactctttaaaattttatttttaatggcatatctatgtaattatttataaaaattaagattatatttaaaatgtatttcccaaataatatagtagaataataattaaaaacaaaattaattggctcgtgaacaaaacgataagaactaacaagaaaacattattattgttgacaaataaaaacaagaaacattattatattaacacctaacgctgccacaccttttataagatatatgttttcttttacaactatctgaatctctaatgtaataaaaatatatgaatgatgtcactggtagtttggtaccaattccatgcacaacattgtaaaccattttcattttagtgttctttgaaccttttgtaaataaaaacaatattaaaccaatggaactcattgtatagttaattaataactttcgaatcccaaaaaagttccgagtaacgttttttctcgtctctatattggattgtaaaaacaagtaaaatatatatccgggtcagttcttctaatcaaaataatcaagaatgctcattagattagactggaatattttgataaacatccataattagaattgaaagttcttaatttaaaaaacaacaactaaatataaagtaacgaatacaggaaaattatattttctattctaataatatatgttgattgttgcatattgtctttttggtttaataataatcgttatctaaagtctagaaaaaagttaattataggtatatctttttagtaattcttatccaaatacttcaaagacacgacatacaaaggacaataaaaagtacatatctataacgagatcgacctttgatcttagaaaaataaaatgagttaagaatacgaatatacgatcgatccccaagaaaatagatgtgtaatttgggagtatatattactttttttttttcgtcaggagtatatattacatttttacatttatctataaaagaaatatattgtgttaatacactaaaatcagataaagaattaaataatttagcatattacgcggctgccgacaatagatgtggagtatgacttcacgtagacatattaagtcatctagtgtcaatatattaaattgattgttgggttataattgatcttaaagtgagcaagttttatgtcgcaccaaaaataaactattgagtgttatgtgcctaacacttaagaagttaagataatctcgagcgcttttaatttaatctaaacaagactaatgtgactaatgtgcataaacattcgctttgctttttttcatcacatcctatcgatggcataatcatattctctggatacgttatacttttgggtcggcaattcacgtttttattcggctatatattgagttttcttatttaaaagaatattgaaataatacatctaatcaaaaaataacaaaacatgtagcatagtgatttatactaatatttttgttgtggatcatcatcattcagactaaatatgtattgttattgattgaaaaaaagatagttaagtttctctaaacttgtgaaactaatctatttgaaaagcatcttgagatttcataaatatttttaatgaaatataaattcggggtctattgggatagttggattggtttaatctggttaactccggttaactagatttcggtttaagtttaatgtgcatagtatataaacttgagaatgtaattaattcagtttaaaaaagctttgtaacaacattttatcagataataaagttcgttatatctctcttcttcttctccgattagacttccgatcatcggatttattatggtatcagagccatacaatcgattctcccgcttactctttcgtcggagatgagcttgttcttagcttcattgtgtttttcgatttgcgatctttcactttgaagatttgcaatttcgttctttggttcgccggaatcttgcttttccgttctgttttctttttatttctcttcattttgacctcctgtgttgacgattctagctttctttacacaaattcatcacacatttctttgtaatttcttgttcttacactgaga

SEQ ID NO: 2771 - DNA, 3000 bp, Unknown
  misc_feature (1)..( 3000): cDNA_ID_2171259_gDNA_ID_1620590_Annot_ID_161396 3000 nt of promoter + ATG
ttttgctatacgatcaaatacaaaaaatgtattggtcccacattaagaggccgacttgataactgaagcccaggtttagcccagtgagttgtgtcttcaattgctgttacatatatagccggaaggtacgaaaagagttgtagaagctttgacctaacttggagatgagagattcaacaatggcgatgtccgatcttccccgagatttggaagaggaagtgctctctagggtcccgttagcatctcttagagcagtgcgaactaattaatcgaatatggttgcctcgctcttgacataataatggtttgatcattaatttgtatgtcagaccattattattcacttagtatgtaatctctcgttggctcttccaatatttttttgaaacagccgaatacatcttagacacttttttccttagaagctctctttagcattgctatttagatgaaaataaagaagttctgtattgtccatgatacaattgttgttctctttgcatatgaaaaacaaaaaaatgactttataacatgtttgtgtaacacatgagcttgaaagcaaaggaaatagatgctttttaccagctaccagaattgatatgtccactctctttaaatcaacatatcgggtccgattggtgacctataaatgaatacaaggaatgaagaagaacatgactaaaaaagaacaaacaggaaaagaaaaaatgataaaataggaatgaaaaggaatggatataaaggaaaaatagaacaaatgttactgtaaatgataaccaaaacatagaataaatagtaacaaaaattaaaaaataaataaattatttttcaaattaaatattaaatataaaacgaacataaatttaatttttatttaataaatatttaattttttttcctgtttgttcctcatcaaatttgggaaggaaaaattttcttctaccattcctcaaaaaataaagaatgattaggaatattgtggggtctacatattacaatttggaaaaaaaatactaatgatggtgaaaaaaagaggaacaacatgttgttcctgtgcattcattttctaaataatggtcactaataggacccatcgtatgatcaattaatgagattcgctaaaaaaagtccactattgaaaatcatatgtcaaattatttaaattaaaaaagcaattcaaggaaattcaagatatcaaacataataaaatctatatcttaagttaactcagaaaatataaattttctgttgcataccaccgggtgtgccctagctaggcagagaaaagaaaagagttttattttttttgtttcactgctaaaggtaacttgatttgtagtatgacatataacatattcaacaatggcgatttcagatcttcctagggatttggtagaggaggtgctctctagagttccggtgacatctctgagaacagtgcgatctacttgcaaaaaatggaacattatatccaaagacgagagctttacaaagaagcacgttggtcaagcaaacgcagcagcaagggaaagtgagtttcaggtggtaataatgacggaatacaaagtttatctaatgagcgtcaatctccatggcattcaaaacaatgttgatccatctatagagtttaaatgtaaacttatcagcctagatgattcagatcgaataggtatatctcaagtccatatctgtcacggtttatttttatgcatcaccaacgaaaaaaattataagcttgtggtttggaacccttatcgtgggcaaacaaagtgtatcgaacataggatttcttacaagagatggaacagctacgctctcgggtacgagatgaagaacaactcttgtctttcgacacaaaatcttgaaaattgtggtgacatcattagtcgattttcacccagtttatgagactgaaatttacaactttcactctgattcatggaagaatattgttgattccactcctgaaggggatatgcaatattttaaacaaggcgtgtctcttaagggaaatacttactggtttgctagaaagtatgtgatctatgaaggaggacaagaagcatgggttagtttcttgatttgttttgattttacaacagagagatttggaccgcgacttactctgccttttgactattctacaaaggagagtgtgagtctcttgagtgctagagaagagcagcttgtgctgttatatcacccctggtttacaatgatgatggagatatgggttagtaataagattgagctcaatgcggtgtcatggataaagttcttagaggttaacatgataacattccctcattatcggtttagttttcaccatgtgagtttcttcattgacaagaagaataaggttgtagtggttttggataaagacaaagagacgcgttctcgcaacttaggatatttcattggagatgatggatatttcaaagaagtggaactgggaggatctagagacagaaatggttatccatttgtgttctcttatgttccaagttcagtgcaattttagcaacttgcaagagacaacaaaccatatttgattaattagtccatttacaatgcctaatctatatgtatttactcttttcttttgtcatctttggttattaatttgtatacatgtcgaccattgttggtctttgactattgggtgcaaatagagattcttcatcagaatggattttgcttcacaagaatcaacaacattatgaaatacaaatcagagatggttaaattaaccaatgaaatttccacaagttaaaccggaaaaaaacagagcggactaatccagttgtgccaatggcaaagatgtaatttcaaagaaaaaagccttaattttggtaattggtacttggtgtccaaattccgccaaacaaaactgtatcgccgtctctcttcttcctcaaaaaccctagaaactgtaaaacccttgcctatctcttacacacaccaccatcacagttcaacttttgtttgtcaacaacaatg

SEQ ID NO: 2772 - DNA, 3000 bp, Unknown
  misc_feature (1)..( 3000): cDNA_ID_3095815_gDNA_ID_1620590_Annot_ID_161403 3000 nt of promoter + ATG
cagatacttccaatgcaaaatatgaaaatttgtcttcatcacatgcaatcgattctgaaatattcacattcgagaattttggataaaatggtccttcgtatatgagcatatcaagttatacttttgttttaacgcatttgtatgttttggatctaagtattttgattatccaatttgctgagtgcattttccatcaagaacttcaacaagttttcagtagcttactcacttaatgttaatataacgctccataggtgtgcaaatgttagtcatattaaagttgttggttctgcataaaaagctgaaacatttgtgttctacaaaaccttttttggtgacatggacctatagttggtacttgaaatataaataaaataggaggatctgtaattcatgtctgtctaagcacaataaagtgaaaaatataaattaaaaactcaaaaagctcatcgtaagagtaaaaactttttacagagaatatacggtttcagcgggttactttcttgggaccttctctatattatagcttttggcgcagttaaatttatgttatattaatcatcaattttttgtttttacgttttatatcgtatgtaaggaaaagtaaagaaagctattagaaaaaaaagctactaaacatgaaattatgagtatatctttcttaaactcaaattcaagctctcgtggtaataagtggctattgacgataacaattacaagttggaatgttgaatagtttcgttttttttatttctattaatgtttttaaaatgattgttgaaatagggaaaatttaacaaatgaagacaacgatagatggagaggtcgatgcaaatggttcgagtgatcttatccatttcatgtggacacgtgtcgcaatagggaaagcttctcagcaacgtgatttatttgtttttttcttatcattaaatgttttcattttattcttcgaaatatacacatgtacagtatttccaaaagaaaatacactatagttgatagttcataaaaattaaagaaatacttaattgatttaatattcgtattgttgagttttccttctaaatactacaagtagtgaattttacttgataacattgattaatgtaagaaattaggtatcgatgcacatatgaaacaagtcgtatgtcacacttaaaactatcgttaatttgaaaaagataagacatgtcggcggtgctaaacaactatttaagcaaagtatacactgaacttggataacttagatatagtttacattgaagttgacaaatttacacatttataaataagttactggtttgtatgtgtttataaatatgtcgtagagcaatcgaatagtcaaatatgatttgttatcctatacattattaaaaatatactttcgggggaatagggcgattggtgggtagcatatgatgttactaatcattcagatgaaccatttgcattatttctttgtttatttagtatccaacgttttaagagaagaagcgcacatgtttttttttgcaccatatactgactactgttgttgtaaacttgtaattatacatacatatatatatatatatatatatatatatatgttttcaacaatcaaacgtacaatttttttctattttccatttaatacaatttatttcctagaactacaagttgtttttgattaaaacatgaaaagtatactatataagttatattcttactaatcatagttacacacgacttgaaataaatacatactaaaaaatttggaaggttatatgtttaatttgcaccaaaaaaggcatcgagtaatcttatgttatgtatacatcatatatctggtttttttttgttgataaaagtatatgtactatatcttagctaaagatgtaggtgatgatgggaaatgcttaggtgtattttggtaccttaatcatatgcttgaatgtgcgtagacgtattattttgtttaatttaatgatatgattatatttttattttgccgtttaatttaatacatgtaggtccaatagacaggaggcattgtttctcaattacataaattcaaagggtagtttagtaaataaattataggcatatcaaaactaagaattttttatatatatatgcagctgctcttttgtttaaggcaaattcctattcgaaattggtagaaaatggaaattaaaacaaaaaattaggaaactaacaacaataatactaatgaaaatctattaaggtttgagtttgcaaactttacatatgacgagttaattaattttttcatgcatgagctggatccacgaatcaagggtctttggtcccactttcttcccaattatataaatttccttaccctatatttctttcattgatgattcaacccctatatttcactacttcacaaaataacccagaatttgagctcaaagcaacatccaaaatgttcttctaaatagaaaaataaaacagaatatagaacaatagtacatataatatacaaaactaacttgtaagaaattgagaataaaaaagagagtggatctaaatgaaatttaataaaaccaatagtctaaatgtagagagaatgatgaaaataaaggacatgtcagcttctacatatatgtaaataaaaaatatatatgactgagtatataaaaaccacattttttttttcttctgcatctaaatgttacaaaaattgaataggaaaaattaagagagctttactctgtgaataaataaaaaaacagagaaaaagagctctaaggtgagacaagccttgtcttcttcaactccctaagtctcatctcaccatctctctcttcttcttttttttggttacccagaagagattcacttctatctccaacaatttcgtattctctcataatattcaattttaaatcgaataaaactcgcgtcaatttcccctctttctttctgggtatatattcttttctgcttttctttttttgtttcttgggttcgagctacatagagagaggtatg

SEQ ID NO: 2773 - DNA, 3000 bp, Unknown
  misc_feature (1)..( 3000): cDNA_ID_3069638_gDNA_ID_1620590_Annot_ID_161399 3000 nt of promoter + ATG
tcccttttgtggttgcggtggagaccccactccttagttttcacactttgacatttacgtgattctttctcaactctttttttttttggttttattcgtcgtgatcaccgaaatacatcctactatattatttaaaaaatacattttgaatgtaaccttatttttttgtaagtaattacatagatatgccattaaaaataaaattttaaagagtaaattaatttatctctttaaagattaaaaagtcaaatactaatttaattaattaaatttaattaaaaaatgaaatacattattaatttccaaaaataataaccaatcaaaatcaacatataagatttgatatctaaattttaattaatttaatttaattagaaaaacaaaatacattattaatttccaaaaaagtaaccaattaaaatcaacaaattatatttgatatctaaattattatattaattttttattaattattatagttcacttctcatctttatatgattctatttttgcgaaaaaataatatcatcattataaaaaaataattagagttttttcccatatgccataatttgaatttttaaaaacaaatataaattgttcaatacataaaaaaatattataacggataaaaaatagatttaagaaaactttctactgagtaacgggtcataattagaaatatttatattcaatttcatacattttatattgaaaatttataatcttatatactacaataattaataacatattagatgtgattcaatttttaatacaagttggaaatcctataattgaatgtttagatcgatattaatacaagatggtatactacaggtgaaactcttaaattaacaatcaaactacaagtgtataatcttaaacattaaacaatatagataatatcaacaaaacatatacaactcacagtttactatacatttaaaatcaaataaaataatatcaaatatttttaaatcatgtttacaataaaattttttagtttaactaaaatatataccgcaggttaatatctagattatagggcttattggatctaaagacggatcatcaaagacttcttaaactgaagcaaaatatattgaatattcaaatatctatatgttaccaaattataaacaaataagtcaatttaatattttatatacgaaatcaattaaatcttaatcacataaaaattagcacaaaaaagtattcatcaattaaaaaattatcagatctctgtgttatataagttttgatactatattcaaataaagtgtaatataccttttcaatttgtattctttaactaatttaagctaactaatatatttgctaatcttatacctatcaaaaccgactatcgtttcttatctctatagtatttttgcaagacttttttggtggatttggataaaagtgcattcgggtcatatggtatattctcctattaaataaatatggtgcactcatatgttattatctaaaatgtttagattctaattcagagtcatatcattaataaaattaatattaataaaattaatattaataaaattaatattaacaaaataaatagctttttggcaaaacggatttggagggacgggtttttgaatcaacattaataaaaaagtaaaatataattaatccaccgtttcaatacgggttaaatctttaatttattatttttaagaccactaatattaaacatatcaaatcatcctaatttagaaaagattatataaaaccaaaaatgttatgtggtatgtataatgttactatatatataattaaactatagatataaatgtgttagagaatgatacaatttgcaaaacttttatatataaaaaattattcttaaattttaagaattactattttttttaaaaatcacgggacggtaaaaaaattacagaacgagttctattttggaattgggttatatggtggatgtatttgaatcaatatttataaaattttaaaatattattaatatgctgttttaataggggttaaaacttcagttttttaacaattatctcatggattcgtggtataccgttacttaataacaattataaactgtaaaatataaatattttataaaaataaaatttgcaagttttaatatatattacttttaaaaaataaatcgtcccgcgatatacgcgggttaaaatctagtttactataaatctataatataatacttggcctatataaaatgttacttgctcatgttgaaaacacatactagccatgcgagaagaatctatgattctttttcacgagccataaattacggtcagccccacgctaattactgtgtttgtttgtttttttttttttttttttttatgtttgtttctatcgaatgtactgagagtcaaacgagttcaactgcttttttaattagcactaatcaataatcaatgctcccaattgcatgctaatgtgctattcagtcgtcactttagcaataatgacagctaaaagcttgcaataatatcgatgtataaataatttactcaaattcattatgcaggcaaaaaaatataaagctagaatataataacagaaaacgtctaaactagaaaagattgaaaaatcaaaataatattgcgattttgcggatagaaagctaatgggcttcacaagaaaaggcccaaattagtatcagttatcaacgtcactttgacgtgttcatcttctaaaatctaaacccctaaatcctaaccttccacgtaactcgtgtcggtacgaggcaaatcactcggtctgtattaattcagattaaccggatcaaaaccgtaaccggtttaattatactacatggtttcgttctgatttagggtttatgcaagttttcaacttctcttgagatattccatctctcagccaacaacgactcgagtcgaggagatagattctcaaagcttccattaaacgttgtgggtatttttttagctcaaatcaacagctaacatg

SEQ ID NO: 2774 - DNA, 3000 bp, Unknown
  misc_feature (1)..( 3000): cDNA_ID_3069642_gDNA_ID_1620590_Annot_ID_161398 3000 nt of promoter + ATG
tctcgtacccgagagcgtagctgttccatctcttgtaagaaatcctatgttcgatacactttgtttgcccacgataagggttccaaaccacaagcttataatttttttcgttggtgatgcataaaaataaaccgtgacagatatggacttgagatatacctattcgatctgaatcatctaggctgataagtttacatttaaactctatagatggatcaacattgttttgaatgccatggagattgacgctcattagataaactttgtattccgtcattattaccacctgaaactcactttcccttgctgctgcgtttgcttgaccaacgtgcttctttgtaaagctctcgtctttggatataatgttccattttttgcaagtagatcgcactgttctcagagatgtcaccggaactctagagagcacctcctctaccaaatccctaggaagatctgaaatcgccattgttgaatatgttatatgtcatactacaaatcaagttacctttagcagtgaaacaaaaaaaataaaactcttttcttttctctgcctagctagggcacacccggtggtatgcaacagaaaatttatattttctgagttaacttaagatatagattttattatgtttgatatcttgaatttccttgaattgcttttttaatttaaataatttgacatatgattttcaatagtggactttttttagcgaatctcattaattgatcatacgatgggtcctattagtgaccattatttagaaaatgaatgcacaggaacaacatgttgttcctctttttttcaccatcattagtattttttttccaaattgtaatatgtagaccccacaatattcctaatcattctttattttttgaggaatggtagaagaaaatttttccttcccaaatttgatgaggaacaaacaggaaaaaaaattaaatatttattaaataaaaattaaatttatgttcgttttatatttaatatttaatttgaaaaataatttatttattttttaatttttgttactatttattctatgttttggttatcatttacagtaacatttgttctatttttcctttatatccattccttttcattcctattttatcattttttcttttcctgtttgttcttttttagtcatgttcttcttcattccttgtattcatttataggtcaccaatcggacccgatatgttgatttaaagagagtggacatatcaattctggtagctggtaaaaagcatctatttcctttgctttcaagctcatgtgttacacaaacatgttataaagtcatttttttgtttttcatatgcaaagagaacaacaattgtatcatggacaatacagaacttctttattttcatctaaatagcaatgctaaagagagcttctaaggaaaaaagtgtctaagatgtattcggctgtttcaaaaaaatattggaagagccaacgagagattacatactaagtgaataataatggtctgacatacaaattaatgatcaaaccattattatgtcaagagcgaggcaaccatattcgattaattagttcgcactgctctaagagatgctaacgggaccctagagagcacttcctcttccaaatctcggggaagatcggacatcgccattgttgaatctctcatctccaagttaggtcaaagcttctacaactcttttcgtaccttccggctatatatgtaacagcaattgaagacacaactcactgggctaaacctgggcttcagttatcaagtcggcctcttaatgtgggaccaatacattttttgtatttgatcgtatagcaaaaacaaatgattagcaccatgtggaaacattagagagtttgtgtaattaaatttcaagtttcttttctgtcttgttatatacataaaaatggttacagtaaccttgttttttctagttatcctcatatgctccaaaaacataggagaaaacataatcatgaactttttgaccaatagtattgttaggacttgaattctcttagatttgttaattgatgatgaattctcttagatgtttataacactatgaaaatcattacttaaaaaaaaaaaaactaagatgatccatcagtcacactttaaatgttttttaaaatatgttcatatgttttgtttatggcattgcgtacataatttaattagactaattataatatcgatcaaacaaagaattattggctggatttggtcgcagccattagcagtcgctctcaactaatattattacgagaatctctagctgagcaagtatctcgtatttctcacgctctgacgaaaacttctacgagatagacgcagatatcgagaccacgtcattccccctaacaaggcaacaacatgtggcggacgccagtaaaactctgctcaattcacttcaattccatttttcgaatccgcgtgacgtaacccacctaagggtttataatccactactttgcacccccacctaaaaatgcatcacaagcgcgacaagtgtcaatacaattcagatacggagaatactctgagatcccacatctgctttcggtgggctcacccgcatcagataaaaaccctaagctaagggatcagaccaaacagtttaaccaaacgaggttatcaacttatacgacaacgaaagcacttatcaatgataagttagttaacttatcaaactacagtctgtgtgacaaaacgcatcgaagaaagtggagaacaagtcgtacttttttctttatctttttccttttttattaaatgaaaaaatataaatagaaattttgtagcatctctggggtcagctttttcttaatgttcgctttgcgacgcgaggaaatgcaaccttgaaaccctagaaaactcattctcaactacgactaaatcgatttcgcaaactttgacctacccttctttcacgataaacccagatcgcttaaattccttgaatttcttcttctgagagttttaggaaaaa

SEQ ID NO: 2775 - DNA, 3000 bp, Unknown
  misc_feature (1)..( 3000): cDNA_ID_3069693_gDNA_ID_1620592_Annot_ID_161452 3000 nt of promoter + ATG
ctttgtaaactctacaagaactcagtaatgctctccacgtcactggatggtcttgaaaaccagagctcaaaatcagattctcagcatctgataatcttcccgtgcgacctaaaagatcgacgaggcaagtgaaatgtttctcgtttgggttaatcctgtaatcgttcttcatgcattggaaatactttagtccttgtgtgactaatcctccgtggcaacaagctattagaacaccgagaaaggcttgctggttcggtttaattccgtgggttttcatcgattcaaagatgtttaaggcttcgttagcagaaccgtgttgagcaaggcttgagatcatagccgagtatgttgcaacgtctgggttttggacctcgataaatacttgattagcaagcggcatgttacctgactttgcatacatagaaatgcttgacgtcttaacactggtgaaagcatcaattccactctttatggcataaccctgaatctgctctcctgagcttaatgcagcaaaatcagcacaagcactcatcataagggaaactgtatactcttctggtcttatatgggatgaaaaaagttgtcggaacagatcaaatgcgctttcaagctgctcgttttggacatggcaatctatcatcgatgtccatgaggcgatatcttgctttgatgttgaagcaaagcattgcattccatcttcagttgaacccattaacgcatacagctcgattagagcgctcccaataaactcatcagactgaaaattgttcttacagatgagagcgtgaatctgccttccatattccaaggttttcgctgcactacaagctttgagcacaactgaaaatgtcgatggcgagggttccaaaccccgtctttgcatatccatgaagagcttaaaggcttcactagaagcttcatcggttatttcatccatttggagaaacccagatatcattgcgttatacgtaaccacattcttcgaaggcatcaaactgaaaagctttatcgcctctttcaaacttccgtttttggcatacatgtcaagcaatgcagtacggacaactatatcaaactccattcctagttttgctgtataacagtgaattgccatacctttttctataaatccttcgttcaggttaatacaacaagcctttagcacactccccagagcatacgtagtcagatttaggccgtctctatgcattttagccaacagatttagcggttcttccgctgcgccaacccgaacataaccggaaatcaaagaattccatgaaacttgatccctttcatcgcatctatcaaataaagacatagcttggtcaagctttccacacttactatacatgtcaatcaacacattgatcaaaaacacttgctgagatagaccattcacaacaaccaacccgtgcaacaattcccctaaatcaagatcacacctttctccacaaaagcccaatgcaccggcatacgtgaacttatcgagcttcaaattagcttctctagcttcaagaaacaattccatggcctgttcataaaatcccatctgagtgtacccagaaatcaaagaattaaaagaaataatgtttcgttcaggcattctgtcgaacaactggcgtgcaaaacccaattcccggcacttgcaatacatgttcagaagattgttgagcaagtacagacacgggttcaaggaggacttgatcatgtgtccatgagcgagctttcccagtaccacggagcctgattttgcagctgtctgaaaaagtatcttgtaaccttcggaatctaaagccgtgttctttggttggcataacgaagacaaaaacctgtaacccaatccaactcgtttggtgataagagtaaccagagaatcttgagcaatgttgttgaaaaaagtctttgctcggaactgtaacaacatgttctcccatcacataacgaaactaacggcttttgtctgtaacacaacggtctctctggagatcataaacgctttgctccgttctttttccaaactgggcctctatatagcctttagttaatagttttgggccccgtgtatattttgtatcgtatttgcgatgtgttggtatatacatttgacgttgaaaccacctatatatatatgcatagttgaccatcttttgatttaagaaaattcttcacaaaagatttgtttattgagtctaatttgtcttaggaaaatcttggtattataacatgaatttcgtgttaatttaaatcaaagctcatataagcaagcaaaccaaagatctttaaattgtggtcaacgggaattgaatcggacggtggaaagtccacgtgttagtaaatcggagccgatcacaccgtccaaactttagtaaaggagaagaggacggcgaggtggatcccaactaaaaattgggcttttctgtagggcccactatagtattgtccagccaattgccctccatggaaatttttcctacatgggacccataatgactttatcgtctaccaatgcaatgagtatatcataatttccttcgttaaagataataatattactgaacattagtattttttcttcttttatttaaatcaatgtgtattcatatctgaaaattatctgaatgttattacctgaaaattatttttccatcaaattagtattttttcttcttttatttaaatcaatgtattcatatctttggtcaatatttctattagtaagagtatgtatattaggtaaaaaatattattgttaataataatccctaaagaactatatatgttgggtaaaaatatgataaattttaaaagtaaaaattcgttggaataaaaaacactttttggcatatttcttttgtcaaattagagagaagctcttatgaccttaggagaagcagtcgtcaaagcaccggtgcatcaataacgagctcgagcctagagatctctgtcccattctcttcgtcattcatcactctatctgcgtttcgttgagcgataatg

SEQ ID NO: 2776 - DNA, 3000 bp, Unknown
  misc_feature (1)..( 3000): cDNA_ID_3069747_gDNA_ID_1620593_Annot_ID_161459 3000 nt of promoter + ATG
aaaaaaattgaaatgtgcaccataaaaaatgctaatatatagtattcattcatagtactccatacaaaaagcttttttaaaaaaaaacttatcattaaatcttattatcttttacgggtgttttcattaaagtaaaataaaaataaataagaacagtacaaaactatagcttacgtatctgaatagttcctccaaatgacgatcctacccttcacaatctctctttgtttactcaattccatgaaccgctataaatacgctctaaacgttactcgtcacttggcttgcacagaacaaaccaaccttctagattcttctccttccttcttcaactctctctcacttctccagatatggttacatctccgacgaactcaacaatcaaatttctctgtagctatggcggcaaaatcctacctcgttatcccgacggtaaactccgttacaacggtggtcacactcgcgtcctcgccgttcctcgctccgtctcattttccggttagtttcacgctctcgatctcattgtcaattttgaatttcacaaaaaaaaaaacgaaatcggttttgtggaaagagaaattaaggccacacgtgtggtgcgttttaacagagttagcgtcgaagatggcggagatgtgcggcggcgtcggcggatctataaccgtaacgatccgatgtcagcttccgacggaagatctcgacgcgctcgtttcaattacttccgatgaagatctagtgaatctaatcgaagagtacgatctcgtttcctcttcatctccgatgaaaatcagagtcttcttaaatccaccaaaatccgccgccggatctaaaaaatctcctcctccgttagcgttaccgtcatcaaccaccacgtcatcatcttccacaacttcctctacttcatcaagtcctagatctccgtctctatcaaaaccaccgctacctccgtctccaccgagaataacgacggttacgaagaatccgtgttatggttgttatgttcaccgtaattccagaaatatctaccttgttcacaacggcaatcactggcaataacgtgaagaatcttcgaatatacgattaaaaaaaaaaagaatcttcgttttttttttctaatgtaaaaaagagcgagagattataatagaagggtgtacgtgatctaaccatcgccattaatgaaatcatcccaaaagctttttattctctgtttgttggtgatgatgatgaattgggtgagtgactttaattcctttttttttccgttgatatcgtgtaactccgtctatgtccgttgcattttccccgtcaacgtttaaccggaccggtccaccacgtgtttgccctaccttatctttttttctgttacattgttctgttttgcttgcgtgttattatcaccgtttgtgtgttagtttaggttaaattcagtttgacaatttctgttgagctaacttccataatcattttttttgtcgtttgcaggtaatttaatctatccttgtaaaattcgagcaatggcgtgatcgatttttctcgtttatggtatgtggtccagttttttgaatatcactatatatacttttctgattaacttttatggtagacgaaattcgaaacgggataagcttggagaaatagaagaggaagacaaaaaaaataagaaatggattaagaatgttggggataaaagaagaaggagaagaagtgatagtgatgatgataagattcgattttaatttaaaacgggtcccgaaatacagctggtgtggagaagtacaaataataatacaagtttttaagactatcggaaatgaatttatagagagtttgggtgggggaggagaagacaccaagtacaagtttatatccaataacaaaattgaggtcttggactgtggaaaatggaaactttaatgaccttaaaaagcgacgtgagttctgaattttcggatattttaagctcataaattaggtggtggacgtattagtagggagttagggactattggcaattcataagaggaattaggcggtataaacacgacgaaagtaggcattttaggccatcaagcatctcttaggattggtcgcttatcttaatgatctaacaatgacgtgatagccatctttaagtttttttctttttctttctcttggtaatttggaaagatgggattatgattctatagttcattgacttacgtttggattttgttagcttgttcaattcacaactaaactgaaatctgatggtaaaagcaagagggtcatactagcaacatgagctgaattaatcttctttatttgtagttccggaagatgtgggtcgaacaaccggagatttgactttggaaacatacacaaagatatgaatgggtggaataaactaaacacattataggactatacatgaatggtaaataaaaagcggtcaaatcaacaaatggatttattcgtccaaccgttgcaattattaaaaccattacatttttcaaagaagtacttgcatatgaagttttagcaaagaaaatatgaaacacatatgatgtaagatagaagtgcttccgagttgaacccaaaaatattagaaacgatcaagtgtaattgaagaatgtagctcaaaaaccacattggtttcacggaccaagtcttttagatcaatgttcaaacgattaacggttgtttttttcctatgcggacaattcccctaacttataagatatcataatctcgttgttaatgccatatatcctattacattaactggacaggattggtctttgattcgattattcaaaaaagatggctcgattgactttatcattggaatcttattaatttcctcggtcaacttcgacacttttcaacccaactagacttgtgctcacaaacatggcaacatcaacttcaatgtttctgacttgttcaaccatgaacatacctttactaaaacctctcttaatctccaattacctttgactaataatcacaaaaaccatg

SEQ ID NO: 2777 - DNA, 3000 bp, Unknown
  misc_feature (1)..( 3000): cDNA_ID_1818883_gDNA_ID_1620593_Annot_ID_161482 3000 nt of promoter + ATG
gctaacaagacgttttccgaaagtaaacgaccaggaaggaacgcagactgagacggagaaatcacctcatttaaaagcttctttagcctagaagtcagcagcttagctatcactttatacaaagtgtttaagcaagagattggcctaaagtcagtcatctttgaagagtttgtgatttttggaataaggaccaaagttgttgcgttccactgcttcaataactgacctgaacgaaaaaattcttggactgcttcagtcacctctggacccacaacaaaccaaacacctttaaagaactcagaggaatagccgtcagggccgctagctttgttcctgggcaaagagaagaaagcctcttgaatatcaagatccgagaaactcctttccaagtcattaatctgatccacagaacatctgaaagaaagaagcagattcatatcactctgtgccaaagagttctcgccctctacaccacataggagggattcaaaaaaattacagctatgctcctttatgccctcctttatgccctgctgggtctcaatcctttcaccaaaatcatcaatcaagaaatttattgtattaatcgatttacgcatgtcagccatcttatgaaagtaagcagtattattatcaccctcatataaccaagagatacttgacttctggcagaaaaaactctcctcagccttagcaagaatttgccattttctggtggcctccaactcaagtgtagcatgaacaacagaagggttggtaagagtaatcctttgacggtggagcacaatagcatgggcctcagagacccttttctcaatatcagagtagttctctctactaaaacaacaaatagggagcttaaggtgcttaagctttttggagaccctgtacatcgcagaaccagagacattgcaagagtaccaattctcacgaatcagctgcaagaaatccgggttatgtaagaaatagttgaagaaccgaaaaggtcgctttgctttcaagaccgctggatctaacaccacctcacaagagctgtggtcagagaaatctggctcaccgaagttcgcgtaagcggatgggaagagagtgttccaatgatcattgaccaaaattctatctatcttttttgccaaaggtctagagctgcacttattccaccaagtgtaagaactacctttgtagacgaggtcatacaaatcagaatcaagcaagcaacttctgaacgcacgaatcttcctgccaatatttgcattgatagcactttccggatttaagatttgattaaagtcgccaagaacaatccacgacctgccaacaacaaccggagataaggcaagctgaaccaactcattccaaagctcttttctggtaccctcctcatttgaagcgtaaacaatagacaccacaaaccaagaaggagaatcaggaagaagaagctcacatgtgatcatttgcagggacctaccaataacaactaccttcacacttggatcccacaaaacccatatttttcccaaaacagagaattcataattctcaacaaaagaccagccaggcaaaaggttagagatgaacttcttctccttaggctgctttacatgtgtctcaatgagacctccaaaaagtggtttattcaaaagaaaccatttcttaaaaccgcggcggtgactggaaatattaaatccgcgaacattccaacaaaagagcttagtacacatacttaagctttggttttgaggcccttgcctcgtagattcctcttctgacgcttagacaaaaccttgatgaaagcctcttcttcagtgtcagtagataacacgtcagaggaatcatcctcaactgcacaaactgtgcctgaacaaatgccaacctcctcattttcagttgcattatcaatgattacagcaaactgtccaacacttgaatctcctttctggaccttatccaaaccgagagagatcccattggtctgaactgaaatagacccaaaaacactatcttcaaccttaagagacttggacttagccacattcttcacagaccaaactaagccaccatcttcctttcctttgacagggagccgagtttgagtctcttgacccagagaagcttcacagaccaaactaagtccaaataataaaatcagtaatttatcaaattgaactttttttctccatcttatacttattatttattgtaaattatgagaattattaaacagacgtatgggcttaggttccttcggacagacgatatttctttctcgacacttccttcttcttctccatgtttttgatgaacacctttaatgatcttttttgcgtagaatcctggcgaacggctataattgtataatcgttggagatctcctaataaatcacagtatctgagattcgaattccaaatccctaggtgtattaatgaacatttggtcaaccaaaccaatgtaccaccaaaggggcttacacgaactttacttttctttaggaagaaaaataaaagtcagttcaaaaaaatacattgtccgtttataatgggcttttaacgttaaagccaagcccataatgatacatgacagcccattcattttagtactctaatttggggtgaataatccgtcccgcgttaaaaaacacagaatcaaaattacttcatatcttcttcacgtgagagtcacgtgttcggtaaaagtggttgaaagttgaaacccattggggaacaaaaacctaaaggagtctcatttctgctgggtcgagaaatcgctgatagagagtagagagacacacgcaggtacgtgaatcttcgcgacttcgatctctttgtgtatcaaatcaatccgttcttgttaaagttttcatttttaatcttccaatttcaatctgggtctacttaaatcaatcgaaatctcaatttcaagctgattcttataaagtttcgatttttcttgctgttttagattttgagctgcgtgctctgttttaagcttgaaggaggaaaaac

SEQ ID NO: 2778 - DNA, 3000 bp, Unknown
  misc_feature (1)..( 3000): cDNA_ID_3069731_gDNA_ID_1620593_Annot_ID_161475 3000 nt of promoter + ATG
cggtggattaattttattttacttttttattaatgttgattcaaaaacccgtccctccaaatccgtcttgcgaaaaagccatttattttattaatattaattttacttatgatatgactctgaattataatctaaacattttatctaataacataggagtgcaccatatttatttaataggggaatgtaccatatgactcgaatgcacttttacccaaatccaccaaaacagtcttgcaaaaatgctatagagataagaaacgatagtcggttttgataaatataagattaacaaatatattagttaaagaatgcaaattgaaaaggtatattacactttattcgaatatagtatcaaaacttatataacacagaaatttgataattttttaattgttgaatattttttttgtgctaatttttatgtgattaagatttaattgatttcgtataaaaaatattaaattattttacgaacttatttgtttataatttggtaacagatagatatttgaatattcggtatattttgcttcagtttaggaaatctttaatgatccgtctttagatccactaagccctataattaagaaatgaatattgtcgttaaataattttggtaaccttaacgtcattaaaggatttgttttttattaaatttttttaatggcattgtcatgtaattaattacaaaaattaaggttacatttaaaatgtaattcccaaataatatagtaggatctataatcgaattatgatggagaaagccgcaaaaaatagttttgtttttctgcatcctcttattattaaaaaggaagtacaaattaaaattttgtctaatttggccttaattttgatttcaattttggattttgttctttgctattcaaaatcattaaggataatttagtcttaacaatctcctaaactttatatgatccgattcaatttaaaccgttcaataaaattaattttcttaaatctaaaccgttcaacaaaaataagtaaataacaaccaaacaaaaatttaaacacattttaacacattcctcttatcactaaataacaacccaaaaaaaatctcaattattatttagttatgtttgattaaaaaatttatatttataagtttaggatatcaaatttattcaaatatttagtataagaatcaaataaactgattaacctgcgataaaccgcaggttaaatcatagttatattcaaaaaggatataagagtatggggataaactaaaatgcctactacaagcaaaactaacccgggaagatagatttttgtttccttaaggattaagcccacgaaatgtattgaaattcctacatgtgtaaagcctattcgaaaatctaggatcaaattatgggaaataaaagatagtcacaagcaataccacacgcaacttgatatcaatgatataacatacacacgttattccccattgtttttgcattgtatgcaacataaaattatttgacaaaaaaacacacacataaaattacctcaataacatatatttcctgaatatgataagaatgtaacttcttctttttgggtcaaaaatgataagaatgtttgttacatctcggacttaagaccctaattaactaagggatgaagtttcatgaattgttttaatggctggtgtagctcgtgattgcgggagtaacaaggcttctcattctttgaagggatgcaagtggacgccaatcctagcaaatacaccaaatatttatattactgcatgttgaggattatgattgtatggtaactctactgcgtgtcgatgcatgcatcagcttgaagaatttctcttcttgataccttttgatccaagtatgcaaacgatgaaaaggatatgacgcttgccaaaattacggctggtcaaaattaggagcatgggctaacgactttatgaacgatcataatatgggctgaataaatgcccactactagcaaaactaagcccacaaaataggttttttgtttccttaaggactaagcccactaaatgcatactgaaattccactgtgtaggactattcgaaaatctaggaatcaaaagtcatgtcaactaaaaaacactcacaagcaaatgccacacgcaacttgatagcaatgatatatatatatatatatattttttttccgactgaatgattccattatattaggcgaaagtggaatgcatttttgaaatacaacaacgataagagtcgaaactctgtcagaaattaagtcggagaaagacaacaatatcttctgaaacctaagcccaaaagagagaaacaaactgtaagcaaaaagttacaaaaaagtaagcataaaaataacctaaaagctaaatctgaaactcaaaacatcataacctgcaatcaatcccatagtaacgattagcgtcgagctgaaaccaagaaacatgagccccaagaagaaccaactcagcggacaaactccaaaagaaaggaaatcccgaaaaagaacgaatataaaggctcaacaagcaacaacccaatagaacagataacaatgatatataacacgatattctagatttctagattttttttgcattagtgcgcaacataatattaaacctaatcaacaaaaatatgccaaattcctaaaaatgataagaatgtctcttaaatctcgaagttaagaccctaattaacttcattaacgcttcttaatctataaatatatagttcttcaaaaatctttcaacgcattaattattcaaaaagtaaacacatggaagccgtgtagttcacgcgccggtcaaatcgaaaccgtagaaaaaagcaaagaaaagaagacaaaaacggacttgacttatagagaaagacttaaacaatggcgaagacgaagacgatgagcaacaacaacaacaacacactagtaacaacagtagcatcagcttgaaagagagaactaaaacctagaaatcgagagagattggtggaagatttttcaccagatttc

SEQ ID NO: 2779 - DNA, 3000 bp, Unknown
  misc_feature (1)..( 3000): cDNA_ID_4359839_gDNA_ID_1620593_Annot_ID_161471 3000 nt of promoter + ATG
ccttaatcgctaagcctttgaatttctgatcatcaccttcctctttcttcttctccgacttaggcttcggaggataaataccgtggattgtagttaacaacgaccggacgaagtaatccggcatctctgcacctgcttccttaagattcttatcgaattcatcgactgtctcagagtgacgacctagatcgataatgaactcagccaaaactttttctgcagatcctagatgcgtttccaattcgttgcagacattggagacgagagagagatgattcaatttgttgagctcttctttttccattgaagaaaccaaaggaagtaacaacaaaaagagaagaagacactgtttctggataatcgacttctttctagggttttttcttatagacgctcgcagagttctgattttgctaatcctatttttttctgaaatagctgactcttaaaacgctgcgttttaatttttaaacatatgtaactttttctttaggatttatatttgggccgatgcaaaacaacttaaagttaatgggctttcgcagttaccttttttgtttttttcctcaatatagctaaccttcaatttgtataattgaaaaacatcagaacggccacgtcgtcgtctctcatcctcctcaaaaactctctcaagagagacaactttctcaataatacatgattttgatttatttttaatcatctttttccagaaaaacagctgagagaacccaatttagtcaccattgaagatgctcttacattgtttagaaaaacagggagataaacaatttatcttttctgaaagaataaacaaattgttgaatttttaatttaaaagaaaagtttaaaaggtttttcaatctaaaaataacgcaacatcatcttaaaaaaagaaatgagtacataatatggtagtgaactccgcatttttagttttctaatgctagtaacatgaaagagtactcagagtagaggtgcgtttatcatttataactctaaaactcaaaacaacttgaatatcttatagagaaataaacagattgttatccccaatacatacacattaatcacaaggtttcttgatcaactaaagatcatatctaactatatccaaatagtattgcaacataaaaataaaatcgttgaaaatcgcaaataagtataccacttattcaaataatactttgttactcttcttaccaatatttttcctaaatatacggaagaagctatcatatgtattggactacttggtaggaaatctttatcaacgttgaatttttattattttgtttatagaataaagatttataaagaagaaaagaactaaaattgtataaaaagttgataataccaataagaaattttcttcagtcatatccacacacaaaaaaaaatcattgaattttaaaaaaggagaaaaattaatcatcatgatgaatgtctttcggttgatatttgatcgtgtacataattcgtcccaacattaacactatgtcaaacgaaaaaataagttttttattgttttattgttggctacaaataggatgctaaattatcaaaactaattgaatcgaaggtgaaatctatgaaaaccaagttaataaatgacatatagttaactaaacactatgccctcaaactaacacttgaattactataatttataattgatgtgaatgagtatgtttattttctcgagcgtatatgcagttatatttgtgtattaggggtcttccaaaaaaaaatttaccacaaaattatatattaaaatatccatgatgggaaatgattgaattaaaatgatctcctctcttactcaagaaaattatgggccgaaaactcaaaatatcttggtaaaaccgaaagaaaatccacctctggttttattttgtgtagttatatcatgatgattttcaaaatacaagttctaaataagtctttttttttttttttctgaaatacaaatttaaactgaagttgttgatcaatatatgatctcccaggtaaataaaaaactatatacatatatgtctatatgatcggatcatcccaatcttccacaatcgatcttatcatgatgcatatcgaccaaattggtccaaagatcatatcttagaaatgttttgaactatttttaatgcatgtcgaccaaacattttttaatcgaaacacacaaattttatactaaccaaactgaatgaaactaaacatattcgaatatttgaaaaccaagctggataaatctattaaatgtttgatggaaaatgtattaaagtttttttgacataaaaggaaaacaaaagccataatggtaagagaagatggtgtccatcacctaactaaccagcctcacctacctcataaaccacatgatgaaatcgagttaccccacgaacacactcagctccatgtttttttaagaactaaaatgtttgatttgatttgtaatatttagtattactgttgacaatttgtatatgtaataaaaattgaagattgatttactttaacataagagataatgccattttgttaaatcattattaaaattgaagaaaaatttaaacagtgcatctaattctcttctttgactacatccaaacaaagaacaaaattcccaaatcatttttattcttcttttttacaagtgggcatttgtgaggttgtgaggcccaaccaaaagagcctctcactacattccacaagaaccacacaaattcaaaagtctcactcctaacacaaagaagcatccaaacgcaatcctctcacctccacctcacattcccctgtgccaccatcacttaccctttctcgcctctcctgaaatcaaaatcccattatgcaaatccattttcatcatcatcaatatcatcaccaacttcattctcatcatccatggcccatttctcatctatgtagattctcatctctctacctcctcctcattttctcctcttgattcactaattcttcttcttcttcttcttttcagac

SEQ ID NO: 2780 - DNA, 3000 bp, Unknown
  misc_feature (1)..( 3000): cDNA_ID_1807441_gDNA_ID_1620593_Annot_ID_161472 3000 nt of promoter + ATG
ataagagataatgccattttgttaaatcattattaaaattgaagaaaaatttaaacagtgcatctaattctcttctttgactacatccaaacaaagaacaaaattcccaaatcatttttattcttcttttttacaagtgggcatttgtgaggttgtgaggcccaaccaaaagagcctctcactacattccacaagaaccacacaaattcaaaagtctcactcctaacacaaagaagcatccaaacgcaatcctctcacctccacctcacattcccctgtgccaccatcacttaccctttctcgcctctcctgaaatcaaaatcccattatgcaaatccattttcatcatcatcaatatcatcaccaacttcattctcatcatccatggcccatttctcatctatgtagattctcatctctctacctcctcctcattttctcctcttgattcactaattcttcttcttcttcttcttttcagacatgactcttccttatcgtttctcttccgttagaaaccactcacttctacttaagacttctcatctctgcacacccagatcagctcttggttgttgtttctctcccaaggaatcccctttcttcaggaagaacactgcccaattcctttctcctcagaaacacacttctcttcctctgaaacttgtctgccctttagctagtttctcttcttatgcggattctgagggagaagagcaacaccatgctgatcaaccgatacagaaccctcacgaatcttctaccgtttcaaacgaatcagatgggaaaggtaatgcagaagctactggagacttttctggaatggctcaagcctttcacatttcttccacaacagcaagggcaatctctatagtcatcgccttctctgctctcacccttccaatcttcatgaagtccctgggacaaggactggctctcaagaccaagcttctctcttacgcaacactactctttggtttctacatggcctggaacatcggagctaatgatgtcgcaaatgccatggggacttctgttggatctggagccttgacaatccggcaagctgtgatgacagctgcagttctcgaattctcaggtgctcttttgatgggaactcacgtgactagcacgatgcagaaaggaattctcatggctaatgtgttccaagggaaagatatgttgctctttgctggtctcctctcttccttagctgcagctggaacttggttacaggttccatcttatcttttgcttcttcatcactaggttcaagacaggatttagtaaagttaataccttttaaagatggcattcacaaatgatacaagtagagaacgtaattgtgaacttgtgaatataacaggtagcttcttactatggatggccagtatcaacaactcactgtatcgtcggatcaatggttgggtttgggcttgtatatggaggagctggtgccgttttctggagttccctagctaaagtagcttcatcttgggtcatctctcctatactgggagctcttgtctccttcctagtctacaaatgcatcaggagagtaagtaaaacaaaccaagaaactaactttctaattctgaaagatcactaaagtcatactcaagcttctgctacattttcacactcttctttcgttctgtgcagtttgtttacagtgcaccaaacccaggacaagcagcggctgctgccgctcccgtcgctgtatttgtaggtgtggccagtatctcctcagccgcattgcctctaagtaagatctttccaatagctctatcacaagccttagcctgtggagtagcaggagccatagtattcgacagaatcatccgcaaacagctcggtcacctcctagctaaaacaaaatcaccagaaacatctcaaaaccaacccaaaaccattggtttcctctccgatatcgcaggaccaacaggtacacaactcgaaatagtctacggaatctttggctatatgcaagtcctctccgcttgcttcatgtcattcgctcacggaggcaacgacgtctccaacgcaatcggaccattagccgccgcattaagcattctccaaaacggagcagctgcaggaggagccgagatcgttatcccaatggatgttctcgcttggggaggattcggaatcgttgctggtctcacaatgtggggatacagagtcatcgcaacgatagggaagaagatcactgagctaacaccaacaagaggattcgctgcggaattcgccgccgcgtcggttgttttgtttgcttcgaaattagggcttccgatttctgcgactcatacacttgttggtgctgtgatgggtgttggtttcgctagagggcttaatagtgtgagagctgagactgtgagagagatcgttgcttcgtggcttgtcaccattcccgttggtgctacactcgccgttatctacacttggattttcaccaagatcttatcttttgtattgtgagtttctgtttcttttggttttgttatacgaagaacatgaaattgatcttcttcttctatgttcgtttgaatgattcgagtttgaaaaaaccctaaagttatcatctttcgattttttcacccatcggtgaagtatgatcaaagcttgtacctttcttgttcagtgtttcgtctcgtcgtccagtaaaatcgaattagagtgggtgacgtttggttacttctaaaacgtcttgttgtttgtttcctaatcgtaaaaacgtcataactttttaaacgacatcgtttttttttcgagtaaacgtgagacgcgcgtatctcttgcttttcgtacacgcgtctcgaacaaagactgacatgattatcttggctaaagacggaaatagccttacacgtttccccatttcagcgataaaattgagggtatttgagtcaaataaagaaatagaaatatctctcttcttctatcttttgattctctggttctacttgttcctctgttttggattgtggtggctctcta

SEQ ID NO: 2781 - DNA, 3000 bp, Unknown
  misc_feature (1)..( 3000): cDNA_ID_1818895_gDNA_ID_1620593_Annot_ID_161473 3000 nt of promoter + ATG
tcatttcttaattatagggcttagtggatctaaagacggatcattaaagatttcctaaactgaagcaaaatataccgaatattcaaatatctatctgttaccaaattataaacaaataagttcgtaaaataatttaatattttttatacgaaatcaattaaatcttaatcacataaaaattagcacaaaaaaaatattcaacaattaaaaaattatcaaatttctgtgttatataagttttgatactatattcgaataaagtgtaatataccttttcaatttgcattctttaactaatatatttgttaatcttatatttatcaaaaccgactatcgtttcttatctctatagcatttttgcaagactgttttggtggatttgggtaaaagtgcattcgagtcatatggtacattcccctattaaataaatatggtgcactcctatgttattagataaaatgtttagattataattcagagtcatatcataagtaaaattaatattaataaaataaatggctttttcgcaagacggatttggagggacgggtttttgaatcaacattaataaaaaagtaaaataaaattaatccaccgtttcaatacgggttacatcttgaatttttttttaagaccactaatattaaacatatcaaatcatcttaatttagaaaatgttatataaaaccaaaaatgttatgtggtatgtataatgttactatatataaaattaaactataaaatataaatgtattagagaatgatacaatttgcaaaacttttatatataataaataattcttaaattttaaaaattactacttaaaaaaaatcacgggacgggtaaagaaattaccgaacgagttttattttggaattgggttatatggtggatgtatttgaatcaatatttataaaattttaaaatattattaatatgttgttttaataagggttaaaacttcagttttttaacaattgtctcatggattcgtggtatactgttacttaataacaattatacactgtaaaatataactattttataaaaataaaatttgcaagttttaatatctattacctttaaaaaataaatcgtctcgcgatataccgcgggttaaaatctagtattgttgtattactctacgatgtggtgttttggttatatataaaattctatagattcgaatggaaaagaaaaactacatatataaggatttcaatttaaaaacttatcgtcaaccattgacataaaaatctctaaaccttcaattttcaacccacagattgatttcctactaaatatctcaaaaggtgctgcaaattaaataattttactggtaacaacttgttgtcctactaatcttatggttaagtctaaaccacatgtaaccctttttatataagggagagtcttgtaacagaacaagttaagttgagagtgaaagacattgattgatggattaatatattatagttttttttgaatgatgaaacataagttttcttcgttttacacatgaaaaagcttagttaattttgcagttggttaaaaggaaaaagtcgttgattggctttctcttaacacttgtagggttttttttacctcaaagtctctaaattaaataattaacacatagcagcctctaaaaagttagtgtattttgatataatagattaaccatcaccatgtcaattcaaatacaagtgtatgtcttcaaatttcattaatttattttcttctcatctataaaaacagcatcagattttctttttcaaaatggttaagattttattcacccaaaacaaaaactttttttaaaagtttttaacaaaaaaaaatcaaatcaatacccaaaaaaatattagaaaattgattgctagtaatagaatcctatattataatttgactagagttttaaccaaaattcaatactgacacatatcatttaataatactaccaaaacaaaacacatgtgaatccatccataatatataccataatttgattaatacaacaatgattttgtctacatttagccattttattaaatgctagttgctatattagctattttttccttaatatcataaaaacaatttttttggtcgcacgtattaacattttttttcctatataattcatgaatgattaaacccaagatcctcactcgttggtccttagtcttcgacctcctttaatctctccatctctttctcttaagatggcaaaagacaaagatataacggagacgcttctcactgcggcggaagaacgttctgatcttcctttcttatccgtcgacgatattcctccgatcaccaccgtcggtggcttcgttagggaattcaacgtggaaaccaaaaagctatggtacttggccggtcccgccattttcacatccgtgaaccaatattctctcggcgctattactcaggtcttcgccggtcacatcagcaccatcgctcttgccgctgtctccgtcgaaaactccgtcgttgccggcttctcattcggcatcatggtaaattatatccacgccttttattttgtggtttgcatttattatccaaaatgcgttttttttctttctttgactaagtttcattattaacttaaaacacacaaagatccaaaagttgggagatgtccaaatcattcaaaatgtttttgtctacatttctataaacaattttctatattttaatttatatcaaaagaccattaaattaaaaaaaataatttaacatatatacattaaaaatgtaaattcaaacgcccaaaaaaattgaagaaatgaattcatgattatcaatttgtagtcactagtcaaagtacaatttatttatcaaatggaccattttctcaagtttaaaaattaatatattttttgccttttgtaaaagtttcactttatttttttttgtaagatttaagaagttttgttttgatcattgtaatgaatgtgattatgaacgtccgcaactagcttggaatg

SEQ ID NO: 2782 - DNA, 3000 bp, Unknown
  misc_feature (1)..( 3000): cDNA_ID_3069743_gDNA_ID_1620593_Annot_ID_161463 3000 nt of promoter + ATG
cgagatccaagtgtacacctagaggttccaccaagttagttgcggaaggcccaaaaaaattgcactccttaattgtctcgcccccgggatagtcgttttcgtcgttgtacgcttccccttcactgagagagtcgtaagattcagtggctaaattaattgacggtaaccccagatttttaagtaaatctgcctcaacaacagttgagtcttcttcctgcgtaaatagatgtcttagtactgtaatggtatattcgagtggctgaatttaataaacgcagaatattttacctgatctccatcttcagtcgctgtgtccatactttcagtcgttaacatcggggaagctgcctcaacagctggtctcacagggtgttgttgtacgttggtagaagagtctccaacgttttgaccttctgtttccgttgaacgcatccagcggaggaccgcctcgtcatccataagccttttccacacaacggactcgtagttaggtgatcgttcagcgttgacgtataaaggtgatttgcctttatctgcaaatccgtaacttgaagtctgacttgttccaccatcttcggaaccatcatccaccgtttgcttggagacaaacaaactcaagtcctccaactcaaaacgcatagctagaaacactcccattgtctcctctgaagttatgcttactggcttcgtgcgcccaccaaaggtagtttccatgtccatccaatcaggccattggtaagtcaggtgtagtgggccttcaacgtattcctgtccgtacgcttctctaacaagctggcgcacagatgctaacttctccccttccccaatgctcaacctcctcactgcattattgtgattggatatgaataaccatgttccatcagctccgattgcccaggagccactcaccgtcctgacataacgatcgtcggttatttcggttataaccaccatcggtacctacacattaatagagttgcattaaatagagataaatcaaccatgagttttttaaaaatagcaacaaacccgaccaaaagaacattcattaattgcataccaaaacagaaatgatcgagttcttcgatgttgttggatacgtagtgtgtgctttataggaagaagtagaggtgtgagagatgatatcttgccatctttcttcttttatagaaaaggttaactttgttttttagggctacagtaactaaagatatttctagtaacagttgcttaaccatttgcagccacgcgaatttcaaaacggtatgatttccctcccaacacccgagggaggcgtgaagcgacaattcacgaatgtcaaatcgaagtggtaagcgttctttatttgtattgcatgttatcgtcaaaataaccaggtgatttacttagtctttgctttacacattttcgtgaaccgaggtagtatatcttctgcccccacttgcctattcgtaatcttgacgtcattgaccaacgtgtcaacttaacgacctgccattctgtagcgtatagcataagcacacaaaccttgctttacacaattaaccaatgtcaaatcgaagtgttaagtgttctttatttgtattgcatgttatcgtcaaaataaccaggtgatttacttagtctttgctttacacattttcgtgaaccgaggtagtatatcttctgcccccacttgcctattcgtaatcttgacgtcattgaccaacgtgtcaacttaacgacctgccattctgtagcgtatagcataagcacacaaaccttgctttacacaattaaccaatgtcaaatcgaagtgttaagtgttctttatttgtattgcatgttatcgtcaaaataaccatgtgatttacttagtctttgctttacacatttccgtgaaccgaggtatagattcagtatatcttctgcccccacttgcctattcgtaatcttgacgtcattgaccaacgtgtcaacttatcgacctgccattttgtagcgtatagcataagcacacaaaccttgtgttaaaaagtgctacactaaagaaaagggtttacacatacaacaatatattacgttggaagctgtatatcctctgacgccgcattaaatgcgtctgatacgtatctccatctctctttgctcgcgctttttattgtcacatccgggaatttttctaataattttctcttatgttttctttccaagttgctccgatatgattattgtgattttaaaacatcacatgttgtttccgtagtacttgtgctgtttaccaaatcgtagtacttctgctggtcatagattcaaggtaaaagcccattcaccttgttgaataatcaatccagtacaatactcacccgaaaaagttaccagcccaatatcgtggtatatactccatttcaatactaatttttttgttttttaatgattatttttttaaaaaaaaaatgaaataaatcctttcatagtacatgctgctgcagttgtaaattgcatgtattttatgaaacgttcagtacaaacttagaaagttgtagtaatgaaagctctaaattgagatctacactcataaatagttcatgctttatttagtagtaactgcataagtaatgcatgctttttttttttgatacgttgtaatcattgccctacaatctctagctcccctacatctacaagtctgctgtcgggaatatggttttgccgcccatccgtagaggctatatcggatatttcgcatggtaaaaaaacgttatatacccaacttttctgggagaaggtcattctcttaataaggatgtcaaatttggtcattcagtaaattaacccttaaaaaaatgcaaaataatttgtttatgtgacaaagaaatggattttatctataactatcaagaagaagaaaacactcggctatatatatacgtacaacacataagaaaaacaaaccaatcacttcactctctctaatcaaaaagcttttaacctcagccgttaaatctttctccgatcatg

SEQ ID NO: 2783 - DNA, 975 bp, Unknown
  misc_feature (1)..( 975): cDNA_ID_1810155_gDNA_ID_1620594_Annot_ID_161488 3000 nt of promoter + ATG
gatcaccgatgacataaataaactaataaaacatcgcggatttaaaacaacgaatctcgattttctctctcatcatttcattcactcttaaggcgggattgtgaagtcttcatcaatttaaaacatcaaatgagtatatgaactagaaaaagttataaaaataatataatatagtctaaaatcttttattttagactttttttccgagatatcctatgtatttttttttttcttcattaaagtttctaattttctatcctcttggtttttgttctgttttcattttcttcccgttgtctccatgaatttttttttactttttcctcataaattaattttaagctgtgttctaaaaagcggtttaggcggcactacgctcttaagtgactcgtagacaaccgctttgaccgcctaaatttgcataagttccggtttactgtattgttttttatttttaactatataaaactttcttataagtcttaactcaatatatattctttgatatgaatttaactaatttttgtttatgatttaacattttaatttttctaatagatagttatatataatttattatctataatattatattcaatatgtattatattataaacttttaaactgtataaaatcgtctaaactcctattaagcattgtaggcgttaggcgctatgttaccgcctgcctagcgttttcttcgacactgattttaagtaacatttcgagctagtctcattaacgcctctatttatatttgataattttactaattcatttttttatcttgatttgaaagaaaaatgttcagtggtaatatgattagtaaaattataaaaaaatttctttcttttattaaatacaaaagttcttaaaacgtgcagacttgaagatctccacaaacctccaaaagtctattcaaatggcagagacagttgaatccatcatcatcatcatcatcgtcttctccaaatg

SEQ ID NO: 2784 - DNA, 3000 bp, Unknown
  misc_feature (1)..( 3000): cDNA_ID_3047286_gDNA_ID_1620594_Annot_ID_161489 3000 nt of promoter + ATG
tatttaaatatgcgatatagagcaacaaaagaagtatataaataaagaaaattaactttgaatacagtaaatttagagtttttgaatgtaatgtccaatgaaaaatttaatattacctatggtatatattttaaatatatttctttaaatataaaattggaaaaagaaagattcattattttccataaaaaagagcatttatagtaaaaaaaatgtaactagtcaataaagaaaaataaataaatggaaatcttttatttataaaaacagaaacgtattcttaagaaaactgaaataaatattttccttttgaatttaacagatacaaatgaaataaatccaaaatatgtaaaatacatattatatatttcaaaacaattaagggtttaaaggcttttacataatgtacgaaattttatcctagataatgtaatttcttgcagtttaccggtgaagcttacctgaggttccaaaatattgtatacagaaccgttcatcgtggtctcctgtcgtacggagagagcatattcatcgcatactgcagaaccgtaacatcttgatatctcatttgaaaattctttctatagcttcgagagatacatcacattgatgattttgatatttttctcttgaatatcttccttttggtttcgttgttggaagtcgatccgttcaaaagcttcaaactttctcctgaacttgctttcagatttgttaagatcctcataggtttttttacttcaaacttttcctaagtcttaggtgttaagaggcccgtctcaatatatttataagcctttggtaaaatccaaaataaatctaagacctcttagtaatttttttttgaaataaaaatggaccttttttctttaagaatttttttgaattttgtaatggacccatggcatttgccctactctgccatgggtcagagacgggcctgggtgttaagaagggttttcaaagccaaatccattcaaaagcttcaaagtttaacctgaacttgctttcaaatttgttaagattctcatagtttttttttacttcaaacctttccaaagccttaaggaattgatgcataagatcatggacctttttgtcagcataagtgcacattgcatttaaaattatgaggttgattagtgtcctccattattcggtgatggttgatgatatatggtagtgaatgacgatatactagtctgttggtgatatggtatcgatcgatctgatccattagctaaacagaaggatttatttcaccaacattaatgacctgcatattttctacaaagctataccgttcacgtcaacaccatgtcacaagataaacatagttttttgtttgttagttactaataattgaaaggatgtcgttgaatagtcttctgagttcttaattacgtttcaatacaaaagccatgtatcttcactagttttgatattctattattctgagttcttaattatgtttcaatacaatttgttcaatgtataggtattctaaaaaactagaacaccacgtacatgaaatctaaccagtctagtgtcagtatcaacaactttgttttcgttcacctaatatgctcatgttaaacaattggagattctaattgcaaatcaagataatcattatctaaaaaaaccaagaattttgaaatatatgttatattattgttatagtcagttgtgtttttatctttctgttatataaaaaataggtgacatttgtccatatgcgttgctactgatgtttactaactatatgatatcgagttgaataagtattccaataactttgtttttaagtttcgaagctaagatatatatctatagaggaataactaaccggagcattgactacctaattctgctcatggttgtgcacctgccccggcccacccccacaaattgctacctaagttcgttagtgtatataacttacgaaattaaaaataaaatagcttcatctatattatataatttgttatactttttttataatttaggggaaaaacccccaaaaaaaaccatcgtctaatttaaatttgtccatttaataccaatttattgaactctcacataaccacctgactacgacaatatattcgtaacaattaaaaaagaaattatatatatagtaaacaccatatggttaagttttaactacagctagtgattccgttacggtcgttaattcagatatctaattttgccaaaatttaaaaaacaaaagtttttaaaagacataaaaattaacttagatattttcggacaaatttcataattcagatattaaacggggaaatttaaattagaccgtgttttttgggttttttcctaatcatttataagtgattttttctgtcttgttatttcttatattattagtttattacatgcataataaaattattcatgacaatataaacacttggatagcaaatactttcatgaaatactcaagtctcaacaactgacaattctcctaacaattataagtatccacgagagactttttacctagatcacgttcttgatagatagctttattctaatttagtgatcattactgaaatttgctacatatttaaatattttaatatatatagaaattatagtatattattttttaaagacatttttttattttatattaccaaaatttgaattttcaaaaaaaatccttataaggagatatataatgagaattaagaaaagttgaccaaaaaataaattaataaccatataaatgtatattatataaaagtttctttcaaagaaaaaaacaaaaacaataatatatagaagttgtgcaggtaaagagatgtacaacactttttattaaaggtcaagtaacaactcaaacaagtgaaaaaaaaagaaaacaatttcactttttttggaatgtgtgtctctcttccatttccatatattatataaacaccaaatgagatctcatttttctaataaataagaagaaagaagagagaaacaatg

SEQ ID NO: 2785 - DNA, 3000 bp, Unknown
  misc_feature (1)..( 3000): cDNA_ID_3069755_gDNA_ID_1620594_Annot_ID_161498 3000 nt of promoter + ATG
cactgaaatgggtccccaaaggtctatatgtaataactcaaaagttgaattacaaatattgtttgaagactgaaaagacaacttcttctgcttagccaaatgacaaatgtgacaataagcagatcctttattcttgtgtttagtagtcctcaaaatgtctgaaatagcatccagtcttgagtaagctggatgtcccatcctcatgtgccataaactaacatccaccaccgcattaacagagactgaatccaatggaggtgtagtatccaacacatagaggttgccaatgcgtctacctctgccaattctcaggtccttggtaagatcctgtatttcacaacatgacggatcaaagatcactcttgaaccaatatctgaagtcaaactactgatgctgatcagattcaaacgaaactcagggagaaataaaacatttcgaagaagaatgttttcatttatctgtactgaacccactccactgattttaacacgtgatcctgttgggagattcacataactcaccacagaatgatccaaagaaacaaataggctcttatcatggcaaacatgatgagttgcaccagagtctatcacccaagtttcagtggaaagagtatgttgggatacattcaatataccaacaaagtagtatgtagagttagagaatgagataccagtgtaatcaataggagaacgtgaaattccagcatctgaagaagaagcagttggttgtgacttcagttgagaactgaacaaggctatgaagttctgaagttgatcattggagagattaccaagcagaccatctagagtagcctgagttggaaccatcggaggcaataaagagacctgagcagcaaccggttgaggtttggtacccttctctggtagtttgcctttaaaaccaggagggtaaccatgctttttgtaacatttctctgcaatatgtcccaccttgttgcagaatgaacagattggacgccctttattaggtccattctgaacatagcaaatcttaggagtcaaagcagtagaagatatcttagagacctgaaaagcagcaggaggagaaacattggtagagaaacctttctgactgtaatcctggtcaagaatattgtaaacttcaaccagagaaggcaaggctttctttgcaatgatctgtctcctgactatagagtaggactcattcaaacctgccaagaatttgacagttttagctctctctgccttctgttgcagacgaagaactttaccacaagtacaaggatcatcaggttcctctgtactgtccaacaaatcccaaagaatacgcaactgagtatagtactcagatagagaaagagaaccctggcgaaaatcctggatctcctgtgtcagattgtacgtacgaggaagattagtcatatgaaaacgtccataaatgtcacgccagatatctgtagcatcattcatgcgtagaatgctacgataaatctgcggagacacagagttcaacaaccatgatttcaccatactattacatctggaccaaaggcgaaagttcccatccgattcaagtggacgaggcaaagaaccatcaacaaaaccaatcttattcttagcatctaacgagatccgcaacgctgcactccaatcatcatagttagtctcatctaagcggatagagacgagattcaaacctggatgatcaccactgtgcataaaaaacggagactgagtcggatccatggaatctgaagtcacaacagctcgcgatgcgccagcagagagcagatctacagctggaggagagatcggaggagagactgtgagaccagtggatcgcgacgatttccatggaacggagcttatcgacgcctttgaacgagtggatttccgagttactcgagcaacagccaccatctttacagaaaaacgagtagtgaacaagaaaaaaacgagatcggagaagaagaaatctgatcggaaacaacaaaaacttagctcgttggctctgataccatattacaagataaggattgagctgagctagggagaaaacttgttaagattttcgattcttatttcttaaagagtaaagtgtacaacaatttccttatatacaattggtctaacttaaccagtcaattaaaccggagaataatctattctaactaaatcggatggtatatatactccaagagagttgttattatacctcaagagcgtaaaggtttagaacgaacacaagattcttgagctgcgaaggctgaatgaagaggtggacaaagagattgctctgagtaagtcatgtgcagcgaagattgttcaacagcttgaaaatgtgaagcatcacagttgcagataagtaagttgttgtctcagagataggcaagcaaagaaaatggtgtaacttgaaggtgctgagaaagtgactgcagaaaaagagagcacaaagagttaacggcgattccattatctgcaacattaaacaaagataaaaaaaagaagaaattttcacagaagtggacgaaaaaagatttgccctcaccgtttgtcaaagtgagaactggttttcacggtttctcttttcattcaatttcggaccaaattaccctgggaaaacttaataatggcacaaaccaaaccgtgcaacagttcgtatcggttcagttgacggcgtaaaccaaaccctacagcagttggttttggtttagttgatgcggttcagttttgaaaaagacaaaaaaaaaaaaaaactgaaacgaagaaacccgagaaaacgaaaaagagaagagagtaacggagagatttgagagagaatcagaaagcgaaacgaaattcagtatccattgcttcaaaattcgacataacttcgaattgttgggtagttgaattgagccactgaactcccacatccggggaagtgaaagttactgtttttcccggcgaagccaagagaaagttactttttattccggcgaaatttgaacctccggcgagatagcatctttagct

SEQ ID NO: 2786 - DNA, 3000 bp, Unknown
  misc_feature (1)..( 3000): cDNA_ID_2171559_gDNA_ID_1620595_Annot_ID_161501 3000 nt of promoter + ATG
gcttttgcatttcatagatgttatcactcatatactcgaccacacctagttgtctggtaacagaatgtgcagtcgagtatctttgttactgtctctgctctttactcaaccacacccagtgcttggcaacaagttgtgttggtcgagtattttaactgtttctgcttgaatttctatttcctacatgttgccttaggactgttgaaactcaaaacctgttattgcttggcttgactctgtgaactttgattgcatcttgattgctagcatcacacccaatttggattgacaacctttagtactacaacgacatgatagtgctttaggattaattgatcataaaatcctattatcaatttggcgcagttgcccattgggtgtttatttgttacatttaagatttcagactagcttagatcaagttccttttcaattttcacttcaggtactaactgtgtgttttgcttgttgtctttttgatccaggtacacctctgctgtatgcaaactcaatcaaacggtatccagaacctcctttacaacgataacatcaatcgcatagctcaggaactataggaaggagaaacacagtcgaccttgtacaacacaagcaactactcgaaatggctgatgaaccaaatcaagaaaatggacccgcaaacattggtgctgagatgcaccaaggaatcaccgtcagaggaaagaaattgtcccaagtccagttgctgctaatgttaacaaagcggagacgcaactctctgacattgacccaaatcataatgccttggaggagaactcccctgacaatgaccgcgatatgttttgagcggaattgacaggtgattaaggttttctttataacccaatcccttcatttgctaaagcaataggtgatctcccaggaccggtagaagtactagcactcgagctgcgcaaaagataacaaacttatgagataggagaagcatccggatcttatcgaaggagaagggtggcgtcagaaattaaaatgaggttcaacattcagaggagtcaatgggttcagaggataacatcaataataagagtcaggatagagccgcggtggggcctgtaacaccaaaacctctatgagagttggattttggaactgtcaaggatttggacgatctttgacaattcgacccctagaggcaatacaacaggtgtactttctggatatgttgctattgattgaaacagaaaaacaagacaaatacacaaaggatttaggagtcaagttgggatttgaagatatgtgtattgtttctcctagaggtttaattgggggttttagtagtgtatattataaaaagcatctttcactttaagttatttctcatgatgtaaggcttgtagatctttatgctgaatacaaaaattttaatttctacttgccttgcatctatgggcatccaataccaagtgaaaaacatcacctctgggaaaaacttcaaagattgtcagcaaaccaaacagatgcttggattatgtggtagccgtcaaagtattggccgtcaaagtattggcatcctacaagacttcacaagtacaatcaattgctgcaatatgaaggatctgaaatttaaagggaaccctttcggttgggtaggcaagagagagaaaaagactatatagtcatgtttggagagagttttcataatgctgacttgcaagcctcttttccaacttctaaaatagagttcttacgattgttggatcggatcatgcccctgtaataatagatattgcaaatgagatttgcactaaacagggccaattcagatattatatatgacatgttcactctgaagacttggttgacacattgcaaatgtgttggcaaaggggacgaattgatgcacgaaatggatatcaagataagcttcgaatgtgtaaaaaagaaaaagcaaattagaagaaaagaacaaagaaaaattcagttgagaagattcaggctctgaaacaccggttagatgctgctgagagaaactgctcgacatcccaactaacagttaatcaacttagacacaatctgaaccatgtttatagagatgaagaactttactaacatctaaaaagtagaaacaaatggatgagactgggacttcgtaatacaaagtttttcaatgcatccactaagatttgaaagtctcgaaatcgaactaaggcaatcactgatgaccaaggaatggaacagttccgcgacgatgctattgggaaagtggctgaaacagactttaatgatcttttttctacatcgtagaatactggtttgacggaagttatttctaaagttgtacccaaagtaacagatcagatgaatcgagagttattatagtcattattagatcaggaaataaaggatgcagtcctttcgatttaggcaaatagagctccaaattttgacagtttcacggctgccttctaccaacaattttgggacttgatagggaatgatgtctgctcaatggtgcaccacttctttgaatcggatgacatggttatgaatctactactaataaaagcaacagtttgaggcttctcagcctagccacatatgcattctcaaaaacactctctttaatggacacgtcaacatctttctcaagacagaaaaaacaaagctacaaaaatcaacgcagctttagaccaattactataaaaaacgcaggcccaaacaaatttaatccataatgtaaactctaatctacaactaattgaaacaaaataaaacattacaaggcccaaaaaaaaacacttcaaaaaagaaagcccataccactactaatttaacaaaacaaaaattagccccaataaaaaaccttcgccatcaccacctttcaccgtcgtcttctttctctcaaattctagcgattcagattcttcaaaaacaaaaactgaaaacgtcttatcaaatctccactccctcatcttcaatcccccatacattcatttcaattgacattaaaagaaactaatg

SEQ ID NO: 2787 - DNA, 3000 bp, Unknown
  misc_feature (1)..( 3000): cDNA_ID_2171601_gDNA_ID_1620595_Annot_ID_161515 3000 nt of promoter + ATG
caatgacacacctctctctgtacttcttctgatccacctgtgtggatacaagagctgggctgtcaacaataaccataagagaatacgaggcgctctttgtattggcggtgttgtgacaccgattctgatcgcttgtggagtcccaatcacatctgatggactcgagccacgggcaatggatatcgagcatctacgtcactgcgaattcgtggagttcgcaatggttggcgacatgcaccgtttcaggtttgagcactctacggataagagagctagcatccttctccccagcccagaggttacacgcataatagagggagataacattgattttaggcctgagcttggaaacctctactatgagaacgctccgccattggatgaggatgatcttatagaagaagctgctgaggatgggatggatgaagacagagcagtggagtttgacactagcatgtatcattttagtgaacatgtacctccagcgagggagagcaagagcttgagtgaagctcataggaacaatagcaagctgcagaagtggtgcaagaagcaggacaagctactcgccaagtgcctcaagactatcaagtttctgacggatacgctgagctgttcctcttacactacaaatgttccacagggacaacctcctctagagatgccatcgaggagatttgatgagcctgagccaagtcagcacaggcctgagcctagtgagcagagagtctcacatgtccctgctagacattcatcattcgagtctcgggagcacaagagaagaaggaaggctacactcgttcgctctagcagcagatcacgccttattcactcgaggagatcactcgaccacggtgctggtcgcagcagaagaagagaggtcgagtatcctcagagcggtgttggccgccatagagctgatgaggtcgagtacccacatgctggagctgatacagaacagggcgggtcgtctatggcctgggagcaatcacaggcagccattgacgaccaactccgttcattctttgagtgaggtaagcgcctcacttcaccattgtattatatcatctcttgtgatttgttctttattttgtttctgtgattggatttgtcctaagtactctcttccaagtttagtcacacagtggattgtgtgttttaagtttgggggagggctcaggaagtgtgtgttgcattgtttatactcttgagtctgcattcatcaaggcataggaaaaaaaaaaaaattgaaaaattcaagaaaatgatttcacaaaaatagagtgttcatgtagttgcatttcatttaggatcgagtctagagtgtttcatttaggattgttgcatatgcataggggataatgatgagatagccttgtaagcattttggttcaccggataaactcagtgccctcgttgctagttgtctgttgcgtagtcaatgaaattgaagtaaaactgaaccatgcctagattgctctactcgaccacactgtcatgatctgataccattccctatcaatttgaacctgaatttgatctttaattatcttgtctgcatcaaatttgaactcatggataccctaaaatacctggattttcttattcattttgatcactcttgttaatccaagtagctgactctccttattaaagcagttaacccgaactcaaacctagactttctttcaagccctatatcacttgtgagtgtttgtgaggtcttattccgattaagcttggtagaaagtgttaggttcgtaacgatagagatagtgtctcatggagttctagttcgcatttttcggactagataggactaggtgggcgcttatactttgggttgggatgtgtcttaaagaaaaaaaaaaaaaagggttgattcattgatgagaaagggtaaaagactctaggtgaagtaagctaaagaagcaaaaaagtctagtaaaggttttgagatatgtaaagaaaagaaagagagagttcttgttagcaattgaagatgggcaaaagccctcggctttaaaattttaaaaaataggaaccttagttgtcaaagaaatccaaatccgctagatgtatcaaagtgttgagaaagcttctcctaagagttaagagagaagaaaagaatgattagaaaaagggcttaaaggattcatgaatgcaaagggtagagttaagttcttatactgggattggagatgggattaccattagagcttcatttgatatactctgggtagatgggatcttatctctgtatgcatagcttgggacttacctttagcattctactaaagctcaatcattttttgagagatcccctgttgctgaagcctattctataagggaccatctttgtctcttggcctttaccttagccaaatgagttcattgatgatacattgcttgattcacgttcgagaactaatgaatgttaaagggattggtagatttgaaaacattatgtaggtcgagcaaatgagtcggattgattgataacaaggcttggctaacctttttgagtagaattcgatcatatcgtaacttagaactatcaacttggacattgatttcatctgatatacctgctttggctctgagtccccgccttcaaacctcacctccagcttgttcttaattgtttgcttagggcaaacaaagactaagttttggggagttgataagtgtgcattttgcctgttttgagcatccatttgtcatcactttagcatcatatcatcactgttttatatcatttgtcatcatttgtcatcactttgcatgtttaggatagttttgcatgcatgttgcatatttgtgttgttttcaggtgatttggagctgttgacgagctaattcaaaaaagcggacctgatcatgtcaaaccactcgaccccctggtcgagtagacgcttcacgacctcaaccgaccactcgacccccctggtcgagtagaagacttgaccactcgaccacctggccgagtatgatgtgatc

SEQ ID NO: 2788 - DNA, 3000 bp, Unknown
  misc_feature (1)..( 3000): cDNA_ID_3069772_gDNA_ID_1620595_Annot_ID_161522 3000 nt of promoter + ATG
atttacgactacaactaaataattaggtgtacctacttaacaatgcaaaacatgttttccatctactttatacgactacggtgcgacgtttctacgactacaggacgactagacgacttggtcggcctgtagtcgccatattagcgactaaataaaatagacggtagaatagtcgttaattagcgactaaacaacgacaacaatatccctccaataatataatcgtcaaatagtcgtcacttgccgacactttgccgactgcatacgatagtcgtaaaacaacgactatgtgactacaatttttcgtgttgtcgcaggcgagtcgtaaatccgtcgccaactagtcgtataatgttacgactacgtttattgtcgctgattgtagtcgtcgtttacctgttttcttgtagtgtattgtatccttacgactgatttatggctgaagaccaagcaagggattaccctccaatactttacccagagggggattctaatctggaggctaaagccattaatcacaacatcaagcttggagatttccctatgattagagaatcaataagacaagatacatgggatgaactgaaagagacaccgcttggattaattgctaaacttgtttatagccattttgtatggtttgtaagactgtacattatctactatgcagacagttaagagtactgaagaaggagctttggtgtctcgtggctggtcaacccatccggtttggcttgaacgagttttatcatatcacgggtttaaacacagatccactgcctccagaaaagtttgagcttaaagcggactacaaagcgttcttcagtgaattgggtgtagtgatataaccctatttttaccgattttagccatgatttaggtataggttttagagcctaattgttatttctagagtgttttctagtccttttcaggtctttacatgtttgggatgcatttggagattatggagcattctggagatcagcagacaacttaagctgcagaagcaattcagagacgaaaatgcacgtaggtgtcgaacgacaccacccctgattttgagcgacaccaatacctgacggcaattttgagacacaacttattgatgttttgaagatttccaaattcggcccagaactttctcctatgtttaattaagacccatcacgtttttaagacatatatatagtttttaggtcattgttttagacccgaagcttggtgagtctattttcaatctcttttgtactttgggagcaaaaccatgtggaaactccctttggatctttcttactctatcctcttcttgttttattcagggatttctattctaatcatgttgtttacttcattcatcatgcttgagtagttttcctgttaggtttacggtttctcattagggttatagatgatttagtagatggcccccttgctaggttatctgtagaaattcttcatcttgattgttcttaatgctagttttagagtagctaactagaacttgttcttagataataagtatgcccaccataggtacttgctatttgatccatcatagatgagcctaggcatttaagaaagaacaggtaggctcatagaagggctctggtttagatactaggtgaactaatcaaacttgataataatgcatgtttaagttaaagatcttttggcttctccggttattcttaactatagtcatcgagagtttcgcggaacgccaccggttactctaaaatcatagtttgagttcgagaacggtttgataataacttagatatttctagatctactatcatctatttcctgagaataccctaagcttgacgcttttattatcttgtttcacaaccatcgattgctattgtttacttttgtttctctttattttcattactgttttacttttcttaattccaaaccttagtttattgcgtgatccgagaactttgtgaattcgatccctaagtgctgcaactgacctctttatttgagagagtggtcttaggattaatttgacctatatcaaatttggcgccgttgccgaagatctctttgagtcaccattagactaggtgtagaatttagactaagcttttatttttctttcttttgtttctcacgcattttctttcttctttttcctataacaggggagctaaaagatggaacgcaacaaactgctggcagatttcgacgacagtgtcgaccgacaccaactgggtgtcgatcgacaccatctgcaaacagacctgctaccataggcgacttcaacagagctgatcttttctactccaatcgatcagcgatcctgctacctccttttgcaagagaagactttgctattcaccctgcctaattatactcttgtttcacgaggaaagtttcgaggacattctgatgaatcaccactagatcatctagaagtcttcgaagatttagtgtcctcaatcaaagtagaaggtgtaccagctaattatcttctttgcaaacttttcccacactctctcgcaggcagaggaacatcatggctgcaacaacttgaaccaggttcactaacgaattggactgacatgaagaatgcattcatgatccacttccttgatgattcattgacataattactgcgggagaagatctcttcgttttctcaagctccaacagaaggtttgaatgcagcttggatcagattcaaatcctatcagagagaatgtccccaacatggtttccaagagagccaactcatcaatatcttctaaagagggatagccatgccataccaggctcaacttgatgcagcgagctactgtaacttcatgacaagaactactagtgaagcattactcctcattaccaatgctttaactagtcgttcgacacatgaatttgacactgaacgaagaatttcagctgagatagccaccgcaaataaagcgactcctgtttcagcaatttctgctcctatcttcccctccaccctcatcagagaccagaatg

SEQ ID NO: 2789 - DNA, 3000 bp, Unknown
  misc_feature (1)..( 3000): cDNA_ID_2171597_gDNA_ID_1620595_Annot_ID_161514 3000 nt of promoter + ATG
ctttatctccattgttgtcccattgcatagaatacctgaaaagacactaaaaagactcgagaaataacataaagactcaaaatcctatacctaaaacatagataaaatcagtgaaaattgggttatatcacaataccctcatcatggcttcaagaaagcctctctgctcagcactctttacagaggagttctaccacgcatcagaatgcttctggataccgccagcaatgggaatttccagaacaaggatgttgaagaaggccgggaattggttgagaaccttgctcaatcagatggtaattacaacgaggactgcaataggaccatcagaggcacagctgattccgatgacaaacataggaaggagatcaaagcactgaatgacaagctggacataattctacttagccagcagaagcatgtgcacttccttcttgatgacgagcagtatcaagtccaagatggggagggtaaccagttagaagaagttagctacatcaacaacaaccagagtggctacaaagggtataacaacttcaagaccaacaaccccaacctctcctaccgcagcaccaacattgctaatccacaagaccaagtgtatcctccacagcaacaacaaggtcagaacaaaccctttgttccctacaaccaaggttttgttccccagcagcaatttcaagggaacttcagccgcaaccaccacctgtgtttgcacctcagcaaaaccaaggtcttgctgctcctgatcttgacatgaaacaaatgctacaacagttgcttcacgggaaagcatctggctccatggagatagctaagaaaatatctgagttacacaataagttggacagtagctacaatgatctaaatgtcaaggtggaaacactgaataccaaagtccgatacttagagggacattgcatcttcttcagctccaaaacagataagccaacttccaggcaaagcaattcaaaatccaaaagaatatgctcacttccaacttgagaggaaccaaagacagtcactgaggacagtgaagatcaagatggggaggatttcagtctcggtaaagatcgagctgacaaaccactcgagcagccacttgaccagacactcgagcaaccactcgagcagccactcgaccacgttactcgaccaaatactcaaccaaccttcctagcaacatcaccaactgctccaaaaccagttgttgtcaagaacatagaaaaggtctttgttcctcctccttacaaaccacaacttccatttcctggctgtcacaagaaagccttggcagataagtatagagctatgtttgccaagaacatcaaggaggttgagttgcggatacctcttgttgacgctctagcgctaatcccgaactctcacaagtttctgaaagatttgatcgtagagagaattcaagaagtgcaagggatggtagtattgagtcattaatgcagtgctatcatacaaaagaagatcattcctaagaagcttagtgatcctggttcattcactctaccatgctctttaggtccattgcctttcaacagatgtctatgtgatttaggagcattagtcagtctcatgccgctctctgttgccaaaagattagggttcactcaatacatatcctgcaatatatcccttatcctagcagacaggtcagtaaggatccctcatggtttactcggaaacctaccaatcaggattagagccatagagataccaactgactttgtagtcttgaagatggatgaagagcccaaggaccctttgattctggggaggcctttcttagcaactgcagaagctatgattgatgtcaagaaagggaagattgatctaaaccttggcaaagactttaagatgacctttgacgtcaaagacgcgatgaagaagcctactatggaagggcaactcttttggatcgaagaaatggatcagttagctgatgagttactggaagagcttgcagaagaagatcaccttaacagtgctttaaccaaaagtggtgaagatgagtttctgcatttggaaactttgggataccagaagctgtactcccataaagcaatggaagaattacaaccttctgaggaattgaatggaccaccaacataggtaatggtaatgagcgaagaagggtcaacacgagttcaacctgcacactcgagaacatactcgaccaatgactcgacctcgactgtcagcgactctggagagctgatcattccaacttaagatgactggtctgaactcaaggcaccgaaggttgatctcaaaccacttcctaaaggtctaaggtacgcattccttggtccaaactctacttaccttgtgatcattaatgctgagttaaatgatgatgaagtgaacctgctattatctgaacttaaaaagtataggagaacaattggctattcattatctaacattaagggaatttcacctagtttatgcaaccataggatccaccttgaaaacgaatcctattttagcattgaaccacagaggaggttaaatcccaacttgaaagaagtagtgaaaaaagaaattttgaaactgtttgatgttggtgtcatctaccctatatctgatagtacttgggttcttccagttcattgcgtccctaaaaagggtagaatgactgttgttaaaaatgaaaaggatgaattgatccctactagaactataactggtaatagaatgtatattgattatagaaagctaaatgctgcatctaggaaaaatcattttcctttaccattcattgatcaaatgcttgaacggttagctaatcacccatactattgctttcttgatggatatagtggtttcttttaaataccgattcaccctaatgatcaagagaaaactactttcacatgttcttatggaacttttgcttataagagaatgccatttggtttatgcaatgctcctgcaacatttcagaggtgtatgacctctatattttaagatttaatcgaggag

SEQ ID NO: 2790 - DNA, 3000 bp, Unknown
  misc_feature (1)..( 3000): cDNA_ID_2171657_gDNA_ID_1620596_Annot_ID_161535 3000 nt of promoter + ATG
atagagattgattagaaaaaacttctttattaccaatttaaataattaccaaatatgttaaataataatattattcatagaaaacagataactataaaatcatataatagggaaaaaaatgttaattaatatttcttacataagatagagaaaaaagttctcttaaccctgaacatttcaactttggaaatgaaatttaaaaatgatctttgaagacatgttaaattatcagaattatgactcttttctttgtttcttatatactttttttttaaatctttcttgtggttttggtaatttgtatttaagaatttgtttaataagaaatctttcactttacatttcgaagtagagtttttggtcgatgctatcagataagcatcaaagacaaaatctttaatgacgttagaagtatgataatttttgctattaaagagaaaaatataaaagttctattctgacaaagactctacacgtatggacaacatttttgctatttaaccatttatgcacatcaattatttgggggaaacaaaagcactctaaatttgttgcgcatgtcttactataattaagttaagataagtaaccaaaccaatacatattcatattgaaaaagagaaggtgtctgctgacatcagccatacaaaggttgaaatggtttaaagtttaaacgcagtggtatgaggatgaataccggagttacgcaagttcttacttctctcagtcagtttttactgcattattaatttttgtaatagattttcgctagtgtatcattaaattgttgaacctttagtatttatgaatgtatatttatatgtgtatgtatgtatgtacgagtttgtttcgaacaagaatacaagatccacaactcgagaaaattatttgaactacgaatcttgaaaacaaacactccttgaaaactaaatgaaattgccaggttgtcttacaataagatatatgccccagatatactttataataaaattaaaatatgtaaattttgtttaagattataaagcttctagaatgattattatggtacatggtgctggacccatttagtagttcgtcacttagattgcttactattttagcactctatttatgtgtagattattaaacttctccgactataattgttagcaacatttttattattagtttggtttctttaaaatatattacagtctgttggtccacaatttcttcatatcaaaatatgctatataaatcaattttcgtgtggatattcgaattcgtaatttaaaaagaaaattcttgaaatgtaattataaataatttatttataacaaaaaagaatatttgcaaagaaaaaccggcaaagaatgaatcaatataaggaaaagatcatgagagctatacccatttatgatattatgcatgtttcagattgtcttgtcaatcatgcggatgacgagatgattaggaggatgagtatatttgtttctgatggtttccatacgtaatcaaaatattacatagtttactactttactttttcttactatttaacttgtttctaattttcaatgttcaatcacaagtcgatcgatgactaaaaacttttcaaattattctttcatacatttatccggtgtattcttaagttttctaaaatttacaagtcggtagacgaccagtcaagtacaaaataaatcgaaaatttatgatttttatcaactaaaataaaaatggttcaaattaaactagtaaaaaatatgctataaaatctaattgattaaaagatattaaatatatttaattttgtataaaaaaataaaaacaacacttaatttgtaaaaaacacatttaagctacaaatatattgaaacagaggaataagacttaaataattattgttacatcatgtgattgtagagctggtcgacacctcacacgtttaaacaattagatgtttctctcatattccatacgagaaggaccacaagttaattaaatacagtagtggtataaagtaagaaaaatgaaatactacattttgactaaaatagattaaaagacttgaggatcgagatagagcaaagacccattgaaagaagtttgaaaacttgttgctaacgtgtatatataagtccagctaccttactattactaaaagaaatattcattaattatttagtcttttcttaaacaatataattatccagtctaatgccccaactactattaaagtatataaaacattaaaattgttaaacaagagaatgttatttagtgtgtgaacaaggcaaggctccgggtttttttttacatttcacaaggtttttgtacatttgaatcattgatgtgtctttcactctcatttttttttaattgaatatacaatttattaaaacccaaccaaaaaaaaactgtttttacgggctgcatctattcgagtttttaaaaaggattagttaatgaaaaataatgtttatgtacttctggatgcaaatcatatttgaagtgctccatcatatacttatacacgcatccatgaaagtcactgatggggtgagggagttgtaattatgttaatgtttttgactgtttatttatgttaatgtttaaacattgttattcgactaatcatttgattgatatatatatatatatatatatatatatattatatatattacttttttaatttataaattttactttatttaagtacgattttcagtatgcatcttattagaataaatgggttgactggttatcttggattaacctgatcttggtttaatgttgtaatttagccttgtgtatataagctttttattttatttggtcaaaacatttatcctttcatttaaccaaagaaggatatagagtacaaaacatcaactctaatggtttgatgcataagacaaaattagagcaaatttacaacaaaggtagctagaaagattgagaaagtcttaaacaaaagggataaatccatacgatcctacacagaagaaggcaatg

SEQ ID NO: 2791 - DNA, 3000 bp, Unknown
  misc_feature (1)..( 3000): cDNA_ID_2171663_gDNA_ID_1620596_Annot_ID_161537 3000 nt of promoter + ATG
aaattttcgatttattttgtacttgactggtcgtctaccgacttgtaaattttagaaaacttaagaatacaccggataaatgtatgaaagaataatttgaaaagtttttagtcatcgatcgacttgtgattgaacattgaaaattagaaacaagttaaatagtaagaaaaagtaaagtagtaaactatgtaatattttgattacgtatggaaaccatcagaaacaaatatactcatcctcctaatcatctcgtcatccgcatgattgacaagacaatctgaaacatgcataatatcataaatgggtatagctctcatgatcttttccttatattgattcattctttgccggtttttctttgcaaatattcttttttgttataaataaattatttataattacatttcaagaattttctttttaaattacgaattcgaatatccacacgaaaattgatttatatagcatattttgatatgaagaaattgtggaccaacagactgtaatatattttaaagaaaccaaactaataataaaaatgttgctaacaattatagtcggagaagtttaataatctacacataaatagagtgctaaaatagtaagcaatctaagtgacgaactactaaatgggtccagcaccatgtaccataataatcattctagaagctttataatcttaaacaaaatttacatattttaattttattataaagtatatctggggcatatatcttattgtaagacaacctggcaatttcatttagttttcaaggagtgtttgttttcaagattcgtagttcaaataattttctcgagttgtggatcttgtattcttgttcgaaacaaactcgtacatacatacatacacatataaatatacattcataaatactaaaggttcaacaatttaatgatacactagcgaaaatctattacaaaaattaataatgcagtaaaaactgactgagagaagtaagaacttgcgtaactccggtattcatcctcataccactgcgtttaaactttaaaccatttcaacctttgtatggctgatgtcagcagacaccttctctttttcaatatgaatatgtattggtttggttacttatcttaacttaattatagtaagacatgcgcaacaaatttagagtgcttttgtttcccccaaataattgatgtgcataaatggttaaatagcaaaaatgttgtccatacgtgtagagtctttgtcagaatagaacttttatatttttctctttaatagcaaaaattatcatacttctaacgtcattaaagattttgtctttgatgcttatctgatagcatcgaccaaaaactctacttcgaaatgtaaagtgaaagatttcttattaaacaaattcttaaatacaaattaccaaaaccacaagaaagatttaaaaaaaaagtatataagaaacaaagaaaagagtcataattctgataatttaacatgtcttcaaagatcatttttaaatttcatttccaaagttgaaatgttcagggttaagagaacttttttctctatcttatgtaagaaatattaattaacatttttttccctattatatgattttatagttatctgttttctatgaataatattattatttaacatatttggtaattatttaaattggtaataaagaagttttttctaatcaatctctatcgtaatggattgatgagatctaattttaaaaaaatcctaatgaggaataggtcctctctccacctataaatatatatatttaaaccatcataagaatataaaaaacacaacacgttaaaaactaagtttatagacaaggtaagagaaatctgctaacctaaaaattcaggtaatccgttcacaaaaaaactatctgcaacaatgaatagaggtaatcttataaacctcctaatgaatctattatgtgattaacttaaatatttaaaaattttaggggttcatgtaaagttacacgtacatcttaatctagttttcaagtacgaatcttgaacgtaaaaatgtttaaacattcagattaaaaaaagacagaagatcgtataatctttggttacttggtttaactaattcaagaaaaccctaacattgccataaatgttgatacgtacagccgaaaggccacatggatacaaggtgagtcatcgttactttattgtatggaaggcattttctgatttgtttattgcccgatttagtatacacttcattaggcccattagttagagcataattatatttttatatttgtaaactaatcacaaattactcttaaagcatgcctcttttttcgttattttattacacagatgttgagattctagtggctcataagttcctttcgagaatttaaagacaacccactaatatattttataatatatattttccgccgagaactgaatccagaacaaagttatgcctctgtgatgatgtctataagaaactttttaagtgtccaaagacaaaaccttgttgttcaagaatattttctttttggtgatgacgaataaattcatggtacggatctatgtatagatttggtaatagggtacttgtagaatcctaattgggtaagaaaataatgagctggttctcattatggtatcgacacttgttcgaagaatagtggcttctcaagattgtttccgtgattgaggaagtctagctagtaaaaaaaaattatgattgacgaggctaatgataatgcatatgctacatggttaactatagagtctataagtacatgaaataaaatatttagaatcaaaacacccacaaaaagtaagaagtgactgttgtcaagcatataatagagatccacatactatttatatccacacgcacatgttcaagcagagacaaagatatagaaaacataaacatagaagagcaaattaagcaacagtcttacacagacagaagttgtagaattgatttgtgagtgaaaaactatttaagactgaacaagt

SEQ ID NO: 2792 - DNA, 3000 bp, Unknown
  misc_feature (1)..( 3000): cDNA_ID_2171849_gDNA_ID_1620597_Annot_ID_161568 3000 nt of promoter + ATG
aaaataaaaaatcatcatcttcgactattcatcgtccgaccactaacattttagatttttattcagtactttgtatctattcaccattttttttattgcaattgttattataagatcccagttatccattggaaagagagataacactaccatagaaagaaatcttaattcgaacgaatcttgctaagattggaatttttgtttttgtttttgaaccacataaatattgcaatttctaaggcataatatttaagagatctttgctccaactctaaacaagaattagccgtaaaaaccatactcattcctttatgctctatataagagaaggtaaccatctcacataatcataactcaactaactttttattgttctcaaattgatgtttatatggatcaatccatactaatccaaaatccatggataaaaagagtggaacttttggatattggtagataggatttgatgagtttcatgaattagattgaaataggttgggttataatggattagtggattatccataaccaacccaatagagtgtaaaccatatataacataattaaatatctaaaccgatttagtaaagcgaaacaaaatattctaaatcaaatttgtacactcatatgacggttgatttgatgatggtgatggtaattaaacatgagaacagtccttgataacatgctaaatagaacatgcttaaatcgaacatgagaatatgcttattgaagattatgacactcggtttgatggttaattcgatgtgatggtgatgatgattatgatgatgatggttattaattaagtattaattatttaaattgtaataagaatatacaatccattaatttaaatgagttatggtcttacgaattaatccaaactatttgctaattgagttggttggtctccctaactccatatgagatatatgagttggtttgatttggtttaactaatttgacacctctactttcatatgatcttatatcacaattatcaatcattgctaatagttaggttatgagttccaccaaatcaataggtaaaaaagtatctcttatgattttgattaatactttgctgtaaatattgatcggtgtattaactaatttgtatttgcaaccgtatacattgcaagaaatgttggaacaatttgcgagaaaagtctaacagtttacacagcgcagaagtaataaagtcattacatggaagcaatattggtgaaatgcttaatgattatgaatagtgatgtatataaaaatcctcctttttttttataagtctttttctaagatttatcttttcatctcatcctaacaattttgtattaaaattctactatcatcagatactcgagaagatgtatttgggaagttattgctgctctatttcgaggtaaattcttggacttaataatacttctggttatactcgagacaattaccatactaattggtaatttaattttcatattattgatttcagtgtaataatatattttggttgacctttgtaatctaacatttcaatttaatattaattgtttgatttatttactctccacttggattatatgtgtatcttaagtcttaacgtaaaaattgtcatttcattgatcaattgtttttcttgctatgaaggagtgtttacatacaagtaaagtagttcaatcaattcgttaatttgaattttctctctaacttgaaattgatgggttttttttggggaatttttatatcagttttaagtgaaggtcactataatttcaaaaatcagaaaattcaacgccttcaatgtttaactttgtttataaactattttgtcaagaaaacaaaattttatttgttaacaaacatcttatttgtcaaacataagttagatatgttttatgtttttgggttggactaccaatgtttcttattttgttcttttatctactcatcaagttaatccaaattagtactattttaatttgatcaaaaagaaaaataaaatccatattttcaaaaagctccttaatatatcatatcgaaaatgagttagaatcaatatgaatatatattagataaatataaaacataattattctaacttaaaattgatgtaatattcatagttagatggaaaataaataaagaaaaattattttagttaaattataagaaaaagtgataattgtactaatgatatatatatatatatatatataaatgagaaggattgtataaactttatgtcacatatttaatattctatattctaatggtttatgttattttttattcattatgtatatatacacactctgtttaccaaaatcctataatgttaatgtagctaaatggttgagtgtctcttatgaatccaaaaagtcagatgtttgattccccttgatcacaaattttgcttcttattttctaatgtctagaatgacgtcattttgattttacggagattctaacggaaagataattccgtgattgacatatcctaaatggccaagtcaatgaaagtatgaaacttgattatttttttcaaaagtcaaactaaattttaggatttaaatgtcttcttgaaagttcatgttttttcatctcaaatttaaaagtttgggtttttttcgacattttccaacaaaaaataatattttctcttgtttctttatttgttttcagaaaaattggtatgtagctaatttgtctcttcaaaataacattttttaaaaaaggaaaacaaggccttagactttgggcctttcttaagaaaaagactttagaatgggccaatattgagacagtgtacttagctcataaaccgggcgttgttgactccttgtacatataaccgtcgtgttttaatatacgcctgagaacgagaaaacgacgtcgtataaattcaaaccgccgtcgatcgtcactacgtatataaagggcttttaattacacggcgaagtctctctgttctcaagaaattaagaaactgagaaaaaaaaa

SEQ ID NO: 2793 - DNA, 3000 bp, Unknown
  misc_feature (1)..( 3000): cDNA_ID_3069857_gDNA_ID_1620597_Annot_ID_161572 3000 nt of promoter + ATG
ttttgttttctttgactaattattaagtttttgctgatttcaattttagtttttcggattattctagtcaacaagtcgaaattgtaaccattccatttccggctaatttaattttaataattataatagttttttatgttaaccgaaattaattaaactcaaaagaactaatcccgaaagatattgtttacatatgtgatgaagccgttcgctatgaatttttcgtgcattataataaagttctttagaataattacttcaaagttcccctataattttttcaattcgactatttttttttccataaatcatgttagttttcacttcactatattcaacactatagtttgctaaccaattctttaccactagccgccttacccctatcccacaactgtctcatactcttatcagtaactaggtaaataatctatatttatggtaaatgcgtttaatatgttcttctttctttctttcaatgcatacattaattcaggttttcggcatctatatttatggcaattgatatgaagatttaagttactatcgcactattgctcaatcttgtggtccaaatcatacaaggctgtttgcatgaatgaaataaatgcgtattaattgtgtttgatcattgattatttcttagccttcttttggaataaacacttaacacactaaatttcattttgtgaataaagaatggaaaaagtatctttcaaagagaggagtagtctagccaaattgatggggacgatattgtcactgataggtgcacttgtggtgattttctaccacggtccacgtgtcttcctcgcatcttctccgccctatgtaaacttccgtcagttttctccaccgttgtcatcttcaaactccgattggctcatcggtggagctcttctaaccatgcaaggcatattcgtttctgtttctttcattcttcaggtaccaattttttttccttatatatagtagaaataattttaaatttatggttaagtcaaaaattagtcattaaaaaaggtggaaacatacgaacacatggtttagagtagacctaggcgttcagatatttggttcggttctagttcggttccaattctttcggctctcgagtttaggattcatataggaactaaaacagttttggtttggtttgggttcgggttcggttttttcggttctgaagtttaattaggacccattcggatatttatttcagatattttttagtattttcggatattttcgagtatttttggatattttggtatttttatatatttttcaactatattttcggtatttttgaatgttcaatctaaaaataactaatatttttggatatataatcatatttagatattctcggatacccgaaatatttcagttcggttcgggttcggttccaattattttggttctagaatttaggattcatttgagtattttaccattttggtttggcttcggattcggttctttttgctttggttccagttcgtttttttttggttcgggtattatgcccatgcatagaggggtgaactttggtttttggttggagatgatgttataatacatgtgggaaaacacatatcttcatttagtaaacatcatttcattctaatatttattctatataatgatttttggacaggcacatataatgagtgtatatccagcagcattcagagtctcctttctttacactgtatgtgtttcaatcgtgacctcgacgattggactagtagttgaaaagaacaacccaagcgtttggatcattcatttcgatattactttgattacaattgttaccatggtatgttatatatatatatatattttaaagatatcaaaatatctactttttgatcttaacacttttttaaaaataaaatatttcaggcaatagtaacttcagtatactatgtgattcattcatggacagtacgacataaaggacctctgtacttagccatatttaaacctttgtccattttaatagcagtggttatgggggccatttttctcaatgattctctctatctcggatggtattaatgaatcaatagtcttcataaacatatctataaacaaaaacatctactcaccttcgattttgtccttcgttttgcagtttgatcggaggaattttgataacattaggcttttacgctgtgatgtggggcaaagcaaacgaagagaaggatcagttatcattttcagaaaaagagaaaacgcctcttctattaaaccgcaaaaacgaccaagtttaaaaagaaaaagaatatagacaataaaactactaatagttaacaaatactgttattaataccatatttataaaattgtcttatgtctctatgaacctaggagttggaaaaaaatgtgtgtatttagatttttttttcaaaatactccaacatttataaatacgagttaacatttttccttgactcctttggaacatatgaaaagcttaaattgatattctttgaagcaatgataggtaactgcaccaagtatatatcccggtatagtcacacatcccaagtttagtgaactacacgaattatgtgtattgtatgctaatgtataccaattagtaacatatgatcaacaccatcatattccttttacaccgtttgtcaaatccatttttaaaaccacttttggtgaattacgccgtagaaaaacaagtctaacacattgtaacattttgaagtggtaataaaatttctgattcaaggtttcaatatctataattattgaagtggtttcaatatccattattggatgatcatattttggcacaactgttttcaagtctgcgcaaagaatagggaatcttataataaattcaagaaacaacaattattggacccacaatacaccacttcccctctaactagtactatcataaatgaaaagcaaacaaattaagcgataacaaatcaaagactcacatttcaacaccaaacctttctaccatttcca

SEQ ID NO: 2794 - DNA, 3000 bp, Unknown
  misc_feature (1)..( 3000): cDNA_ID_2171885_gDNA_ID_1620597_Annot_ID_161575 3000 nt of promoter + ATG
acaaaatttaaaccataaccactattttattaacccaaaccgaaatataatttcgttttaatcacaaaatctaaactctaaccactattttatcaacccaaaccaaaatataattttgtttaatcacaaaatctaaaccctaaccactattttatcaacccaaaccaaaatataattttgtttaaccacaaaatataaaccctaaccactattttatcaacccaaaccaaaatataattttgtttaatcacaaaatataaaccctaaaactattttataaagccaaacaaataatttctttaattaaaattttacagaatttgttttcttaatttcttttgtttggttgattttaatttatttattctttaatagatgacatgtcaaattctaattggtcattaaaaaggggtgaatgaatggattcactccttaatactcgataaattaatatttttcataaattaatactcgataaattaataacctctataaattaataaatttttctggtcccgagttgggactagtgtaaaaattgatacaaatcgataaattaataagataatatatttttttaaaatcctatgtaaatatatggtctcatcaatattataaattaataattgtataaatttatgaatatatatttatatttatgattatatattatgtaaaacttagtaaaatatgactttagtactgtttttctttaatttatattaattctttgtaaaattcaattctaataatttttctacgtataaaaaagtttttgtttttgtttttaaacctaataatggttttctacttgtaatgatttttagaaaaattattgattgtatagaaaaagtaccttttagatcacatttttgtaaaaaattacaaaatttataaaatctctccataaattaataatttatcgataaattaatacctctctaaattaataaattttttcaggatcccgacattattaatttatagaggttttactgtagtatgcttgggtaatgggtccaatcagtccggtttagtttagaatttcggtaattcggattactcggtttgggtaaaagagtcctgaaacgacttgaaatagaggtttagggtttaggtaatttggttcggttagacaatcgtttttttcgatttaggtaaaaatattccgaattaaaaccacacttacatggataatgcccatttattcaattttgacatcaatgatgagaaattaaaagctagaatgcagcacatagctaacactcgcttaagtccaaaaaacgctaccatattggactactaatcaaccatcattaatctatcactctgtatttttagatatgactggttctttctaaattgttctagcttctatctttagttttagttagtgtcacacaacaattaatgattaactagtggattaatcttcaaagcatgactgttcttttaaccggcggaacgaagggaattgagttcttattcttcctttcgtatgctttgtttcaaactcctatgtagtttttttttttcatctttgagagaatcaagtaaaatttaaacaaaaaaaccttagcttgagtctgaaattatcaagtcgcgggtttggtcatacttataatgcttccttttgacgagataaagcatttgtaaaatcttcaatattttaattatgctcttgatctcactaaactactacgaatgtggcatggcaacccctaatcctttgaatagatcacacttttaccatagaaaaaaaataaaaaagatcacacttttaccaaaatgtcttgaatagaaaagctaatttatgtgtttaaacccatcagtatttttttgaggacgcaagatagacaaatatcaaacttttatataatcgtcgtgtaattgacttcaaataacatttattggatcccatataagtcttttttttcttttttttctttttttgaaaacaggatcccatataagtctagtaattattattctgttgtcaaaaagttttcatatttataactttgttggtttttaactgaggatgatgcatccatctaaactcaagatgcatcttaaaaaatagtcttttttggatgagattgtcaaacgcatttggatgctccatctaacttgtctgcaaaattgtacttaaacgaacatcagttggcatatgcagttagatgcatcagtctcagaaacgaacatgacctaaacgtcagtacaaatcttggttttttgttgtcaaaattttttatatttatgacgttttttggttttatgatgatgatacaaacagcttgggcctaagcccaacataaattatggtttcatatttcttttttaatttttgattagtccatagtaaaagatctctatcggatttccacgggatctcatcattcagtactctgcatatattcacctatcaatgtatcatcaattcatcatgattcgtgaatcgtgatctttcctttttattggtgaatgatgaatatagtacaaatattttcaaattattagaaatagcctagtatacataagttttgaaatcaataaaagttgtgaaaagaaggagaatcgagaaagattatagtagacgcgttacacatttaaataaaatacttaaaaagtggcaacaaaatttcaacaaaggaaaaaaaagagattacgccgtgaaatgtggtttagtgcaagaaaactagaaaaaacttaccaatccacaattcacatgcaaacacataccacctcgtagcacgccacgtgtattcatctgacggctaccgttacgtcatcattgaagaaaacaaacaaaaatatcataaaaaatcgccgttataactttttttccttcacaaattttcattttcaccacccaaatttaaacttttttaaggaaagagaataaaaagaaaaatctctacgcgtgtatatatagaattatagacatatataagtttattcgttggtaatgtttctagggatgatcgacatgcaacgatg

SEQ ID NO: 2795 - DNA, 3000 bp, Unknown
  misc_feature (1)..( 3000): cDNA_ID_2171853_gDNA_ID_1620597_Annot_ID_161570 3000 nt of promoter + ATG
taatataccaaattgagaaagaaaaaaatacaaaataaatatgtgattgtatatatagacgttttatgaatatatgtctagagatgtatcacatcacatcactgaaacatatatttttgtagttttacttttactatgtttagattggttagagatgcaactgtaggttaattgttgtaaatgtagctttgttttttttttctctgtataaaatatcttatagtatctaaatatttaatataactgttttggaaaaagactcaaatatgaacaaacacaaaatatttcgagaggtattactggtaaagtcttattggtaaatcaaagtctggagacattaccaattcacatacatattttggtagagtaactattaagtttaaaattatattatcgaattacagttaaacctttataaattaatactcgataaattaataatctttacaaattaataaattcttccagtctcgagttgggaccagtgtaaaaagtgacacaaatcgataaattaataagataataacttttttgaaagtcctatgtaaatatatggtcccatcaatatcataaattaataattgtataaatgtatcaattatatatatacattatatgtaagaaatttttttgaaatataattctaataattttttgcttaaatttgtatttattcttatttaaaatttagatttagtattttactgtatcaaaaacttttagtgttgttttctaaacatgatattatgttttacttgtaattgatttttgaaagatattttctagaatgaaaaaaatcctttagaaatttttgaaaagttactaaattaggaaaatctctctataaattaataaatattaatttatcgataaattaaaacttctctaaattaataaaatattgcagtcccaacattattaatttatagaggttttactgtatatgtatttgttgtaactcacgggttcaatagtgataaaggttaatatttctatatcatgattgaatttgattcccattgaacattaactatgcagattaatggcgacaaactaacggtaatctttaacatcggtgttgataaatcatgacgaagtgcttatgtgaaaagtcgttcacaaaatcgtttaccatagaaaaatgaaaagatttaagatttgttaatcatgaatattaagacaattatttattacaaaattcaaaatttaaggtattttctaatgatagcgtaacaaattaaaaaaaatacttatttacacagaatattatttatactattttttttctaacatgattttagtcttaaccaaataagtttgtaagttcaaaaatgtgttggttatctattataaaaattacaaaatttgattgaaaaaataattataatgctgattgtaactattttcgtaaaaatgctaattgcaatataacttttctataagattatttttttatatagcttttatttatttataagtctaattaaaacaacatgtacccaaaataaacaaaacacaaatcatagtcaatggtgtttaaaaactaatgtctcaaaccaagaaacatatcaatctcctttagtaatataattataatcttaaagttatttgttcacaactttttaaagagcttaatttaagtttatgatttgaatctaaaattgagaggtgggcaggacaaagtgagatgtcgagacaaaaatacagataagctaatttgtgcggtggattttacacaaactttgtcagtcacgagactctttcttattctaatggcaccaaaccctagttttgttcttttcttctttacttttttatttatcataaatattttatttggattctcatactctcatatgtctctttccctattgaccatatctttttatctcatctcttccctttcttgtgatataactttttactctattattatgacaagtcggggctagatatggttgtagtccaatgatcttattatttgctagactatagatttatatgtattggacacacacacttgataagaccatattttattgattctattaactagtaagcactaaatatagtctcgatatttttagtcttttttttttttgtcatctgaaatttaattaataaaacttgttgtggaaacaaggagagatacatatgcccaaacaagggaaactaaagctggcggacaaaagaaaagtccccagaaactaaagccggcggaatacatgatttccccggaaactaagccctgtgaaagggaagttaaaaacaacagaattaccaaacagaaaattcgaatcgaaagaggacgatgctataaactaagaacagaggaaaaaggctaaaatcctaagggaagcgataaaccaaagaatttctcgatatttttagtctacaaatcataatttcttttacgattcaaaattatatattttcgacaaataatttctattattttatctaaaaaactcggataattagtcgggtacggattaggttatgaaaataccttcgtaaaaccttataatatgatattgttttccggatattcgagtgggtgttctgacctcaaatgaagataaatccctaaaaccttgtaagttgtaacatggttttagggaatcatgttaatttttttggcaggatagggaatcatgttaatggcattaactaatagtgtgtacctaattagtaaagacatgtctattaagagaaaattgactaaaccggacaattttggttagaccggataaagaccatgtggtccatttagccttagtgatcatatgtatactcgatctagttgtaagttgttgtcatgtagctaacttcagaatcttactcactaacacttcgagtttcttctcattggcacaaaacttaactccattctctttttctctctctcttctatctttcaccaaaatgccataactctctcttcccctatataccaaaaattaatctgtatctctctatccatcaagagagagcatcaca

SEQ ID NO: 2796 - DNA, 1998 bp, Unknown
  misc_feature (1)..( 1998): cDNA_ID_3069894_gDNA_ID_1620598_Annot_ID_161585 3000 nt of promoter + ATG
cacttaaaaactagctttaaagcatacggtttgtttcctgattatgttcctaaacttgttatgtttccacctgcaggccaatgactctggcttggcttcgtatgttgctggtcaaattgaccgtaccttgagctggaaggtaagagaatacaacaaattttcagataccacagcaaaaccaaaaacttgattcagattgctctaactttcatctacaaaaacaggatatccagtggctccaaacaatcaccaacatgccaattcttgtcaagggtgttcttacaggagaggatggtgagtttccatttgccaaacaaataatttcaacactctagtgtcatagaaatacctgacaaggtcaactattattgtccccatgcagcaaggatagcgattcaagctggagcagcagggatcattgtgtcaaatcatggagctcgccagcttgattatgtcccagcaacaatctcagcccttgaagaggtagatcattctcgactacaaacataaatctgtgttctcgataagtatttatgtacaagcacattagctttgttctcttgtgttcaggttgtcaaagcaacacaaggacgagttcctgtcttcttggatggtggtgttcgacgtggcactgatgtcttcaaggcacttgcacttggagcctctggaatatttgtaagcatcacatcatatatccattcaccagaaagttgcttaaaaacagtaaatatttaaaatgccttctcaatctcagattggaagaccagtggtttttgcactagctgctgaaggagaagccggagtcaaaaaggtgcttcaaatgttgcgtgatgagttcgagctaaccatggcactaagtgggtgccggtcactcagtgaaatcacccgtaaccacattgtcacggaatgggacactccacgccatttgcccaggttatagagaagaaaaaaaaaacagagaacagaaacaacacggcaccaaaacgtattcatattctgattgatcactttgcttctactctgctatatttatatctcgaaaaacttgtttctccctatatcggatcacaaaaacgtgcgtagagattctctgtaatgctatttggctacattttacctttccgtttattcttattgcttgtacaatagatgttgattcctacaataccaatgaatactaaaatctgttcccggaaaactagtatagtcagaaaatcttacattgcacccaacttccacaatccaaacacagttcaaatcttatattaacagcagccaaaacctcacagaaactagctaccaaaagagcacaaaagaatactataggagaactcagattaaggaaagacaggtttgtgagatttacaataccttattgaagaagaatgtaagcgaattcatccttcactttgtgctgggctaagtattgcatcgaaaagcccaaaataatttggctcacgaattcgaaactcttggatttatgcacttttctgaaaaaaaaagaaaaacgattggtttacgaattactactatttttctacgagattaagaacgataatatgtaagaaaaatctaagacacacaccatccatcagatttttgtccgtatctcctcatcaattcttcacctccagcttctcatccatatttctttctttccaatgcaaacaagttttcaactgttaaaagataaaccaaaaactcacaagccaattaatctatcagaaatatttaacttttaaccaaataaaaacgttgagatatatataatataagcgttccttaccactcacacacttcatctctccccagagctctattcccatcaaggtgtgtgagattctctgctaagacaaaccaaaaaccagattgttttgcgttcatggacatgttcctctctggagattagaatcgtagctatgactatgtctgaatttcacaagaggtagctaactcaggcctttttgctcttttgacagaaacacacttcggaagatg

SEQ ID NO: 2797 - DNA, 3000 bp, Unknown
  misc_feature (1)..( 3000): cDNA_ID_2171810_gDNA_ID_1620598_Annot_ID_161602 3000 nt of promoter + ATG
tttgtttgtcatcagtatggaagttctctcaaagatgttagatcaggcagcgggagcgaaacggtttggttttcacccgaaatgcaaaaaccttggactcactcatctctgttttgccgatgacctcatgatacttactgatggtaaagtccgttcagtagatggcattgtcgaagttatgaacctatttgctaaacgttcagggttaaaaatcaatatggagaaaacaacattgtacacagctggagtctctgatcacaatcgtcacatgatgatcagtcgctacccatttggtttggctcagctcccggttagatatctcggtctcccactagtaaccaaacgactcaccaaagaagacctctcccccctttttgagcagatacgcaatcgaattggaacgtggacctcacgttatctctcttttgcaggtcgtttaaatcttataagttctgttttatggagtacaatgaacttttggatgagtgcatttcgattaccaagtgcatgcctaaaagagataaacagtatttgttcagcatttttgtggtcaggaccagagctaaatcgtcgaaaggcaaaggtatcatgggatgacatttgcaaaccaaaacaaggaggacttggtctgcggtctttaacagaggcgaatgtggtgagtgttttaaagttgatatggagagtaacctcgaatgatgattcattgtgggtcaaatggtcaaaaatgaatctgcttaaacaagagtctttttggtctctaaagcccaactcaagcttaggatcttggatgtggaaaaaaatgttgaagtatagagaaacagcgaagccgtttagcagagtagaggtgaataatggagctcggacttcgttctggtttgataactggtcgggaatgggccatttgatggatgtaacaggacagagggggcaaatagaccttggaataagccggaacaaaacagtggccgaggcttggagtaatagaaggagaaggaaacatcgaacagaacagctaaatgatattgaggcagccttaaaccagaaatatcagacacgcattttgcttcgggaagatgcagctttatggagaggtaagggggacgtttttaagacaagcttttccaccaaagacacatggaatcaggttcgtaaaaaatcaaacgaggtggcttggtataaaggggtatggttcagtcactctactccgaaatatcagttctgtacttggcttgctttgcgtaataggttatcaacgggagatcgaatgcagctttggaataatggctctgatgtgaagtgtacattctgctccacatctattgaaacacgagaccacttgttcttctcgtgtagttatgcctcagcgatttggactgcaattgcaaagaatgttttacaacatcgattctcaacagattggcagacaatagtgaattacatctcagagactcaaactgatcgaattcggagctttttgtcacgttatatcttccaactcacagtacacacggtttggaaggagagaaatgatcgacgccatggtgaggagcctagaacgtcagccaatctcattacttggatggacaaacagattcgcaatcaactctccatcataatctcgacaggagaccgccgctacgagaacggattacaagtctggttctcgacaaggctctagactctctctgctctttctgttaagctctcaaattgtaatttcttatcaaaacaaataattcaactcacataagattaagctgatgtaaaaagttatttttctttttgaatataatttgacattttattaaaaaaaaaaagattggcttaataccactcccctaatcatccaaaaactgcatttagtattccgtttaggaaatgacgtaggatcctacgaggtacacctcaaactaaaaaggatatctttggttcttgtgatttttgttttcctcttcttgtagtcctcatgaataaatgatgtttgcagactgagatgagcagaggagagctggccaatgggataaattgttacatgaaacaatatggagtcaccaaggaagaagcaagccaagagttgcttaaaatgtacagcgacaacaaaaaaatggttatggagcaattcatgaacacacatgaccatgtgccgcgccaggttctgctgcgatgcctcaactttgtacgcctcgtcgatgtgatgtacatagagggtgatggatacagtgaacccaaaggcaaaactgaacactttatgacctccttgttcgtccaccctatacccctttcataatgacgtgcaacacacaccaattttctaagttaatccttgcttcttcttattttgtttttcttttttaataatctctaagaagaaatattatgactccgtttttcctatctaggtctatttggtgatgttgtgtagccttttgcaggttctctgtttgttcactgctacgccaaggcagataatttctacaaaaaaacaaaatttcttatgaaagtagaaagaatggttgttttgtgacttcctgaaaccaaaaatgccaccatgtcttttctgcaagttatattcaccaatttagttgttatagcaaattcacctcataatttatcgttatcgtttaatcaaaactaatagatgttgaatgtaatcacttttccaattaaatttagtttattaatattctataggaaaatattttagacagtatcgaaattcgcaagtattgattgccacatgttgagttatagccatgttgcatattttatagttcacaatctcatgagtcatggactaaaggattggacaaaggtaaactcgtaaaacttataaccatgttgtatttaaatattataaccttgtttattcatcccgtaattcatactactttgttggaagataatgcatttttaattcatactatttccaaatccaataaacctattaagagctccacatgctattaattggcaaacacaattactcttggatcggccatg

SEQ ID NO: 2798 - DNA, 3000 bp, Unknown
  misc_feature (1)..( 3000): cDNA_ID_1020575_gDNA_ID_1620598_Annot_ID_161586 3000 nt of promoter + ATG
acacacagacatatactatgtgcattttttgtttttggatttacctatatgtgtgttttgtgtgtctgtttacgtttataagagatagaaaatatgtgtgtatatatatttgggatcggtatagatataagaaattaagtcggtatatatacatagagttcataactaaatttttcgattttattcaaaacaaaccggtcgtgtcctcttattctcaaatatatagaaactattttggtcattcataaccaatatctctagtaagacgtcgttatttctaaattgggactccttaaactcgtcaaatgagtgtatatggtaattcaaacccgaattattttatgtatttatttctgctccaatcgtcgtcactgatcaaaataagagaaagtatatgataaattattgaaaaagagagaaagtattactctatcttgactggggcacgtgttcgtagttcatacattggcataagatcgttgttttggataaaggcgtcaaagcgataaatgattattgcaacaaatagaaaataagtttaaaattcattgttggttttaaaatgtgaagaattggaggagagtgacgaacaagatgatgtataccactataatcgtgcctcatatattataaaatgataaaatgccaataatgcaagccacattacttatacttccataactttagcatataatatcctaactaactagtaactaccatatatattagtctcatcgatccaataatatagattcgaattttacttggatatcgatcttcttcatagaataatcgattcttgtgaatgaatatttgatgctgaatatatacattctttatagatatataatgtaaagctccccagaaagaaaccaacagcattaaacagctgggagatttgtgttgtgtggaggtcgacctttcagcgttaagataggccaatcatgtctttgatatatgatgatatttaataacatttgtgtactagtatttaattgttctatacttattctatagtacaatcttttttttttttttttaaaggaaaatagtacattattttttttgtacgtttttttgttgttgttgttgctgctgcatactaaaattttgtttgtttgggtttagtttcataggagtctacttggtgttcatccgatcaaacccgatatgaaccaaacctaaataactatagtttaactggattcattatttctatattcgaaaaaccaaatcctaattcgaatcgaaccatgcagaaagagaaaaagcagtttaattatataaactaaatttatttggattaaaaatacgtttgatctaatctgcttgtgaatcaaatatgtaccaaataattgatagaaaatagaatctatgttagatgttcattgaccgagaatgccaaggaaagaaaaaaaaagatattgtgacgaattttcggctgaacacgtttacaacacaaaactcatcttcagtagctatattgatgtattagaagactttccaaagatagataatacgtctcgaaatatcaggttcgaaccttgctgtttgggaagtgactaattgacatactctaagccctgcttcgaggggattgcaaaccaaaaattgggaatctcttggttattcaaaataaaaatgaaaaatgtaagcacgtaatcttcattgaatccatagatctagaagcggatatgctgatctataattggcttaaaacaatgttacaaaacttttgtatgaacgatatttaagcatgacatgtttcaaaactttatccaggacatttgaaatatagtttcgcaagttattacaataaagtattaatcaggttccatatcttacaatatcgcgacaaagaaaaatctgtctggaggcaagtcaccatggaccgcttaagatgatgatatgaaaactaagcacatgatgagtgaaagccacaaaatggataaagcataccaatcttcattttttgttatctttatttttcttttgggatttaactttaacttcaatttgctttcatcatcgacatattcccgaaagggataaaatgtcataatcagccacgcgcattagcctctggacgtattagaggttttgaagggcagagaaggacacgtccacgtgaccgtcaacgtaccacacacccagtctcatagggcactcactgattaagaagaagaagaagaagaagaacatatcttctctctttaacattctcttctcatctacttaacgacatgaaaacgatgcttcttattttggacccacttggagtttgaaaccaaaatggaaaatctgataaggtcaatagaaacaaagagagaaacaaaatcgatcggccgacatattgggactacaacttctgatcaggattgttggtgttggaattcgtactcaacccggccagtgataaagcccttgaagaaagcgagcccacacacaatgtacaccttcggctcaaatatccaggcccggtccttgaaaacgctaatttgaaatttgagtgtggaccatatatccataatgatcacttcacaaacaaaactatggttgccaagtcaagtgaagaatgctgtaatcatctaatccaacacagagaaatcaactaacgcaccatcctttcaatgaacaactactaagcttttaagctaccaagttgcaaacttcagatgcaacttcgaaagataggaaacgtttcttcagctgtggaagcgacgttattaaaaacggaactgtttttactatatcacggtgaacaacttgtcgtttctttgatcctctcttattgggctctgatgatatatattaaccttttaaaaataacggcccatattttcgtaagtttgtaaaatgctttattgataaaagcaaaaagacttgcaacttattattcgttaacggaaaaactaactcgccggtaagatttgggagagaactaacgagaagcgacggtggtctgttattaaagccggagggagaattttaccgacgatg

SEQ ID NO: 2799 - DNA, 3000 bp, Unknown
  misc_feature (1)..( 3000): cDNA_ID_2171784_gDNA_ID_1620598_Annot_ID_161596 3000 nt of promoter + ATG
atttccgtttattttcttgtgaaacgtatatagtttgtctcacctacgtaccatttgtggtcaattcttctttcactataaaaagacgttttcatagtatataaatgttcaaggaagtttcttagaatttgttttcgaagaaaaatagaaaaaggaactcaattccaattttgttagctcgaaacctcgaataaaaatttggtacgttggttgatttggtatcttcgagaagtcttccgataaatcgagaatgtgttcatatttttttttttttaaagaacggtgggaaatgattgtatacgtaacataattacacgtgaatgaaaccaatcagtgattaaaaaaaatcatttatgttagaaaccaaagaagctttttgtttggttgacttctggtatttagtgtagttaagggatgtaggcccatgaaagttaggcctaaatattagaacccaatataaatggtctcttattcgattagtgatgttgagtttttgggaaataatgatgggcctaaatggccaatgtgttgtgggacgattgtttggactttttgagtgactttgcatgtgttcataacttaaaataaaaattgcattcccatacctctttaagaattcaaacttctaaaggcctttaactcgtacaataatttaacgtgagacggtcataattcagttaagaacggattgcgaggcttggccaaaccctaaaggtgttggcctgctcatgaaatgcaacattagttggatcttacgagaccgtacgtgggaaaccaagttccatggacaatgttcacgttttgaggccaatttactagtttacagtttacactgggcaattgaataacagtaaacgaaaacaaaaacaaaaacaatcgtatcactaattactagaatttgtcgagtagggattgaatgtttatatatatgagatattaatacaacggccaacacgtgtgtatctgaaagtgtacatactaacatttatggtagaaaggaattcgtgtcatcaagtcaagtaaaaccttttttgtccgttgtgtaacctacacaacgatatattcaaacaaaacatatgacacatataatcgtatgtgtcatgtttatacatatacaatatgaaaagcaaagagaacgacacattagttgtttttagttacgtttggtcttaaaattaacaagtccctcgttaaacatcagccgtgtgataattaacaagcatccatcgttaaacacttccaatataacattttttgtcgtgaaagttgattttgttcaagtcttcttcgataggagttactcatttaaagaaaatagcatctcttgtatgtaaatttgatcactccttccaatggtccagactccagaacaaaggaaactgtattcacaacgaataaatagataaagggatccagaaaatcatgtaatgcatgatacattattagaaatatatatagaataactgagtaaaaaaatatatatatatatatatatatatatatatagaataaatgagtgacaactgacatcacattagtattctctgtatatataagataatttatatttagatgaaaatgtactcaatcgagaaaaatgtaataaacgaaactaattagttgacaaaaagggaaaatcatcaaagataaaagtttaactacataaacattataaattcactttctaccaaaaaataataattataaatttactttattccagtttcgacgaggagtgtggattctgttgttgaataagcagatatttgattcgccgagattttagattacaatattcaaataatttcgaaaatactggagaggaacgagattaacgataattagaggaaaaaagaagacaaaatcctaacaaacgcaaaactttatgcagcagtagcagcaggcagcggacttattagttatttaacgagtctatgactcaaaagacaaatacgaaacaataaattgaaaacaaactataagaaaaataagaagaagagtttaacaaaaatgaaaagaaaagcaaaagagaagaatataaccacaacgtggaataaaataatagcatggtcgatattgtcactttatatgattccttatacgataacatatgaagtagattttttacttagacacagattgcatcgaaatttgaaaatcgtatcaatataaaatcatcaagtgtgcagtattttcgatatctctgctaaaaatatcatatttactagtagaataaatttgctatagaaccaatagatacacaataagttaagtaggaaaatcgtaaataagtgacaaatcattttgttttcacggtttaatgaaaaagtcatccgcaatcatacatgtattaattaaacaatgtgtcattggataaaatgagataaaaccaaataaaatctaaaaaatgttattttatccaaagattattttgcaaggaaaacttgatagggagtagtatttttagtgagtgtaagctatttattaattccattatttagggtctacgtaaactatgaggcattcgtgcaaacaataaaaagatagcgggactcaaatgtaaattaattatgacactcacaacaagaataattctcattttttttttttttcagtcttatgaatgaaagttagcgtcttagcgaagtagaaaaggccaaaatagagagcggccaaaacggaagcaaaaaaaacctcatcattcttcatctcctctcttctcttctcttattcatgctcaccgccataaccacaccaccacacataagctttcttctgtaatctcaaactcttttatgggctaattattacattttcactatatacgtctacgagaacgagatcaagcacttgctaattattttgttgaagttcttgaatggttttccttcagtgtgtcacatttttggatttagctgaattgttttgatcataaggagaaaactttctcttccttgtttttttttttggtctaaattttctctgttttttttttatcca

SEQ ID NO: 2800 - DNA, 3000 bp, Unknown
  misc_feature (1)..( 3000): cDNA_ID_3069918_gDNA_ID_1620599_Annot_ID_161627 3000 nt of promoter + ATG
tcctacgggatggatgaccatgaggaaaaaatctacggtgacaatcaaaccagcatgtcttccgtccattgggtagataaaaagactttgtactttccatgcaaacaggacaagacaatttaccatgagtagtccatcctgataacatgctatacgccggaaagtcgctaatcgtccacagtagtactgcttttagattaaaattctgactcaatgaaacatcgtacgcatcgactccagtagaccacaactcttttaactcctcaataagaggttggaggaagacatcaagactagctcgaggatgatttggaccagaattcagaatggtaagaaataagtactctgtattcatgcacataccagggggtaaattataaagagttaggatcacaggccacaatgaatgattacgagacatgccaaatggattgaacccatcagtacacaacccgagataaacgttacggggttcttccgcaaactggggatgtaaccctaggaaatatctccactctgctgcatctgaaggatgattcatttctccctcctttgattggtgctcagcatgccatcgcattgccgctgctgtcttatggctctgatacattctcttcaaccggtccccaataggtagataccacatacgactatatggtactttggttcttcgacggtcgtccttaggcttccatcttttcgcacaacaaaatcgacattgatcttctttttcgtcttctttccaaaatagcatacaattgttctgacaaacatcaatcgtatgatatggaagtcctaaattgcgcattaacttctcggtctggtaatgtgaagtggttgtctggtttccttctggtaaaaaatctgtaaacatttcgcaaacggagtccaccaacttttcactcatattatactccgccttgttgtgcatgagtcgagatgctaaggataattgcgactgcccttcacgacaaccattgtacaaaggattatttgcaccttctaacaagtcgtagaacttatttgaatggttacggaccggttcttccacattctgataactatcatcatgacgatagttatcatcataccccacattaaaattaaatgcatcgttcaccatatccacatatggatcttctacaatattacccacttcttcatgattctcactaaaataagtcctattcgtgtaactcgttcctatatccatattcatttcttctccatgcttataccaaacataataatcaggcataaatccatgactaaacaaatgactactaactcttctacccgagatgatgtgtttttcattcttgcatacactacaaggacaatgaaatttacctcgactactctgtactattggctgactattagcgaatgtcatgaattgctcaactcctgcgacgtattcggctgacaaattccccgtcacttcatcaaatctcttgtacatccaatctcgatagaaaccgccagtaccgccataattgtagtttcccgccattatacaataaagtaactaatatttttttttctctttgatgttgttgttgttttgatttgttggtgaaagaagagttgcgtgaacgtttattatataggccaatttttgtgactaatttacgactacaactaaataattaggtgtacctacttaccaatgtgaaacacgttttccatctactttatacgactatggtgcgacgtttctacgactacaggctgactaagacgtctaatcgtcctgtagtcgccaaattagcgactaaataaaatagacggtagaatagtcgttaattagcgactaagcaacgacaaaattatcccttcaataatataatcgtcaaatagtcgttacttgccgactctttgccgactgcatacgatagtcgtaaaacaacgactatgtaactacaatttttcgtgttgtcgcatgcgagtcgtaaatccgtcgtcaaatagtcgtataatgttacgactacgtttgttgtcgctgattgtagtcgtcgtttacctgttttcttgtagtgataatccttaactagttccgaggctaacaacaaattctccattataagccgatctttgatgaatacagactggttattcactacaggaaaatgggtttttaatagcacagaaatatagcgttttatgtcaatatgctatcattgatagaaggataaaataaagataacgtctccaaaaatgaaatgctatgatagctttactcactaaaaattattttcacgtgttaagtaaaaaaaaggttaagtccacattcagtcttctctctcactgttcaactcgacaattcctctctctcactgttcttcaaaaaaatttctttcaatcgtcgaattgttctgtctgtttttcaaaacgattattgttctgtctcttttccaaaatggttattgttcttcggtagctcatagctcgattggtcttcgataattcactctctcacaaagcccagaaatatctgataaaggtattttaatctgttcaattcaatatctgatagaggtttgatttcaattttgatttcatttcaatttggggattttgatttggggattttaggggttttagggtttcgtttcgatttggggattttagggttttgttttgattttagggatttcgatttagggatttcgattaagtgattaattgtttttcgttttggtttattttaattttaggtcctcgtttcaatttggggatttcgattttagggttctttagttagatttagatttggttttcaatttggggatttcgtgttttggcttttagtttgatgaaaactaatagtcattttctttatgcagattattgtttcagaatctacaagagcttaagaggtagcagattcttatctatttctatattttttggtttatttgttgtgagatgagtgtttgataaatgaaattattgtcacgcatgtctgagtaatccgtggttgagctctggtgttataac

SEQ ID NO: 2801 - DNA, 3000 bp, Unknown
  misc_feature (1)..( 3000): cDNA_ID_3069908_gDNA_ID_1620599_Annot_ID_161631 3000 nt of promoter + ATG
agagagagacgaactgttcctgtggaggacgtcgaagagagagagagacggagagaacgatgattaccataatttaggtttagggtttccaaaaaaaaaattaaacactaattccaaaatgacaagagaaaaatcgtttaaaagaacttgctaattatcaatatcccatatgaaaaattaattgaacctaatcaaactaaattaaccataccatacgaattgaaccaaaacggttcgaacatacctgaaataattttggttaaagttcaatttactagaatcgtataactctaagggcacaattatcagaatcccagtctctacatattctcttacaagtatcttcatattagtcaccttgactactctacagattcgtgcattaatgtctctttcacgttaaaaaaatcttgggaaaagaaagcaaaagagtaattttgaccgtctagctctctagtctctatataaccccaatcgttaacagaatgaagataaacttaaaaacatggcatcacaaaccaacaaagagcttttcgtgggtggacttgcaaggattttgaaagaacagcgacaagtcgatgtccggctgaaggcaggggacagcgatcagaagggtgtatctatatctgctcataagcttgttctggtctcttcctctttccttattattttttcatcatcatatgattcttaaaaaaacatttacgaaacgttctttactcgtactgaatttcattgtgaatgttatggaatgttttatagtctgcaagatctgaggtgtttaagatgatattggaaacagaagagatcaaggctacaactacgctagacacaatcactctctcagagctaaaacacacagagttagtggctttggttgagtgataagtaccaaaatggcttatcaagatatgtaacagaaagagatgagataatagaagaaataggttgagatgcagaagaatttcagagaaggagaaggaagatgaagaagataaacattcttaagattataatcaataagtgtttttcaatgactaaagaagagtttaaataaaagacattactaaagtaaacatgccaaacactaagccttataaaaacccataaggcccaactcctgaacctatcaatactccctcctttgagagtcaccttgtcctcaaggtggaagaaagtgaattccttggacgagtgtcctaacttcggttgagcctacagctgcaaccttctttttgacacttgattcccacttatcaaccatctcctcaacatgcatttgtgtaacctctttaccgaattcaatcattagccttgaaaccacagttttaaaaggatgatacaatcccacaacttcaaacggttctgcagtccttacctcctttgatatgaccgcctctttagtctgttatgtgtgcacctttaacacacacggagcgggtttggtctttctcactcttggttgacatgttccgcgtacttccagctacaacttcactgtgtttcaccccgggttgcccaaaaaatgatttctcatcgtcattctctttagtatccttctaaggttccaaccatgaaacttcttccaagtgttctggacttagcttcaactcttgactttcaacgctcttaacatgtccaccttgtatttccttagcgattcctccacatgtaaccttactctctccttttaaagttaccttgtcctcaaggtaggaaacaacaagcatttccccatcgttatttctctgttcttcaatatcctcttgctcattttcactcttcatctttacttttgtagtaacttgctcaagttcttcgtgctcagcacaaagagtgatccattgttggttgtggctgaaagagaaatcttgattctgccaattaaccattgtctctcccagttttgagagccactcataaccaagaatcacatccacatcagtcttggccaagtctagcagaaggaaattctcagtgatttcaacttcttgaacccataatctaattccgagacaagttcctacgctttgtatgcactgcctttgtcccaataaaactgaagcttggtttgtaatactcgtgggtagtttgagactgaaggctaactcaactaagataaaattgtcggttgctccagaatctatagctacaacgaccttatgatctaatatgaagccatagaatctcatacctttgttcctggttaaatctatcactagttgctccattccctgtctcaaggtataactatcctgctctaattcttccagctcatttataactccttttttcttctttaccacatccagcttagcttgtaccagggtaaggctcatcagctccgcctgtcttgattggtagctgttctcaatgacgacacaattccagaatttatgagattattactttcttctaaccattgtgttgtatccatcatttgtacaatcccattcggtttcaattctcgaactgcagtttgcaaactaggttgcaacccttgtaagaacatctcctcgaagccttgtcctggtaaggtaactgagcgaagacaaagagcttcaaacctttctctgtaatcacgcactgatccttcttgttgtattcccgaataatgaggttgatgatttaacttcattgtcgtctttgtctctcggcccatcatacacttaaattccttccagcttgtaggtgaattctttttccagagatgctttatccattgcctagtctctccttccaagttagcataaacaatttgtaacctctcatgctccgaaattttattctcaccaaaataattctcaaagttatttagacagcttcttaggttttttccgtgaaaagcaacgaggctctgtactagctgaaagtcctcagtccacggctcagttccagaccaacgtcaccacggacagctgcatcacacctcaagctccgttaaaggcaaaaggggatgggattctacccttaccgctgctggcagtaccgatccaaaca

SEQ ID NO: 2802 - DNA, 3000 bp, Unknown
  misc_feature (1)..( 3000): cDNA_ID_2172027_gDNA_ID_1620599_Annot_ID_161634 3000 nt of promoter + ATG
agctagcaacatgaaaggaaagttcaatggactgagatcattgattttgaaagaaaatagctctgcatattatgtgcattgcttcgctcatcaactacaattggttgtcatggcagttgcaaaaaaacatgttgaagttggagagtttttttatatgatttctgttttgctaaatgttgttggagctttttgcaaaagaaaagataagatccgggaaatcgatcggcaaaaagtggaagaaaagattagcaatggtgaaattaagacaggaactaggttgaaccaagaactttcccttcaaagacctggaaatactcgttggggttcacattataagactttgttgcgtcttgaggagttgttttcatctatagttatagttctcgagtatatccaggatgaaggcaccgacaccaccaaaagacaacaagcatatggtattctcaagtattttcacacctttgattttgttttctatctggagttgatgttgcttgttatgggactcagtgatagcttatcaaaggcttggcaaagaaaagatcaagatatcttaaatgctatttcattggtgaaaactactaaatgtcagttgcaaaaggttagagacgatggatgggatgcttttatggctgaagttagttcttttagcgagaaaactaacattggaatgcttaaaatggaggaagaatttgttgattctagaagaccaaggaaaaagaccggtataaccaacttgcatcactataaggtggattgtttctacactgtcttagatatgcaacttcaagagtttaatgaccgctttgatgagttgaattctgaactacttatttgcatgtcatctttgagtccgatagattcttttcgtcagtttgataagtccatgctcgtgagattgacctagttttatccagatgactttagttttgtggagcgtagatctcttgatcatcaacttgagatctaccttgataatgtgaaaaacgatgaaaggtttacagatttaaagcgtcttggtgatcttgctcgtgtgatggtagagacaagaaagcatctttcacatcctttggtatatcatcttctaaagctatctttgattcttcctgttgcaacggcaactgtcgaaagatgtttttccgcgatgaattttgtgaagactacattgcgtaaccgtatcggtgatgtgttcttaagtgattgtcttgtttgttttattgaaaagcaagtacttaacactgttacaaacgaataggtgataaaacgattccaagatatgagtgaacgtagagttcatctttagagtttttatttataatgacattgttatgtttatagtaaagtttatcgtttcgtttaatttttttttgaccccagtgagtcattgttctggctccgccactgactggggcgggtgctatccgagaacaattagccaatttagatttgcaaattattatagaaaatttgttggtagaatggaaacaattaggagaagaaggacctacggggaatgaatgggaagatcgaaaaattgtaaaaagaaaaaaaaatttagttagacgtatgaaattagctaagcattttctttgaacaaatatagaacccgaatggatggttttactaatgtttatgtttattatgttctatgatatatatattttgttatattaatagatacaaagaaacgttaaatatttttttctgtatagatttgtatattttaattgcatacattaatctatttttgttttaatatcattgaataaattcaaaagtataaattaattggagaaaaaaatcagaagtaagactaatggtaaaatctataaatatcctaataaaatttagatgtttaattaaatagattgaaaagttctgagagaacgacacataagtatgacattttcgttaaaatagctttaatcttaccagaattaatacatggtgattttaaacacttttcacattttttttttaatgatttttctaaataaatgttcgtaaagcaaaaattagcttccaaaacttataaagactatatcggtcttactaaaaaaatcaataaatgcattgtgttcacaattattttctaatgaatccttttattctatatatatcatgaattatgataaataatattcaatacctacatacaacttaacaaaatcatattttaaaaaaaaacatccgcggtttgacgcgggttttgctctagtatttgtaaaaatgtttagtttggattgaaatctacatgctaccaaagttggatcgaaattggacttttaccgtaatgtatatgggctttactgggtctaagtctaagtaaaacaattaattagcatagaaactgtttatagaattaaattaaccgacccgagcgaaccagctccgaagacccgacccgaaaacttgacaacacgagagatctaaagaccccaccaagtcacgtctaagccactaaacttctttcttgtctctctgcaaaaaaatccttgggaacaccaaacgacatcaaaacgctgtcatttcatctcctctcagatccttaaattctcttccactccaaattctctggggaaaggtcaacatttggaattctctctgtctccgacttttgttcttcctctccaaattcatctgtaagtttctttactgtaattgttccggagaaatttgtacgggatacaaaatccagatcgatcacttgtgtaatgatacggacatatatgtacgaactactgttttgataaatgcttttaagtcagatcatctttgttattacaaagtcttagatttttgcttattacacgttaattgtgatttaactttgcattatcttaattaatcagttgttattgttaaaagttaaaactaaagaatcatttaattgttcttgattttgattttctctctttgaatttgttatactttcttcttcaacagattggattgaagtaagttagtgatgcaaattctgagtttttcgagtttagtatg

SEQ ID NO: 2803 - DNA, 3000 bp, Unknown
  misc_feature (1)..( 3000): cDNA_ID_3069916_gDNA_ID_1620599_Annot_ID_161628 3000 nt of promoter + ATG
cgctcgatgtacccatttgagaggtacttctacttctaactctctaattatgtgatatgttgttagttagctttattgaaatcttcagactctaaggctagtattttctcttatgatgtaggtacatgaaaaaattgaaatcttatgttaagaactatgcaagaccagaagcgtgtattgcagagggctatttggctggagaatgtgttgcattttgcacagagttcctacgcaactcgttaccatatgaagaatcagttaatcgcaatgaagatattgagacaaatgagaatgtgcttggaggtcgtccattatataagggtacaaatgttacactaatagagaaagaaagagagataacacatcgatatgttctaatgaacatggctgtgactgaaccttatattgagtaagagcactgaatctcctgtatatatctttattcatcgagtatgatctttacattaagttttgtcttttttcagtatgcatttggaagaattacaagaatttgatgatagttgtgcaagaaacgaaactctagtgttcaagttacacaacaaaagatttgcaaagtggattaaaaataaggtatgagttcatcacttacaaatatgatattgtttctctgtaatgatgtattgagtattgtctgtttttattagatcccttcaaactcaaaggatcattcaatgaagctaaggcggatagcacttggaccaagactaattgctcagacttacaaggggtttatcgtaaatgggcataggttccacaccgatgatgtaaagcgaaagactcagaatagtggagtcacatatgaagcctttagtatgcgtagatcaagtgcacgtgatagtaggcaccaagctgacatagttacatattatggagtcataaaggagattttattgcttgactaccatatgttccaaatacctattttcaagtgcaattgggcccataaaggtcatggtgtgagagaagaagaaggattcacgcttgtgaacctccacttgagccaagcagcatttgtaaaagatccttacattatgccatcccaagcgagacaagtgttttactctagagaggatgatttgagtcagtggtatgtggtaatgagagcgccaccaagaggttatcatgagttagagactgaagaggagtttaatagtgcaccattttcagtccaaccaattgatgattcaggaaatcaatctgatgatgacagtttttgtgctagggcagattgtgaaggggttacagtagtggattaatgtatgatttattgttaagaatacatgtttaactttggagatttgatggtttttcaggttatctgaaatggctaagaaaggtgaactgaacccacgccgtagtaagcgtcaaaagggactagatgcgagtcctgtcatatcatccttgaagaagaaaaagaagcaacaaaaggaagtgcttattcctgtgatagaagaaagcagcaaggagacgacttttaatgatgaagatggagttcaagtagagtttgaggaagtaacccaagcttctcgtggtgctgattcattggataaaaatgaagaagctgatgaccaagaagttgagagaacagaccctattgaagaagatttggagcctcctgctcaagaagaagattttggccagccttccactgaaaggcttacaactgcgactgctgaaacatcaacacaagtgtcagtgaccaagaaaaacagactaagaggacccacaaagctgcgaagagtggccaaaagtgcacaagacaaagttgatgtcgaatttacagaattgggagaatttgtgggatctggttcagttaaactttcatcatttcttggagcacttgtgagagagtacgtccctattattctggatgattggaggcagctagatgatataataagggacacactatgcgaggaaattcaggtaagtgtattgatcatcttattacatttacttgaaaaactaattaagtaaagaatagtgattttctatacatttgtatactaatgtaggggaggttcaatgtggaccaagaattgcaaagaagagaaattttcaaacatatgggttgtttgtttagggcttctaaatccaaccttctggcgaaagtgagagttgctaaatggttttaatcataggaagtaagagataaagtctcagatacaccacattcaattcttttacttgtagaaaaaagagagttcagacccctcgcaggtgacaaggagtaaagtttgggttgcaggacacacgcattctgatggaagaccagtcaaggccgaatttgtcgagaccattgtaagtaatatctaatttcttgtggtttactctgatattatctaaagctagctacttatacctgtttgattacatatttgaatgcaggaaaaaataaaatcttttttttgaaagaatgtaaaattgtattcagtcaaaaacctttttacaaaagatgtaacagtgtgtgtaaaagtttagaatataagctgaagatacaatagctgaaagaaaagactagagaggttgtagaggatgaaggggtcgagtggagaaccaaagctgcaggcaagtgttgtagctgtgatctcctgtatctcggattgagctgattcgattacgaactgttttgtcaatgagcttgatgagcctattcggtggtgagctaagttcaccatgacgtctagcattcctttctcgccaaatgtggtagattgtggcttgaaaggattgtagattgtggaaaaaataaaatcaatagagagtgaaatggatttcacatccactagtgttaaagaagatgttgtgactcaagtactaggaaaagacaaacctgggagagttagagggttgggcagaggggctacattaacctagctggcatttttgcaagttagagactcacatgtgcataaatttgaagctactcaagaactattattgagcaaggttgaagacttacagaatgttgttaaaaaa

SEQ ID NO: 2804 - DNA, 3000 bp, Unknown
  misc_feature (1)..( 3000): cDNA_ID_1380688_gDNA_ID_1620600_Annot_ID_161637 3000 nt of promoter + ATG
aacctggaaatttttctgagaattggataattttgtaggtaattgctgagaagtattgcaaaacggatctgcctgccatcgagaaaaagaagtaaaaatttctcatcttaagattttgatgatctcgtcttgcctagcttatgacttgtttgattaccaaaatcatctttggttcaatttatgctttactgaaagctaatttatcctataacttcaaagattcatacacatttttaggagttaaatagctgatttagtttcaaagttatcacttttgatttgaataagtggtttcaatatgatctgagagttgtctttgaatgttaggtttctggttccaagagatatgtcagttggccaattcatctacatattgagtgctaggttacatttgtctcctggtaaagccttattcgtgtttgtcaacaacactctccctcaaactggtgagtttctgcttcaattgggttttgcttctaggctttttctaggaatagtttgtttgatgtcttctgtgtttccttttctctgcagctgctctgatggactcggtctacgaatcttacaaagatgatgatggattcgtttacatgtgctatagcagtgagaaaacctttggttgatccaataatgatgttagtgtctgtgtacatatactttaaacataagatgttcactacatcaaaagacatcaaacacttgttaagctttatatgactgctgcttgttttatccttagactttgttcatctgtgcacaatcgttctactacagtctcagttccaactagtatttccccttaacgctctctttgtcatcattgtttatcttcctgaaaatgcaaaagaccaatggattgttttactaggggaagagttttgtgcttcctctccagcaagcaccacgaagtggccaccaaccggcaaatagttctggctacttttggtatctttattagattctggttcaggctctgggctacaaacataagaaataagacttgacattgtaaaggtaaaacactaaacaaaaacttggaagaatatagaggaaacagtgtggaagagtatacacatgtattgtctgtctgatatctggataatctttccaagtatagagttaacatattcgcaatttctgatggtaaatgcctagtgtttatatatttgtattgtggctattttttctgttcttacaccttttctggcttctaattacataatggcttgtgcattcaagaactccaatcttcttttaagaaaatagaggctcttcttctgaacaaaggtatacttttcattaccatcaaaagccaacataatcaaatgtgcttgcatccttcaaatgtctcaaggcagaaaattttggtgacaaattccaaaaccatgaacggttttcagtgctttcaaatgtgtgcccaaaaggtataagctttgttctgaaacctctggagagaagaagaaaaaccagccttgtctagaggttggagttatttagctcttgatttacataaaagatgagtgaatataactttatgtcaaggaaagtaaaaaaaaaaaacaaagaacagccaaacccatatctgtaaatgggcctttaatgggctaaaccggttggtatgatttcgcactcgtgatgtgatgtgataatgaatgtgcaatgggaataaaaaagaaaaggaagagagaatcttatttttggcatgtacgtatggttgtgaattgtgataatacaaccggcatatggtcatgatattctaaaacgggaccattcattgtcgtcttatttacaaatcacatggagagaaggatattacaaaatatcgaaacagagagactatgatttatttgtcttcttcgaaatattggttttttttagctaaatgcatagaagcttatctagttagtctctttccacggtcaaaattgtagtcgttcgtgaatgtacttcgtgtgttatgatttatgaaaaaatctatacaaaacagttactgtttgaaaatgtgtcaaacgaaatgatcctttttaggtaattcttatcttagacgaccaaaaccaaattaaaccataatgatggagtttagtttacagtcagaatcaaaactaagaatgtaactaaaaatcgttcactgtatatagtaattaattggttaacactagaatacaaatgccatttagcatctcagagtaagacaatgacaagtctatgcattaatttcattctctttgtcatatatataaggtaaaatatctctataattgtttttaatatacaaggcaaatcaagggaaattgtcttcatccttctcttatccctatcttcctccacaacctctcaatcctctcacattaggattatctctaatcaaaaccgtagcacatatttagatcattatacatatattcttattcagctgaattcataatacagagtaaaatctatgctacataatggataatcttcaatacatctttgcatattcatatcattctagtaaccctcaatttttaatttctttttaatcaaacgatgttttagcatacatatattttattttttttgcatggaacctatataaatttgaatccgaaaatataataaaatactttttcatgtagtcattttttttttttttaatagtcaataattctatctgaacgaaatatttttttttcaattttaaatcagaaaaaatgttacgatttgattgtcggtcactattaggcagctacaatgtatcaataaatattatgtttatcaatttttcacgaaaatgaaatctaactaattcgttcgttagtttctaaaaatcgcaaaactttttgaaattctgtggaagtcatgattatgttctgtgatgagcttttcgagcaaaaaaccataaaaccaaactttaaataaaaagaccatcacttcactttgctctcttctatagaaaatcatcttctactacactacacatcgagagctcactgtgaagaaaaaaactcgaaacaaatg

SEQ ID NO: 2805 - DNA, 3000 bp, Unknown
  misc_feature (1)..( 3000): cDNA_ID_2172187_gDNA_ID_1620601_Annot_ID_161654 3000 nt of promoter + ATG
tacaagagccaatacatctctcagcttacataaattcagttaagaaaaaagacaaatgttccagagaatgagttccccatcttgaactactttctaacacatatctttgaaaacgagtttattaaatcagagagacaattcacctttatgagatgtctccaacagattgaatagctttgataatgtggaaagtaatacatccatcccttgcttagccataccttgtccatactcctgtgctaaagcctataatttccagaaagaataaattatattagagacattgacaacctttgcaaacaaatataagctaagtacaataacatgatggttgaacaattagacattttcaatgaaaaataaactcaagatataaactcattacaaggtccttatcagccttgcaatccttggatacaataagtgtaaagatagcttagacgactacaaccagctcaaaacatttccagttccctgagatcttatcataattcactttcgaatcctctgctattccttaaatagctaagcaggagtatcccgaaaagagtgcacaaccaacagccattattacgatcaacagaaatgtcataagttttgaagagactaaaggtgacacatttgcgtatgcaatgaactccaccctctaatttatataccaagactgagaaactgaggaaagggaaaaaaacagaataacaaaaatgcccttacatcgataccaccaaagcgtccaaccgttaattcggcagttctgtcaataccatgagataaatcgtcataaacgctgactgcctgtctgatattctgatatagacccaaaaggttcaatgcaaatttcctctctgcttcctgcccagagaaacaaaagtcatgtgccttcttcatatgaaaatcacaatatctacaggtaatacagcaacctctcccacataaaatcatacaatttttcatggaattaagaatattaccttttccaaattgaactccacattagcacccccagccagagggatactcaacaatccagacgatggttcagctccagcaacatatgatccacccaaccaagatgcctaagtatattataaccacaccattaacttgtggtcacattatattaaaaaggaaaaaaaaatagtgtttgcacttagaatgacaggtgctgttaactaacaaaatcattaatgtccttgtcagtcacatcagaggagggttcattgacagacacaacaaccacttcattgtctgcagaattttgaaaagattagcagaatatccaaagtaagacttaaacccataaagaaaaaaaagttagaaactagtcatgctcagatggttctggtattcaagctgatagggcacctggaagttcagtatcagctttgtacgaatcagacttaatactgctccttatggcattgcccaagaaagaatgactaggggaggtttccaaaagcatatctgcaagtaaaaaacaaacacttgaatattttacaactaaaatttttggttcatgtcagaaaactaaagctttccaatcacataccatcagctccagcgatttctagcacaaaagcagcgcgaggcctctcaaatggattaggttttagaatcttgttcaactataacaaaatgcaaaacaaataaacgatgaagtacaggactttaacccagagagagaaaaacaactctactataatactaaaataaccttggatgagccatcagctgtcaaagttgctgaaggtgcaaaacccaacaaggcagacactgctgcagatatttcaacaggcgacatgggaagtgcctgtgcatttcaattcaaagaaaagagatttaactaaaattcatcaaaaagaactattaaatcacaaactttagtacttgtcaaacataaatttgcaatctgtccattgatctctcatcaatatcaaaataacaaaaaaaaacagacaagaaaactacaaattggtgccacttagaccaaacaatagatcttattttactacttcaatggaccaaactcgtataatttccagaaacgatcttagattgaaatataaaatgatcaaatttgagattatttcaaatcggtcatccacacatttgggacgaaaatcattacctcactggatgatcgtggacgaagatattgattgttggatccatcaatgaagaaaacagaaccacttgcttctccctatacacaaacaaaagtcagatccatgtcattacatacaagcaattccgtaaacgagagcaagacacgaaggaacaaaaacgaaccctataattcaaggtgagaagaagagcaacaacgaatacgtagaaagctttcatctttaagaacgagagtcgacggagagagaaagaaagagatggatcggtgttatcagacgagagatgtttaatggaggagacgaatccagatttcagaatcaatcaaagtgttagacacaactccaaaacggtgtcgtttgaaattaatattatctgttcaaaacccggttatttcaattccggtttagtaaaaagccatattaaacgacagttgccgacaaaaaaaaaaaaaaaaacgacagttagtacaaataggggtataatagacaaatcacaaaactggttcgtttttaaagaagcggtcccgaatcacaccatttccatttccatttccagaagcggcaacgatggagacaacaatcggagattctatgacgatgatgatgacggagatgtgaccggtatgagctcaagtagacgaaatctccaaacgattcagagcttcaaagcttcagatctgtttccttggatcggttaaaaagagttttaaggttgatttttctttccacaccatttggcgactcgtacatcgaactcgctgatcggaaaatactcccggatagaaattgaaccgattagtttgatgagtgagtgacttgttacttcgatttgtagctgagtgtgtcactgctcaagtgtgtgaagaaggagaaaatg

SEQ ID NO: 2806 - DNA, 3000 bp, Unknown
  misc_feature (1)..( 3000): cDNA_ID_3070000_gDNA_ID_1620601_Annot_ID_161658 3000 nt of promoter + ATG
aattaacaaaagcctaatagcttaatgatgatcagaacatgggtaaccacagaagaaacttacagagaactgattagacatcataggtgatggatcgcaagtcccaggagtgatttgccactgcttaaactcccctctgaagcccctagatatgcttccacttctgcaattacaagcacgattggtcaaacctaaattacgaaactatgccaaataaaaccaaaaatcagaggctatctgctatgtaccccattcctccgagtggaacaccttgggatgcagatggtttgcagttctctttggtgaagggatcgataggtgctttctgtagtaatcataagttaaatctccgcaaacaaagaccaaaactttgtaccataaatatgtaaatcaagaaactctattgatcaagggagttacccttccatgggaggcctcttctctgacataagaccataatcgtatccccaagcgtacctgtaattccgaaaataagaagtaaagagacgccccatacaacaacgaagcgaaggaaataaacacaagatgtctctttgtttaccattttaatggcttccctaaaagtaatagtgaattcttttaagatattggcatggcagtttaatctcctcctccatgcgtgtggtggcggagcagcactatcaaaatcgagctatggaaacaaagacaagtcaaaagtcaaattttccaatcgtcatgattcctaaactactaaaaatagactcaccaattgcaaagtacttctgctgatgaattcctcagtcggccatgaatgctttctacggtgaaacaaagttgctccaaccatatttactatacttctcgattctacactgatttgatcaaagaaaattgaaagcaataaggaattaaggatcaacacgaaattgcatatacttcttaactttaaaaaggttgaatttttttaccttttatttacataaaagaacaaaaggtatttctcagggaagcatttgcagcgaattgaaacggcaccgtctcagtcgcaacaatccccgattcaaaacctaaaggaagtgacaatgaaaacggttcacattcagacgaatcggtagaagcgaaattttgaatacaaaggcaaatcaaaacataccaaaaagttttgtattcgatctgtcacgttgaatagtcaataggacaaaaatatgaaatccgatgagattttctcagaagaagaaggaggaggaggagaagaattggattcgaatcttcgaaaatcggtttgatggtattggtgagatttagaggaatctatgtggatgctgacgtggcgtcgtcgtggcgagcggagaatcgaccgtcagagacaaggttctcatacggtggcaagtggtttttaaactcttttgatttgcgtgcgtctccacagtgacgaagacgaagaccaaagagaaatagaaagagagactaattttgcattgcgtttttttacgttttagtccttttagttttgtcaaaagtgttgttttgacactttttttttaatctaatcaggaacatgtttaaagaccacttaacattattaattggggaatctttcaccgaccacatctggataatagggttggatttggaaatctcttgtctggtttttaaatttaattatcgtatattgtagtaatttataaacatattaacaactaatataaggtaactaattaaaagagattatccagattagttgtacacttgtctttttcgagaacgtatttgtacggttttacaaattttcttctaaaaaatgtgtcactgtcttaagccaattatttgctgaattagattaaaaaaacaaaactttctatgataacgtattttaagaataatttatatataaagacattatattatactcaaatgccaatttgtagtaataaaaaaaggtattatcgtttttaaaataattttaaatgtcaaacatacaagctcatgtctaaactattaaattttacaattgttaggtaaattaatataggaaacctaattaaagagttggagatcagttgttttttttcttgaacaaatattttgattggacaaatgtctttttcctactatggctatggacctatggtttacaatgtttctttttaattgcgacatttgatgctgttggtaagattaagacaattagttattgaaatacataagaaaacatttttaaccaaaataaaaaatacataagaaaacactataacagcgacatcgacgtcattaaatattgttttataagaaaaatatatcatactcaaatggcaaattatgtaacagtataaaatagaagaaattttaaataactaaatgtcaaacattttaatatataattgtgtaaataggtttatatcttaatatagttaccttttgataatccgaatagtaactatgttttgcgatataaagaaaatgcgatgcaattcaaatagtaacgaaaatacataaatatatatatatatatagagagattttaatattgttataatattattgcgatgtggttttggatgtggtctacatcatcattcgtgttctatacatgagttgtgattttctccaatgttaataagtgaatatcgaaatcaacggaggaatagaaaatataataaaagccgaaaaaccaaggtggcgccgacgtagcacaaagaaaaagtacaaaaaagtcaaaactcgttgccgacgtaatgactatcggtgtaaatccgaggtcgcgacttcgaatcgttctaaaacccattttacatgctcccattttttttttcgaacaaatgatgtcacaatctcagagtcaataaataaaatggaaacaaataatcatcatatgaacttggtcttgccacgtggaccctccattgccgttaccttccggtgaaataccaaacactccgcttccacttagagccgtagaagagctactacttcatcaaccacaaccactatctcctcaaaatctctctctaccgatcg

SEQ ID NO: 2807 - DNA, 3000 bp, Unknown
  misc_feature (1)..( 3000): cDNA_ID_2172236_gDNA_ID_1620601_Annot_ID_161670 3000 nt of promoter + ATG
tttggttagtgatttgtagaaaaaaattacatttgctaatgaaattaagccagttgattgcttatgatgtctgcagctaaacatagtaaatgacttttctttgttcttccaagttatgtgtttgttgttaattcacattggtgcagctatgtttttgtgcagttgatttgagtgaggagtgagattacttggtaaaatagtgggcctatatctggttacgaaaggcccattagtagcccattatgttttgtccgtttcagactaattattggtcttaacttaagtatattacccacatacgaattctgaacttagaataagccaaatgcatttgaatccaaagtttgattgattccttgaaaagttaattagtacgtgtcgattttcaaaatactaaaaacacaattatataatcttaaacagaaagttaagtataatgtttaattaacataaatatttaaattgagggagtaagtaagtggtaatgttaaaaagaaaaaagaacattttgggaaaataaacaaaaacatggagagattcgcacaaggagagactctcgaggcaaagacccttgaaacaaggcaacacttcttatttctttatttctaaaaactgcgccgtttaagactcttatggtctttttctcctttatttcttttgtttacttgtaataatggcttgtggtgcgctaattattctatgaactttgcttaatttattaaatttttcaaaagtaacattaatacgtattagaataaatatttcaatgtatgtcatgtgccggtaaataaaacattttttctctctctacgataaaaatccatacttgacaactttgcatagattacttattaatttgtatttttattttttcaggtataactaaacttattacagtaaaacatgaccaaagtttttcgaaaaaagtaataaactaatcgtaattcaatatttgacatgaccaaaatgctgataagtaataagagaaaaagagttaaagaaaaaaaaacaatttgggattttaattcaatcaaattggagtttaaagtaaaataaaggtaagaatcatgagagtggagaattagggtaggtgagaatgagtgaggctcggtgtggtcacgtgaggtatcctcaaaatcagggattgttgttttgtccactacactccctaaacctaaacccactcatcctttgcttaacctatttcttaatactatgattttagtaagttttctatcaataactctctttctttttgcatacctttttggtcaatattttgtacttataagttttaaaaattggaaagagtgtttattttaaatatatgaatagaaatttgacaacaagtcaagctacatcttaaaatactttttgaaaaagtgatggaaactcggaaaggaaacataattaacacgagattatgttaatgattttatttctcagactgtatttgtattagataaaaaatcaataaaccattagaaatggaaaaaaaaaaaatgaaaattcattggatctagcaaaaggttcaagtctagtcatcttatttcaaaggattcttaatgtgtgaaataaacagcaatacaactatatctaatttatagagtaaccttgttttcttaagattacatttcggctcaaaggtttaaagtcaagaagataacaactatagaaagaaacagtaagctactagagtattaactaacatatacaataaaatatactcaagtagaaacaaagggaataaaaacgaatcactgattcaaccacttgcttggggtttgagcaaacgcactcgtttacttacaggggattaagctaaataatttctttaaaacaatcttaattaactgatccaacagtaacataaataaaaatacttatacccataaatttacgtaccaacgcatatatatcagacggctattgagtccagttagcacaaaactgttggaatctcgataatagcatgagcaactagttatttttgtataataaactacgatgttatatagtatataagtagataaaacattctaatctcgaagtaatatttatatacacttttcgattaagcataatttggcttgttttagttttacttcagcttagtcctaagagatgaaactgaacttttgtagtttttacttatatcttttacaaatttaaccacattatattagatcgacaaaaggggaattaaaataagatataagtatgtacattacatgattcacgtaaactataaattacactgcacataccactagtggttatatcaccaacaataagcatgtatccataggtaattttgtactaattctagctatttaacaatagaattttctttttaataatttttatccggaattctataccgagataatcatattttttcttgaaaactatattgattagatatttacatagtaaaaaaaatagaatatttccccatattgaagagcattttaattaaccaaaatttttttgttacctttaccatgtctttaaccaaatatgtttagctatttacttaatatcacttttaaacatcttaccttacgactatttcgtttagttagatatgtttctactctccacgcaatgtatatgtataataatactaaagaaaattagtactaaaatattactggtaaagaagagataggccataaataggtgaggtggcaaagaggtggggtggtgcagttttgttgatctcaaggcattgtgtttccctattttcctttgtactctttctcctctcttaaatcgccactccattattttaaatttcttatcttgataaaacacacacacacacaagtattagaagaacttaaaccctcttatgttctcttcctaagcttgagtttaattcaagcaagaaacagatttcgagagaagagtaagcacagagatagagagaaagaaggcaccaaaccctaaatgggtctaaacccaagattttaatcttcttttcgtattttgaggcaa

SEQ ID NO: 2808 - DNA, 3000 bp, Unknown
  misc_feature (1)..( 3000): cDNA_ID_2172228_gDNA_ID_1620601_Annot_ID_161666 3000 nt of promoter + ATG
aggtacccttttccttatctataaactccgttttgatttatgattccatccgaagtatatgaataagcaagcaataggacacaacccactaaaaagaaaaagcaatacttgtttgaaacccgttaaatcacaaatactaaaatttgaaaacgaagatgcatctactctgcatagacgaacataaatattggttgcttttatgtataacaaaggttgtaaaaattattttgaaaaaagcttgtaaaaatggtagaaacgaattaatttctaagatatgaaaaatctcaaaaaaaattcagaagttaaattttttatatatcaaaatcgtgatatcaaacaattttaattttttcagtcagttttttttccttcaattttatatatatttcaagcggacacataatcccctataactataaaattttaacatatatccaactagttatgaaacatatacaaataataaatatgttaatgcaaactgaacacaacagatcatatatatcactaatctacatatacatttttgtagccattttgtgaaataaatcctggagttagaatttatttacaatggctgccactggatttaaattatttgattttttttaattaatggtttgaatctttatacgacaattaattgtgtaacaaaccaaaaagattctaaatatatggcaatcccatatgtcacgcaaaacacaataatttaacttctccttatctcacctacaatattcactaaatcttaaaacaaccaaaatttgaactatttaaattatttgtattaaatttcggcaataaattaaaacaaatgtgaaacaaaccaaaaaatacatttacgattccggaaaatgagcaaacccaattatatgtgcagctaaaaacattctttattttggtttggatattccatggaattaatagtccataacttttttggcataaaatcataatcacaattaattccacaactaatatttaaacttatagaaaaaactaaaatatcatgagacgaaaaatatagcgtgacggatttggattgatatgaaatatagcaggactggtttagattgatataacacagattaaatatttattttattattttatcatcaccaaattttttaattacaatatcaatataaaattatataattttaatactaaactaaaactttaaaatttaatattattatttataaaaataaaatatttgccctgtggtataccacgggttaaatcctagtatataagtaaaagactaaatgaatatcaatatttacacaatcacttcacaaatttcggtatctaatattgtattttgaggttcacactgatctcattagaggctattttttcaagtgactaaattttgtaatgatttgcatattctacataacttgctttatccaaaggtgattttttttttcccataacccgtacacgtttcctcaaatatatcttactaatactataatgtatttctgaattagttaaaatttatacaaagtggtttataaagtttttgtatggatttagattaattcattttgagcaaagtgaaacgaaattcaaattttgtatggctgaataggtttcaattcaacttgaattataatctatgaaatcctattgacgaaaaaggaaaaaaaaatataggtttaacattaaacagaaacaaattagcttacaatactttctacaagtactttataacccttgataccttttatcgtaacaataagtaacgtgaaagatttatgttgatataaaaatagctagctctattcacgtgaaagctttatgttgatataataattctcccacattaagtaattaattaaaataaaatattaaaactgtttaatacaaccaaagtagtaaggcgtaaacttattaaggaacgcgtcttaattacctggttttaggttccttaatgcttgcttgcttactccatcataaagtttgtagataatgtctaatattggaaaacgaaaatggcatttcttctagttggttgtagtcagcttaacatctttgttaatagaactttatctttacatcgacaactaaatttagaaatattcacctacctataggtatactatataaatgatacccaaagaaagtcaagtgacttctctagtcatggacggttaaggatatatatgccttaaagtttgtatgaatttagcatatcacaaaatgctttttctattgttgcatgaagcatccaatgtcagattttggaagggtctctaaaatttatttcaattaatagattttgtggatgaaagttttccgtaatctaatacatactagttatgcatgcatgatttggccgatcatcaatagaaagtgataggcaacataaatggaggattagaaaatgcttgtgaattaaaaaaaaaaaaaaaccataatgcagcttataagcagtttgaaaatgtcatgatttgaattacaaaaaaattggttttctcataatgagttatcttatattatccttttagaataattgtatccctactaaaaaaaaaagattcgattaaatttcaatatggattaaaggaagggatgattactaaaaagtctagaatagcccaaaaaaggaggttttacaactagagtggcacacaaaacttgtaggttaattcagtcatttctatctccaaaatagctttgaggaaaaatagaggactatgttgaatttgtaaccaagtaaatggtttttcctttacgttacgtttagaagattttagtaatgatgctattatgagacggttagaaacagttaagagagaattggttacattaacggcgttaaaaatcaggtgtattttcaatgacccgcaaaagtgtgaccagagtaaagttccgtttagtatcggcgttatttaacgacgacgttattgttcgtttgcaatataaataacgaaagacggttttcttggagcttgtgcactctctgtcactcattttccctttgtttgcaca

SEQ ID NO: 2809 - DNA, 3000 bp, Unknown
  misc_feature (1)..( 3000): cDNA_ID_1032141_gDNA_ID_1620601_Annot_ID_161655 3000 nt of promoter + ATG
caagaaacatatatataatccttaattaagatacgccaaagaaataattaagggagaaagaaagttgaatttgattgtgataggtgtcacggtaatcttacgtgagatgggtacgtaggatctccaaaaataaataatcatgcacttttatacgttacttttgagttttgagtttacaaatatatataagctccttttaatttattgcatgttaatgactcgtgaatcacgagtgtacattactttttataaagcaatttttttctttgaaaagaattttcttgtatcagaactggtctgaatgtttaacatcaaccaagatttacaaactgtttagtgatgaagctacaatgaaccctcaaaaatgctaattaatttggtgaaatagatcaatatcaactttcaacgacacacctttgtttttttatgaaaaaaaagtctcattttcgtttgttttgattataaacaaagttggtctctcgcatgcaatgtacgttcacgctgcaatgacaatagtgtacgttctttgttgtaatttagtcgagaatccatctccgacgttaggaacaatctatcatctttcctttttttctttgcacaaatatcgtaaaagtgatacccacgattatctacaccaaaagtggtcactgacaatgtacgaaaaaacttagaaaacaacttaaaaaaagacagttcaaaatgatggtatttgatcagtgagtagcttcttcagtattaaagctcaattacatttattcaacctatggttatgattatataaactctgttttctctccaatttaccctgaatatgttagcacttgtaactaacctaattctttctattaatttcacatttaaacaaacatatataaatggattaactaattcttggatccagaatttagcttaccatacttaagatcaatccatggatctttattataaaacttgaagcgaacgctaagactagtagagtcaataaaatagtaaaccaataaacctgaagcttttacaacaactaagcaagtcctaaaggaagtctccacacaaagttctgtgctttttaactctcgaatctgaattctgaccttcactatttgaaaaccattcaaacctatcattcttctttacctctgcgaataaacataactcttcttggtttcttcccgggtaagcccgactagacccgacatctattcttgtagacggttctgaagatataccgagcctcaaggataaatcacagaccctctcagttgcttcttctgagggctttataccaataggcatgccaatgattatgggcgcttcagggactctaaaagacatgtcagcttgctgcgtttgattattaccttcgtaatacaaaggatagaccgaacccaagttgactggagctggagcaggagcagaagcaggaccagttccttgtctaattgccaatggcttttgatgcatctgcatggattcatgaagaaacgggtaaccgcgaggagtagctacacgcttgttgctgttatcaagtacatcaacagggactgcagcttgaactgtctggcttggtttggttgatgattgttgagcttgctgacgatattcatgatggtaagacggctcattagtcgacgcagaaaccggttcctgaattttaggaccgaggtaagtccttccgctactatgtcgttggcttcttgaagctcttacagcaatacatcccaaattaagagcagctaaccatataaaaaaaaaccacatcaacaaacaataaacagtacaaagcactaacttctaagtagtttcaataaggatcactagagctaaagagagaaacaaaaatgacaattaccttcaacacatggaggcaaaagaggaccagtttctgtactctcatctcttctaataattgtatcaatggcatcatttactctattccacatagtatcagcatctgtatactcttcctaatggaaaccgaaacccaattgtcattttgtgaagctgaaaacacactaaaaaaagagaaggaaaatttgtttaaaacctcggaattggctttagagtacatgatttcttcagcttttaacacaaccacaggcaatttctcctgccattctttgttcttcctcgtcgctgcgctatgtgcttccattgcgagtctgaaatcaaacaaagaaaaccccaaattaagatacaaagaaaccctagcgtacggttttgagaaagatgagtgaatgaaaaaaacctgaaaatctggcgaataatcgaaccacgaataggttgatgacgatcgctatgccaagctcgtttcacacactcgtaaggtcttggtcctggcctcggcattttctccttcttcacacacttgagcagtgacacactcagctacaaatcgaagtaacaagtcactcactcatcaaactaatcggttcaatttctatccgggagtattttccgatcagcgagttcgatgtacgagtcgccaaatggtgtggaaagaaaaatcaaccttaaaactctttttaaccgatccaaggaaacagatctgaagctttgaagctctgaatcgtttggagatttcgtctacttgagctcataccggtcacatctccgtcatcatcatcgtcatagaatctccgattgttgtctccatcgttgccgcttctggaaatggaaatggaaatggtgtgattcgggaccgcttctttaaaaacgaaccagttttgtgatttgtctattatacccctatttgtactaactgtcgtttttttttttttttttgtcggcaactgtcgtttaatatggctttttactaaaccggaattgaaataaccgggttttgaacagataatattaatttcaaacgacaccgttttggagttgtgtctaacactttgattgattctgaaatctggattcgtctcctccattaaacatctctcgtctgataacaccgatccatctctttctttctctctccgtcgactctcgttcttaaag

SEQ ID NO: 2810 - DNA, 3000 bp, Unknown
  misc_feature (1)..( 3000): cDNA_ID_2172195_gDNA_ID_1620601_Annot_ID_161657 3000 nt of promoter + ATG
cttcaagtcacaactatcttttctactcttagctagaagagcagtaaacaaaatattacctctttaactttcttgtttattacatcccctgcaatacgcgatagaaaccctccagcaaccgaaagcaactggataactcgagaagcaacagcacgaggccgtttcccccaataggcagaaatggtctccggatcatataccaaaggtaagaactcactgctttcaccagtctacaaatcccaacaaagacaaaattaaaacattacaatgctaaatacaatactaaaatctcagctgaattgccaaagagtgtttacctcaacaagccttagctgaatattatcatcagcaaaaaccgaatccttcaaattctggccacgaagccctctcatcaacacagataactgttcatcttcttccatttgagctcgtactcttttaatctcttttgatacatcgttaattctctgtaccattgccataaaccaaaattcgaggttataattttacacaatccaatagaaattttctatgaaattgctcaattgaaccataacataatcggcagaggtaggagtagaaatcgtacagtggaaacattgttgttgactacttttgacgcagacgatggagaagaagatccgtttacggtggtggacttgggtggactagtctgtgtaggtttaggatcagtagcgacggctagaatctggcgagagcgtttattacggtgaggaatcccggagacgaaggagcggcgggaggagacggagaatcgaattggctccggtccgcaattgacgagacgtggcactgctgcttccatcgatcggtagagagagattttgaggagatagtggttgtggttgatgaagtagtagctcttctacggctctaagtggaagcggagtgtttggtatttcaccggaaggtaacggcaatggagggtccacgtggcaagaccaagttcatatgatgattatttgtttccattttatttattgactctgagattgtgacatcatttgttcgaaaaaaaaaatgggagcatgtaaaatgggttttagaacgattcgaagtcgcgacctcggatttacaccgatagtcattacgtcggcaacgagttttgacttttttgtactttttctttgtgctacgtcggcgccaccttggtttttcggcttttattatattttctattcctccgttgatttcgatattcacttattaacattggagaaaatcacaactcatgtatagaacacgaatgatgatgtagaccacatccaaaaccacatcgcaataatattataacaatattaaaatctctctatatatatatatatatttatgtattttcgttactatttgaattgcatcgcattttctttatatcgcaaaacatagttactattcggattatcaaaaggtaactatattaagatataaacctatttacacaattatatattaaaatgtttgacatttagttatttaaaatttcttctattttatactgttacataatttgccatttgagtatgatatatttttcttataaaacaatatttaatgacgtcgatgtcgctgttatagtgttttcttatgtattttttattttggttaaaaatgttttcttatgtatttcaataactaattgtcttaatcttaccaacagcatcaaatgtcgcaattaaaaagaaacattgtaaaccataggtccatagccatagtaggaaaaagacatttgtccaatcaaaatatttgttcaagaaaaaaaacaactgatctccaactctttaattaggtttcctatattaatttacctaacaattgtaaaatttaatagtttagacatgagcttgtatgtttgacatttaaaattattttaaaaacgataatacctttttttattactacaaattggcatttgagtataatataatgtctttatatataaattattcttaaaatacgttatcatagaaagttttgtttttttaatctaattcagcaaataattggcttaagacagtgacacattttttagaagaaaatttgtaaaaccgtacaaatacgttctcgaaaaagacaagtgtacaactaatctggataatctcttttaattagttaccttatattagttgttaatatgtttataaattactacaatatacgataattaaatttaaaaaccagacaagagatttccaaatccaaccctattatccagatgtggtcggtgaaagattccccaattaataatgttaagtggtctttaaacatgttcctgattagattaaaaaaaaagtgtcaaaacaacacttttgacaaaactaaaaggactaaaacgtaaaaaaacgcaatgcaaaattagtctctctttctatttctctttggtcttcgtcttcgtcactgtggagacgcacgcaaatcaaaagagtttaaaaaccacttgccaccgtatgagaaccttgtctctgacggtcgattctccgctcgccacgacgacgccacgtcagcatccacatagattcctctaaatctcaccaataccatcaaaccgattttcgaagattcgaatccaattcttctcctcctcctccttcttcttctgagaaaatctcatcggatttcatatttttgtcctattgactattcaacgtgacagatcgaatacaaaactttttggtatgttttgatttgcctttgtattcaaaatttcgcttctaccgattcgtctgaatgtgaaccgttttcattgtcacttcctttaggttttgaatcggggattgttgcgactgagacggtgccgtttcaattcgctgcaaatgcttccctgagaaataccttttgttcttttatgtaaataaaaggtaaaaaaattcaacctttttaaagttaagaagtatatgcaatttcgtgttgatccttaattccttattgctttcaattttctttgatcaaatcagtgtagaatcgagaagtatagtaaatatg

SEQ ID NO: 2811 - DNA, 3000 bp, Unknown
  misc_feature (1)..( 3000): cDNA_ID_2172063_gDNA_ID_1620602_Annot_ID_161677 3000 nt of promoter + ATG
ttgaaatcaaaacagtgtgtatataaatatatgatcacaagtttgggagaaacatcgttaaggtaaagtggatacgagagattgcaattttaagagaaacattagttggatacatgaagaaacttatatcaaaaattcatcttcaaaaatgatgaaacaaaaggtgtgtatggaagaaccagatggtcaacttgacacatattccactgatattaataactgtttaatctatgactttggaagagcaatgattcttttttcctatagaagtgagagaatgttcatattagagagaaaaaaaatctttgataacaaaacaaaatcccttgtctagttgtggtctcaagtagaaatttttgtttcactcacttccaacttgtctaagacattatatgttcccaagcgtttaaaccactgaaaaacttccattcattaaataaagcttataggaaaagatgcaacaagtgtatgacgttaatgtctacacacccaccttacctagactgttgttagaacactagtttaatatttttccttggctaggttattttactcaaacttacctttaataaaaaaaatttaattattggatagttccgcttaagggtttgaacccaaatacttatcggaaaaccgatcgaatggattcaatttttctatatccgatgaaccaattccgaatccaaaccgaaaaagagaaaaaattgatgtagaaagtttctttgtaaattaagaatatatttgaccaaaacctgaatccgaaccgaaatcaactgtaccaaaccatctattttagattacattttcagtttgaaaccattattcatataccaaacatataaaaacccgaaccggattggaaaagcgcattagccaatcagtaggcctaatttatcagtccccgtaggcccaaattatttaataacgtaacatcaaaactcaattactggaggccatatgcaggcccaaattagtgtttcgcttgctagggctttaaagtaaggttatggattcttgtttgtaggatcttctcttgcttagccaaggcaactatactctattactagatgagtatccgtactacgtgcgagtttatgtattattatttacaaattgttttatataatgtatgttcatataaagtaaagttgaatgcatcggttttgaaacataaatataatttgtaattgtttttgaaaagtcctactatattagttcatctgaaaaacgaatgtgcttgagttattttttattgttgttttaaattctcaggttttttttaatttatatatccttgttttttggttctaagtgtagattgtgagacggtgaaattttagaaaatttatttcttacactaaaaatataacatgtctttattaaccatgtctctgcatattcaatctaagcttattcaacttgatgttcttgaaaagtttagttaaaatcttgtcataatcttatatctcacgttttagttataaggatagctcatcaaacatctttcaaattacttgttttcttagcataaatctcgaaaagcatctgcatattcatttagtttctttcataataattgtctaatttttaggcaagtctaatttttaggcaagtaatatatgtagcatgtttggattttatgatcactttagccacttaagtggatctcaaaattaaagaagatatattgaattaaaaaatatagaaaaagtgatggttcaagttctgattaattatatcctttatgttgaattaattactaattatgtattacttattttatgaagtctaggtggcaagctctcatgtgctgatgtgtcaagttgtgggagagagttagcctcctttcatatatatgattctacctgttccacattaagctccagtttacaggacagtactcagaccgattttagatgcttaatagcttcagctctgtgacagttctccacactatatgtctatatcgggtataattactccatgttcctctcgttcagtctgatccaacgctgcctagctaaactaaggcagcatcaacgtcactactttccgattctaagaaatctaaattcagaaacacttcaaatttctaagcagctcagactttgtttacctgatgaaacccaggttcatgagtcaatgtaacaccaagctcatgtataatagagtataaactggagcttaatgtggaaataacctgatgaaacccaggttcatgagcttaatgtggaacatgtagaataatagagtatagttacactcttactttgatattttcagatgaaggctccacgtcgccaatgctgtgacatctctccatcatatgaggaaacaaaaggctaacttttcatggttcagaaacttgtggaagtctgtatccgaagatctctcgacattctgacaatatttgtcgatgggtttggtcgtttttgtgtaataatatgcaacattgtttaaccagtacggcttctcttctcttgttattaagttttcctagttaaactattaaatgtataaaatgctaattgtagatgaaactgaaaagttgaaaaagaagaagatgaaactgaaagtttaaatcttatatttgacccaaaataaaataaaaacagagaagcttgtaattatagaaaataataattccttcatttcaggttgtcaccataaaaatggtgtgactgtaagagtctgaactcagtcacacctctttactttttcttcggccttcttgtagccgcaaatacttctctgtcatctccgttacaagctctaaacatttatttgaatttatcaatagaattcgtataatgtaaccaaaaaccgtaaactaaatatattttataaaacttatctccattcaacatccaaatccgttcgagtctcacacaaaaatccaataaaatgtactattcatcgccgacatgcttcgttttgatcactatatttgccgtggtggtaacacaactgatctttatgcgcaccgtttcgtccttgaac

SEQ ID NO: 2812 - DNA, 3000 bp, Unknown
  misc_feature (1)..( 3000): cDNA_ID_2172140_gDNA_ID_1620602_Annot_ID_161702 3000 nt of promoter + ATG
ataaaaataaataaaataaatgataataataataatttggaaaagaaagaaatatggctacgttcacgacaaacactcaaacttgtaaaccaaaatgggcttttggattttccttacagaaatgtataaagtaaactctcatctagattctctatttgaaggtatttttttttaaagtaataactctcaaatatgccttttgttttgttttgttttgttttgttaaagtagtaattagcaaaacctttctatataaaaaaggaaaattaaaaggccttaaagaaaaaaaggaaaattaaccaaagaaccgtaagtttcgtctttccatattccacgtccgtttacgtttgtttgcagttgcaaaaatatttataaatcaaagattaatccttcttttttttatataacaaagaagattgatctttatcaggaaccctaagttttgtcttctctctaataagtctctctggattaccttgtgtaacaaggatgggcagcaccgtcttggacgcaaacccgtcaaccttaagagaacatccaccttcctcatattccatcaagtttgagaatatcgcagaactcgacgatggcaaatacgaatctagtcttttcgcagctggcgggtacaactggtatgtatacttacaaatacaactctttgtttcactaattgtgtacctaaatttagcactatgtatatgtttaatctaacttatttcgaatctagtctttaattaccttacaaagtttccaagaaagatgaagaactgaacataatagagctcacggtagtgagtagtttggaccttggagacaataaattttttattgctagatgtgatttgtgagacatatcactccatgaagaatgatcatgtttttaccctctatgattttgttggcaactttttaaggagattggtcatttatccaaaaggaaacgcaaaagacgaagggagtggatttatttcaatgtatgtggagattgatagcacaaacctcttgtcatcaccactaactggcgtgtttgcgtatctcgtattctttgtctacaacaagaaaacagacaaatactttactattaaaggtttgtatatatctaatatatttcacatatacattgatctattgctagtttgttttccatttagtatacattcacttctcgttttctttactcatcgacaatttatgcacgatgtcatagattcagaactgaagcggttcaatgcatttagaacggtgtggggattgtctcaagtgctttcgcttgaaactttcaacgactctaaaaactgatatatctttgagggagatcaatgtgaatttggtgttgatgttctggttgctccatcccttactaaatgggaagtcgtgtcctttaatcagaaaatccttgatcccaagttctcgtggtctctcaagaaatttaaagagttaaaagaggagttatacaactcagacaagtttttagtaggaggaaggcaatggtgaggagtctaaaaaaaacttgttttgctttttcatattacatatgctatgttaacaagtgcaaaattgttctgtaggtttctaaaggtgcatcctaagggtgttaaagcacgagacaactcgttatccatttatgtgtatttaagtgaaagtgaaacactcaatgcagaggagaaaatctacacgcgagtacatcttagagttttagatccgtttggatccattcaccaagccgggcaatgtaagtttccaaaacaataagtatatcatatcatcttatagttgttttacttcactggttgatgaaacataatgtttcatttggtgctctttttcgtccctcgtttactattttaaattataagttgtaattatatttgacttataatcaatatgcatgcttatatttcttcctctgttgttgcaggcaacttctggcgcacaaatacaaataaaaaccaaggctatggttggcctacttttgcgtctttagataaagtgcgagagaagtacttggacaatgagggttctttgaacatagagattgaatttgcagttgtttctagcaccaaatactctcctgttaactaaattctgctttagaaaagacaattatatatctaccatttgattcaaagacaatacaatgcagtgttttgataatggcttattgagttatttatttctgaattatttaaatctgaatctttttattaatatttttaggttatactttaaactttagtcttggtatgtatatatatgattatgaacaaagaaacgagaaagagcaattgaatgcacataaaataaactagagcctagaggtgaacctatctagtcatcaaagttcagtgccggtaaaatatgatgaaagttactggcaaaataaccaaaaaataagggatgatcattatctctgtaaacagaatacaaaattaaatttaaataactatctcactaaataaaaatttcaatacgtatatagattatattattccttgtccaaaccctagaaataagtggggcaaacaaaaattaaccccaccccaaaggctcttcttcttcttctctctctttgcttcaggtacgtcgagtctttctctagctctctcaacttttcaccattctttagagaatcaaggataaaacgagctagctctaggtacgttgtttaatgtttgtgaattctaaatcaaattttctccctgtcccacatactttgaatatagctcgattcgtcgtcgaatctttctttagttttctttaggtgtaaaagacagtactcgtcgaatcttttgattttgtatatgttttgctatatatggtcgatgggtaattttttggtttagtagttaaattttattttctagttaggatatatgtaacagaaattctaaactttggtagttccctttcatctcttctcttctgtcacatatacacgattttttttcttcttttttggggtagattctgattctctctagtctcgcttcaggttcaatg

SEQ ID NO: 2813 - DNA, 3000 bp, Unknown
  misc_feature (1)..( 3000): cDNA_ID_2172144_gDNA_ID_1620602_Annot_ID_161703 3000 nt of promoter + ATG
gcgacaaacagtcgacaaaaaacatataacggaatcgtcttcgttcctcgtgtcgccgcctcctcttcaacacccaatcaccacaatccacgtgtatatctctcttttcttaattatttctttcttctatctccacccaataatcacaagccacgtggatatctctctgttttattctcttcttcacacagtcacgcatcattctcattttctcctctctctgttttttccctttcgccggagaaaatggagacaccagcttacgatttcgactcactcactgacttaccaccgcttcctccttccgatttcactccttccaacgccttcaccttccccgaccacaacctcgacttttccttcctcgactccactctgtctctcctcaatcggcaccatctctctgagtccactcgcttggaacagattttttacgactccactcacactcagctctttcacaacgacgacaccaccaccaccaccacaccgtttctccaccttcctgatctcaaatccatcgacgccgttgaagaaccgacgacgatgaagctgtttccatctctctctcctcctcttcccgccgccaaacgtcagaagcttaactcaacttcctcttcaacaacctctggatctccaactgcgtcaaacgacggtggtattattaccaaacgacggaagatctcagacaaaatcagatccctggagaaactcatgccgtgggagagaaagatgaacttagcgatgactctagaagaatctcacaaatacatcaagtttcttcaatctcagattgcttcactccgttggatgcctctcgaatctgtctacaacaccgccggtgaagtaggagaaacagatttgctcaaatctctgacacgtcaacagattcttcaggttcttgcgaattctccaggctcacgaaacgtactctcctctcgtggtgtttgtgtcttctcttatgaacagcttctctctctcaagacaatgtcgagaaacctctgaatccaacgacgtcgtttgaagaaacaccaaaagctctctgtttttgttttgtttaacgtttcttctacatagcgttttaatggcgttttgattctcagtttcaatgtacaaaagttttggtttgattgatgatattctaaagaacgaactatatgagaaactttgcaattttttcacattaaggtttcaatacaaacataaacgatacataaagttctcaaagacaaaatcaaaacatgaaaaattcctcagggtttagtggtagaagaagaagcaagaagaagctcaagcatctgattacccaaatcctgttccttaagacacaaagctttccatccatcattcaactctttagctttatcatcaccaataagcttgactctctcaaaagcaacttcttcagaaatcaaaccttgagctacaataatctccactaactccttcaaatacggatacttaacccaaaacccttccacagtttctgtaacacaaaaatcagagatacgaatcgattacacaacaatctcgacataacaagactcgttcaagcttattcagagtagaaacagaggaaatggtgaatatgaaccttcgtttacgagattggagagagatccttcgtttgtgtttactaactcggacgattcgtcttccattgattcgtcttcagatgaattagaaatttcggaaccgttgtactcttcgtcggatgattcaggtggagagttgatgaggaagtgaatcggaaccgccattgtcgttgggatttgagcttgaagaaacgaataagagtcgatttgtgcttgtgtgtatcaatttattttacggagtacgaaattgtttgtaaatttgtttagctgacgtggattgaaccggttctagaagaagatggaagcaagatcaatataataaaccaaaaataaactaaaccgaaaattgaaaatgcgaaatatgaacaagattaaacgttgccaatataatagtacacaagcacaatttgatgagatagtaaataaaagctattaaaaaactctactgttcgttcagatctctctttttttataatcataatttaaacattttaaactggtttttagattatagatttttaaaagctcaaaaaaacaaaactaagaccatgaatggatgctaatttagattcagtttttgagtttagattttagtttatagattttagattttagttttagatttttgttattatatttttgtttagaaaacccaaaaaatttggtttttagtttttgagaaaaataatgttgattgaataaaaactagattttctaaattttaggaaaactaaaaaactaaaatcatgaatggaaaactacagtaacatagttttactaaattgtagggaaaccaaaattttaaaatcttgattggtatgaaaataagtttttaaaaaacaaaaaccaaaaactcttacaaaatctacaaaacattcaaggcctttagattacagattttggattctacaaaataaaaataaataaaataaatgataataataataatttggaaaagaaagaaatatggctacgttcacgacaaacactcaaacttgtaaaccaaaatgggcttttggattttccttacagaaatgtataaagtaaactctcatctagattctctatttgaaggtatttttttttaaagtaataactctcaaatatgccttttgttttgttttgttttgttttgttaaagtagtaattagcaaaacctttctatataaaaaaggaaaattaaaaggccttaaagaaaaaaaggaaaattaaccaaagaaccgtaagtttcgtctttccatattccacgtccgtttacgtttgtttgcagttgcaaaaatatttataaatcaaagattaatccttcttttttttatataacaaagaagattgatctttatcaggaaccctaagttttgtcttctctctaataagtctctctggattaccttgtgtaacaaggatg

SEQ ID NO: 2814 - DNA, 3000 bp, Unknown
  misc_feature (1)..( 3000): cDNA_ID_2172121_gDNA_ID_1620602_Annot_ID_161694 3000 nt of promoter + ATG
cacttgcgatccttagtgttaacagctcaatctcaatcctcaaacctatatacattaatcgccaaaaacccctaacttaatcgtaaagcaatctttgttaaatcacaaacttaatctccaagtttcgttccaaaaccaacgtagaatatttgtatttttgcaagtctatccctcaagtctatccagcttagcaaatattcatctaataaaaacatcctaatggtgattctattttctacgattgataaattagtataaatttgaactttgacttttaccaaaaaaatttttttgaactttgactttttcataggctctccccatccctcgccgaaaattcccaactcatctctgtcctctctgttatagacaaaattccttctacaaactgaaatgatcaaaaacaaatatagctttgagttagagaaaaatagttaatttagttactactgagacgaatctgctaaaatccttattctcctctagaaaaagaataaataaaccaaaacaatgttctcttcatattctctatgcaaatgcctcgtttctttccatatattggctatacaagtcctcataagctgtgcgtcttccttgaatcttactaatgagtatctgaaccacaaatgtcgcgtgatcaaggaaaataccaaccaggaagtgagtacgagaaagaactcaacactctcagccgtagagttgctacccttgactttacagatggtttcacacaccggtccaatagtagagataccaaatctgtcaccatcatattccaatgtcgcggtgactcttacaggtccaagtgcaactcctgctatgctaccgccctcgccggggtaatgccactttaacatgtttgcatatgtgtagtctatatcttgtcgttcgctataaacaactaccttaactaaagccaaaagaaaattgactataagaaaccaaaattcaggttagagttagaattacctagctgaaacaaatgtgagttggtttatacacatcaaccgataacaattaacataactgttatatacactatacaaccaaatttgtggtgtgctaggtgttggcttggtgttggcaagattatttacccatttggaaaagattatttacgtccaaaactttcttgttaatatatatttatatattaagtcatctctctttaagtcacaactatttgatttttcgttaggtgaaaacaacaaaggtgcaaggttatcttgtattgaaatgttaagattgctttttaacttgatttatttatcaaaacatttattatgattggtatttagtatttacatatcatccagttagagatatcttctatatcatatcatttggtagattattacgggacaacttttaggtacatatgtcaaaaaaaacttttaggtacatttcgccattttgcatacaactgatttcgtgtacatctcacggttcctacaaaaatatttatgaatatgtatatgtatattacagtttcgtagtaggtgtccgagaaacaaaggtggaataatatggtatgaccaatgttttctcgatgttagtatgattaatgacaattccccaagacggatgaactacgataatattttttctatgcacaacccaaacaacgtgagagggaatgtaaactcattcaacaaaaagacgactgaattcctctacaaactgattggaaaagctgatagactcgacgtggacgggatcaactttctatattacgcggcaggggaaatgaggcttgggaagcaaacattgtttgcaatggtgcaatgtgcgaaggacatattgagttgtaaggattgtttggaatggagtatcaaggagctttctaagtgctgtgatggtaaacaaggagcgagagttgtaggtacaatttgtaatcttaggtatgagctatacccttttcttaggacttaaagcctctttggtaataaagcagcggttttgctgtctctctagtatctcttttgagctttttacaaatttttctgtttattttactgcttatacttctttttattttgtttgtttaagtcctaactatgtctatgaatagggtcccaatcaaaattcagtaacctaattttgaaacgaaagggggaaaactatgtacgtagcaaacaaaatgcaaatcaatcagtcccaccttctatttcaattattaataagagcaaacttggtgaccctaaaactgagacaaacgacatttttgttttttcaaattgcccgttaaacatattgacgggttttttattggaccgacgatgacttagtagcacataagttgcccgttttggcatgctattttaggcccatgacaaaaatccgattcacaatgcatggagtatgagctaatagccgtggaatgttagtttatcaatgttttgggaaagaaaaaaaatcgtttggtaaatgaaaaatgaaagactttgatttccataatccaacttagttataaatagaaagggaatgaattatttatagcattcgaagctaaatatattagcatttttctttctcaatctagatagttctgttattaaatcatttttatattacaataatatagtcatatagattcctaggtattagcatttttctttctcaatctttagatagttacgttctctaaaaatgtttgaagaggtggagatgtgaaataagtacagagaacctctaaaactttgatccttgatcaaaactagtggtgattcaattctctcagacttttaacttggtaaaacatttaaaatttgacttttccattggccatcctcacccttcgccgaaaaatacccgacccctctctcctgtctattacagaccaaaaataaacattttttctacaaactggaatgatcaatagaatcttgtatacactaacaaaaagagagaatattattttagatgatgtgtgtccatcagctaaaattcttctgactcttgtaaaaacatcttaactatataaaaaaagaatccaaaaca

SEQ ID NO: 2815 - DNA, 3000 bp, Unknown
  misc_feature (1)..( 3000): cDNA_ID_3070027_gDNA_ID_1620602_Annot_ID_161692 3000 nt of promoter + ATG
gctctacgtgaagtagagttacaatatcattggattaaaaatatgagctcattgcaatggaaatgatataactacaattgaaaattaaccttcttacacagggtcactacgcatgaaagttaaaacatctattgctcctggcacaaaaccagtggcgcactacaagtttggaattgggtgattctattttctcagagttttaacttagtaaagcatttgaactttgactttttcatatgctctccacatccctcgccgaaaataccaaactcctctctcttggttgttacagacgaaaaaaaacttctcaaaactaaaatgatcaaatccagttttgtataaggtaaccataaaggaattgtataccgtcttgaaaaaaattagttaatctagttaccaatgaagccaatcagctaaatccttcctactctcctgtatatataaacatcacaactcaacgcttcatttataataaaaaagaaaaacaaaacacacctaactcttgaaaaaaaacaatcaaaacaaaatacaatatgtactcttcatgttctcttttacaacgtctcgtttggttccctttcttagccttggtggccacacaactcctatttatacgcaatgtttcgtccctgaacctcaccaatgagtatctgcatcacaaatgtctcgttagtgaagggaaatataaaccaggaagcaagtacgagtatatccttaacgattacatccgttttctcgcagccggaaattttcgctcaggttccatgcacatgactagtggtctaaaacccaatgctgtaaccattctctaccagtgcagcggtgactcctataattctaagtgccgctcttgctatgctgccggcatctccggggtaacattatttactctcttcatatcatattaaatgttattttagccaaaacaaattgttttaaataagaaatattatgttctgtgattatttgtatacaacaatttatgtttgattcaagattttcttgtgcccaacagccctcaaggcttttaagtctgtccatagcgaccaattcaatgaccctagcgtacaatttatcaaattaggtaaataggaagggtaatgaatggtattgtttttttatgtctaacagattcttcattcacattttcaacttatgaaagcctattttctaatacagattcatgaattagttagaaagcacaaacgcacaatgattgtttcttatatatttatatttatttaataatattttagctattatttcataatttaatgtattaattattttaacacgtcaaaacatgaattaattatgtaaaatgtaaacgacagcttcgtaggcgatgtccgagaaacaaaggtgggataatatggttcgatcagtgttttgttgagattacttcaatcagtgtcatcgacttcaacatctcaaagatcaattacgagaacaatttccccttacacaacccgaacagggtaagtggcaatataaagtcattcaacaatgagacaatggctctcctcaaagagttggcgttgaaagcaaataataaagacaacatggacaatggcaagatggcactgtacgcatcaggggagaagagggtcgggacaaagaaggtgtacgcaatggttcagtgtatgagagatctagttaagcctaagatgtgtaaggagtgtttggaaagcattataaaggagtttcccgagtgttgcgacggtaaacaaggagggaggattttgggtacgagctgtgattttaggtatgaactttacccttttctaaggacttcagattcaaaaactgtttgatgacgatgcacaacacattctcttgacaccttacttattttacttcagttccggttttttgagctttttactagtttttatttatattgtttattcttggatttccctttgtgctggtttagatcacatgtgcctatgactaagatcccaagctgtgtttttcctcactctttatttggttattaattacagttgttggctatgaataagaagctctattattcttgacatcttaaatttgttaacatagaactccgttttctaatttattgttggcgactaaatagcgtcacgtgtagttaatttagacgaatatttccgcgtcattgcttaatctgagtcatgatcctacaatttccaagtcattcaacgggtaaaactactccctgattgacaagataattttgtgattatccgtagctctatcaaacctgtaattaagataatgcaaacttctaacaagcaagaaatatttaaccgatcataaagattatgtactggatataagcgtcagttatggtgaatatatattcagcataaataatttatcatcacccatattatgtcgttcaagaagattcatgatgtatttccgttgtgttacgtttatcctattgaaaaaatctgtgatgtcaaatgtatttggatcaacgaatcctcgtagcgttagaaagtttccactctatcgcaatgcatgggttttagctaatttccatggaacattttcttttttaaaggaagtctacgttactacgtatgaaagttaaaacagcttcacaaatcacaagatcccaacacccaaaatcatcctgctccttgcacaaaaccggccagtgcgtatcctatgattatgttttctaaaagttttaatttagtaaaaggcgttgaactttgattttttcatctgccctccccatccctcgccgaaaattctaaaatcctctctcatttctgttacagccaataaccattttttctacaaattgaaatgattaaatctaatttgtaaaggtaagttaaacaaacaaaaaaaaagattacagttgaaattattagttaatttagatctaatgaatccaatcagctaagtccttttgtctcctatatatatatagaaacatcccaatcttagcctttcatatatggaaaacttctaactctggaaaaaaaatcaaaacaagaaaca

SEQ ID NO: 2816 - DNA, 3000 bp, Unknown
  misc_feature (1)..( 3000): cDNA_ID_3070074_gDNA_ID_1620603_Annot_ID_161713 3000 nt of promoter + ATG
tattgttgctgcggaggcatgaatgaatgaatcaatgatagacgaaaacatatagtataagctacatagttgaaaattaatactttaatagattaaaaaaaaattaacaacatatcatgcgtgaggggatggtgggtttattttataaaaatgcaaatgttttattaaaactaaaacaacaacacattctagtttctacaacatatatcatcccgtaattcagagctaaacataactctcagttttgctcataatgaaataattttgctagtaaaacagaaaatatctatgtttcataaaccatcgtttatcgttatcgttttcacacaggttagaaaactatttgaatttatataaatgttcatactttgattagttttagattttttttttttttaagtgtatgttagtaaaagtcatcctttttcttttctttttgataaaagttgttaaagtgatttagcgacgaagcactttgataccatatcgaattaaattacagaagaaaaacgttttacttattctattattcaattcaactaagagggtttcattttggtttacacattacactggttagttaattgctactcaaatttgataataacatggtttacttaaaccaaacactctttaactaacagaaataataaacaaagattgaggagtgtttccctcctagttttagacttttttcggatagcaaagccatgaactttgcgaaaaaggctacaatgattgaagagtatttggtatttacagatattacattaatataataaatgataagaaattattaatatgaaataatgtagtctttattaggcaagttgttatacttattcctagatagttactctatgcggtaggccaataaatttaaattattaatgatttctctaactctgaaccctatcaaataaattccaaccccatcagaactcagaagcacaaagtttccctatccaaagtaaataggtcacacaactaatgaaatcttttacagaactgtcgaatcatgatagcatccgttcataattattattccattaacgtatagttgaaagacactcccaactttcaaattttaaattttttgcatgccttaataacctggaaatgattactgttattctcactttttttttgctacacaatttttttctcacctttctggtttcaatctttttttttttttgtcatccaaaattaattagagctcaaaatattcattcctgaggaatgatgtttacataagtgatatgatgcggttagacacgaactttacgcgccaaattatccgctttgacatttgcactatgagaaattaaagataaagaaaaatttgaaaattctttcttgtcactctgcaattcctccaaatacactgagaagaccggccattcggttgggaaagacaccatcttcaccagatccgaacagtatgtgagaaacacaacatcttgattttcggcggcaatcatgcaataaaagtataaaaaataataataacttcgatcgttgttgttttaaattagtaaactatagttttttatttattttatttttgctaaacaaccctacatgatttaaaagcaatattatagttttggtttctacaatatttatagacagaataaggggtccaaataattctttccacattcataactaaaaattttaattaataaaatagagttaagagtttgactatatataatttttaaatcaacaaatatgtaagagtaatataaatattttttccctccaatgacagccagaattgagtcattttgataactcacaaatggtaaaaatcattatatgtaaatacttattcaaatagaacgtataattaaggaattccgaatatttcaatatgactaatcaagtaaaaaggattacaagacattaattatgttaatcacccatagtataaaattctccgacattattaattcctagtattaattaatgattaaaacacaaaccttgtaataataatagagacgcgtttagaaagaagaagaagaaaacctaactccgttgtgtagttccgaagtcgtaacctgctccattatctatggacaacacaccaatcctctcttctctctccttttatatatgtcatccacttccgtacctgtcgtctctaattaatcgcatttaataaacgcgtctcaagtccgacattgcgtcggtgttgtcaccataatcttcttcttgactctatatcgaaaaaagcttccaactttatctcgttaaccgaaactccggcgacaaagcttctacctttatgttctaaaatcgaaactccggcgataaagcttctattttaatttgtaaattgaacttccggctgaattttaaccggagtatgtagattccggcacacaggtgtttatctttctcttactgtatttgtccgttactgttacatttctttattgcgttaatcaaaattccggcgataaagtttgtacctttcgccggagaatgcagattccggcagactggtctttgtctctctgtttttttgcagtctttgtcagttgaaacgccgtcgttttttggtgaaattacttttacagttcttttagcgaaatgtttggtgaagaaagaaagcagaagactttaattttgcgatcgctttctcttataacgttttctgcgttgtttttcgcccaacttgcctttttttctctctctgttcttatggtgtcggtaacgcagtttctgcgtttgcgtttgtaaacgttactggaagtttagtgtatgtgtatctctttgtgattgatacgaagtttgattaataaatgcttctgatttgatgaatatttggttgctcttaattttcaagattctttctttatttcccaagattttgtttcctttcaaagtccaagtaaaatattcagtaaggttttcttttcttaaatccgaaatttgattgagaaaaatctcttctgattttgtgatgtttcaggctttgaagaaatg

SEQ ID NO: 2817 - DNA, 3000 bp, Unknown
  misc_feature (1)..( 3000): cDNA_ID_2174947_gDNA_ID_1620604_Annot_ID_161723 3000 nt of promoter + ATG
tagttgatagtataatatgatatcaatatcatagtagtgaatcaaagaagaatgtacatatgattaaagtgagtaattcttgtatgagtggaatggagatatcagatatcttctaaaagtgatttcgaatcatggacttgtaaaatttttcttaatttttgactttttgatgaccaattcctctatttatttatttatttccacaaccgaccaaatattttcagataatatactctgatgggtccattgtattttgggccaaaaagcagtcctctattttatcaggatcagtgggaattgactcggttttgttctacttgtaatgggttatgacaaactgagaccaaaccagccattttacccctgcattcttattacaaaacggccaatgttatattgtcaactgaaatagttgagaaatacagtttacaaaaatttggcacctaaaaagagattgaaacattctacaaagcgataaaactttactttatctttgaccggacaataaatgataggcatttctagaattttaggaaaaaaatgaaaaaaaatcaaaatgtgaacgttgatacaataagaaagtcggtgaacaaaaaaaagataatataaaagcataatatagacaatataaaaattggttcgaccatcccaaacactacggaggacccaaaatatgagccaagagacagcgatagcaagcttcaagaaattccaacagtcatggatcgagcagctacgaaaccacctgaaccacctccgctccgcccaaaaccatcaccggaactctgctaccggtgatgaggaacggttaagggaggctgtggacagagtgatggaacactttagagaatatcacagggccaagtgggctgcgacggataaagacgtcatcgaagttatggcttctccttgggcttcagctcttgaacggtcgcttcagtgggtcggtggttggcgaccaaccaccttgttccatctggtttacactgagtcgagtattttatttgagtctcgtatcgttgatatacttcgtggctttcgcaccggtgatctcagtgatctctccccttctcagttcaggttctacacgaacccctaattagctactttgtttactaatcacaactactagtaaagatttttttatctaatttaataaaatatccttaagttacgttgtaatttgattgaagtaatatcgtgatttgcgcgtgttattgtttaccaaaactaatacaggttcactcctacacctagagatatcaaatatgtagattagtttagaacatacgatgtttatttgtttacttttcttaccaaaaatgttttagaaagtgaaaaacacatttgagggataacaataaatttgagagattaaaacacttattttactttcttttttttcaatgtgtaaacaataacatatggactaactaaacatattttgattacttaatatttaatatttagggttccatttgtcaaaggcaggacggtaagtgagctacaatgtgagaccgtgaaggaagagaatgcgataacggaagagttgtcggagtggcaagacgatgcgagtgaccttgtcatggggacatcgtcagatcccgaccagaggatccgacggctagcagaaatcgtccaccgaactgatgatctgcgactgagaacgatcacacgtgtggtggaggtcttgagtccgctccaacaagcggagtttcttgtcgctgcggctgagcttcgtacaggcgttgctggttgggggactagccacgaccgtcgtcgaagttccgaagtttaaagctaactaaaaccggtctaaaggtaatgagaatcgaggaagaaaaatagtttttggatattaattatatgtttttaccatgtttttggttatccagactgagtttggttttacatggttatgaaaacaaaaaaaactcatatgttatgtctctacggttgcaataaagatcaacccacgtgtggtgcttgttagtttaccttttttagttagaattttgtgtgtttgattttttttatgaggtaattatcggaccttattggggcttctgatagtttgtatataaaaaatactaaagacagagaatcggggacatgggtcattgttggtttctatagaccaagtggataaacagaaaacaaaaagtcagctacagaaaaagacatgaagtgaacgtggcactgccatgtctcttgaagacatgcaagaggacacttggtgtggtacgcgtcctcctatcacggtgtcgattccaaacattttgtttggtttagttttaagattcttcttcgaaagaatctcatttttaatcgaaagatatgatgacatgacaaatttcttcttacataaatttgctcttataatgtttattttcgtgtaagttttatatattttctaaaatattgaacttaaactagctagaccctttataaaaatactatcagcccttttatataatgctttggtgacaacagaacgacaagaaaaactgagaagagacctaaaaacgattatagcggttttgattggttgaagatgtgtcacaattttttttgtttatttcgtttcatttttatttaatatgctagtaaacctgttttttttttttaaaactgtattataaaaacgtgtcttgttaggcctttaaagcccaaataagcccaatgaaagaggaaaagaggagacactgagatttggcccaaactaacgcatatatttgtgttttacatttatacccctatgaccgacatcaatttaccgacagactctactttcgagaatggcgggaacgtgaactgaaccctaatcaccttttttctcgattccccaccaatggctatatgattacagtagcccccttcgtgtctcttcgtttccagttccctctttatataataaatcgctccactctctttttccgagaaagaacacagtatctcgtctacaacacctgtcacattttgagaacaacggcgaaaaca

SEQ ID NO: 2818 - DNA, 3000 bp, Unknown
  misc_feature (1)..( 3000): cDNA_ID_3070102_gDNA_ID_1620604_Annot_ID_161735 3000 nt of promoter + ATG
gagatctagaagaagctattgtgatccttgacaaggtcactgggaaatcgaaagggtatggtttcgtcacttttatgcacgttgatggagctttactagctctgaaagaaccatctaagaaaattgatgggcgtgttacagtaacgcagctcgcggcatctggaaatcaaggtacgggttcccagattgcagatatatcaatgaggaagatctatgtggcgaatgttccttttgatatgccggcggataggctattgaatcactttatggcttatggagatgttgaggaaggtcctttgggttttgataaggttactggtaaatctagaggctttgcattgtttgtctacaagacagcggaaggtgcgcaggctgctcttgctgatccggtgaaggtgattgatggaaaacatttgaattgtaagttggctgttgatggtaagaaaggagggaagcctggaatgccacaagctcaagatggtggttctggtcatggacacgttcatggtgagggaatgggaatggtgcgtcctgcaggaccttatggtgcagctggtggtatcagtgcttatggtgggtactctggaggaccaccagcgcatcacatgaattccacacactcctcaatgggtgttggttctgctgggtatggtggacactatggtggatatggaggtccaggtggtactggcgtctacggtggacttggcggtgggtatggtgggcctggtactggaagtgggcagtatagaatgccaccaagttcgatgcctggtggtggtggttatcccgagagtgggcattacggtctttcatcatctgctgggtatcctggacagcatcatcaggctgttggaacgtcccctgtgccaagagttcctcatggcggaatgtaccccaacggtccaccaaactactgaaaaggtgcggttgttctcccttgtatattttggggtttaagagtgtgttgcattatcatgattcattgcatagttatatattcttccctactttgtggcatattgtttttgcaggttgtgcgtaattttcttgctagaaattctctgctattcttttccctgtgtctcttttagtctatttgcttgttagtactgtgttagctacttgatgcaatgcctttagtcgatgtttttttgcttgtgttcattcctttattttaacgcatgaaagatagccagaaaagtggcaccttgaacccttttatggggaatgtttgtggcattctttcatgcagtttttctgtttgtctttaagctgctagtctgtgcaccatgctttgtctctctatcatttactttttgtagtaatgagagtacgcatgtgatcgttccatcttgagtccttgttttccttctcagtatttaatcttcttctgaggatagcatgaggttgatttctttgataatgctaatgaccaaattgagttgtgaatgggtgttgattcaggtttgtgacagcatattgggtgaagatgctttttgtgcttagtggtgattacctgattgcagctctttaatctctggaatgatgaatgtatagctgctttgacctatctgcacttgacctgaatgtgctttggtttctataatgaatgattagactaggatatatttatgtacttttaaatatagacatactcggcaaatgagttttgttggtcagattagtgagtcttcaataatatgttgtattttctcctacattgttttctggtttatgtccagccactctattgggcttcctgattggtggttatatttcttgaactttgatacttaaatgtttgtgacttttggatatctaaaccttgctgattggtggttatatttgtgacttttgaggacatccagactggccctagaggctatgatttgtgattattgactaatgatgcctaggtaaagtggtgcatattttgtgaccagtcattggcactgtacgtgtttatccatgtcaaaaccataacttgagtagtgctgagtttgcataaaaatgtgaaacatgaaggtggtgttgaagtcttgctgttatttcatgctaaattgcgacccagttggtattgtatgacagaaactatgttctttcaaagcttagtgtggttattccaagggtatggaggatatatcgagttgttgacttgtttaaattatgacattattgtatcgtgaaaatctcatggcttgtgatgtcgaggtgttgcttctctgatcccaagatgctgagtttgtttttgttttttgggatttgagaaaatgataatgtgttcttagtctatggtggggtcatttatttgtcacttcgaagacagattttgatgcccgaatagctcttcttgcttctttcttggtcacaaacaaaagacaatttgtcaatttgtgtgttttaggtgtagaaaaaggctagaaagctgtcattgttaagcttgtatagactcttttcttgccaatgaccattcgttttttttccccttacattttgtcctttttgtcgagcgaatcttcaatgttcctaactgaaaacggagtgggctgaagaaaatctcaacaacggctggaggcgatgtaacttgagctatcgaaaaggaatggaactgcgacgaaaccatgtaaataataataatagtgtattgttgttctttggtatattttcacacacactctcttctgtaacttacaaaagaatattcataatcacgtttgaatagctcttagacacaaatgagttgggttataaattagtaattaacaatggcatgttacaaattagactaacaacattgtagcaaatcaagccgattatattttatttaattagtaaaagattaacacaacaaaagaaacctgaaaatagttaagtggagggccccatgaccactaacaaaaacatataagctcttttcgttttgttactctctccattgaattctgtcttgatcactttcgattctctcaaaaaatcccataactttcccaacgaaaa

SEQ ID NO: 2819 - DNA, 3000 bp, Unknown
  misc_feature (1)..( 3000): cDNA_ID_2175004_gDNA_ID_1620604_Annot_ID_161741 3000 nt of promoter + ATG
tcaactctttattcaagcgctcagaactgaaacaaactgaaaatttcgcctcatgatacttaaaaaagaaaaacacaaaagttggaaaggcaatgtgtaccaaggtaactcgtccaagggcacttttggttccttgactgacaccaaccatttcacagtccatagccacttcatctgtcaaactacccacagattggtgagatttgatatacaagattgcacaaagaaagaaacatctattggcaaaatccttttttctttttttgcttagagctatttcaacattcttttactatttaagctacccaagtcaattccacaaccaccaacattcacaaaaatgaaaagcagaggaggatagtagcttataaacaaaagttctatacaagatattataattcatcaacaagaaccctgatttcccagagcaggaagacactaacaatgtaaagctcatgacattgtgtatatctgagctagttattagtcatcatgtagcaattaaaaccatttactaacagaaagtccacaaagccaaatagcaaacatgaccaacctggaatcgtcgttaaccggagctaagggattaatcttaggaacatcaacctccgaatcgggtctctcctttcgcttccctgcaagtttgttgtgtgagttaagacaactgagaaaccaaaccagtctataaaccctaaacccaagcttaaagttcgaatttttaggttgaatgctacctaatatggagctgggattttctgggtttgaagattttcgagtgttgccatgagaatcagatttcagtttctacaaggaaaaataacgggaaccaaatcaatggctgaacaaaagtctggaagaaaaacaggagaaattagctaagagaagaaagaaatagagactaacttgttggaggagtgaccaattagggtttaattgaacaggtttaggagttatcttcttcttcggctttctcttcagatcagaactcatcttttttagttcagcgggcgcttggaaaatttgttgacaagcacgaagctccttgaagcggctcgagaatcacaagagtaaggtttaagaattaagacctcccaaaacgctgccgtttctctagcatccaataataataataatacgattttcaccacgttatgatttttgctttgattatactttggtatatgataaaatatacacatgtattaaatcattgtttcatagcttataaaagctaagataagatatggttgtatttagaagaaaaaaaaaaagacatggttgtatttttataatgttctttcttaacataaacagagagacttggatgattaattgggcacaattagattaggtgagaaggtggtttaaccaaaaagaagcacatgggattgggaatcacctccctataaatattcgcatcatatgttacttgcctcatgggataattcaattctgttccgtcgcattgatctattgttttagttctaagttttgcctaatttttctgtttctcaacattttgcctaactttttttttaatcgtcctatgatagtgaaaattccagaggtctaatttttttaaaaaagattgttagttagagtagaagcataccttcattaatggctgccagtgacatgcttatcttgttgttaaattcaatggcatgctttagtacaagacaaaaacgatcatgctattaaatgtagtaattagatggggaaatcaaaagattttgagttaattattttcgatccttgtacgatgtcgtttggtaaataagggatattcattttttaattagaataaaaaaatatttgctgtccgaaaactcaagaaaccaatgaaaaaagggcaaataaattaataaaaaaaagcaaagataagcataagagaataaatgaattaaataaaactgagaagaagaggaaaataaaaaaccttccgtcaccgtgagaggaaaataaattagaaactagaaaaccgacgtcttaatcttcatctaatctctctctcgtccgtccttggatctctctctccctgaggaaaataatcaggtacttatctcttatgatcctaacgattatcagattctcgagctttttgattatgagtttttatttgtcgtttttggtgaaatatggttttgaaattgtttttaatacgagagctgctgaagaattgcattgttattggttagtcggaatttaggcttaatcttcttttgatcgtctaggttgttaattttctaaactctgtttatgcttcaggggagcttccgattaatacgagttggttggtttttgctgaattttcgaagctttgtttcttcaatctttgatgctagaaaggtcagcaacttaataacaaatcttctctacttcttttctaaaattttctggtttatgtttcgtgaattgggtttgatttgattttcctaaggcatgtctggcaacgtggcttgtgcctcattaaattgtaatttagtgttgttttctgccacaagggtggtgagttttgctaaagccactgcttagtttctgtgaaaattattgggttaggaaaaggttcgaaggatttacttttttgaatgtttggggtttgatctctgcagctaaggtttcatattctacaatgtatccgtggaccttgaatgttctgtgctgtcaggatactgttttttttgtgtgtgtgtctccattacttgcgatgatgacgaaaaaattctgggatgttttgagacttggcttatcccattcacgggacaagttgggatgatatttacttgttgtatgttttgattccattattagatatcagtagtttgtgcactagctagaatcagcgtgcggtgtaactagcatcgagttttagctgtctttgtgggtgaattttaattgttgttttgttgcattgttgctgatctttgtaaattcaactaccaggtgttttctgcaacaagcaatatgcgacaaagaaatatgatgactggttcagacatg

SEQ ID NO: 2820 - DNA, 3000 bp, Unknown
  misc_feature (1)..( 3000): cDNA_ID_2175002_gDNA_ID_1620604_Annot_ID_161740 3000 nt of promoter + ATG
agaagagtcttcacccaccaaaaaagattagatttttaacgacctgaaaattaaagagtagagtttggaattagatcgatccattgttgaaagtttcgattttttttcaattttctgggtaaaaaagaaagtgaagggtcgttttcaatcaaatcttccaagagatttactcaaggaactcaatcataaccgcaataaattgaaaacctttcatgtgaacatgataattaggtcgttctttttttccagaaatctcgaatcaatgaaaattgtagcaaaccaaaggtcggattccaagaagatgaatttaagcaattatctcaaagagagatccagaatcaaaaaaaagattcgagaaattacctgaactctgggaagaaaaagaaataacagcagctaatcaggtgcacgaaccaggtaagcgatctaaatgtttttagcaacagagagagagagaccaaaaacaagaagacctgaatgatattttctagaatttggtatccgtacaatacgatgccgtttttgtaacaataagcccaatagagtaggcccaaatatagtttgtatacaaaaagaaaccaaaccagacaaatttcagttgtaaacataaaccggtttttttgctaatgattgatcaaaattatccggaaccaggctttttcgagttaccaacttcatccggtttagcagaggtttttgtgatcacattattgggtgatgatttctccggtttcttagatggtttgatcggtttaacgacgtagcattgagccctaatctcccaaggtcgagccgcaatccaccgttctttccaactccatccccagctttctttgccaaggttaaacgaagcttgacctagatactgtgtagcattagccctccactacaaaataccaaaaaacagaaagttacttgagccacaagttatctaaaacacaaaccaaccaatgtaagtttaagaggtctcagttttgattgacctgatgagagaaagcataagccattgctctttcacgcttaaccgtagcttcttctttctgttgtatctttgcgagaatctcctccattgtttcagagcctccacaccattcaacttctagctcgtgaagtttgatctccagcttcaaacgattctccaatcttttgtgttggagtctaccttgtgtcaccatatacaaacgtcgtgctctgatctgattctgtatatcgtaccaagaatgaatcacattgagtgcagtcgaggtttggttcatcactgtatggccttggatcagcgagttaaatctcctcgcactcttcaagctgcatagtctttttctcgcctgcagaagattcgcaacaacgttaggtaaaattggagcggtaaataagtggaaaatgacaaaccttgaatgctcgaaaagccttttgaatgcgaataacagcgacttctacggtaagcttagtagaagcagcagagcttgattcaaccggtttgacacggtttgatgtttcagaatgtacctaataataacatatttaaagtcatctacgacaagaaagaaaaagagaatgaaacagagtttttttcactaacgttgcctcgatttgatttgttcttctttgttccgtttagacagatgattgagcggagcagccatccagatcccataacagaagactggctcagtttaaaggtaagagattcagaacagcacaatgttttatcggttatgatcacaaaatctggctcaatatttaactagattatgtgaaagagatatgagattataatgtgttctttgttttaaggcacaagaaggtttaatgttgagtggttttcaagtaaatgagagagagtgttgaagcttcgctctctttgtggtgaataaacccatcttggtgattgacatttcacccaatggggaaggtgttgttttatcttttcttcaaattcaaggtggtgctgtttctgatatttttattagtttaggctaagattgtggagaccgatcaaataaaggatgagattggcaaaagaggatgatgtaaaacaaataaattttcaaccattggtcccggcggggctcgaacccgcgaccttcggctcataagaccaacgctctaaccaactgagctacgggacctgtttgaatattatgttccatacttttatttctccttttttttattaatcctttttagcaattaatgaattaaacattactattcccaaattcttgcatccaaataaatttccaaattcaactttgtattgttaaagctaggttttatgcttttctcaagctcaaaaaatcatgtattatagacacatgttagtgaatagtgagatgcttacataatacgcatgtttttcactcttgatgcgtggtggaatcatcaaagctttgggcagcaaaatcgcaaactgagaaaaaccagggagattcacccgttttactgcacttgtagacttgtagtcctgaagaacaagtcttgttggttcctgtttattaattatcctccatatcctcatcggacattaagctattccataaccactctacagaaacatctctaagaaagcttttccaaaaccagtatggagctggagctcgttgaggatatgctagaagaattctgtatccccaattttttagttcgcacagcgtacgagctaacccttccagttgctcagaaccgattatgagcattatagtagctacgtgtttagtttatatgggccattacgtgtggcccaaataattacttgtgttaggtttaaatcgaagaatatatttgattgggcttataattacttttacaattggcccagtccaagaatcagatggatctgaatccgacccgtaagaagatgtgagtaaaaatttcatccacttgcgtgtctctccctttcaaaggctcaaaatttaaatctctcattcttcttgtgcggcgtttctttttctccttttgtccgtacgcgttttcttaccggtgacctgaaagtctcaaaaa

SEQ ID NO: 2821 - DNA, 3000 bp, Unknown
  misc_feature (1)..( 3000): cDNA_ID_2175013_gDNA_ID_1620604_Annot_ID_161745 3000 nt of promoter + ATG
cttagattcagatcaagaacttgaagtgtctgtatagactttccaaagggttcgtttttatttggattttgtctgtgttgcaaactactaagccaagtaatggaaatggtttagaaagatcatttttgttgtcatctattacttggaatcttaccagtactaacaataaacataacaatcacatttctgatactcttcttgattaaaattgaaactattacttgctatatagttaaaccccagatctaacgtgagaaaactgtaaaggtatgagagaacgtagatgtaacctcaattaattgaagacatgcttatagttgctaaatgtgtgacaccaaactaaagttgatcacatgatcgaacaaatcccacaaaatcaaaatccaacctcatagaaatagcattctctgtttcttacttgattaaattatgtttcaaagatcataacatgtaataattaattaatttttaaaaaggtctggaagtgtcattaaaagcataacatgcagtttaattaagtgattaaatgtatgttttgtctggttctcgtcctttaatggtctctagtcaaactcatctctcctctaccagatcaacaaacaactgaatcctttttacgcgccactctgctgcgcgtgtacttcacagcctgtcatagtaactcctagcgacgtcagtgagaactgagaactttctccttctttcctaaattccaagtcttgaacacttttttctgttaaatgttagtgccgagtctacgaaatcgaaaccttcttaagttctttaatttcttctaaatatctctagcaagatcatactatatctacgtacttattatttttgggggaccaatgagcacatgtttatatatcaatcatattaattgtcagtaaaagcacgtagacaccttccatctttgtaatcaatttggcatttattatggataattgtttgtttttgtatacaacaaatgttcttgctgttgaaaacgggattattacatcttatagtaccattctggtcatagtaacaacagtataatataatttacaaaatctatttattttttctgaaagttgtctttgtaacaaattaaattattaatatagcagaagaaagtatgcatttagtatttactatatatggtttttctagcatttagaaaaaataattagtctagttgaaaaataaaataaaagtagaaaaagagttattaaaagcatgttaatgctaatatgagggtggtcctgttagtcttataatggtctggtcaaactcctccttctcacgactgccacatcacacaacccatcttcttccattttctgtttagtgtgaccgttgcttcgcgccttcgcggttcagtgagaagctcacgcgcgttttcttacccgcgtgatttttcaccccattatctcctttatgtgattcttctgttaaagttccggtttatgtatctgatccgaatatctcctttatgtgagtcaaacatatgtgtatgagtgagtttatgtatctgattatttaattttatggcttccttaattgaatgatttaagattaatagtatgtctctaactatttggccaccatactcacattcggaacaacataaatgataaagaagctagcgaatgggtccgactccttttaagtgctacaaaaagcgacacgacgtccttagtttcatgcatccatccacacgaaaatgtaaagtgagaagaaaactcaaaaactaataagaaatgttaaaattaataagaaaaaacaagggccatgtcgaatcattaccctatctctcggtactccgatcacgtgccaactttgggttctataatgcttttattattcatatttaatgtatttttttctttaatttcttttattatctgtcttcgaccgtatttagtccaaaccatgtgaagatttccggtctactgtttttatcattatgaaaaagaaaaggaaaaaagctatggtcctctctaattagagttgattaaaaatttgaataagaaataattaatttatttcactctctccagcttgttctttgtggtttggcttatactgaaaaattgaattcccaaatgtttggtcctattgagtaaatatcatccatttatctaaaatgataatcatttcaaacctaaacacaacaagaaggattttaaaacaatagacctgaactcaatcttactaattcattggttaagttgtcacgacatgtatatgttgataacaaaaggattggttacaatatgggtgcaaattgtggttgtggcttaatgtttttaaaattcacaaattttcaaatattgtctaaaagtatcccacttgtcataaattaccatccaagatccttccaatctctacatgcatatatgtccaataaaatctagctagagtacgagaaaaatatccaaaacttttgaatttgacaaaaagtcttatctttccaaaggaaaataaaagtttgtattatttatttccaccagaaaaaaatctactaaaaaaaaaagaagagactacgaaaacaatacatgcaaaatacacaagagacatgcgtgtctgagtgtttgtgtttttgggaaagccaataataccttttccctttagtgtgcacatgtgtgtatccacagaagcgtacgaaccctttctttaactcgtttcactctcatgggccacattactttcaccatcccctaaattaccacttcacccttcttccatatcattcacacaactaatcaaattacctcaaaaacgcaacaaaactaaatcgtgatcagtcaaagatgattacatagatttaggaagaaggaatctcttaccctaactagatccaggggtattttagtaaattatcataggtacccctaaaagtctctcgattccgttacactctcaatatctctccaatggctatggttactactacactcttcttcttcttcttcttcttcttctccttcttctcactgtaaaaaagaaaaaaaa

SEQ ID NO: 2822 - DNA, 3000 bp, Unknown
  misc_feature (1)..( 3000): cDNA_ID_1013341_gDNA_ID_1620604_Annot_ID_161742 3000 nt of promoter + ATG
tgaacctgtcccatatgactgtatgaagcaggatgcaaagtctcagcgtatgaggctgaaggcatgtgagggtatacgatgggaggaggaggtacggggtgatggctaatatagtggttcctttggtatacagatggcgtggggtttctgctactagatgtttcatggtatcttgggaagcaaacattaccagattctatagatccagtagcaatgttacctaagagatcattcaagaagaagaataaaattatcaagaacttgccaaaagaccaatcgcaatgctgagaataagttaaggatagtaccatgcatataaggtacggcaggtgcttgagaccaaagcgaagatgatccatcagatctgttgccattacagtgttggtcataccagattgagccaagaggtggaaaaggatgagctgcatagtttccttgactgaagttgttatgaccatgagagagaagtggatccattgtagctgctcctgctctgttcctcacacttctctgatctagtggttgtggataagtaccaaaatgtgggaatgaaaaaggtgctgtctccgatgtattcaattgagggaaagaacaaggagcaactggatactgagaatttccaggtattacttcagaactctttcttttgaatccgtgatccataaaatgggcatttctctcatgttcagtggaagtaactccaacaactgcatcattacttccatgagacaacagaaaactcggtggagcttcataattcacataagggacatagaaatttggtgcggttgacatgccagaaccaagatttgaagcatgttgatgatggtactgtggaggcccgtagaacattgagttgttatcataaggttcttgcagagaatgagcttctaaatgaggaacagtgttcactggtgggatatctggatacagatagttagttccaatgcgaggttcaggatggggaacaaagctttgagaattctgctccatgtctgaaccagtcatcatatttctttgtcgcatattgcttgttgcagaaaacacctggtagttgaatttacaaagatcagcaacaatgcaacaaaacaacaattaaaattcacccacaaagacagctaaaactcgatgctagttacaccgcacgctgattctagctagtgcacaaactactgatatctaataatggaatcaaaacatacaacaagtaaatatcatcccaacttgtcccgtgaatgggataagccaagtctcaaaacatcccagaattttttcgtcatcatcgcaagtaatggagacacacacacaaaaaaaacagtatcctgacagcacagaacattcaaggtccacggatacattgtagaatatgaaaccttagctgcagagatcaaaccccaaacattcaaaaaagtaaatccttcgaaccttttcctaacccaataattttcacagaaactaagcagtggctttagcaaaactcaccacccttgtggcagaaaacaacactaaattacaatttaatgaggcacaagccacgttgccagacatgccttaggaaaatcaaatcaaacccaattcacgaaacataaaccagaaaattttagaaaagaagtagagaagatttgttattaagttgctgacctttctagcatcaaagattgaagaaacaaagcttcgaaaattcagcaaaaaccaaccaactcgtattaatcggaagctcccctgaagcataaacagagtttagaaaattaacaacctagacgatcaaaagaagattaagcctaaattccgactaaccaataacaatgcaattcttcagcagctctcgtattaaaaacaatttcaaaaccatatttcaccaaaaacgacaaataaaaactcataatcaaaaagctcgagaatctgataatcgttaggatcataagagataagtacctgattattttcctcagggagagagagatccaaggacggacgagagagagattagatgaagattaagacgtcggttttctagtttctaatttattttcctctcacggtgacggaaggttttttattttcctcttcttctcagttttatttaattcatttattctcttatgcttatctttgcttttttttattaatttatttgcccttttttcattggtttcttgagttttcggacagcaaatatttttttattctaattaaaaaatgaatatcccttatttaccaaacgacatcgtacaaggatcgaaaataattaactcaaaatcttttgatttccccatctaattactacatttaatagcatgatcgtttttgtcttgtactaaagcatgccattgaatttaacaacaagataagcatgtcactggcagccattaatgaaggtatgcttctactctaactaacaatcttttttaaaaaaattagacctctggaattttcactatcataggacgattaaaaaaaaagttaggcaaaatgttgagaaacagaaaaattaggcaaaacttagaactaaaacaatagatcaatgcgacggaacagaattgaattatcccatgaggcaagtaacatatgatgcgaatatttatagggaggtgattcccaatcccatgtgcttctttttggttaaaccaccttctcacctaatctaattgtgcccaattaatcatccaagtctctctgtttatgttaagaaagaacattataaaaatacaaccatgtctttttttttttcttctaaatacaaccatatcttatcttagcttttataagctatgaaacaatgatttaatacatgtgtatattttatcatataccaaagtataatcaaagcaaaaatcataacgtggtgaaaatcgtattattattattattggatgctagagaaacggcagcgttttgggaggtcttaattcttaaaccttactcttgtgattctcgagccgcttcaaggagcttcgtgcttgtcaacaaattttccaagcgcccgctgaactaaaaaag

SEQ ID NO: 2823 - DNA, 3000 bp, Unknown
  misc_feature (1)..( 3000): cDNA_ID_3435496_gDNA_ID_1620604_Annot_ID_161732 3000 nt of promoter + ATG
ctttatgcttacgtcatcgcacacgtctatcttcttttggttaaagtgataaaaaggaaagtcgtaaatggcttcgtcactgagtctttcctactattttaaccccattagtgacactcctttcttctccactacactccatttctctttcttcttgactcgaccatcgtttctctaatctccgcaactatggcttcatttacgaaaacggtgtgtggggtttcacgatcccgagatcatacttttttccctcctcgtacgtaacgatttttttttgtgattattaatccaaggttttttggcgtctcttttaggttttgatccctattgcgcacggtacggagcctctagaagcggtggcgatgattaccgtgttgcgtcgaggtggtgctgacgtgacggtggcgtctgttgagactcaggttggcgttgatgcttgtcatggcatcaagatggtcgctgatactcttctctctgatattaccgactctgttttcgaccttattgtgctccccgtaagtctctctgctgatttaacattgtccatttgttttgtttctttgtgtgtaatctaagaactaaggacagccaataagtggatcgatcaattatcaattagctcacttaactaaagtttcgaaagtgatgtttatagttcctactaagaacgatggtttttagatgtatctgttgcaacttttgttctctgaaacaacttcatagattcttgttttctgaaagatttcataattgtgttgctgatatactttttgatatgattgggaaaagggagggcttcccggtggcgagactcttaaaaactgtaaatctttagagaacatggtcaagaaacaagactctgatggccgacttaacgcagctatatgttgtgctcctgccttggctcttggtacttggggtctactagaaggcaagaaagtaagtcagaagtgatcagtatatttccaagggcgtttatttatctttttttcaggccttgtaatgtcttgttattacatggggtttcttgcaggcaacgggttaccctgtttttatggagaaacttgcggctacttgtgcaactgctgttgagtcaagagtgcaaattgatggaagaatagtgaccagtcgtggaccaggaaccaccattgaattctccatcacgcttatagagcagttgtttgggaaagaaaaagctgatgaagtctccagtatcttggtatgttttgtctctgcctcttttatcaaccgctgtggtacgtgttcatgtcacctcctcgtagacttacttgttatccttttgaaatcagctgcttcgtcctaaccctggtgaggagtttacttttactgagcttaaccaaacaaactggtcatttgaagatacaccacaggtaaatgttcagttgcctctccacttggcccttttaacatttttccaagacaggctttgtttgatccgttatacagattcctaggaacatgctgtgttgtaaagcttttgtctttcttgatcaatagtcttttatgagtcagagagataatgttttcccttttcagattctcgtacccattgcagaggagtcagaggaaattgaagctatagcgcttgtagatatcctgaggcgggcaaaagcaaatgtagtgattgctgcagttggtaacagtttggaagttgaaggatctcgcaaagctaagctagtagcagaagttcttcttgatgaggttgcagagaagtcgtttgatctgattgtgttacctgtgagtattgctaacttccaaaatgtgaatatactatttagtcttaaattaaattttaatattctatgatgacaaataaccaaaaacataatccaacttctttgatgaactacagggcggtcttaacggtgctcaaagattcgcaagctgcgagaagctagttaatatgttaaggaaacaggcagaagcaaacaaaccatatggaggaatctgcgcatcgcctgcttacgtcttcgagcctaatggtttactcaaggtgcataaatcaaacagtactagaattgtagtttcttgttctatcttttaagtcattaaactgagatataagagacatgttttgtatagggtaagaaggctactactcacccagtggtgagcgacaaactttcggacaagagtcacattgagcacagagtcgtggtagatggaaatgtcataacaagcagagctccagggactgcaatggagttttcacttgccattgtcgaaaagttttacgggcgagagaaagctcttcagctcggaaaggcaacacttgtgtgatttcaaacaatgaaagtatgagagtggcttgaataaaaagaaggctttgccttttagttatctctctccattagtaattacttactttatgatatatgacatatgagcttggcttagtgattggtgtgtaactttatgcctttataaatgaataaacgagatttttctatgtatgttgccgatattttctttaaacctctgcaagagctagagggtgtgctggagaaaaaaattattttatggagaaagatattttagtcacacattttcaccaaattgaccttacaataactctaaaatacgaatttgcccctatgtttagctttggaatatttcatatttgtaaaccatttaataatatgattattaccaatttagtgaaaataaaatcttcagtcttctcttcttgtataaaaatagcttttttatcatttgaaaacagagtaatgtcactaatttcttggcgaaaatgtgtttatttgtaacttaaggtaaaataggggcaattttgttgaatctgataagatcagggggtagtaccgtagatttcgctgtccagttcagttatgaaatacctaaaatgccctcgactcataatctactattaaaccctcataaaacccttgatttcatttctagctcatctgttttcacactctctcctagggttttatctgcgaagcccaatctagagcttcc

SEQ ID NO: 2824 - DNA, 3000 bp, Unknown
  misc_feature (1)..( 3000): cDNA_ID_2174959_gDNA_ID_1620604_Annot_ID_161726 3000 nt of promoter + ATG
gtgactagacaagtgcctacgccgaagaatttgctgtttaagttttgtgaacatatgtctgaatctcttaaacttggtgcaggaatgagagaaaaagttccatgtctgacccttaatcgatgctagagttggtaacttgctatgagatatatgcgaagctgtccagtttttgtttggcttgcttgaggatttccaatcttctggaccaagctctgcttaacgtttaacaatgtattgagttgctcctaggcttcaaatgttgctgcttcttttggagatatgactctggttaaagtttaaccaaacattcatttatctggttaatctcaaacctttgctatgtttgttatcccacttttttcatatggttctttctagatctctgtatctggtgtgtcttctctcgtgatctcaacattcgatgtgaaaccaggtagattgtaatattgtatcatagactgcaaaagataacgcaaaagagaagtctctgatctcaacctgaatcagacttgttaggagtccctcttgtttggtttaattcaattttccggttcggatttctggattataaaccgaattaactacaaacggaaaaacgtaccgcgttattgcggtaaccagcaactttaattggcctatagtagaatcaaatgaaaagaaaagagcaattttttttttttttttttggttttttggttaaagaagaaaagagcaaattggaaaaacaaatagataagataatttatatgatttaaaagtcaaatgtaatcacaacatataaattttaacttataaaatatagtcacaccattgcctcatcgtatttgctttcatgaatcatcccaccacttgtaagctttattttattaagaatgaaaacggagaaatataaattgaacactatatactattgtcgtcaccctccccgaatgtttctgataaataatgttaactatcatctaatacgtcaaccggattatcaccgacactgaccccacacctaaccactgatgcacaagtttatattagtgtaggtatcatccacaatatattatccaataattgaaccttgttaatgtctttggttcataaagcgatctataatcaattcagcattattgctaaaattcaaattaagaagacggcatgatttgttaaaaccataaagaaatacaaaagggtcaatgataaaactgtttaaacgaatcagtctacccaagagccgtctctcgaatactagttttaaattcataagcgtatagagtttagtgattccagaacactttacaggccaaaatctaatatttcgatattttgaaacgacatttttagtcctataattaaatttgcaacgtattagattacttttaaaatgtgatactgcgaagaaaatgaatcaaaagattgaatcgaatattcgaacagacggacaagaacccacgaagcgatacagatcagaaactctgcttctttttttaacaagagatcacaaacttggttgacttgagttcatattataatgacgtactcagtgattcgaatattccataaatagtcgtaagaataaagaccttaatgtatacattgttcatttcgtatgccacattgacgaagatcactgatataaatttcaattatataaatgtaaaataacaaaacaaaaagttacatgttatcaaatagtgtcattagctaaataacatgttacttggccaccacatcacttttgttgagaaatttctaaaatttggctatttagtgcatataccctttaaaacttgttgtaaaagcaaggaagaggaaaaaagattgaacctatagcaaaggaaaaagaaaagagagtacatattcttaagtcttgattacaatattttgttcttcaacatattctcttagagttgagataacataaattataatatagatgctctattgggtagcagtagatagaagaacatatgctgaaaatcatttttatagatctagcaaatcacctttataaaggatccagatttttttttttttaactttttgaaagtcaacttgatcatatgtgaaagttagagtcagagatttatgcatcttcgtgcatagacaaaatgcatgcacgagctcacacgatcctgtttttttttcttaatgaggtaattttcttgctgtcatttttttttctaaagttaagattcatataaaaaccatatcaggtaattccttaattttgtgtaataattaagaaatcaggatcattagatctttgaccaccaaaactcaaatttgttcccaaatacactcagttaaagtactatctttaatcatttcatattcgttactttgtaaattagtacaaagtaagtaacaaattttagtttacccaatgaaatggaatgaagttaatgaaaatattcgttcttttagaatattcttctgctcttgacagtgtttaattatttaattttcttacttgaaaaaataaaattgaccaacaattatttttcttacctcatgtagataacttacaaaataaaacatatatatatgtatatatatatttattttcaactcagaaataaataattctaacgaaaaaatatgaaataataaaaaaatctgacttaaaaagcgcgcatcgctcatgccaacacactccctcgtctataaatacttcactctgctttcctcaatcacatccatctctgaatctgattccacatcttaaacccttattccctaaacatcgaatttggttccttctcccacaatccgcagagatttcttcttttcaggtttgtcaattcattttttttttcagtttgagttttgttttgttttttcgtgattttcggtcagtctaccaaatcccctgtttttccggcgattcagttgtcaacagattttgcttttctttttccctttttgtgtaaaaaaactcatttcctttttgatctgatgattacagaagaagtaagagggtggcgaagaagatttgattgatcggcgata

SEQ ID NO: 2825 - DNA, 3000 bp, Unknown
  misc_feature (1)..( 3000): cDNA_ID_2174967_gDNA_ID_1620604_Annot_ID_161728 3000 nt of promoter + ATG
agagatgcctcttgtagctacgtgcagcaaatatcgccgacagggcatgtgtagaatcctcgtggctgccattgaagaggtacgatatttagaatgtaaccatgtggttgttcttgaagctacatccacattaataatgtctaaacttagtacaatgatagacatacagcaccgctcatatgctgaccttgataatcccttagctcatatgatctctcttccagtcttgtcttgatccctgggctatcaatagataaaactattcattggttttggctgcagatgcttatgtctctcaaagtggagaagcttgtggtagctgcattgccgagtttagtggaaacttggactgaaggttttggcttcaaacccatggatgatgaagagcgtgatgctctcaaaagaataaacttgatggtattccctgggacaactctgctcaagaaaacactatacgagagcacaaaacccagcactatgaaaggtaaagccaactcctctctccctctctctcgaacgaacttcatttgatttttgctcctgtacaggtgtatgtctttctaaagaacgcaataacccatcaaacaaagaagcagatctagagccaggtctagacaaagccgggtctcccatgagtacccaagttgagagctgtgatcagatggttccagcaggttcagatgatgagccatccccaggcttccccgtaccactcggagccgatcaaacagaaccaacttcagaaacagagaacccaagccgagacagcaatgccaatgataggccaaataaaacaacagtagtctctataggagaagaagaagaagaagaatgtttgcagaaagatgtatcaaagttatcagaagaaggaaaagaaacgacaagggcttcttcttcctctgcagctttagaagaagttagtggtctaggactaggagtagtaaataatgttagcgatgagatgttgctttgtgttgatgaacagcttgactctgatagctctcaggattcggaataatattattagactaaaaaactatgatcgtttctttctctatatcctctcgtcacttttttttttttgaaagaaaaccctactaagataaggaaaccgcataaaagaggattctatattttcattttcattttcaagtcttatcaagcctcaaaaccctaaataccaaatatcaaaacgcccatttttccgaacaaatcatggtttttgatgctgtcaatccagaccccgacagcttcgtttactattatccgatctataacgatgaaggcgattttggcagaacccaaaacttgatgttcaagtttcatttatgttacaatcttgcccctgaagtaaattcagatggagaagatgaaaatcctctcgatcttgaaactctactcgttgatcgaactcacgagtttgataaaggattgcttttcagtggagatagggagcaaatacaagtcattgtctgtcacattcttgatttgattaaagcccctcgttatattgatgttgttacagaactcattgatgcgatccttgatttaaagaagtgtgataagatctctaacgtgaaagaggtagatgtagtcatcaatgttattgtgtggaggtttcctgatgatgatgatgatgatgtagatgtgagacttgcggtggccccggcgagcaatgaagcggtggagcaacacttggagacggttgttgttgagaatgaaagttggtgtgtgatatgcatggataagatccggattggattggatgtggctgcgggtcgaatgccgtgttctcacgtgtttcatcgcacgtgtggtgaagattggcttaggtgtagtgggatttgtccggtgtgtcgtgccatgtttccgacctaaaccctaaaatccatctctcaaccatttgtgttagtttcgtttaccgtttacgtaatcctttcattttttctttcctttatgcatttgaatgttctgtacaatatgattcatcaagctatttcattgctgttttattgatttgtggatctaataaatttggtgggggtcaaggatattctgatgatttaaaaaagattgttagagattttatagaaactaaaacaattgttaacgatttggtaagatttagtaattagttggtagggttttgagtgatatcgaaagtgtattcatttccaaatatcttgatagagggtataagaacattttctatgtaatttttgttaagtttctagtttaagatattgcatttgccgtttcttgtaactcttaattatgtgtaaacaactccgatatgtaatgtcttagtaatgaaaacgatttcaacatctttcatcattgagttaaatactgtaatttgtcttcatttgttttgagcctttgactagtggaaccgtcttaaaaaacaagattctattgtgatggtttcccaaaatagagaaaaatggtctcttaaattcggtacagtactctctatatatagtcctttgaattcaatatattcatccaagtgaatgtaacctaatgatggccaatggtgagagttttcaaccctcatcccctagtaaacaaaataagtattgcctactaacaacttttagcaagtaaaacacaatcaacttttttattatcaaagaatgctgttcttatctattttgtttttatttttattatttattcttatctacttaatttgtgtatttattcacataaaagagtcttcatttgtgggtcaaattaattaattacctgcctaacttttgttatcattaatgttctaaaattgtatttagtcatacccctagttctcaaattgtatttattcacaatttccatacaaaacatacacataaatccgtgtaccttcaaaaggatccgacccgaatccgataatcggatccacctgatctgaataaacaaaacaaaacaaaaaaaccgttacaaacgcttccgagaaagtggatccgccgtagctggaggatccgtcgttacaaaatcatg

SEQ ID NO: 2826 - DNA, 3000 bp, Unknown
  misc_feature (1)..( 3000): cDNA_ID_2174980_gDNA_ID_1620604_Annot_ID_161731 3000 nt of promoter + ATG
ttattacctgaaagcttcactctcttagctttagtgttaaaatctgaaccatctcttgaagcagatgcctcaaaaccttgtggacatgcatatccactagttaccacagagttggaactcagagaggaattgacattcttactggaatcacattcgaagttaatggctccagtaacgagacatcttttagtagtatttccaggatcacttccaaagaaaacttctctgaatatctgatgatcctcatatgacccttcaaagcagtcacctcctaacatctcaatctcagctccgggaagcatctccacaaactaactgcatattccacttcaccttaacttaaaaggaaggttgtagatagatacctgcaattatataaagtaatgaataaactcacagaacccaaaagtttggaactcgacatcctaatccaaaacacatacccataagcggaagcggattcaaaacaagataaaatcagagatccttctagaaaggccaaaactttgaagcctagagcaaaacgatagaccagatttcatgaaattgagatgttataatgactaattacatccaaaaagaaagctcaaaaattgggaaatgcaggacattaccagcatgcagaatgaaatcagagctgtgaaatcggagaaatggcttcttctcactgaaatagactcatttcgtcgcccttatcctctccaaccgcaagtgggaaacgcattttcattccatttcacgttctctgcactcacacactctctctccttgatctctatctcacacacagaaagaacaacaatttgtctatctttttagctttttctataattgtggaagaaacccacctctgattcggtgttaaatctctcaaccaaaattcatcagatagataaattctgacgaactttttttcacctctctgaatctgcctctatcactttgttgtgcacagtgtgtgtatacttattattggctatttctttctcttctcgttttttttctttttttcttttctataaattgtgtgctgtcaccaaaaaggcatcttcgtgtttttattttatttttccttcgttatactgaaaaagtcattcttcatttttcaccttaagattctgtctcctctctgataacaacggaccagcagttatagtatatggagtacttaaattcgtttaattacacaaattaaaacccaaatattcgtcgtttttttcttctgttatcaaattcttaatcctgttaatgacgatcgtatcactataagccaatattaatgactatggttttaagttcttgacaaagtttttttttactaaattcgccacagacaaaaactgttctgacaaaaataacagacaaactaaaatgaaaaaaaaggttagcatatttaattgccaggtttctaactgttcttctgttgtcgttttaaatcatttcagcttatgtttttgtcctttaaaattcagtcatcaccgattgtaacaggttttgtcttaatatgtataatcaatatctgttaagtggattggatgctttgtaatttgcgcggggaatctttacgtgtcttaacgataacaaatactgtactatcaaataggtgcatgcgatgatggacataagtcgtattttaacctattttgttgtgtgaacagattagttattgcatgttttgtattaactatatataggaatacggctctgaatctttgtttcttcttattcgattttgatatatgaaaattccaaaaagtacatgtaccagtacgatgaaaacgactgtgttatgtgaaagtatttgtttttaaaaaaaaaaatatttagaggggatcaattctagatacttttttcatttttaaggtttaactatggttaaaaagaaacgattcttttttaaaagggtagatggtagacctcatttgctaattttgatccacataagtcaataacaaataattcggctcgcttgcgaagctaatgcatgagccacgtgttttgctttatatttggctttctgtattgagacattcttcttcatcctaattgtgaatggaatatgttggacccaacgaagccatcaaacatggttaaaacacacaaacatgtgatttaatctagtttaatttcgtctattacaatataagtgaattttgacacacatccttggattatatctaaaacgttaagtttgttaaaaacactttggaccggataatgggtattgatcatttattgtttgttgcatgttgggttagaaattagagatcataacaaaaatcatgatttcaggctgtccattttgaaaaatgtgtgtgtttgtgttaatttgaatacaccgattcatccaaaaaccatctgaacagtctcttaattagtttaccgtgtatatatatcatatttatgggatcatatttggttaagtttaactagtagtttcaaatttcgcgttaatagctatttgaaagggtaggagtactttttcgaccggttaacactcccatataaagcccataaattattggaacgctacaaaattaacaaaacatctcttcagaagttcgtccggtttactctactacaaagtacatgtatcaaaaacgacaacacgtgcttccacaaaattaagaaccaggacgtgatgtcgttgttgtaatacttttttctcgccaacttcacgccgtcttagtttaccgaaaccaaagtggctttttctgattttatccaatacaatgacgtggaaagactcaaaagaagctttcgccacgttccaccaatgaatgttcgacacgtatcgtcgagtttctttttctttatgcttacgtcatcgcacacgtctatcttcttttggttaaagtgataaaaaggaaagtcgtaaatggcttcgtcactgagtctttcctactattttaaccccattagtgacactcctttcttctccactacactccatttctctttcttcttgactcgaccatcgtttctctaatctccgcaact

SEQ ID NO: 2827 - DNA, 3000 bp, Unknown
  misc_feature (1)..( 3000): cDNA_ID_3070106_gDNA_ID_1620604_Annot_ID_161730 3000 nt of promoter + ATG
gtcggtaatatcagagagaagagtatcagcgaccatcttgatgccatgacaagcatcaacgccaacctgagtctcaacagacgccaccgtcacgtcagcaccacctcgacgcaacacggtaatcatcgccaccgcttctagaggctccgtaccgtgcgcaatagggatcaaaacctaaaagagacgccaaaaaaccttggattaataatcacaaaaaaaaatcgttacgtacgaggagggaaaaaagtatgatctcgggatcgtgaaaccccacacaccgttttcgtaaatgaagccatagttgcggagattagagaaacgatggtcgagtcaagaagaaagagaaatggagtgtagtggagaagaaaggagtgtcactaatggggttaaaatagtaggaaagactcagtgacgaagccatttacgactttcctttttatcactttaaccaaaagaagatagacgtgtgcgatgacgtaagcataaagaaaaagaaactcgacgatacgtgtcgaacattcattggtggaacgtggcgaaagcttcttttgagtctttccacgtcattgtattggataaaatcagaaaaagccactttggtttcggtaaactaagacggcgtgaagttggcgagaaaaaagtattacaacaacgacatcacgtcctggttcttaattttgtggaagcacgtgttgtcgtttttgatacatgtactttgtagtagagtaaaccggacgaacttctgaagagatgttttgttaattttgtagcgttccaataatttatgggctttatatgggagtgttaaccggtcgaaaaagtactcctaccctttcaaatagctattaacgcgaaatttgaaactactagttaaacttaaccaaatatgatcccataaatatgatatatatacacggtaaactaattaagagactgttcagatggtttttggatgaatcggtgtattcaaattaacacaaacacacacatttttcaaaatggacagcctgaaatcatgatttttgttatgatctctaatttctaacccaacatgcaacaaacaataaatgatcaatacccattatccggtccaaagtgtttttaacaaacttaacgttttagatataatccaaggatgtgtgtcaaaattcacttatattgtaatagacgaaattaaactagattaaatcacatgtttgtgtgttttaaccatgtttgatggcttcgttgggtccaacatattccattcacaattaggatgaagaagaatgtctcaatacagaaagccaaatataaagcaaaacacgtggctcatgcattagcttcgcaagcgagccgaattatttgttattgacttatgtggatcaaaattagcaaatgaggtctaccatctacccttttaaaaaagaatcgtttctttttaaccatagttaaaccttaaaaatgaaaaaagtatctagaattgatcccctctaaatatttttttttttaaaaacaaatactttcacataacacagtcgttttcatcgtactggtacatgtactttttggaattttcatatatcaaaatcgaataagaagaaacaaagattcagagccgtattcctatatatagttaatacaaaacatgcaataactaatctgttcacacaacaaaataggttaaaatacgacttatgtccatcatcgcatgcacctatttgatagtacagtatttgttatcgttaagacacgtaaagattccccgcgcaaattacaaagcatccaatccacttaacagatattgattatacatattaagacaaaacctgttacaatcggtgatgactgaattttaaaggacaaaaacataagctgaaatgatttaaaacgacaacagaagaacagttagaaacctggcaattaaatatgctaaccttttttttcattttagtttgtctgttatttttgtcagaacagtttttgtctgtggcgaatttagtaaaaaaaaactttgtcaagaacttaaaaccatagtcattaatattggcttatagtgatacgatcgtcattaacaggattaagaatttgataacagaagaaaaaaacgacgaatatttgggttttaatttgtgtaattaaacgaatttaagtactccatatactataactgctggtccgttgttatcagagaggagacagaatcttaaggtgaaaaatgaagaatgactttttcagtataacgaaggaaaaataaaataaaaacacgaagatgcctttttggtgacagcacacaatttatagaaaagaaaaaaagaaaaaaaacgagaagagaaagaaatagccaataataagtatacacacactgtgcacaacaaagtgatagaggcagattcagagaggtgaaaaaaagttcgtcagaatttatctatctgatgaattttggttgagagatttaacaccgaatcagaggtgggtttcttccacaattatagaaaaagctaaaaagatagacaaattgttgttctttctgtgtgtgagatagagatcaaggagagagagtgtgtgagtgcagagaacgtgaaatggaatgaaaatgcgtttcccacttgcggttggagaggataagggcgacgaaatgagtctatttcagtgagaagaagccatttctccgatttcacagctctgatttcattctgcatgctggtaatgtcctgcatttcccaatttttgagctttctttttggatgtaattagtcattataacatctcaatttcatgaaatctggtctatcgttttgctctaggcttcaaagttttggcctttctagaaggatctctgattttatcttgttttgaatccgcttccgcttatgggtatgtgttttggattaggatgtcgagttccaaacttttgggttctgtgagtttattcattactttatataattgcaggtatctatctacaaccttccttttaagttaaggtgaagtggaatatgcagttagtttgtggagatg

SEQ ID NO: 2828 - DNA, 3000 bp, Unknown
  misc_feature (1)..( 3000): cDNA_ID_3070110_gDNA_ID_1620604_Annot_ID_161725 3000 nt of promoter + ATG
ccaaattttcaaagtcttaaaagtgccaattccctacattgttgctgatactgtgaagattataaatggttttgttctgcaaacaggtgtttatagcctgtggagtctcaagttctggtggtaaaggtggtaaagatgacctttaccgcaaacccaaggctggaatgtggcaactcatgaagaagcattttaactctggaattgcaattgatatggataagttagttttctccccacctgctcctaaaaacttgaatttacctgaaacttctagcaatgctggaagattacactcatttgtccaccagccttactgattaaacactccgtttaagtccactagcacattttttgttgttgatactgacatctgtgctatgctcatcagatccttctacgttggggatgcagctggaagaaaaatggatcacagcgacgctgacatcaaatttgcacaggtatttattgcaaacgtcagacaatacccatcctttattttataagtcaccctatttacttttctgactttcctcatagacaactactttctttggttgcaggcgagtgggctaaagttttttaccccggaggaatactttatcccctcaagtacatcgccagggacttagctgtatcagtcttgtgcttgtgtttgcagtttgcaacttcttttgcttttttttttgtgatgaaactagtagctagcttttgtgataaaactagtagtgtgcttttgtgatcaaagtattagtatgtgttttaactctttttgtatattactgatatttaagcgtcaactagagcttattgaaccaggaaaaagaaactcctttgaacaggcaggattgcaaagtcaacataacaaaccactgataacaaaaaaagttcaaatttccgactcatttacatacatgggattgggaaagtttaaaatctcttatgatgctaataacatacatcaaaaattcactctccttttcactctttaatcagaagactcagacatgaaatcactccttctgaccaatctcgccttccaaaatggcgtgtcttgtcagaacaatctctttgacaaggtttctgtaaacaaagggcctaacagcagcacggagaaagagctcaggtggaatcctactcttctttatcttcttcatccaccttccatatcctactgtcttccattcttctggcttcacttttgccttcttacctctcatttccaactcatctccttcaatctctcccttttctcgttcctccaatgcctttaactgcttctcataaaacttatctgacaccaccatactcatctccgcaagcttctccatccgctccgcattgtttgtcgctttgttgaattgctcttcccagtacctctcatcctcttccggatccgactcctctatttcatcttccaaactgtcttcttcaacgtttccctccacatcgacaaccatgttatcatcatcatctacttcttccacctcaccatcatcatcatcatcatcatcatcatcatcgtcattgtcagcttcatcttcaatccattctgagaactcagccttctctgagcttccactaatgctaatctcatcctcatcttcatctggagcatcacaccctaactccatctcctccaactttgctttccattcttttgtatacggatgcaacagctcgttcgggtggtttccaagcaagaacttcaacactctggacttcttttcatcactcaacttctcataagcattcaccacatcatccacgaaagctgtctgtctcaccttcaacatcttacacaatcctccgtaataagtactcaactccactctaccttcatcatcctccacttcacacacaaatccagattccgtcaccgggtttaaataagggataagcgagttaaagaaatcttcttgaggctcaaacctacactgaaacacaggcttcttcacatacacaatatcaggtctaaaccaagccgcacattgacatatcaaagaccgagacttgttccctaatctccccatcaaattccacttatccaacctctgcttcttatccgcttccacaaccacttcactaaccaacgtccattgctcccacggtaactcactgagtctccatttcggatgcctgacaaacacccaaaaatacctcaaaccaacattcgaatccaactccttaaccctcttctgaaaagctatattcatctcatgctgctcaatcttctcaaactcttcatgattctccacttcaccaatcatagtaacacactcatcagagatagtaccacgaaccggatcaccaaccacaacaccacgccacgagtaaggtccaaactctccatacttgaaccaatcataaggatgacgcaatctcgggtcatccttatccataaaccgaaccatcctatcgtaaccaagcccaatcatctcaagctcctcctcagtaaacttatccggatgactactgagaatctgactccgactcttgtcagggttattatacaatctataaaacaaagattccgctagcttcttcgacttttcacgagcattcctcttcacctgcttcctcatatccgaatctccttctatccttccaccagatgaacctcctccaagctttttcttgctcctcccggccaatgcccgcacgtctcgccggaatccaccatcttctctgagcaaaagctccgaccttttgacactaaacgcataattcctctcggtaattgccggtaaaaccgaaacgatccttcgtaccccggaattgagtggagatttacggaaggaaaagctagggttcagggttttagaaaaggataaatcttgactcagcatttcttctcccgacacagcttagagatgacgtagcaactgtaataatataagccaaacgatacgacggcgttttgctactgcgccattagtaatcagaaaaagttaaaaaccttgtctttttttttttttttttggttcaatagattgattagcg

SEQ ID NO: 2829 - DNA, 60 bp, Unknown
  misc_feature (1)..( 60): cDNA_ID_2049270_gDNA_ID_1620605_Annot_ID_161752 3000 nt of
aacgatcaagctgcaagcacgtcgagccataatgtcttttgtacacaagatcaagcgatg

SEQ ID NO: 2830 - DNA, 3000 bp, Unknown
  misc_feature (1)..( 3000): cDNA_ID_3070129_gDNA_ID_1620605_Annot_ID_161766 3000 nt of promoter + ATG
gcttaatgttggaaaacaagaatgtgttgttggttgaccttacatgttattgtaccagctccacttaagaatgctcttgactgggcttcaagaccacctaatgtttgggcggacaaaccagctgctattataagcaccggtggaggttttggtggaggaagatcgcagtaccatcttcgacaaatcggagtcttccttgatcttcatttcatcaacaaacccgagtttactctcaatgcatttcagccacctcagaaatttgatgcagaaggaaaccttgtcgatgaagtgactaaggagaggttgaaacaagtccttctctcgttacaagcattcacacttcgacttcaaggtaagtaaatgaagtggattaattcttgatcatttgagattggtcgtgtgataaaaataatgccaattgttgtgataataaacagtgtataacactctatttctcattcatttatgttttattaaacgattggtgaactggtgattttgttttgtccaagcaacgagattctgaacccaaaactcacaagtgttttacgaaacttaaaaaatggttaggatttcttattttaaatctaaataaacaatttgtcgtttgcaataatagaatattttttggtgaattttccacctaatttttccatcaataagatgatgttatataagtagacaaagaaattgacttttgagttgcaaagtggattcaatcgacaaaaggcatatccaacgaaatcaacaacaattatgagtgttgtaaacatttcgattccatatgattagtttaattattttttttcaaaataataatttattttagactccaatctattaaccatctttaaatgtttgcgtcgctatttttttgttaaacaaaaatttataaatttataaaggtattaattttgggatctctataaattaataatgttgagaccgtaaaattattaatttatcgataaattattatttataaatttatagagagatttctctaatttcttaacctttttaatttatatgaaagtataagatttttttcattatataaaatatttttctagaaacaaattccaagtaaaaatcaattatcatgtaaagaaaacaacacaaacttttttgatacagtaaaaatattgaattaatttcaaacaagaactaatacgaatttaagaagaagaaaaaaatattagaattatttttcattgaagtttcttacatataacatagttgatatatatattattattaatttatgttgattttcttgaaaaatatagttttcatctctttatgatcacttttgtaacattactttttggaaaattacctctaatcacaactcttcatttaatatattttgctctagattagggtatctttatcattttattttgtacttacatttattttaaataatcctagaaaatattttggaaggtcggttattatcatctatgtacctttttcaaaatatgaataagatgtaaaatttattcgaaaaaacgtttttatatcaagtgcaacatatggttaaaataattgtatacaattttttgaaaatcctactccctcttaatgtttatcttgatgcaaaccaagcttccatgcatccatcataccttcagcctccttgttcacgaatggcggatatcctgttctggatttgtttgtccacaattcgaagtagctgtgatggtggtagaggtggttctccatgcctcctaccatttcgctctctccatatggaatagaccgcaaattgaaagacatatttggttaggaatatcaagtctccccgatgacttatccgtgaggattgtttgaacgctactccatgtagtagtaaatttctgtcctagaatttttcggcttagtccagacaatatctcttcagcataactacacttgaaaaacagatggtctctgactctctgtcctctagtaagttgtcgcatagaacacaagccggctttgctcccattgccaattcaacattctgtcgctggttgctaggcggttctttaatgcaagccatgctatgaaagagtgtttaggtgtggcatgaagaaaccaaatacctttacaccaatccactagtgacgtatgccttctcgaattgcttcccacgtctcatttgtgctgaaactgtttttgtaaagatcaccttttcctttccataacaccacatctttctcttgtatgagacctttttatcgaatctcggcaatcaacgcctctatattgttgagactatcgagtctgtgccttctctgcctatgacttgctatcacatcttccagtgtggaataaatcgttattctcatatcaatgcaacctctttgacatgtgatgtcaattagcttcctcatgtgtgaccaattgtcgtaccagaaagacgtgtcttttccattcttcacctctgtgcctttttcacttaactgtaacaattgtaaaatgttttggagtggcatctatttatcgacaatttttataattaatttaatttcatcgaaaaataatctacagtttactaatcaatttaaagaagtttcaaaatttaatataagactaatctaatcgactaatcacacagaatatgtaactatctaagccacctacccaaacttctattttctcgattagccaatgaaccaacgacacttgaggcaaattatacaaaaaaatatttcccttattttgtccgttagtcgatgataatttaaaatttaggcattttttaaggtttaggcatattttaaagttttcacaataacgtgggaataaaaataattaaggacagtagtttcaagtttgaaccaatccactaatgtagtagatatataatatcaggaagaacatttgggtagagagacagagaagtttgagaaccttaagtattaatctatgatttgaacacgaaaagacttgtctctcaaacaaaacaagaaaatattttcctattttgaaaatttttgagtgctaatcatg

SEQ ID NO: 2831 - DNA, 3000 bp, Unknown
  misc_feature (1)..( 3000): cDNA_ID_2049205_gDNA_ID_1620605_Annot_ID_161773 3000 nt of promoter + ATG
ttataactcttatccagaagaatacttaatcatcaaaaagacaacgaaaatattttattttttttgctatatattgtcacgaagagcctcatgcatgtggtgttaagctgttaaaaacttcaaattaaaaacaagagagttagttgagacgccaaaagaaatgttgaatgttccaaaaataaaataaaatagatactattatgggatctattattattattcctatttgtaataaatttgtactctcacatttcagctaacaataaagttgtgtgatctctgaccacgttgtgttgatatcttccgcgtaggttttcatttaatttacactataaattggtcattaattactcaaacatgtatataagattcgtgtatttttttgggatttatttttatttctttcacatattgttgcgtcgtagttaatttacacatagggacatacatatgcgtacgggtcgttgacacgtctatttattattaaccacactgggtacgtagtaaatttcatcagaagggacacgcaaagtaagatagcagcaataattgagttgaaattaaaccacatgttttctcttttaaaaatctggttttcaaaacagtagtaatctttgccgggaatttcgacaccaaaactatgagtttaacaaaaagaaacactaattagaacatcaaattgaaaatgacatatagaactaaatttctttgcaaaacttttgcactcaaaatgtaaacatacattatttttggaaaaaagaaacgtaaaatatttaagatgaaagtggtatacaacataatatgtcatctattgcatgaatatgttttacatttttcacaaatttttgttggtaactaacacatcatatacattatatatttttggaagtacatcatatacatttatcctttcaatatttctttctaaatgatttcttttaaatttagttgtatattacacaaatttgaaataaaaccgaaatccgtgtatcaatttgttgatatacatgttggaaatgactttgaccttttagaagaaatattgttgcgaattttttagaaaacatgaatgtgttgtaacttaaaaacgcgactagtagttggataaacaaaaattcaattgatttaactgcattgaaaatttcaaataagtttgatttaaaaacatttacgaacatcttttagacgtgataagtctaagatctggatattgaatgactcatatatgaccataaactcatcatttcaatcaattcaatataatctaccctaaccgaattaatgtccaactaagaaaaagaatttcatttatgtttataaacaaagcgataaacagagatgagatgaaagattttgttaagaaaaagaaaataagtttgtttttaatagacgagaacaaatgtttgatcacaaagattaaatttttaaaaattgcttaaatagcttaatagtatggactaaatgttacttgaaaatagtcgtctttagggctttggtgattggtttacactaagtagaggagtgacttatcacctaagatagaattgaactcgtgtgccttgtctcaatagttgtatgagctttgaacaatttgttagaaacaaagatgatagaacagaggtgttataccacactgttgttacattacaacagatgtgtcacatatatattaaacagagaaagaacatttttgttgaacgatactttattctctaaataactttctcatttgtctcttgtgatttctcacaaatgagactacatgaatatataaaaaatgaaattgtaattgcactcattaaactcattgattcataatgtcctataattaaacatgaaattgaaacccccgaattgattgtaaatccaaaactgataaatgtgcattttggtggctatgtcctaatcatcttgtaacatgggaacaatttacacaacaataaggcagtttaaaataataaaaatgtaaggaggaatgtttcaaagaggggacctagctatcaaaaggttctaggatgttatcgctatttctccatcaatgcttaactgtatattgtaattttggatttatttgtttcctcaagaactgtaaagtttttatcgtgtattgaccttaactaattgaagttgggatgggttaccctagtaataggaacttgaatggcatgaaatgcactataaatctagcaagtggactagtttgtagtagttgatatgttttttgtataatgagacatcttcttttcacaagaaagagtatgttgtcatcatcgaagcaactgtcaattattgaatgcctaactagtaaaatttgtttaaggtgagactattgcaatggtaaatatcatatgcatctattgaggcccgactgattaaaataatggatcatgtactaaaacatatttttaaagctagaataaagataaaaggccctaaaatgttgcaaaatatttttggaccatgtacatatgctccactagaacacccaaagaaccggcccagcatctattgtgtagatgttttgagtgattccttcttatttcctcatgagcaattttattttgtgagaacacccggcccataagaaagcgcttagaaaacgaatcttgttctagatgattggagcgtgttccacatgaaaataccacgtattgtattcttatttgtaggcataaaatcaaatccaacatttatgatattgcttaataagaatgagcaatacatgatttgttgaattcttaaaaaatatccaaacacagtaactattaatagttgttgaatatatataattaatgataaatgaatctgggactagaaatctttggctgaaacacaaacactgcataaatgttcaaccttttataaattgtataaaatttatatttaatagttatacataatcaaatcgtgtttttaacatatttctcaaaagtaattaagctattctataacttccttctatcatccttcctttcatagctcatactcatattgaatatg

SEQ ID NO: 2832 - DNA, 3000 bp, Unknown
  misc_feature (1)..( 3000): cDNA_ID_2049263_gDNA_ID_1620605_Annot_ID_161753 3000 nt of promoter + ATG
gttcattgttatagcctcatgccttagctgtactttctgtatatagcaaaaaccattttcttcccgtctcaatgagtttgacataatctttattcaatgttgaacagttgaagtcggcgaatatctaagaagattttcataactatcgacttactaaattatatcatgtgcagtaactatctttgaaatcaaagaagatcttccattaaagatacataagcaaatattctttttagtgaatatggtttttaatttcactatactagggtaatatatttttcggttcatgcaatattcattcaattaaactatcatgcctttaccattacaattcacttggttccggttagatcaactttgtttttggctttggtcgattattaacttggcccaagtcatgcattccacgcatgaagcaccctccgaagttcctttcctatgttctctctaatcttgaacctgagggattgattgagagtgacaactctttcggttgagagcaataaactcatttgatgaataaggttttcgacctttgcatccattttttttttcctttaatctagagggttgtcgattcagaagcaagagtcaaaactaaatttggaagtttagttccacctaattcaaacaatgatatatatgttaaaccaaggttaataatgttaaacatagtttcttacactattatgtctattatatgtaggaattgattgattattatttttaattattatgaaaatgtctactgaaaaaaattaagagttttggctaattaaaaagctagacaaaaaaagtttttggccattttctctatagaatttgctctttctgttgttacttacattaaatgctgtcttgcacctatatggcctgaatgtgaggaaggcccatatctattggtgaaagagcccaaaggttaggccattcagtatttttctgttcttgaacctgatatggatcttcttgagtttatttgcctcactattcctgagcctattatcatcacattatatcatacagttgcatcaattcaaagcctaaacaattgcattaacgtgtttctaataaaaaaggatcggaggattattgatagttatatcttattttaagcccaaaagataaacacatttgtggtggttgtttacttcgcgtatgtgtccttaccattcagacacaaagttatactgtattatttaatgtatcttatgagccacttggcagagagatatggaacgtatgaactcgtacttaccacacgtctacgataaaagcttagttttgtctatcgataaatataaattattcgatttgtaacgttttggattttaatatatcatcggaacatcatcctcatctcgaccacacttcccaagaccaaccacatcatggtttttgacacttgacatacgataattcgtcatttcatttttctttgttttaacatgtacaaactatacaagttgttattttgttcctatagtcaaatttactaaagaatatatagaacgatcctttgaaattttagtattatgcggagaagataatttatttgagatgaaaatttattatagaagttgtactgcattaattgttaccattcacaaaaacttaattataaatgttataaatttttttacttgtaattttattgtacaactcttttctaccgctttccactattccaaaaaaattacaacttcaactaacaactaaaaatttaaatttttgtacagttttatgtaatcaaactggatttagagttttttttgtttatctcatgattgagtgggtgattggttgggctgtaactgtaaagtttttgctgtagagattttggtgtagctgtgttagctgtaactgtaacttttattgttgtagaattattgctgtaagtttttttattttaaataatttataaaaaagaactaataaaatataatagttgtaatacactttttttatatagtaaataaaatgccttgcattactaatttaaataaatatattatgatgatataaaagtaaaatatagtaaatattttttttgttatatatttatgttgataattttaatttcttagatttatttaatgaattaaaatttctacaccaaaaaaaatttggctttgagaatttactctcctacaaccttaaaaataaaattaaaaaaaattgggctgtaggtttaaaaataaagctacaacatgattagtacgtaatcaatacttttaaaaaaattaaggatgtaagttagacttatacgccaaccaatcatgcactgaataacatcaactcttatcatttctacacaaattattctaaagtatttgattgaatataatttcagttaaatttgatcattattctttatcatctaaaatatatatacttttaaaaagatgaaagcatatgcatcagcagagaaaaaaaaagatgttcaatgcagaaaaaaatatttaattttcggaattaaatttaaaaaataaaacaaatttaaataaaccccattaaagcttcctaccaaaataaaaacctttaaagcttattttatttatcactaaaatcataaaaccactaattattacctaaatcgttgaatatttcaatttgatgtaattttacttttaacgaattaaataataattataccaatgatgatgggccaagcaagtcgtgcaagcaaagagttaagctaggtcccactctcataataagtccagaaaatggacgatctagatctagtgtagtctctatccaactctaatcttcaccgtttgttattacacaagtcaaataaggataaaactgtaaattcacaacaaaatcgtcgaaatatcatatcattcactggtggaggaaactgaagaaaacgatccgataacagcattttctattttcttctgtgcctcaaaaaatcataattttctcggaaaattaaaaatcatgtttaagattttctcgagaaagtaaaaaaaggaagaagaagaagaagaaacc

SEQ ID NO: 2833 - DNA, 3000 bp, Unknown
  misc_feature (1)..( 3000): cDNA_ID_3070131_gDNA_ID_1620605_Annot_ID_161765 3000 nt of promoter + ATG
caatttcgaacgttcgttttcgagaagctaagattaaactacattaaaaaggaaaaatttgattcaacgcagcagccatgattcatgattcatgatttctattggctttgtcagcaattacgtatgcattttcctatattgagtagatttggactaaaattcaactttacacatacacacacatataaaccacataaataaatttatggttaattgatataaaacatgaaaatgttactttaacatggctgttgaagtaattgacgtaagtgatagcgatgatttatgccctatttattatgtaaatataatatcgtactaatatatacgtgtccaaaggttcttgaatggtcgacattttgttgaaactaaaaatatctctacctgtacttttactttcttaattcttaatcaaaggaattgatttaaatatcttgttttcatatacacaaagctatattttaatttacccattttactaatttttgctaaaatacaaaatttgtttgagttaaagaatcatacatatttccgccaattaatcaacgaattccaagtttaataacgtcaagaccatcactaattttcaatagtaaacttttcagttaggcgaactgacaaactgaatgtaccatagcaaaaaaaacagatcgaataaattttttgaaaataatcgaatggatattaaatattagaacaaaaataactggaaccgatttgatagcgaaccaaagtattttaagtagcttaaaatatttgaaatacagttatattcaaaaatattaattacttatagaccaaataataaaaaatatttgaaaatatataaaaataataaaatatttgaaaataatcaaaaaaatatccgaaagtacaccaaataaccaaaaatatcggaaaatattcaaaataaaataactgaatagatacaaaattttaaaaccgaaaggaccaaaaccaaaccaaaaaccgaactaaaaaaatagtaaactctaaaattaaaatctaatgaaccaaactgataatcaaacgcccaaaagtactttttatattttatcaaagaatcttctacaatgattccagatattaaaaatagtaataaacatgaacttattttcgtagatactacatcattgtcaaatgatttgaatacattttaaaaaattactaccaaaacttgtggatcaagtagcatgattcgcttctagaaaatccacgttatgcttcttctctaaatcttttgatacaaatacacaattgagtcacattaataactatcttacactttaattaccaaaattgccatttccatgtgcccccaaccacttcctcctatatatacggctatttatacaacaagacaaaaaaaaaaaaactccattaaagcaaaaaactccaaaacctctctctctttcttcctcacacgcttttttcatttctcaactgtaaaaaatctgatccaatggagaaagacgatgcaacggcgtcgttttcacctagcttcagtacttattccggcgatagactcgtcgaaatcgccgaacgagtctgttacaaagagaaatcagacgccgaattcgagttttcgacggcggcgacttcttcttccggtgacggtggactagttttccctgtatttaacaagaatctaatctccggagatgtttctccggagaaagtaattccgttgaaggatctattcctccgtgaacgtaacgatcaacaaccaccgcaacaaacatactcatcgtcttccgacgaagaagaagaagacgacgagtttgattcgatcccgagcgagatctattgtccatggacaccagcgagatctacggcggatatgtcaccaagtggaggatgtagaaaaagcaaatctacaggatcatcatcaacctctacatggtcaacgaaacgatggcgtttgagagactttctcaagagaagtaaaagtgatggtaaacaatcacttaaattcttgaacccaacaaacagagatgatgatgatgaatcttccaaatcgaagaagaaagtttcagtttcagttacagtttctgcacatgagaagttttatctgaggaataaagcgattaaagaagaagacaagagaaagtcatatttaccgtacaagcaagatcttgttggtcttttttctaatattcatcgttatggcaaaacttttcctccgttttgattcattgatttggatctattcggtgaaaattatgattttaaattcgtatttaataaattatgtaagatgtagatttgtatttttaataattacatcttaaattatgtttttattagtttgtaaacaattttgattattttcgtaatcatatagttttataatttgggtgaaggttttgatgtaaatatattttatttagttgaaaattgacaagttgtgagtgtattttagtgtgtatttgatgttttttcaggaagatcaatggatatagacatgtatgtaaatgaagacaacaagatattaaacttttatggatggacatcattaatttgtaaattgacaactatactttattttgattagatttttttttttaatggaccatttttcgtaaatgcgatcacttataactgtgaataataaacttttgattaaattaatgtttattagaggagggtcagctactcatctatagattcgataccatttcgtagctatagaattacacattgttattgaaaacaatgtgttattgaaaaatctgttaattggaaaagcagaggaatcacttttcaataaaattaaagcgcttctctcttttgggcttaagaccctctttctcttttaaagtattcgcttctaagtggaatagagctttagttatggtgtttctttcctcttagccgcatttttaacctactttcagtttaatcttcaaaagctcagccgtttctcttcatcagctagccgtcaagcgagtttatcatgattaagtgctttttgggtcgtctcataccttatccgttact

SEQ ID NO: 2834 - DNA, 3000 bp, Unknown
  misc_feature (1)..( 3000): cDNA_ID_2174902_gDNA_ID_1620606_Annot_ID_161790 3000 nt of promoter + ATG
cagccactaagatcaggctgtgatcaaagccagcgactgcttgaagaacacaaccctctacatcctctaacaacatcggttcaggctcatcgctcgagcttcctaaaccgagcctaccattcttcccacaaccccaaacccaagcttctcctttctctgttacacacaaggaatgcacacgccctgctgatactgaagctggactttccccatcgaaaccttctacttctcttggcaggttttccggttttcccctaccaagctgccggcttcggttccaaccccatgagagaatatttctttcacccctgttgcagatagctagtgaatgaccaagaccagctgctatagagatcggagattcagttatatcaacaggtttcattcctagatcttgtttagaccgacccaactgaccatagatgttgctcccagcgctcaaaagtgtgccatcatctgaaataagccaaaacctatcagacaaaactaatcctctttttgtttaatatatactctcccatagtgtaaaacggtctcatttacttacgacaaaggatcaaggagtgatcggaaccgcacgcaatatctgctaccttctcgttacacgtttcttccaccagacaaggttcccaagcaattggcatatcgttctctttactcattgcttccacaaccttcttttcagctgcctcaagattcaaatcaccagcagcatggtgacctttcatcgacccatctgtaattgaatctagcagagatgcttcaagtggaagtccaacattgcctactcttccatcagctacataaccccatccaaaaactttaccatccacagtaagcgcaagtgcgtgcccccaacctaatgatacctatcaaaatcaaaccccccttcctatgaaaacttaaaatcattttaaagctgattatacaaagacttgattatccaaaccttaacaacgtgctctgcagctaaattttcaactctcgaaggaactcgagcttcaatgataccatttccaagaccaagctgtcctcttttagatcttccccaaacccacaaagagccatcatctccaatagcagctgaaacaactccagacgcaaacgctgcctggacattcacattctctagaccttccactctcttaggttcactccttgaatctctactaatcacatcatgaaaacatcaggtatagtagcattactagcataagagacccaccaaatcctaaataacatcatgactagcaaattcatgttaatgattcttaaagtattctcactaattgacctatcaaattcaagttcaatcactactttactctgatgaaatcaattcaaaattgggttctcaggtagagattttacctagaatcaattacgattcgaccgagctggccttcgtcgttgcgaccccaagcccaaatctcaccgctagatgtaacggcaagagaatggtaatgtccggcggatatggaagagatatcggaaggcaaattagaaactacggtgggttcgtaagcgtccattcccatgcctggaatcgacgatgatgaaagaccaagagcgccaaggtttccgtcaccgaagctcatcactgttcttctttcgccgctagtgctcgtgaattgtcgtctgacaactccattgaagagaacgtgtgtgcaaaagcgagaatcggatgaataaactttactgatttgtagtttcgcgatcgaccatgatcgaagcatatcgccggagaaagaaaagttttcattgtgtaaatgattccggcatcttgagtgagtaaccgaaccgatccgacacgatatttaattcggggtttttcggaaccaattacaaaagggaactataattacccgattacccaacccgacccaaactatctaaacccgacaaaaataataatcttttaaacgtcttttattaaattaaaaaaaaagattacaaatatatcgatgagtatacaagctaatagaattagcctcaactatctataaattaatatttttatatattaataaaattttatggtttcaacattattaatttatagaattttactgtaaactgatgtgaacaaatgacatgaaattgttttgagtatttttgttttggcttacgtggacacatcttcttctattagtagaagaatttgcttttgattttcagtatttacttaagtatttttagtttcaaggttattttgtacccatttcctaaattaagggtcactaaaatattcttcaattatacgaaagtggttggtactacgtcaaaactaatcattgcctttatttatttgaaattgccgcctctctcttcttctgatttatcattttcagcttccccaagcaatctcccctccataaaaacttcatcaatatagtaatcagattgatggttactactatgttggtatctcaccaagcaattttttttagaataagtaaaaatacattatttgagttgcctagttgggatacgtaaccatatgacgggttatacttggtatgactgtcgatcatatagcccatcttttatatctaaactgattattgactctgccttcagatgacctatacattttaaaattgtacggctgtaaactttttcaaatctatataatataatgagggaagatccgccaactacaaagtccatggcgccattaaattaaaagtcgaccgttcaatgcttttggtaaataactgaaatattggaaagattatttcaacaattttgtttatgaagagaacgtgtagtgcataaactcgtatactaaactcttgtaataatattatagtactagtattgggataattaatatctaatctccaaattgatcattgactttgtagttggacagcccgtaagtttgagaatgtctcgtgatattttgatgtgtttgtataaaaattagcatttagaaacataagccaaataatcatctcatatctctcgttgctcaaaaaatctctcagcatctctatg

SEQ ID NO: 2835 - DNA, 3000 bp, Unknown
  misc_feature (1)..( 3000): cDNA_ID_3070160_gDNA_ID_1620606_Annot_ID_161795 3000 nt of promoter + ATG
gaaagagaagaggaatgaaactgaatcagtcattatcactctatgtaaaaagtgtaacgtttttggctggattagtttccaatttgtgaccaataaaacccaaatttcgaagataagagtttgggctcagaaccctttattgcttctgatgctcagaactaatgtacagtaatcttttgcattgtgtagcttttgatagtgaaaaatatttttgaataaaaagcttatctactgtaccattctagcagcagcggttggcaaggaatcgcaaaccaagggttgttccttactgttaagacactctcatatatggaaagcaatgttaaatactgcccttgtccgttgcaacagctggctatctgtttcggcttttgtctgtctttataacattctaaacatttcattgtactcatagttcagcctttaaacagattactttctttcagatttgtttcaatttgggacccatctctcttttagttttgtcaaaacatggttctgtgtggccatggttttcaaagttcttagttttccatgagctcacatcgcagaccttgatttaaagaaaatgcttgataatcacacagtagctgtagcgtgcttaaagcctcgtgaaaccaaaaggtcgacatgcatttaagtttcgtctcttcgttttcctctagaaaggttgatggtaacaaatattaatgcctcgttaatctaaaagttggagacagctatcatcatcatactttcgactctttgtagtcctctctaaaggttgtgacttttgcaattccctttcatgtctatataaagacacgtatgttcagaatgttatctaacacttaccctctttatttcagagatgtcttcttccattgttaaaatcggaatagatagcatcaaaacaacggtaactgaaaaagagcgagatatcaaccgtcttgtgaagacattcttgtccaacaaaaacaacaggaagaagatcattggtcttgataccgaacgggtgcaaaagggaagaaagctaaataagaccgtcttgttgcagctctgcgatggtgacaattgtctaatagtacaacttcccgatgaagatgaagatgaaggtgaaggtgaagatgataatctgccactccccctcttcaattttctcaatctacccgagttcacatttgtgggcattggcataaacaagactatgatgaggcttgagagtgagtttggtttgacctgcaagaatgttgttgagattggacccgccacatggaatctgaccaatatgacgaccgatgtgaaatttaggatcagtgctattgtttcgactgagagaccatcaaatgccgtacttgaggactgggagaaatttgttctcaataagaaccagatcaagcttgcagcctccaatgcatactttgcttttggcattgggaacattttgttggatgttcagattttaagttaatgaatctagatttctgtttgtctttctttgtttttctttcttatgttcttcagtatcttgttgtagtttgcatttcaaccgttttaaagaccacaaaatgtggtatttggttcttcatttttttgttcttgttctctctgttagaccacaaagtgtaatattgggaaagttttgaggttaattagactgccacaataagcgttcaactagctagagtctgaatgattgtagccaccctaaactctgaggtcaaggtaaaggtataatattattactacaccacgtgagctattgaactgggcctgataattaaaagttgattagggcctattagaccacataacgaaatcttgagccgctgctgctagggggctgaaggatgattaattaagtgttcaacttgaagcaatgaaatagcttctgagagaagagagagttatgaaactgaaatgatcatcattttttttcttgggacaaatcagtcatcatctcttaatcttatctatgtaaagtgtaacttttttttgcgggattagtttccaatttgtgattaataaaacccaaattttaactaatgtataagagtttgggcttagaacccaaaataagtgggcctctatgcattgtctacctttagatagtgaaactattttagaataaaatgacaaagtagaactgtacagttttttgatgttttccatgaaaaagaaataagttccatgtattggagagaagagagtcagaaaaaaagagtcaaaaagattcttttgaaagacgggtaaacttcggagttccaagtaattattgcattttcatatacgctctgttcctggattcactaaatcttatttgaatacaaatgcatatgtagcaaatttaatattgtaactatatgtaaaatgttattttacaaaaaaacctccaaagtatttagtttttgcaaacttaccctcctaatccttaaagtacatgacaattgacaactacccaaccaaagaaaaagctgcaatacaaatacaagcctcggttatatcgatcatccaaacatgtgttttctttttattcaaaaacgaaaagcaaggagcattgtttgattgcatgaaaacgaaattaataactcagatggtaaggaagctcgttgttgaccctatagaatacatagaatgcttcaaaaaaaaaaaaattgtaacaagtgtcgttctctatagagaaacaacacaacataaaattcttaaaacgacattgagaaaaggtgtgtattactgttttttccgttggtggttagttaattgtcattcatttttggaatataaacggtaaacttttgcaaaaaggaatattacaaggatttgtattgcaaaaacaaaaacacatcaatagttacttcgataaaagtaaaaatggttgcagagtattattattactcaataggccctagctcagtcacacaggtacatccataatagtgccccattaacttctttcactctcttattgtgtgttgaacagtgacaaagaaagagagagagagctttgctttgcagaaaaaa

SEQ ID NO: 2836 - DNA, 178 bp, Unknown
  misc_feature (1)..( 178): cDNA_ID_1830250_gDNA_ID_1620607_Annot_ID_161804 3000 nt of promoter + ATG
actgcaccaattaaccattacttacttctcaggtaatctctctaccttttctcatatgattatagttagtatagtatttggttacattatatatgataatctttttgaaactatttggttacgtttctaatcgcaggtaataaatcgtaagatttatcaaacgcaagcaaaagagatg

SEQ ID NO: 2837 - DNA, 1533 bp, Unknown
  misc_feature (1)..( 1533): cDNA_ID_3070187_gDNA_ID_1620607_Annot_ID_161824 3000 nt of promoter + ATG
actctctggtagcatgcgttcgagctctcttcacggcgacactctaaatactccaagattttgtaaaccttctcaggcctagtattatcgtatcctacgccacatacattgaaacctttattctcgtactcgatccatttaatctgtttcaaccacggattccaaaaagctgttcccttgggactaatccaagagttacaaaacaagaacccatcggccatcgcaagcagtgatggttaagtaagcaaatttccattcacggtaagggataccagaggagtctagcacatgtaacttaatcgttggatcaacgccgtcgagaccgatgatctctatcgaataaatcttggaatcggtaatgaagatgaactgaggacgagcacgagcgaactggtccttgttgaaacttttaacatcaaaaagagcattccatcgtttgcaaaccgatctgaattgaacaagagatcgaggtggaagccgagacagtatatcttcctccagctcccatggaagcagaaccattagctctgtatttttttggtttttttttttgtgtggggggggggggggagtcaacgagatcttctctttgtcgttgtagtagcttaggagaagagaaacaactattattttattttatactccattagaaaagtgacacaattttgttatcatgattattggatcaaatgattttaattaatttcagattatatagttaaagaataagcaaatagtgattttaatagagggacaattggtcagaaaatctttatcattatcatttctgtgttttatttttaagaagcccgaaactttttagagttctaaaaaaactttaataactcttttaggactaataagaacccatcataacttggtttgaagccatctcctctgttttggatacgttaaagtttgttgttggctctgttttgatttatttatttaagtttctccactagctactcatttgaaacatacgattattgccaaaaataagagaactgccaaaaattaatgcgcccaccgtggggttcgaacccacgaccacaaggttaagagccttgcgctctaccaactgagctagacgggcttagatgtttgaatttatacttgtaaatacctaaattcaacagacattcctgtgtttattcaagaccacatccttcaagttcaatggttttttcttttctttaacttgaactattttgtgttccattttttaataaagacattgtaataccattaccattgtatttaacatctttaacagtactaccaacatttttgttagctataaactttatagaatatgtataaatattctttcagttcaaagaaagttccttggaaagaaaaaggaaatcaattttctctagttatttactctaattatagatgaaggcaagttttcatgcaaaaatggaaaataattaaaaggaaaaagggcaatttattataaacacaaacaggttcgagttttcactaagatgaattatcaatatgcttttccggtcgtgtgttggtatg

SEQ ID NO: 2838 - DNA, 3000 bp, Unknown
  misc_feature (1)..( 3000): cDNA_ID_3070193_gDNA_ID_1620607_Annot_ID_161822 3000 nt of promoter + ATG
cttagaattagtctttgtatagtattttggttatatatgtgaacctaattggggcctatattagattatctttaatagggctaacgaaagaacggacccgataaccaacctaatacccgaaccaaaaaaccgggttaaggcgggttaaaattttaggaaatttccttattgggtagagttttagtaaacccgtggatatctgattggtccgtaaattacccgttacccaaaaagagtattcaaaaatccaaacattaatttaatatctaaaatattaattatatttaatcgtaatattatctaattatctaagattataattataaatctaaatatatcaattaattttggacctaaatatttaaaacaactaaactattcaaaaattatttgttatgtttgtaaaaatttagtaaaatatattcaaatataattaaatttattaaaacttaacaaatttaaaagttttttttttgtttggagacccgctatctacatacaaatttctcgtttctattttttttggtatttttagggtctgaaacgttttgtgcaaactgacccaaacccaactggatccgacccgaaccagaaccgaatatttagaattattctattaggtagtaaatcatatacccattaatcccaaacccgaacgagttctacccgaattcgaatgagttactcatatgcccaatcttattctctgatttaattatctaaaaactcccaaaaaaaacatatgttttgctgactactttttattcaaaaaaatttacatcctcttctgccaaaatcatttcataagacatcccaaaacccttggaataatgattccatgaatgaagaatcctaatttgaatataccaagaggttttgaaaggttttaagtttttgataggtgtgtatgtgagaaggtacatacatcgtgatggtaatctgcttatttataattttaacttgcagtataccgcaggtaggcttatattttagttaaactaaaaacttttattgtaaagatgattataaatatatgatattattttatttgattttaaatgtatagtaaactgcgagttgtatatgttttgttgatattatttatattgtttagtgtttaaaattatacacttgtattttgattgttaattttagagtttcacttgtagtataccatcttgtattaatatcgatttaaacccgtcaattctaggattttccagcttgtattaaaaattgaatcacatcatacatataaaaatatataatatgttattaattattgtaatatataagattataaatttttaaaataatattatgaaattgaatataaatattcaaattatgactcagtactcagtagaaaattttcttaaatctatttttgacccgttataatatttttcatgtattgaacagtttatattctttttaaaaattcaagttatgtcatatgcgaaaaaaatataattattttttataacgatagtattattttttgcaaaaatagaatcatataaagatgagaggtgaactataataattaataaaaaattaatatgataatttagatatcaaatctaatttgttgattttaattggttacttttttggaaattaataatgtatttcgtttttaattaaatttaattaattaaattagtatttgactttttaatttttaaagagatgaattaatttactctttaaattttatttctaatggcatacttatgtaattacttacaaaaaataagattacatttaaaatgtactttccaaataatatagtagggatagacgtggaatgacttgaatgatacaagagacatgaattaaatatgttccattaattaaggcacactgtataatggaatcaattattcgaattcaataaaattgatttttctaaattgagtttggataggtaaaaccttaatcatatttaaaaaaaaattgtaagatcttggaacgtcataacgaactttcaatcgtatataaagactctcggtcagtgagacagtcactagttttgcgaagaaagtttaagactttttattatgagtatttattgtgttgaacataacaaatgttaagatatgttagttttttcagtggcgaacccatgtatgccactgatatcatggaccaataaatgatatgatcatgaaatttttggttgatcattgtacaaaataggtctttggcataattggtagtatttgatcacctccatagtatcaagtcttgagtttgatgaccatcccttgcaacaattatgtctctttgctttctgaagataatttcctttcaaaatatcataattacactttctttttcatttagtttatgcttcatttctcttagatacgttctctttgaagtattaacttccattacaaacactttatgagtttttcctatgaattaagaattgacaaaaattgttaagtcaacaccaaatactttcagcacacacatacctaaccatgtttatgacgtcattatgtgagatttaaaatacttaacatgtttcaatgtggttgaattaagcatattgccgaatgattcagcttaagattgttgatacaattttctaatatgttctcaccgtaaaaatattataatcgtttatagatatattgtatgaaaaaaacattaaatgtatttataatttacattttaaatgatttaaatgtatatatatctaaacaaaaatatattagatttatttaaccccggtaaaagaaattctcgctgttttgtgactacaaagtctaaaacttttgacttgtgacattattttgtcgagaggtgcaaccattatccatggatcatatcatctattggtccatctgattttatgtcactttcctccaaaaaaagttaatgaaaatcatatctaacattcaaagagacgtgtgacagttaaccatatcatcattattaactttccaattcttgcaacaaatctcacaaaccttaggaagagccatg

SEQ ID NO: 2839 - DNA, 3000 bp, Unknown
  misc_feature (1)..( 3000): cDNA_ID_3070205_gDNA_ID_1620607_Annot_ID_161810 3000 nt of promoter + ATG
gggatgatggtttctatgaagatgtgaggaaggtatatgtaggacaaggtgactccggtgtgtcttttgttaagtttgagtatgctaatcgcaaggagcttgtagctggagttggccatgggaagatgtcaattcttggaacagaggaggtttttgtgctctgttctcgtattgacctaataatgttttcttgagatccaagtttcactggtctttgtattttgtggcagtttgtgctcgattctccaaatgaatacattgtatcggtggagggaagttacgataaattatttggagtggaaggcgagttggtgacgatgcttaggttcaagacaaacaagcgtacctctccaccgtttgggctcgatgcaggcacaacgtttgcgttggagatgaaagatcataagatcgttggattccatggcaaagctggagattttgttcatcaagttggtatccacgtcacccaaatcaccaagtcttaaagctttgtgagctttctcttctattcctagaataaaattaaaaagccatgtctgtttgttactcctcagcttctagttactctcttttaactatgtcttgcttcgtttgtttgttatgtgttatgaagtggtctgcttctttgaataaagcatcgttttgttggaatgtgataaactgataattgtgttatgctatacttggatgcatgaggataaatgaaaactaactattcaactaaaccctaaaacctatacgatcaaaattatagtaaatagtaacacttaatgagactttaaagttgagatgtgtaactagtcaccactcactcatgttagtgattcatgtgtgtgtcagtgtgtgtgtgtgtgtttttatcaaggtcttctcttaagattcataagtgtgaatctggtgggacttaattggtctggtggagtagaacctatgcgggcaatgaggaaggttaaggtaggctaaccgagcccactctctaagtgtttaatttgtaaccttaattcgtaaataaaagctgtttaatttgtaacctttattagataaaattttgtctttttttttgtcaaaagataaaatgttgtcaatcattttaaaaacaaagaaaaaaacttttttggcaagaatttatatatttgcttgtcataaattttccattttgtagtattttgaaaaaaatattttaacgaatggaagcaataactcgacaaaaagagtcaaactaaagtaccttcacatgcaaaacaaaacgtaaatttggtatttttttcccattaaaaaaaatatatatatattcttggccttgtgtgcgaagacgatcgagaacgagaagaacgataagctcaatacgcacgaacgtagatcgaagactggaaaggtatatcttcatcaaaatattcatgattatggttgagtttaattttgtttacgtatttgttttaatttttcaaaagtccactgttggctggctgttgctatcttggaatgattttcatatctcaataactattgtttactctaagttaaattattggggtgctatttatgatgactgatgaagtgatgggaacatgattgcaatattaaaatctcttttttatttatattaattataagtttgtacccacttcattttaaatagataatgccaagacgtaggtatattattactgaatttattttttaataataagtaaatatgcaggtttcaactagaaaggtaacacatcaacaagaaataccaaaaaccactagcttacatattttgatcatataagtattgaataatatagttatagatgatcaaatagttattattaattacttagctagtgtaatttctatcgattgtttcacattcgcaacagataattatataaataaatacatactacatgttaacctttgtttttgttaaataggatgttttcttgattgatgatctagatcaacttttaataatttatacgtaccagctttcattcgatcgtgcgacttcttggaatatcccatggtacatttgcagtcgagctagaaagcttttttgataatttatgaatcatattaagcgtctctcaattagattaatatttagtaccagtgtaaatgatacaattataaatctttttaccaacgaatacagaatttgttttagaaatattcttcgcaaaattttataatatttcataaatcagttataaaaaaaaaaaaagcagttttgaattcagaggaattcgtaaatttccctaagagttattaaaactagttgtgatattttggagtattctttatggctagatccatatgatccggttcttgtatctagattttttttacggaatattgtatgatatatctagtctcctctttggttctaaacttctaattaatcttcggtgatttgaattaaacgttactgtttttaaattatgattaaggctttaaaacatgttcatacaataattaccaaatcttaaccaattagactcttaataaggagaacgtatatatatgttgcaacttgcaactttagccctttacaaataattaatcgtacataatctaattgataaacgattctttaaattttaaaacaatgaattagcttgctgccatcgtttaatgggccaacgccaatataaagacgattagttgagaagttgtgcaagtagaagtatatgaatattttcattatctaaaaaaaaaaatgtatatgaacatgcgtttttcccagtaatgctttttatataaatatgcctcgtggatcacgaaagaataaattattatttcccttattatttcatctagtacgatcaatatcaagaagtcaatataaataaacatacaattcactttaattgatcatagcaccgataacaatctactctctttaaaaggtcttatctctattcttctctattatgtaaaaattggttaatagtagatattaacaatttatttttgcaactacagaaattcgtaagtactatcaagaagcagaag

SEQ ID NO: 2840 - DNA, 3000 bp, Unknown
  misc_feature (1)..( 3000): cDNA_ID_3079746_gDNA_ID_1620607_Annot_ID_161812 3000 nt of promoter + ATG
ccaaaccaaatttgactaccatccgtttgcaattagaattcaattttcctttcatgttactatttcaaacagaaacatgccaaaaatggaacttacctcattatgtccgataactaaccgttatgctactccttaagaaacgtgtgctactatcatatcattaatacacaaattcaactcatttgcttcatattcacaacaatttaatagtttcacgtatcgtggatatatcgcgagattatacaatatcttctattaattaattgctggcatgattgtaaaaaaaaaaaaaaaactgctggcatgtattcaaaaaaatcaatatatacccccatgcagttcttcgtagatggatcactcgactctttctatctatctcttatcaggtcaaatcttattctctcatatctgatagtatttttgtaaatattggttattaaaaaattgtgttcgtaattacaggtaattcgaaagacatcaaaagcaagcaaaagatggctcaaaaggtggaagcacaaggaggtattggaggagatgtatgggatgatggtgctcacgacggcgttagaaaggtgcatgtagggcaaggccttgatggtgtttcgtttatcaatgtcgtgtacgagaatggttcacaggaagttgtaggaggtgaacatggaaagaagtcactaattggaatcgaaacggtacgtaaaaatgttttgcttcgaatccactaatcttgtctttattttgcttaagtttatattatatgttcttaaaactactaaactctcaatactagggatataacgttatgataggataatagctcgcggaccatccaattagccatgtttagaatttaggtcgtatcagttctaatgattaattatagttctaaagccaaacctaaatattaaaaataagaaccaataattaccagaccaattgacgccttatacgtataattatggttctaacaagccaaacctaaaccttaaactattactcaatatatctttctatttttgcagtttgaggttgatgcagacgactacatcgtagcagtgcaggtgacctatgacaaaatatttggctatgactccgacatcatcacatccataaccttctctacattcaagggaaaaacctcgccaccctacggattagataccgaaaataagtttgtactcaaggaaaagaacggtggcaaacttgttgggttccatggacgcgctggcgaaattctatatgctcttggagcgtattttactacaaccacaactcctttgactcctgccaagaaactaccggctgttggtggtgacgaaggaactgcctgggatgatggtgctttcgatggtgttaagaaagtgtatatagggcaagcccaagatggtatatcggccgtgaagtttgtgtacgataagggcgccgaggatattgtaggagatgaacatggaaatgatactctactcggatttgaagaggtataatacttcttgctttcttctcttgtggttgaatgtgaaatgtttttacaaaatgatatgaatatcttacacaaaaatatgcttgggtaagggaatccacataaactttcgtggataaaatcatgcatattttatattagctagtgttgaatatctccatttttgatataaaatattttaactaactcaattgttttatttggtttccatcaattgcagttccaacttgactatccaagtgaatatattactgcagttgaaggcacatatgacaaaatatttggttttgagactgaagtcataaatatgcttaggttcaaaactaataagaaaacgtctcctccctttggaattgaagctggcacagccttcgaactcaaagaagaaggttgcaagatcgtcgggtttcatggaaaagtaagtgcggtgcttcatcagtttggagtccatatccttcctgtcaccaactgatcatcacatatatatatatatatatatgtctcttctataccaccaagtttgtcacgtgtgatatcttcattaagttttaagttttctaatttttcttgttctgtttatctatgttttaagtgtctttaagtatggtgttttgtgaagttgttatgcctgtaatattatatgtgattggctttaataaaagtgggtgattattatacatatcagttgcacattaggagaaaagcttatattcatactcagtatctcggcatctagtgtatgatggaaacaattatctttaagactttagcattatttaaagtgagaaacaagaaaacttcgccataattggagaattggtcattttgatcaaaatccaacaccagactacgcgcagtccgtttcgaaggaggtacactccacttagtatctagatttaatttattatacagtatgtttaattttttttttttttcaaacacatatttttcttcttaagaatatatatggaaatataatatgttaattatgtaatgatcaaataatattaaaacacacatatatatatatatataaaccatatgagcaattggataacgggtaaaatctaaccaggtttcaaaaattgtaactattgttgatttttttttttttttgatcaacaactattgttgagaaaaacatgtattatgtgagcaaaggaaaaaaagggaaaaaaaactacagatcagtaatatcaactactccaattcaacttatttgcttcatattcacaacattctaatattttaatgactcgtggatcacgagattatattaacatttctatagattaattagtggcctacattcaatgatatcaataattacacattttatccagaaataaaaataatcaataaatacgcatgaaggtcattgtaatgcatatcaataactcgttccctctctcctcaggtaaattctcagtctctcgtctgataatagttttgtagagtttggttaataaaactaatcgtgtacgctactaatacgtacaggtaactaattaatattcaaaaag

SEQ ID NO: 2841 - DNA, 3000 bp, Unknown
  misc_feature (1)..( 3000): cDNA_ID_3070201_gDNA_ID_1620607_Annot_ID_161813 3000 nt of promoter + ATG
tgagccacctcctcccataagcatctgataagaattggattttacacaattaagtctttgcgtttgaaagatcaagtaatgtatttgagtcaggcacctgaagaacagttgcaatgatagcttccttctcgttattccatcctggcacttcaaaagcaagcgcaaaatgtgtagcctgagaatggtgaaacaaaaaaagaaagatattaggaataataaaccttcttttactcaaagaagcccattgaaacgtcatatttgtacctctccacccgtatgttgacggaaatctccaccgacatattgagactttggctccgcaggtcggggtacattagggaggtcagatagtaatggctcaaccacttttagaagttcttcatgatcaactccactagctgctaggaccattcgtgaagcagtgtaattctcctgaaatttcagaacaaaatgagaaaaaagacacatctacgaaataacaaaccaaaagccagtgatactagttccagcgaatgcaataatctcttgtgttaacggtcttacaaaaacaaaattctccaagacctccccagtcaatccagtaattgcagattcaggtgcatacaatggatttgccaatgcgccagagtaaccagcagaatgaactgcctccaaaagaaaacccattggattcgttgcgaattctcctatctctactttcacctttcggagctgccaggagaaaaatgatgaaaacagtgtaaaaaaattgcttagctttaatgtttgtgagatacatgcaacatgacatgaagtacctcttcattcacttcccaatccaaaaaagcagggttcctcacactatcaataagcacttcaaccatttcgggaacataggttttgagagcatcaattgtgtaacccatctgctctcgggatgcagaagctgaagtattacctccaatagcctctatttcccttacaaggcgaaaatggcttctgttcaatgtactcttgaatgccatcctttcaagcaagtgcgtcgctccacggaattgaggagtctcataaatagaaccacagtcaacgtataaaccaatggaagctgctggattctgaacaaaatttcactcaaaatcactttccagtagtttttaacaggaagttgatgttgggattactaaaagaagctctcaccggagacatctcagtggctatagtcagaccatttggaagagtagtggtcttaagtttgctaggctcaacatggtcagagagtggtggtggaagagagacaccagccaagggaatgttcatagaaggaagtgaactagagtagcctccacttagccagctggaggaagaagagctcgttgcaacagcactagaacttgcataacgagaagctcgaaaattgtggtttagaatgccctataaacacacacacacacacacacatcctaagcatcattaatctcttgattcaattaacattgtaaaaataagaactttcgaaacagagacatttcataaacctgcaaaaagcatgaataatggcaccagctactataaagcgataaaattgaatcaagatctataagaatctaagagaccctttaatccaaatccaaaaacaatgaatcatacaaattgttcaatactaagcattctcctaaaaaaaccagaatctcaatggaaacaagtgaagtaggacattgaccttaagggccttggctcgagaagctgccgtacggtacatgatgatgactgcgaaaccctagcttggtcagatgagtaccggtgaatgtggctgacgacgggagagagatagaggccgagtcagagctgaaaagaaacgagagaagggaacgattttttttcctaattaaggttattggatcgggcaattgcttctaattacattgataggcccatatgatataatagtcttggcccaaattataacatatagaaaagatgaatttaaagcccatgtattgtagtggtgtgatcctattatattttctctcaattatattttttttcttttctttttcacgtaccattgtgtaaaaattcaagtaaggtaacgacatttacatgcagtcacaaatgaaacaagaatttttttgaggtgtgtgtaaagtgaaacgaaaaaagtactaagaaagtttatcttctctaagttaatagaattattttgaaacgtagtatccacatatatagaagactcgtgtgtggtgcatatatatactgcataacttcaattgaactgtattatataactatgactatccatccatgggaagataagaatgagagccgaatgctaaaaagcaagggacccgaattaaacaaaaatgaataaaggagaaaggtttgtgtgattttgtcaattgtcgtcgtttagtggatgtgtaaaaatactaaatactataacaggtggtgtgggtctatctttttttttttttggtctaatgttaaatgtgggtctatcttaataatgcagaaatagtgcaatacgattcatgagtggaaaaaatcatatttgggtactctcatatatagtctcattaatcattatcaccgagtggggcgtacgatacactttttcttctttatctgttttcatctaatcatcatactgtatgtctatattatcgtagcattcatcatcgagttatgaaacttatgccaaaagaaaagaaaaaaaaatcatttgagattggttaaatttctattttaagatttaaaccaaaatgtttaaagttctataagctctaattaaagtctctgcagtccattaaaatggataattaggatttgccgaacttgaaaggagtaatgcacattttgatgctcacgtgaacaacgagttgtaacggtttcgctataattggaggcagatgagaaatggtcgtgtgtgagttttaataccacgtgattaacggagccacaatcatattcatgggccattctcatgagctataatttgaggtgtagctgagagatggtcaaatg

SEQ ID NO: 2842 - DNA, 3000 bp, Unknown
  misc_feature (1)..( 3000): cDNA_ID_2175176_gDNA_ID_1620607_Annot_ID_161818 3000 nt of promoter + ATG
gcttgggcttggagtgggagctgggcttctgggaggagcattgggtgggctcttaatcagtgatatagtatccgacattggttttgatttttaacctttttaataacttgtgaaaattaagaaactccttttttcctgctttttttttctttctaattgtttgtcgtgttgtcgataattaacaaaataatatctacaattttgtttaccacttaataatcatattagataataataatcactgagtaaattaatatcaatgtttacaaaatctattgtatatgttatttatcggttttattttatccctgttatgtataaaaataagattttcccatagaaacaattataatttgttgaataatagttttgctcttgcttaaacaacaaataatcatacttgttaaatcaatgaaattcagctgttaaaaaacaaataatcatatacattgttataggttattataaatagacaactcataatttgtgagattgtatattttaaaccatccatgaatttttaattattttactttgatatgtaaaaactccacttgcgtaagaggtgaagccttctggaatacaagtctgataagaagagatgagaaaaaaaaaaaaaaaaattagttttctatagtctactctaaatatgcaaatacaagcacccaaaaacatgaacaaaattttgaagaaaggagtacaatcaaatatgcaaggcatgattttttttcattcaactctaagaaacttgcattatatatgtgataaattcacaaaactactagtattagtagtcaaaactcaatagtcaacccatttttccataaaggcatgaagttcatgaacattgatgatcaacaattgggctcattttcagcgtgattttcatgggccagttatactagaggatcagttcagaccttatccatatttggattattttttcttttattcctctttttattttgttaaaatgatatcaatttcttacatatactccttttttagttcactaaaaaaattagtgagtggataaaaataattttatttcttggtgaaaattctaggaagagcatcattgacaccaccactattctcacttgcttttctttatttcccttgatatgacattcaattcacgagttgtttttttgttccttttctcctgagtcggctacttttttaatcggatgctttgctttgtactcttttaatcacagccgtcacatttgctatatctctattcacttctacggctttgattaaagcccaaatttaaaccttatcgtacgatctcaaaatcttgtgcaacttcaacatgtgtccactgtctagtttgtctgtgcggatctagttagtgcggttaagttaaaccggagaggttcaggttatgttaaccatggttaaggttttgtctgacagtgagggaagaaagtcacggagttgggtaaaacggcgacaagatatgactagagacacactccttcttcaatttcctaaattacccttccttacttgaccggaactctcactcgagatttttctacgtcggctttatcgtaatatcggtgtcacacgtacgtgggagagacatgtacattcttttccccctcctgaaaaaccaaataaaatagcttcaatctttggttgaaaaacttgaaatatgttcttgatttacgctgcaaaattatgtacattttttaagatcaaaggaccaactacaattgtttctgctaaagtcttttcttttgttatttttatcaaaatatgttgattttgtagatttgagaaaagaaaatttttgattaggaaaaacaaacaaacagttgactatttacttggttggggaagcaaattaaattataccatcgtaatccacacgtacacattgtttttaacttttgacaaaataattgtttagctacctaacaaattgacatattgtgtggcaaatttataaataaataattacatatatctcactgagacgccatgcagattcgtatgtttatacaatgcctcacccatttcttgaattctctcaattgatcttcccatgatgttcatttattatttgctttatgtatatctttgtagaatggtagtattactattaaagtatcaaattaccatgacgacctatagaaaaatgtttttagaaaagcatagggatatgtgtcttatggacagtggataagagagtggtcctaaaaacagaccataaattatgggatcttcccttagttcctttattgttatcatattttaattactcttattagtatttttttaatggtcaagttgtttattggaattacgcatttaattatttttctaattcgtatacttgtgagaaacagaacagcacgctttgcttcttttactagacaaacccttaattagcgatatttgaggcagaaaaaaagacaaggttgcgtgtgttttactccacaaaagaactcctaaaaccaaaaacgttaaaacccacttcttttttttcacagtattctcttttcatgtcaagaacaattactgtttttcttggtatgcaatctgtaaatttattgtagttttcatttctacttttggggtttaggagtaaaagtggagtcactctactttgctttacctttttctgagtttttttttgttcatacaaatccaaatttccttttctttgtattcctattttttctcttctcgtccctttcagaatctttagagagagagaacaacaaattgagaaagaaaaaaaggtaaggctgtgtgagagagaacccaccaaagcgtgcacgagagagagaaaaaaaaagctttgattttgtataaaatcccaccactgctctcttaccataccttcattacacatctctctttctctctctcgctctcagttttgtgggattgtttctttaaaaggggttcttagggtttagtgaagctatagatttcaatttcatacatagttaacgtatagaaggaatcttgggttgatcaatg

SEQ ID NO: 2843 - DNA, 3000 bp, Unknown
  misc_feature (1)..( 3000): cDNA_ID_1830267_gDNA_ID_1620607_Annot_ID_161814 3000 nt of promoter + ATG
aatactagaaagaaagaaaaaaaaaacttttgggcaatttcaagaaatacaaagatttgtgtacctcctctgttccaagtagtgtttgcttcccatgttcaagtgatacaatcttaccatctttctcgtaatcaaacttgacataaacaacaccagagtcaccttgtccaacataaactttctttacattgtcataagcaccaccgtcgtcccaaacatctccaccacgaccaccttgagcttccaatttggtcagaccacctgataccggcggagtcagcggtgtagtcgacggaattatataaactccaacagaatggatcaaatcacttgaacttccatgaaatccaacgattttgccacctcctagctcagcttcttctccagaggttagtccaaaaggctgagaagttttccccttgaatgtcttaaagattagagccgttacgatctctatcggtgatccaaagagcttctcgtagtaaattttcactgatgttatgtaatcttctggatcaaccacaaactagcaaaaaaaaaaaaagacaaccaaaaatgatcagttaatgttgatgacaagagaactctcattgaaaacaaaatatttacctcctctgttccaagtagtgtctgcttcccatgttcgtgtgatacgatttttccatctttctcgtaatcaaacttgacgtaaacaacaccagaatcaccttgaccaacatacactttcttgacgttttcgtaagcaccaccatcgtcccattcttctcctccacgaccaccttgagcttccaactttttcgccatcttttcttcttaacctaaagttatagtacccatttcttagaaactgtaaacgcacaagagccatgaacagacactactcaagcactttcatgatgatgaaactaatctaatctgaggactataatacttccactaggacattactttaaacaatggtatcatattctcatagattcattatcatataaagaaattcaataattcaaataaaactagtaaaaatcaatataacgattttgtgaaagaaagaaaaaaggagtacattaaagggaaggaagaaacacctttgagtgtgagaaatggagatgaagatggaatatgaatgagttaatcttgggattttgtatatatactatatagtatatataaaacatttttgaatacgaacattaaattctcttttcatccaatactaaccactttttttttctgccaatactaaccactttttcttttctttttgagagactttatattcaaccaactcgtgcttcacgagggatggaagctttgattagttaggacttaggaacttgtattaatctaaatatctttttttttttaaaattgaatctaccttacaacataaaatttgtaaagagaattccaaaattccaaaaaaaatcacctaaaattttaaaatcgtgaaagcagcatcgtaaagatgttctcttctgttttttttttttttttttaactctcttttgaatattggattagagattttcacagtgtcgtagattcttcgtagagtctgttatgagttgacatttaccataggaattgcattatcgtgagaaggttaaatgataaattgacatttataaattctcaaaatgtaggttatgagttgtcaaagaaatgtaggctatgaaaaaaaaaacttacgtctaaaaaaatgcaaagttaagaaagaaatactcaaagttcgtggcatttgaccatctctcagctacacctcaaattatagctcatgagaatggcccatgaatatgattgtggctccgttaatcacgtggtattaaaactcacacacgaccatttctcatctgcctccaattatagcgaaaccgttacaactcgttgttcacgtgagcatcaaaatgtgcattactcctttcaagttcggcaaatcctaattatccattttaatggactgcagagactttaattagagcttatagaactttaaacattttggtttaaatcttaaaatagaaatttaaccaatctcaaatgatttttttttcttttcttttggcataagtttcataactcgatgatgaatgctacgataatatagacatacagtatgatgattagatgaaaacagataaagaagaaaaagtgtatcgtacgccccactcggtgataatgattaatgagactatatatgagagtacccaaatatgattttttccactcatgaatcgtattgcactatttctgcattattaagatagacccacatttaacattagaccaaaaaaaaaaaaagatagacccacaccacctgttatagtatttagtatttttacacatccactaaacgacgacaattgacaaaatcacacaaacctttctcctttattcatttttgtttaattcgggtcccttgctttttagcattcggctctcattcttatcttcccatggatggatagtcatagttatataatacagttcaattgaagttatgcagtatatatatgcaccacacacgagtcttctatatatgtggatactacgtttcaaaataattctattaacttagagaagataaactttcttagtacttttttcgtttcactttacacacacctcaaaaaaattcttgtttcatttgtgactgcatgtaaatgtcgttaccttacttgaatttttacacaatggtacgtgaaaaagaaaagaaaaaaaatataattgagagaaaatataataggatcacaccactacaatacatgggctttaaattcatcttttctatatgttataatttgggccaagactattatatcatatgggcctatcaatgtaattagaagcaattgcccgatccaataaccttaattaggaaaaaaaatcgttcccttctctcgtttcttttcagctctgactcggcctctatctctctcccgtcgtcagccacattcaccggtactcatctgaccaagctagggtttcgcagtcatcatc

SEQ ID NO: 2844 - DNA, 3000 bp, Unknown
  misc_feature (1)..( 3000): cDNA_ID_1830254_gDNA_ID_1620607_Annot_ID_161808 3000 nt of promoter + ATG
ctatcaactataatcatatacagaaagaaaaaaaacaagtgttacatcacgcttagcttaaaagtttcgactttttgcaccgtcatatttcacgtgtaagcaagaaatacaaatgtaaatagattataattaatgaattctctcgactctctcaacatagtatataaaaggaaatctacacatgaaccgtatctttctcacttttgaaatattttgatgttttaaagaaattttttcaaaattttatataaattataaattaatttaatattttttgattatttatatttttcatcagtcttgttcataattggttgaattgttttaaagtaaatatttctttagctaaaacatcttatacaattaaaagaaaaaagtgtaatcaaataaccaaatataaattagtatttcaaattatacttattgcagggtgataaaccttttgtcccaagtgaagttaaacctataaatatataccccatttagagggtcctatataactaaagtaccacatatttggtggtttatatcattcaatttttttgtaactaacttaatatttgatatgtaaaatcatgttaaaataggatcagcagatagaatatataaaaaataagtcatgtacaaacgtaacgttcttcatatcttaggtaacgtatctaacaattttgttaaatattattattttaaaaaattgaacatattatttggaaacttttcttttgataattttgaaatggcactttgtaattaagagtttaataaagaacacgtcacacacaaaaacgaagaaagagattatagaaattaagttgtgttttcaatcttcgtgtatacaaaacaaaaataaaaattagaaatgatatttcatacgatgttgttaaataatataattatgaaaattagttgtgctttatattattatttttgttggaagctctagaaacgatcgacctaatagtatatttttgtcactaaaaagtgtgattaaaatatatatatatatatatatatatatatatatatataatattgtaattttcaaccaattctcggtttaggtggtttattattatattgttttttgaaaaaattaaaaaatatatccttattagttcattcttttctggtcattcgttcacactttacaacttggttaatggccacttctcaagttatcgttctttcatttgttctacagtcgcaagaaattatcgttctttcatttgtcattatgcataatgatttctcttttctttttagtgcataatgatctcactacataaaaaaatctatcttacgattcaactatatttagtcccatgcactcgctgcataacacattactttcttcgatttagagtgattttcacaaccttgtttctgtattgtatatttagttagtgtttgtgattaccaaaaaaaaaaattgtttcttcttggcttagtctttttatcttttttttttttttgcttcatctatttttcctcccatgacagatgaagacggcaagagatgcagcaaatctcatttatgatctatctgaagaatcagcgtcatcgatttggagactcgaaccataacaaaaagagcatcacagtttcaatttaattgctcctggcgcttcctatttcagcaacaaacattaaataattaatccaatagagatgatatatatggaaatttcaaaaccaaaaaaagaaactttcaaaaccaaaattgcgaagccatagaaatcgtggatcatggaattgcgaagaccaatgttgacatatgggaatttggtgtcccaatgagcagagatcactaagattggttttcgggaggaactttttgagttcatgatttgaagaattgtctcgcctataagctatcgtccatagtttgagattcatgcgacaagaagaaggtttgattcactttctccatttaattgaatcatcttcatagatatattttcatacttaatcaatgtttttaccaaaaaaataatgttattttattattttggttttatgtggtttgggattggtgtagattataaaccgattaaaccaatgtttttgtgttctgagatttcaaacttttgaactaaataaatatacgttttggggaatatccaatatcaatatgtatcatagtttggactctatctattccagtatgataattcccgtggaaaaatatatcatcgtctctattttatacatgcacttgcaacacaaaccagccataaagtgggtctattcttataatttatgacaacatggaacactatcattgggccacgatgcaaggagcgaaggacgatgcgagaaggtgctttactgatttgatgaacgtggaggtgattctgaatgatacgagatctctaagctgaatatataatagtatagtttttcgtaatttttttttgttaaattttttatcgctgctaaagattaaatggcgagtaaaactatactattatactttcaaagatcacccgagaaaatgatgactgcacatactttcaatatcccatagatgacatatctgttttatttccatcaagctattcatcgaaacaaaagcacatgacgattatgggagagaaacactactctaaaatcccgtaataagctgcaccacctaattttttgtgccttgaccaaaaaaaattcaatgttgcagttcaacgaaccttcttacggaggatctttaaacaaaatttatttggtacatagagaaaaatattttaatatatactaatttaatgcctcgcgatcaacgagtagagaaaaaatatgtcgcgtgtatcttcttccattggtcaataaataccaatgcaatgtttactacacaaatcattacttcagtctcactctcaggtcagctctctccacatctctctcatatgattgtactatgtataagatttggtaatatttgtaattacaagtaaaattcgtaaatacagataatattcgtaagaggttgatcaaacgaaagcaaaagag

SEQ ID NO: 2845 - DNA, 3000 bp, Unknown
  misc_feature (1)..( 3000): cDNA_ID_2992185_gDNA_ID_1620607_Annot_ID_161807 3000 nt of promoter + ATG
tcagcccatcgataaacacctttacgtctttgacctcgagacccggacttggtccattgctccagccaccggagacgttccacacctctcttgcttaggtgtccgtatggtgtcagtaggatcgaccctctatacctttggaggccgagacttttcacgccaatacaacggtttctactcgtttgacacgacaacaaacgagtggaaactgctaactccggtggaagaaggacccactcctcgtagtttccattcgatggcagcggatgaggaaaacgtttacgttttcggtggagtgggtgctatggatcgaatcaagacactagactcttacaatatcgttgacaagacgtggtttcattgttcgaatccaggagattcctttagcataagaggaggagcagggctcgaagtggtgcaagggaaagtatggattgtgtatggatttaacggatgtgaagtagatgatgttcatttctacgatcctgctgaagacaaatggacacaagtggaaacattcggtgtgaagcctaacgaaaggagtgttttcgctagtgcggctattgggaaacacattgtgatatttggaggtgagattgcgatggatccacgagctcacgtaggtccgggtcaattaatcgatgggactttcgcgttggatacagagacgttgcaatgggagaggttagataagtttgaggggactccgagtagcagaggatggaccgcgtccacgactggaaccattgatggtaagaaaggacttgtgatgcatggtggtaaagctccaaccaatgaccggtttgatgacctcttcttttacggaattgactctgtctgattaagcgcgatttgatcatgaccgtttgtgttttatttgtttgtgtgtctgtgtgtctgtgtgatgcaataagggagggatcgtgatacctctatatgatccttcgtcagcttatccattttattttttattttctaaatgtatctttttgttttttgttttctgttttgtatgtttaatgtttcgtggcttgttcaataagatgtttattttccgaattttttttgggtatgttacgttatactacaaacaaaaatattatgattttgattttctctaaagatgaaatgaatagaacaagaagtcagcagatagggtggtttcatctacttttgtggttggtaaatgtggttagaaaaatttgcattgaattgtaagtttctatccataaaagaaacaaaaaattaatgtaatcaagagtggaaagttaccaatggattataaaaatcttgcaattctaataaatcctcatgtcaacggtacagataagataagggtaaggggcaaacaatcttgttggttcaaatggcaagtaaacaagggcaattatatccacctaatccattgcgttttctttctctaatcttagaatctactttaattgtatgtttttctctttcatctactttccaaaactatataacctcatttctatactttttatgcatttattttgaaacccctttatcaaaaaaaaaaaaggggccaatttttcttcaaaaatggttactttaagattctcatatacagtgtgccaaaaaaaaaaaaggtacctaaaatatttattatttcagatattggtcaacatattatctgtaacagaaaaatgttcacgtgatatttgcgaatcacatttttctaggggcaaaagtgatatatgagaatcttaaagtaaccttttctagaataattgcccttgtttacttgccactgtagtcatttatttaatttatgttcaaaaacagattacctacctaattcaccgaaacgaaaaattttgttgccagtttttgttttttttaattttttttttcctctttttagtttaccttctcttttttctgttcaacattaaactagaaggtagagtaataaataacgatggatggatgtgttgaaaacgcgctttatgcatgattcatacgagagcagctgaggaggagacaaaaaacgggtctacactatatcagacttttttttgtttttttggtgtaaaactatatcagatggaaaaatatcaaccaaataatgtagaaactatatcaaacttttaacaaaactatcaacccaatattttatattttattaaaaaacaatactaataatttttccttttcctcgtttttttttttctgatcaaccattcacacgttgtttttcgtaattatgattctgcataatgctttctctaaatcaaaaactccacgccacggttcaactgatgtagtgcctccaccgttgtcgtttgactcgttgcagaggacaccattatgcacttcgattcattttcaaaatcgtctttctctactgaattgttactccatttaattttttggtccatagataacatagaccattatactagtatgttaaatgtatacttatcagttaccgcacaacattaattcttaaagagggttcattttcgagaattgagtacaacactaccattaggccaaaatgcgagaggcaaaaaaagatatagcatatacttatcatgaataatgaaaatcttttccatccaaataaaaatctttcttctcataaaagaaagaagagaaaaaacaatgagtttgcatatctttatcctgtagaatgataatcttccccatcaactactgtagatcgtcaacgtgtactcacttccattatcgatcgaatcatcaatttaatgcctcgtgaatcacgagatcatataatatgacaagaaattcgtcccgtttatctactgctggtcaataaatactcatgcaattcccaccaatagatcactcaaccaatttcttctcaggttctctcttcacacctctccccttctctatgattatagatagtatatgatttggttaaattatctatatttcttttttgataaaggatttggttaaatttttaattgcaggtaatactcgtaagatttatcaacacaagcaaaaaag

SEQ ID NO: 2846 - DNA, 722 bp, Unknown
  misc_feature (1)..( 722): cDNA_ID_3070212_gDNA_ID_1620608_Annot_ID_161838 3000 nt of promoter + ATG
taacagatacgaatatcaaggattttcaggatatcctgatccgatttttaactattggttccggatccatgcttctggatttccggatttcggatatccgtccaaacaccaaaatctccgtaggggtccgaatccgtaaaaataacaatttatttttaattaaaatagtaataataatgataaaatttaatttcatataatataattttagaaaaataaaatctgaaaataaaaaaataaacaaaataaacaaaatctgttctaaataattattaaattttaaatatcaatacattttaaaaattattaatataattaacttttaatacaattaatgatttttgattcataaattcattattcggatccaaccaccccggagattcttgtttctccatcataattggatccaggatatagtcctaggcctcagtagctccgtgtttttagatatgtcaaatctaaagcaattagttctcttttcatggtttttttcttgtctgatccttagctaaatatccatgaagatatactaaaggcaatgatcaattttatgattttaaatcaccttctcttcattccacattttcttttggtacatgtctccattccccattgaatatgtaaataactcacggttttgttatctttaggccgggatggtaatagcacaaagtttgctatggaaagaaatcactctactgaaaaaaatacaacatatg

SEQ ID NO: 2847 - DNA, 3000 bp, Unknown
  misc_feature (1)..( 3000): cDNA_ID_2175122_gDNA_ID_1620608_Annot_ID_161839 3000 nt of promoter + ATG
ttgccgaaagtccggttattaatgaaatattccctttattttccatctattgtagttttcatcgggcctattgtttatatcaaccaccattactattttatgttcagtttgtttcttccacaattccaccatagttatcctaatcttgtttagcatttttgagtctgattgatgacatgttcttggtgtttaaaaaataatggttaagagaaaaaagtaattgtgaaagtttgatctcgaatcgctttgggttaaggctcacttggaaagtgtcttggagttttgctgcccgtgttaagtatcgataattttctgtcaaggtattttcctttagcaccctttagctctgattttgctgatcgtgaacttcacgctaatagagtatccgtttctttaggtttgtctaatagttacctttgtcgagatcaacagttaagtttagtatgaaccctatctgaaattctctatcacaaccaatagagtgaaaaagactggcattatgaccccgtcactacagagtaggggttagcggagcttttttcaactctatctctccattcgctaattatcgggttcattcatgtgaacatcaattgtttgaataatttgcaaacctctgatagtgtggaaggagcgatattatgaccctttctccgatagatggttaccatatcttattccaactgtttgacccgtccgcctcccctgtagagcatcttttcaaaggttcatttgctttgtttgcgagaaccgtttatgactacacgttggtcgaggatttcgataagtcgaggatttcgataagtccgtcttcaaggttgaatttgccaagatctcaacagattttttaaatcttgtaaactcttttaaaagtacacagttctttagaaaactcatgaaatttttatttttattttcttgtattctcttagctttaatttgtatgaacttcccttctttaaagttaatgaatggaaatctatggtttgacagaaaaaaaagacagaaaaatgtaaatcaaaagttgtaagaaagaacagtgttattctataaaaagagaatgaaagaactatgttatttttataaagggaaaaaacccccaaaaaacctcaattaatttttatttagacgtttaatacccaattgtttttggttggaaggtaaatacacgaaataataaaatcgtacaatttaatacacaaacaattaattgctgttatttttatattcacgatctcacaacaaaaataaaattccaattttacccttaccatctcaattaactattatttttttgataatatgatattaatttttatgattttgaataaaaattaaatttattaacataaactaaaatattaataaaattattttttattcaaaattataaaatttaatatcatattataaaaattaatagttaattgagatggtaagggtaaaattgaaattttatttttgttgtgagatcgtgagtatgaaaataacaacaattacttgtttgtgtattaaattgcacggttttattacttcgtgtatttacctttcaaataaaaataattagatattaaacgtccaaataaaaattagttgagattttttttgggttttttccctttttataaatgtatcgtaccgtttgtgttaagcccctagaatctttcacacacacgtctgtagttgggcacagaacaccaaactgaaattcaaaactataaaaagaaaaggaaagattcgagggcctatttcaagaatattaaaattaatataaaccaaagatatgttggatttctccttagaggtttgaggttatctattgggtgaattggtaattattcatagaatattgcaacttgcttataaatttgattacgtgagctgtgattagtccataaatatattatctaatgagacaagaaacctgatgatttattgttatttttttctttttcttttgtcgtaattataaataaaaaaatgattagtgcagaacatacgcgatttttaaaatgaggccggcgcttactatatacatttagtttactccaaccatatattaatgcactctaaactatgcatatattgatatatatcattttagataatcttttggactacatatctcaaaggattaatacaagaacttcagatataatttgactttaacacatataattcgattttgttcatagttcatgacaattattgataagcttggtgactttaacacatatagtttcgaattttgaatgactagtcggctttacacttgagaaatatcagccagtttgtgacaattcatgggttcttataagattttttttagtatgtatcatctttagaaaagaatgttaccacggatttattaacaaggaatgtccgaaaaacaaaaatttcgttccaaacccaacagccacaataggccttactcaaatttcatgtatctcgaaataactctatctggtttgttaacaataatttgcataactgattaataattaaaacgacatataacagagatctatattatgtggttacgttttatatagtatttgcacatgctgcacataatggttatgaatatattatgattaaaagacaacacatattgattgacttttgatttatatatattacatctatgatctatcttcattatataagatatcacgtttctctcggttacatatatatattatgtttgattattgaatgaatataattatataagataactgtctctctgtctgtctgtctgtctgtctgagtggattcgtatactatattgtgatgagagtcaccacaacaaattcgttgacatgagcctttcatatatttttgaattatactgaactaaaacccatttaaaagcccatttaaagacccattataagagtagagatactcagcccatttaaagataaaattacgtcatagcgatttttccattaaaagagtgaggaagagacaaaagtgattgattggtcagaaaaaatg

SEQ ID NO: 2848 - DNA, 3000 bp, Unknown
  misc_feature (1)..( 3000): cDNA_ID_3070208_gDNA_ID_1620608_Annot_ID_161840 3000 nt of promoter + ATG
aagatgatacatactaaaaaaaatcttataagaacccatgaattgtcacaaactggctgatatttctcaagtgtaaagccgactagtcattcaaaattcgaaactatatgtgttaaagtcaccaagcttatcaataattgtcatgaactatgaacaaaatcgaattatatgtgttaaagtcaaattatatctgaagttcttgtattaatcctttgagatatgtagtccaaaagattatctaaaatgatatatatcaatatatgcatagtttagagtgcattaatatatggttggagtaaactaaatgtatatagtaagcgccggcctcattttaaaaatcgcgtatgttctgcactaatcatttttttatttataattacgacaaaagaaaaagaaaaaaataacaataaatcatcaggtttcttgtctcattagataatatatttatggactaatcacagctcacgtaatcaaatttataagcaagttgcaatattctatgaataattaccaattcacccaatagataacctcaaacctctaaggagaaatccaacatatctttggtttatattaattttaatattcttgaaataggccctcgaatctttccttttctttttatagttttgaatttcagtttggtgttctgtgcccaactacagacgtgtgtgtgaaagattctaggggcttaacacaaacggtacgatacatttataaaaagggaaaaaacccaaaaaaaatctcaactaatttttatttggacgtttaatatctaattatttttatttgaaaggtaaatacacgaagtaataaaaccgtgcaatttaatacacaaacaagtaattgttgttattttcatactcacgatctcacaacaaaaataaaatttcaattttacccttaccatctcaattaactattaatttttataatatgatattaaattttataattttgaataaaaaataattttattaatattttagtttatgttaataaatttaatttttattcaaaatcataaaaattaatatcatattatcaaaaaaataatagttaattgagatggtaagggtaaaattggaattttatttttgttgtgagatcgtgaatataaaaataacagcaattaattgtttgtgtattaaattgtacgattttattatttcgtgtatttaccttccaaccaaaaacaattgggtattaaacgtctaaataaaaattaattgaggttttttgggggttttttccctttataaaaataacatagttctttcattctctttttatagaataacactgttctttcttacaacttttgatttacatttttctgtcttttttttctgtcaaaccatagatttccattcattaactttaaagaagggaagttcatacaaattaaagctaagagaatacaagaaaataaaaataaaaatttcatgagttttctaaagaactgtgtacttttaaaagagtttacaagatttaaaaaatctgttgagatcttggcaaattcaaccttgaagacggacttatcgaaatcctcgacttatcgaaatcctcgaccaacgtgtagtcataaacggttctcgcaaacaaagcaaatgaacctttgaaaagatgctctacaggggaggcggacgggtcaaacagttggaataagatatggtaaccatctatcggagaaagggtcataatatcgctccttccacactatcagaggtttgcaaattattcaaacaattgatgttcacatgaatgaacccgataattagcgaatggagagatagagttgaaaaaagctccgctaacccctactctgtagtgacggggtcataatgccagtctttttcactctattggttgtgatagagaatttcagatagggttcatactaaacttaactgttgatctcgacaaaggtaactattagacaaacctaaagaaacggatactctattagcgtgaagttcacgatcagcaaaatcagagctaaagggtgctaaaggaaaataccttgacagaaaattatcgatacttaacacgggcagcaaaactccaagacactttccaagtgagccttaacccaaagcgattcgagatcaaactttcacaattacttttttctcttaaccattattttttaaacaccaagaacatgtcatcaatcagactcaaaaatgctaaacaagattaggataactatggtggaattgtggaagaaacaaactgaacataaaatagtaatggtggttgatataaacaataggcccgatgaaaactacaatagatggaaaataaagggaatatttcattaataaccggactttcggcaaaaatccaactagtccccatttttttgtgtaattttttcttcaatctcttaaaaatacagatcaatcgcacgattattattttttattttgtaggattagcgtatatatttttgggaccctatatttttcttttgtagacaacccttaaaaaaaaaaaagaaaacgcaaacgtcgggtgttttaaaacgagccacatagctttaacttgtgggctatatatatagctttgcacacataagaacgaaacataatgtggcttggcttatctctcagcacaagtgtttcctcttaaactcatccaatagtcctttacgccttcaaatccttcttcattctcccattcacaattccttcatttttaatttttgattcatcctccattttttttttctgaaaaacaagaaaagttcaaaaaaaaaccaaaaaaccaatctcggttttcgtcattgtattcatctttaatggtagaccgtagacacgtattttgaaggtagattttaaataactctgtataatgagaatttcttactttgcgtaattttattgagaatctaatccgatgaatttggtcaatgcaacttatttatctacaatgcagggaattacaaaattttaatactatctcttaccaaaaaattagaaaatagagagaagaaaa

SEQ ID NO: 2849 - DNA, 3000 bp, Unknown
  misc_feature (1)..( 3000): cDNA_ID_3594385_gDNA_ID_1620609_Annot_ID_161844 3000 nt of promoter + ATG
aaactttccacgttaatgattgtgtatgtggctttggcctttggaagttccctctgcattcttcttagagccacgcttcttgtcactgctggttacaagactgctactgaactgtttcataaaatgcatcactgcatattccgttctcctatgtctttctttgattccactccaagtggaagaatcatgagtagagtacgtcgctggccactatccttatttgaggatttccatatatatatctatttggtaatcattgtgttccattttttccttgtataggcttctaccgaccaatccgcagtagatttggaactaccgtatcaatttggatcagttgctatcacagtgattcagcttattggaatcattggagtaatgtctcaagtttcttggctggtttttctcgtcttcatccctgtggttgctgcctccatatggtatcaggtacttttcaataaactttacaatttagtcttccataagagttgttgattctgacaaaattaagtcaagtttatttaagtgatgaagttgtgacaaaaagctttcaactttgcagcggtattacatagctgcagcacgagaactttcgcggttagttggagtatgcaaagctcctctaattcagcatttttctgaaacgatttcaggggcgacaaccattaggagtttcagccaagaatttagattccgttctgacaacatgaggctaagtgatggttactctaggcccaaattctatacagctggagcaatggaatggctttgctttcgccttgatatgttgtcatcacttacatttgtcttttcattggttttcttggtctccatacctactggagtgattgatccaagtctcgcgggattagccgtgacttatggactcagtttgaatactctgcaagcttggctgatttggactctctgtaatcttgagaacaaaatcatatcggtagagaggattcttcaatatgcaagtgttcccagtgaaccacctcttgtgatagaatcaaaccgacctgagcaatcatggccttcacgtggtgaagttgaaatccgtgatcttcaggtatccatatctattatactttactcctatcaaagtttgtgatatagagctcgcacttgttttatattataccttgaccgtttggaatatttggacacattgttaggtccgatatgctccacatatgcctcttgtgttgcgaggaataacatgcacattcaaaggaggtttaagaacaggaattgttggaaggacaggaagcgggaaatcgactttgatacaaactcttttccgcattgtagaaccttcagctggagaaatcaggattgatggagtgaatattttgaccattgggttgcatgacttgcgtttaagactaagcatcataccccaagatccaaccatgtttgaaggaacaatgagaagtaacttggaccctcttgaagagtacacagatgatcaaatctgggaggtgcgtcggtttaaatctctgaaagtcgcacgttcttctttctttaactagtttaaacaatgttcagtcttggctaatgtttgcgcggtgttttaggctcttgacaagtgccaactaggagacgaggtgaggaaaaaagagcaaaagctcgattccagtgtgagcgagaatggagacaattggagtatgggtcagagacaactagtgtgtctcgggagagttcttctcaagagaagcaaaatcttggtgcttgatgaagccactgcttctgttgacactgcaactgacaatctgattcagaaaacgctaagagaacacttctcagactgtacagtgataaccattgcacacaggatatcttcagttattgacagcgacatggttctgcttctaagcaatggtttgtctgaaaaaaatctcaaattcattcgatggaacttgtgtgcatatgaaacattgagaaatgtcttgttgtgttctatttgcagggatcattgaggagtatgatacgccagtgagattactggaggataagtcttcctctttttctaagcttgtggctgagtacacctcaagatctagttccagtttcgattgaagcaaagactctgctattttcctgctgatgatgacgatgaagaaaaacttaggatgtctgaatctggtttagccacaacactagctggattatgattcacacaagaagaaacactatcttttgttaaaagcttttgttcttagtttatagcttctactactgttgaacccctaaaaacgattattctacatcgctagtttcaaatcaatgcaataaaagattgttcacttctgattgaaaatttcagaaacgtttctcaataagtcattattgatttgatgaaagttaaaacaaaaaaccagggatcaaaaacaaaaaacaaaaaaacagagcttgatagactcaaaacagatgaaagtaaaaccgacgcagcatctttgttgaagagcaaaccgggttagtttttattaaatcaagatcacacgggtctatgaacaaaaaccgggacggtttagtaatctctttttgcgtggttgcttggttggtggatgcgataggggtattaatgtaattaactattatctgcctgccacttgctcacgagcgactttggtctgagaaaaacaattttgacggaggaaaggctgcgccttttttctccgcaacttcaccattttcggcttttcgctgccggaggggtttccccattgccagctatgaaccttagttctcattctcaaaatcaccattttactttcactaaacagataactatccttttggtctaccaattttagacgcttctgagcatttacagagacattgactgagtaaggaggagccgtcttatctttcttcatacttgagctcttcccacacgtcacataccggaggcatttttagcgaagtttctagctccaaggttctgtttttgtttgctctagggttttctattatcaggttcttatgatgggtatg

SEQ ID NO: 2850 - DNA, 3000 bp, Unknown
  misc_feature (1)..( 3000): cDNA_ID_3070216_gDNA_ID_1620609_Annot_ID_161856 3000 nt of promoter + ATG
atcatcagtctccaagatttaaactaaatgttctagaacaagataagaatgggaccactaaccagtctaagatctcggtcatccaaatcgcgagtccgaaaaccgatagtcctttcaacataactcatctcattgctcccagacccttttcctttctcattcaaaagatcagcaaaagcaccaccgtactcaattctcatcaatctgactgcagatactgtataggctccacaaacaaaaactgttataagatattgggacaattcaattgcacttaacaatattgatgcaaagacttcaaaagactctttgtactcattaataataattttctaagtactcattaaacgcaacgactctatgtcaacctagatattcagtgtaacactatcactactcaagctagtggtaactaaatcaatggatttactctaccagctctatgtggagaaacttccaaattcagattctgagatttccgcgacggagccaccggacctgaaaaataggaaattttccgagagattgaagacagaaccaggcaaacaacgtcgatactgccattatttttctatttttttaaagaaaccaaaaacagtagagaactattcacctcttctatcaggcgaaaatggttttcgagtcttttgggttcgcttaaacgaccctggagaagctttctgcgtttcagcagacagataaacgcgaaatgagagcaattgcgccatggatgctccactgctggagctagagccaaacctgggaactcttatcgtactttcagaagaaaacactcttttccgccaagagtgttggtttaatgggcctaaaagcccatactttgcagatctcaatttagttcaatttcggcccgtctacttttttttttcctttttttttacatttaacgcaaaggcaaaaacgtaattatctaaaagtcctcttcttccccagttttcctaatttggtaacccttgttgcaggcggctgttgctgatcgggtctctcttctccattttccgattagtaagtgtttattctactcattttgtcaaaatatcacaatgttaatgcaaatttacatatatcaactatcaaaaaggcaatcttttattgaaacgtgttctaagtttgaaaagactaaaactttcactgtgctgctgtaggattaactaggaagtcatgtggttcagaataggcaattcacgtgcaatgacagagataaagtaaaaaaagaaaagtatagaggtacccgtgacctctttcttacacgaacgtgacacgtgagcatgattgtacattagagacgaagctgccctctttcctccttccattacagtgttcttaaggtacaactatgtttctttactttctcttcagggcattgctacttcttaaagttcttcttcccattgacaaacaaagggatcagtgtttttatttcgtcccttcctttgtctgtattcttaagagacaaccaaatcttttttgtttagtaaagtttacgagtgaatggctacttttcataccgttagagatgcggtgaagctctttgacgctggtatttctggaggaaaacatctcaacaaaggacaagaagaggtattgtgccttttgtgtttctttcaccctctgtaacattgtgtgtgttccttggtgtgatataatactgcaatattttctgaaaatttggttattgttgcagggagtgttggtggaggagacaaatctctgtctctggaataaagaggttaacaagttgaaagaaaagataaagaatgctgtgaagaccaagattgaggctttgttagaactggaggaagctaagaaaacggttgagcaactcagtcaggagttgggaattaagcggaacatgattaatgatgagaaagatttagatttgagtagtagtgtaagagttgtgacttcagagctaggtgttgctaaggaatcgattcatagagtagctgaagaggagagtgagctgtgtatgttaatggagtctcttaagctcgagcttcaaaacgtggagaaagcacattcagagcttaaagagattgagcaaagagagagggatcatcaagccattgaagatctgaagaaggaaacaaaagatgcaaaaacccaactctcgttgttagaagaagagctcaagattgctgtttttgaagctcaagaagcaaaagatgcagaggaacacgccagggaacggctaaatgttgcagttttagaatctgatttcagatcattagctgtggtgaaagaaagtgctgctgaagaattaactgagacagaagctttaagagcttgcagagatgaaacactcaagacattagagatgagtgagagagaaattgaagatataaaagctgcaacacaagatgctttgaagaaagctgagatggctcaagaagctacaattgtggtggatgttgagctgaaacgacggcgtaaagcagcgagtaggatcttggcagaatccaaaatgtgtgccaaatctaccaaggaagtgctcaagtcaaaaccaagatcatcgtcaaaagaaggttgcctggtcaagtgttagaagaatcttggtcagagttgtaattgtgaaaatctgtagaacttcaataactagaagaagtgtcactttgttggttgtgttcaaagttggaagatttaataagattgtagtgcgaccatttgtggttttgaatgtatatgtaaacacattcactatcagcattcagcaatcggataactaaacaaaaacaatttgatgatttggagatttggaaatttacagagctaaaagtgaaaaatgccagtgattaataaaagaaaagataattaaggtcggttagtaaaaagacgtaaatataaataaaaggcttgtttttttatttttcactttgttctctctctctctcgtaacacgcctgagagttctcgtcgtccttatctcgatcttggttgattcgctctccgatcggaaattagggcttttgttttctgaag

SEQ ID NO: 2851 - DNA, 3000 bp, Unknown
  misc_feature (1)..( 3000): cDNA_ID_2105500_gDNA_ID_1620609_Annot_ID_161854 3000 nt of promoter + ATG
ttccagtaaaagctgacttcctcttctgcgatctctatcatctaatgatagaaaaaaaaaactcattagtccaaatcataatgaaaaggcttgaaatttattatcttaccattgtatgatttgtcttttgatgagaaatgtctcctctcacgctcttcaagctcatcacgaagatttatcttctggagttcctcttgagtgtgttgcccttccctcctgccaaaacaacaataagtaggagacgtacgtgagtatagagaatccaataaacaacgagacatatgtgcttaaatagaaaccagtatctttcaaatatcaagcacaaataagtccctagaaactattgatcctcaaaaactacaacaagaaaaccggtaagaaataaacaggccacaatactaccgatttcagcaacctaaagacaacgtacacaggccttttctgaatcaccgtatgtcaaaatccctagcacgctattgcaattaaccctagattctggacaatatcatcaatctcagctaaagtttcgatcgaattcacaggtagtctaattcgcgtcggattaaaggaagagaaccagtttcgaaatcttaccttggctttaaagttgtgtgagcggcgacatcacgggacgaatacttctgagatggaccaaagatccgagcaccaccttgctcgttacctcccttagctggagcccaggttggtcgtgctgcagtcgtcatcttcagaaaacaaaagccctaatttccgatcggagagcgaatcaaccaagatcgagataaggacgacgagaactctcaggcgtgttacgagagagagagagaacaaagtgaaaaataaaaaaacaagccttttatttatatttacgtctttttactaaccgaccttaattatcttttcttttattaatcactggcatttttcacttttagctctgtaaatttccaaatctccaaatcatcaaattgtttttgtttagttatccgattgctgaatgctgatagtgaatgtgtttacatatacattcaaaaccacaaatggtcgcactacaatcttattaaatcttccaactttgaacacaaccaacaaagtgacacttcttctagttattgaagttctacagattttcacaattacaactctgaccaagattcttctaacacttgaccaggcaaccttcttttgacgatgatcttggttttgacttgagcacttccttggtagatttggcacacattttggattctgccaagatcctactcgctgctttacgccgtcgtttcagctcaacatccaccacaattgtagcttcttgagccatctcagctttcttcaaagcatcttgtgttgcagcttttatatcttcaatttctctctcactcatctctaatgtcttgagtgtttcatctctgcaagctcttaaagcttctgtctcagttaattcttcagcagcactttctttcaccacagctaatgatctgaaatcagattctaaaactgcaacatttagccgttccctggcgtgttcctctgcatcttttgcttcttgagcttcaaaaacagcaatcttgagctcttcttctaacaacgagagttgggtttttgcatcttttgtttccttcttcagatcttcaatggcttgatgatccctctctctttgctcaatctctttaagctctgaatgtgctttctccacgttttgaagctcgagcttaagagactccattaacatacacagctcactctcctcttcagctactctatgaatcgattccttagcaacacctagctctgaagtcacaactcttacactactactcaaatctaaatctttctcatcattaatcatgttccgcttaattcccaactcctgactgagttgctcaaccgttttcttagcttcctccagttctaacaaagcctcaatcttggtcttcacagcattctttatcttttctttcaacttgttaacctctttattccagagacagagatttgtctcctccaccaacactccctgcaacaataaccaaattttcagaaaatattgcagtattatatcacaccaaggaacacacacaatgttacagagggtgaaagaaacacaaaaggcacaatacctcttcttgtcctttgttgagatgttttcctccagaaataccagcgtcaaagagcttcaccgcatctctaacggtatgaaaagtagccattcactcgtaaactttactaaacaaaaaagatttggttgtctcttaagaatacagacaaaggaagggacgaaataaaaacactgatccctttgtttgtcaatgggaagaagaactttaagaagtagcaatgccctgaagagaaagtaaagaaacatagttgtaccttaagaacactgtaatggaaggaggaaagagggcagcttcgtctctaatgtacaatcatgctcacgtgtcacgttcgtgtaagaaagaggtcacgggtacctctatacttttctttttttactttatctctgtcattgcacgtgaattgcctattctgaaccacatgacttcctagttaatcctacagcagcacagtgaaagttttagtcttttcaaacttagaacacgtttcaataaaagattgcctttttgatagttgatatatgtaaatttgcattaacattgtgatattttgacaaaatgagtagaataaacacttactaatcggaaaatggagaagagagacccgatcagcaacagccgcctgcaacaagggttaccaaattaggaaaactggggaagaagaggacttttagataattacgtttttgcctttgcgttaaatgtaaaaaaaaaggaaaaaaaaaagtagacgggccgaaattgaactaaattgagatctgcaaagtatgggcttttaggcccattaaaccaacactcttggcggaaaagagtgttttcttctgaaagtacgataagagttcccaggtttggctctagctccagcagtggagcatccatg

SEQ ID NO: 2852 - DNA, 3000 bp, Unknown
  misc_feature (1)..( 3000): cDNA_ID_2175278_gDNA_ID_1620609_Annot_ID_161846 3000 nt of promoter + ATG
ttggagtgatgggacaggttgcttggcaggtccttatcgtcttcatccctgtcatcgctgcatgcacctggtatcgggtattcttcataacactgacaaacttagattaaagcttagcttcatacctttgtcttgtatagctcatggaaatcacgataagataatctaggagacttaatgcaatcattgatactacacatactaactttcttgaagttctcactttagtcttgatattgatttaatgtatgtatgcagcaatattacatatctgcggctcgggaactagcaagattatctggaataagcagatcgcctttggtgcagcatttttctgaaacactttcagggataacaactataaggagctttgatcaagaaccaagattccgcactgatatcatgagacttaacgattgttattctcggctgaggttccatgccatttctgcaatggagtggctctgcttccgtcttgatctcttatccactgtggcatttgcgctttcgcttgttatcttagtttctgtgcctgaaggagtcattaatccaagtaggtcaccgccctttaatcattgtatttgttattgtttactttcaagactaaaaatcttccgggtcgttcttggtattttgcttcttaaaggctttgcaggattggcggttacatatgcactcaatctaaatagcctgcaagcaactttaatatggacactttgcgatcttgagaacaaaatgatatccgtggagagaatgcttcaatacatagacatccccagtgaaccatctctcgttattgaatcaactaggcctgagaaatcttggccctgtcgcggagagattactatctgtaatctgcaagtacgatatgggccacatctgcctatggtgctgcgtgggctgacatgcacttttcgaggaggcctgaaaacgggaatcgttggaagaacaggatgtggcaaatccactctaattcaaaccctttttaggattgtggaacctgcagctggagaaatcaggatagatggaataaacatcttgaccattgggctgcatgacctgcgttccagactaagtatcatacctcaagaaccaaccatgtttgaaggcacggttcgcagtaacttggaccctcttgaggaatacgctgatgaccaaatctgggaggttagttggctcttgtttctttcaatgtttctgcagatagaaaaaggaaggttctcacacgatttttgttgctctgatttcaggcactcgacaagtgtcaacttggggatgaaataaggaagaaagaactaaagctagattcccctggttagtacggctaaaactatagtcgacaagagtcatctcgaatctgttaaaacacatctaatgaaaggaatctctaatattgcagtaagtgagaatggacagaactggagtgttggtcagagacaactggtgtgtcttggacgagtcttgctaaagagaagcaaagtattgattcttgatgaagccacagcttctgtagatacagcgactgatactctgatacaggaaacactgagacaacatttctcgggctgtacagtaataacaatcgcacacagaatatcatctgttatagacagtgatatggtactgctcctagaccaaggtaatgatcatacacttttttaatacgtttgttctatcagaaggaaggcttagatgaagattggttatgtatctaaaaatgcagggttaatagaagaacacgattcaccggcgagattgctggaagacaagtcctcgtcattttcaaagcttgtggcagagtacacagcaagttcggattcaagattcaaaagaagttcaatgaaaacaaactagttataataaaattaataatcttgccttgtcgtgtttgtttcagaaagaaaacagtaataatttgtaagaaatagtatttgtttgttttctctctgatgaggaacgaattacattatcagtttacaacacgttttggtctctatttctctcttttacaattttttttaaatcacaggcatgacattttaggatctcagggaacttcacgatgaaactcttttccatcttaaggtgagaaattagattcaccgcctgaccgtattgtcaaagtgagctggttgctgtgatctatttggtgggaaaaatgaagaatttaccatttgccagcactcaggggtacgtatattgttaccatcagtaagtatcatctgtttctgttacaacatgtttgtgatttttctaactcaaaattttgatggatctgcttctacacatctgtctatgttctcagaatggtccactgtttgcatcagtggagtttcagaagggagtcttttaacattattaaactcttcatgttttgttggttaatggttacggcgtcatcgtatatatatataattttctcttttgttcttttgtcttggtggtctgcgaaagtaatattatttattgactcagtagcctatatatatatagatatatcttgtcctcagagtgaacattttggtcaacactcagttcctgatggaaaatcctatcgattctcttctcctccagcccatctacctttcggtactttcgtttttcttgaatctggtgttgttgctaattctttttggttcatggcttttcaaaaagagagtagcttgtgaagatactgatgctatcatgaatgaagagtttaaacacatatctttctcgtataataaactggttcttatttgttgtgtctcattatctgtgttttattctgtgctttcgttgctaagttgccttcactggcatacaaatggttggcctttcttagatcttctgttggctgcccttacttggggttccatctctgtttacctgtttggtcgatacactaattcttgtgagcaaaaagtactatttttgcttagagtttggtgggttttctttttcgtggtttcttgctaccatcttgtggtagactttgttctatacaagaagcaagaaatg

SEQ ID NO: 2853 - DNA, 3000 bp, Unknown
  misc_feature (1)..( 3000): cDNA_ID_3070222_gDNA_ID_1620609_Annot_ID_161847 3000 nt of promoter + ATG
tgcttttttttttcacagcattactgaaatcatacataatttctgcttccataatcttatattttacgagatcggttttatgataaactttcaagtagtaccattatgggttgtattttcttttactaccattttgggtttattgcaatttgcataaacatattcaaaactattttgcgttcaaccaaatggttaaactctggttcatattgatataccaaaacactcatattggatcaaatatgtaaggtgataataacactgatatgaactagtatactatgtcttatgagtcactattttctctaactttaataaaagtttagctgtgattcattattcgtgattatggtatcctcatatcagaattgctttgttctaattcagtcttattgttcactaatcctgatcgaaaatacatggccacattagaagcatcaaacaaacagggttttatgttttccacactcgaagagacaatattttcaacggctgaaactgaaaggaaacaaaatataattttaagacaaaaaaaaaagaaaagaaaacatatatttcttcttttggttgtagtattttgagacctcactgattgtcggaaaataattggaggggttcccactgattttgaatttctgtaataccaattgtttgttttattagaaaacaacaccttcaatttgtattttccccttgttgtttgggatggcagttacttaaataaaatatttatctaaaacccatcgaagaaattgattctaaacataacaaatagttattttttttcacacaatctcacttggatatagtttattaagtcgctggtagtcaaatatcttcgttttaacatataagctttttattatgttaattttttggttttcacatcatatgattatgttaattgataaagctatttaattgatcagaaagagcgagagccacatgataaattcaagtgactttggcttgaaaataggacgatggcttcacggatctatagactaactaagtcatctgtcattacatacgtcacgtttatttcattttataattacaaaaacaccaaagttaaatcaaattattctttgtttttgtcaactgatttgatattgataaatttgttgaaattaagtatatagtacacacgggagtgactaaaaaaaaaaaaaaaaaaagagaaactaaagccgatatgcaatgaataaatactcggaatcaaaaacgggaggaacacaaaaaattattggagtctaagccatatagaaaaaaaaaagatattaaaaccacaaagcataaaactcaaagcaaaatgaaaaaaaaacatatattcttacctaaaaatataagcaactaggcatatataaaccttactaaacaacactagttaagtcaaattagtcttaaattgatttatgaaaggtctattatacacgtctaacaaaaagggtttatatatctcgaaggtggcaatgaaatatatagttcttgtgttgaacaaaggtaatgaaatatttaaaattaaatttcacttgtatgggattgcacttgctcgtattcacgtcatagtgaattgtgataatatattcttttttttcttttcattgtgataattttattttttagtcgttatagtttgttgttttggtatatacaaaaaagaatgaacaacaaaaaagtgggttgatggtaaccaaaaaaaagtaggtgtcacaaaaaagaacatgtgatagatgagcctcactcccgaaaagaagatgtacacaaaaactctgaccacaatttaaaatgataataaacatgtgttttttaaaattcttttaccaaacaagtgctactttattacgacagtcgacatatatgtccttttaatttttgttaattcaatcgcacgagaattaaaacaatgattcgatttgctatgccattttttttcaaaaataaattacacacatttttctaaattaaatcccaaagaaaatataaacaaatcttattatataaattatggttttcaaagttactaactcatacgattataccacgtgtcaagtctatcgatcagatgttgatacgtgtaagaaaataattaacttttttcttttaaaaaaaatagaaatactaaaaaagaaatcaattaacttttttcttcttaaagaattagataactaaaaaataaatcattattaacatatactaattcatatgactatatctaaaaaagattacattttatttttcttaaccaaaaggataattaacaaaaaaaatatatatatgttattggtcaaatttttaatatatatggtattaacaaaatttgtattattattaattatgttttgttaattgttaataatttttaatattaactaagatatagatttgatctcatataaatattattttgacatgaaattattatcaagtaagatgaagtgtgtagaattaaaatcgagttttttatgaaatagatagttaaaatgtattacaaaattgaatgtgtaagataaaaatttgtttttttattctaaatactaaattataataaagaaaaaatgtgtatgttactatttagacttcaaatatcatcaataagattgaatgagtataataaaataaaatgcataaaactactattttactattcaaaattatatatcaaaacaatatataaattattattttactattcaaaatttaaatattattgataaaaaattatatttacatcttacacctgaccttatctagtttcttatataagttgcaataaaaataccaacagattcataactttttttggcacccagtctctccactcctagtggccactagtgttcacacacagtcaaaaaattttaatacaaaaaaaattaggaatcgaattcaaaaaggaaagaaatctaaagaagaagacagagagagaaacaatctccaaaatacataaatttgttcacatccttccgttttttgtttggccgagaaaaaaaaaaaatg

SEQ ID NO: 2854 - DNA, 3000 bp, Unknown
  misc_feature (1)..( 3000): cDNA_ID_2175293_gDNA_ID_1620609_Annot_ID_161850 3000 nt of promoter + ATG
cttcatgactaaatcgctttcatccatggtttatagtattccagcgtttagcaaatgacatgttttgcaagacgaaccgctgcattgttatcacagtaagaaatctgcttcattcttactgatttcagttttgactagttttcatttccattttatgtttgacatcaaagttacgattgtttttggcagggaagaggatatccagatgtctcaacaagaaggtacataacttaatcccaggttcctggaatactattttatcagacattatcttctattgattaatatatcagcgaataacacagattctttccaggttcttgcgactcctgatggagaagttgcatctacctgtgcattgtctagtcgactgtgatccatatggctttgagatcctagccacataccgttttggctccatggttagattctgttacaaaatatagatgactgaactcggaaaatttcaccgcttgcattgtttttgttgatagtgataatgtgatatggcactgacccatttcattttgaaccattttccttatgtcacttgttttctttctgtaagcaaatggcctatgatattgaatcattacgagcaccagatatgaaatggttgggagcttttccttcagactctgaggtatatagtgttcccaaacagtgtcttttgccactgacagaagaaggtaagagatcattaaacaccttatcgccttaaatctttagattttcctatttttcactgcttccttttttgagattgtaacaacttccccggacagataagaaaagaactgaagcaatgttgcttagatgctacctgaagcgtgaaatgccacaatggaggtatgaaaaacttccctgacttttttatatttacatttcaaccaaatgacaaaaactagtcttgatcaaaacgattttggtcgtctaaggttggaacttgaaacgatgttgaaaagaggggtcaagtttgagatcgaagcactctcagttcactcactgtcctttttgtcagaggtatatattccttctaagattcgtcgtgaagtaagctctccttgagcttcatacgagataactagtctccaactcaaggtaatgctcattgttttttttatgactctttctaagctttttagtgcaaaccaaatgcattggtagaatggacaaatgaacatagttttaatggaaaaatcataaatatacagattataaaaaataattctcagtttttaatttttaataatacaaagtacattcactaatgactaatgagtaataagtttgaaattttgaataatacaaaagtaatttagggttcatttgctttatattgttaccaaacctaatttgaagtattaaagccgttcccctgactaaaaacctttgaacactccgatccaaaaaaaagaagagaaaaacctttgcatacagctaaaaacgatgtcgtctctctctcgctttctccttcgtggcaacttcagcttcagcacccacacgaatcgccgcttcttctccgccgttaccgctgctgcagccacaccctcgccacccaaaccgtccctcatcaccctcgtaaatgacgaacgcgaccccaaattcatcacggagaagttcaagaaagcctgccaagcagagtggttccggaagaatatagctgtctatgagagaaccgttcgccgtctcgccgcagccaagaagtttgagtgggtcgaggagatcctggaggagcagaacaagtatccaaacatgtcaaaggaaggattcgtggcgaggattatcaatctctatggacgagtcggtatgtttgagaatgcacagaaagtgttcgacgaaatgcctgagagaaactgcaagagaacagcgttgtctttcaacgcattactgaatgcctgtgtgaactccaagaagtttgatttggttgaaggtatcttcaaggagttgccaggtaagctctcgattgaaccagatgttgcatcttacaatactttgatcaagggattgtgtggaaagggttccttcactgaagctgttgcgttgattgatgagattgagaacaagggtttgaaacctgatcatatcaccttcaatatacttttacatgagtcgtatacaaaagggaagtttgaggaaggagaacagatatgggctagaatggtagagaagaatgttaagcgagacatccgtagttacaatgctcggttgttaggactagccatggagaataaatcagaagagatggttagtctctttgacaaacttaagggtaatgagctcaaacctgatgttttcacattcactgccatgattaaaggatttgtcagtgaaggaaaattagatgaagccataacgtggtacaaggaaatcgagaagaatggttgtcgcccgttgaaatttgtctttaactcattgcttcctgcaatatgtaaggcgggcgatttagagtctgcttatgagctctgcaaggaaatatttgctaagcgtctgctagtcgatgaggctgtcctgcaggaggtagttgatgcattggtgaaagggtccaagcaagacgaagctgaagagattgtcgagctagcaaagacgaatgactatttgcagtgcaagcttcgtctctttcccaaagagtagttaattggcaaggcttattgactagtttttaatttagtctgtgtttccctctttttaatgtcttgttgcaaactgcgagtgcggtgatttaataattgaactatctctatctgtagtgtgtttgtgttgctttcaattctcaaagttaaaagaaattttcttatttccttttctggttagagaacggcatgaatttaagatttagacacaaaaaacgctgcgtagtccaggagtagaaacggcacgctgttttattttgtttttcgcattcactgcataagacctagccggaggagcactcttaagtccaaaaccctaaaccctcacactcaactctgacattttcaccacctgcacgaagctatg

SEQ ID NO: 2855 - DNA, 3000 bp, Unknown
  misc_feature (1)..( 3000): cDNA_ID_2175274_gDNA_ID_1620609_Annot_ID_161845 3000 nt of promoter + ATG
ctaaaaatctcccacgcctttctcggtattttgcttcttaaaggcttagcaggactggcgattacatatgcactcaatctaaataccctgcaagcaactttaatatggacgctttgtgatctcgagaacaaaatgatatctgtggagagaatgcttcaatacacaaacatccccagtgaaccacctcttgtgattgaaacaactcggcctgagaaatcatggccttctcgtggagagattactatctgtaatctgcaagtacgatatgggccacatttgcccatggtgctgcatggactgacatgcacttttccaggaggcctgaaaaccggaatcgttggaagaacaggatgtggcaaatccactctaattcaaaccctttttaggattgtggaacctgcagcgggagaaatcaggatagatgggataaacatcttgtccattgggctgcatgaccttcgttctagactaagtatcatacctcaagatccaaccatgtttgaaggcacgattcgtagtaacttggaccctcttgaggaatacactgatgaccaaatctgggaggtttgttggctcttgtttctttccatgtttctgcagataacaaaaggaaggttctcacacgattttctcgtcctcttttcaggcactcgacaattgtcaacttggggacgaagtaaggaagaaagaactaaagctggattcccctggttagtgttaataaaactattgtttacaagagtcatcttgaatctggttatcacatctaatgaaatgaatctcttatattttagttagtgagaatggacagaactggagtgttggtcagagacaattggtgtgcctgggacgagtcttgctcaagagaagcaaattactggttcttgatgaagccacagcttctatcgataccgctactgataatctgatccaggagactctgaggcaccactttgcggattgtacagtgataacaatcgcacatagaatatcttctgtgatagacagcgatatggtcctgctcctagaccaaggttgtgaatctgattatacacttctatttacgcttttataactagaagacttatattaaatctgttttatgtatcctaaatgcaggtcttatcaaagaacatgattcaccggcgagattgctagaagacaggtcgtcattattctcaaagcttgtggcagagtacacaacaagttctgaatccaaatccaaaagaagctgatagaatcaaagatccataaaaaaatgggaccaaacaagtttgtttatcgtctagcctttgtcgtgtttctatgtaatttgtgatctgacgtttgtgcttgactttgtaagctgatgaaacttccatgaaaatggcataattgaagtggaaaaataaagtatggacaaagacttgtcaaaagaaagaaaaaagtagacttggcctttctagtccagtagctatgaccacatacatgcatacaaggctccaatatcgtgatagacttaacggctaatggaatgataacatgattattagaatatgaatttgaatgcggaccatattattattaaatcatagttacaaaaagtaatattatgagatgagaatgatgttgtgggacacagccgttgactgacaagatacagagacttatcatttccttgcagcccaatcctctatgaatcttcttgatttccttcccaagaaatttttgcactgtgacaacttcccaaatattccaaactttatagtagtttatttttccatttaccaaaatatcttaacccaaaaaatatgataacttagttgttgggttatgcgttgttatttattacgttaaagaaatgtatacatttgttaaatggtttcacgttcacctcttgagtggattagagaagatttgtttttagtatttgtgatttgttttgtagaatatgaatcaaactgaataacgagtcgaaggaaatctaacgcacggatattggtaaggttcgtctatgtaatgtattagtgtgtcagattttcaacaaagaaaagaaaaacagattcatgtgagatagaaaaaagtgacataaagtgaaactgaagcttataatatgtactaatatcttaaatttacaaccacaagctaagaagacaactttagttaaaggtaattcgtacgtcatcagagagacatggaggatactagttgaaaagtcagcaattgctttggagaaaaaggagttctatcccctatcttctgcaatgagagacatataaaaataaagaaatttcttttaataaagcttaacaaatcgattttctcttcttttttaatacaaaaacaactaaatcgaattgaacagctccaaaatacaatttttgatataatgagaagatcaaatagaagtaaaatacaatttttcaactcaaaatacttggagaggtgtagaagaaaaatacattattatatgaagaatgaaaaatacggataaaacaacaagagttctaaaggtactattagtaggtgccaactttgtttttatttttgcttcttcaaaattcaattaaatcaattcgtatcaataacttggcaacaaatcagctcgtcttaagaataggaaaaaaaacatagtaacaaaaacagagagatattaaaagaatatccttttttggctaaaaaacagtaatcaaagtttgtttttttttcaacattttaatgaattgaaaaaatagattgtcaaagacccgtgaaagaggtaaaatacaaagtgttaccaaagtgctctggtggggtttgagaggagaggaacggagcgttgtctctttctccttcttcttcctcttggcttcgtgagcgtgctctccaagatatactgtctccatcatcactccactctccttctataagtattctcctcctccaaaactcgcctccatatttatttaattacaaacctttttctcaaatcattggaaaacagagagaatagagagagagaacagagagctcaaagccatg

SEQ ID NO: 2856 - DNA, 3000 bp, Unknown
  misc_feature (1)..( 3000): cDNA_ID_2105221_gDNA_ID_1620610_Annot_ID_161871 3000 nt of promoter + ATG
gatatacactaaaaatagattttcatattaaattagaataataaatttcaaataagtaaaatttattggtcaacaaaatagacaaaatcgtagtttaatatacgagttgcggctgatatgtaggattttcgaattgaacatgtcaatatatacaaatcatggaaaaatacgagagatgattaatcaaatgcgggtttgcacgatttttacatggaccttgttaagatattgataggtaaatctagtcaatcacaatttttcaaaagttgacgcatagtttcccactttcccacttaggtcacggatgcaaattaacaaaaattaacttaaatgttaagacatgacagtaatattagactattagtacaagctactcttctagtactaatagtaaacataaagcgaagatgtcactaaaaaactcataagatgacatagaaaaagcagagattggagaaggatgttaatggagttaacatcatcaacgctatttccaactcgctgtgttcatcaagttgttgaatgatgagataggaatatgaaaagggagaagcattgtgttgaggttttacgatgctccaaggatttcacttactcctgtgtttgctcagttgaaacctcaaaaccaggcggtataaacacaatgtcgtcccagtttgacgtcgtgctttcctgcaatttcgcccgggaaaacaggttcagcaaaaccaatcattcttaaaggaaaatgcattacagaatcatgtttgattgtttaccctcattcccttgacaatatcttcgaaaactgcaacctttggaatacaaaatcatgaatttcaatatgagatgacagaattatggattgacaagaaatagggagactaaagttaaataacaaggaacctgaatatcgcctggtttcagagcagggttaagtcggttctgttggctggacgctcgtattagagatttttccaagtcctcctgtcaaaactcaaccaagactcaagcttgccgatcatgtaatcagtgtatggacaaaggtgaactgtgtcttgttagtttaactaacctttctaaagaaaacagggcgataactcatgttttcacttcgtagaatcaagctctttgactgagacaacacaagtcagatcgttaagaaaattggacattaaggaaaacatgtctcgaccattttaaggaagaaataatgattattacgattccatggtagataaatatccgaaactatattacagaccactagatagagtaaaaacgaaaaagctagtcacaaccattaaaagtattggttctttcgcatattacctggaaaaccggaacaccatggaagtcatcatcatcgataccagctgttttcctttcctgtatacacatatagaagagatatataatttacttgtactgtgtctaaccaaatgctacagtctgttttcagaaacataatcgtacatctaggaaggattacatccataagacctataccctgcaaattaacccgaccacctttgagtaaaaatgtaccaaaactgaatgcaattagtgtactcctaaagaaaaccaactgttgacgcagaaaaggtattctctctttatttactcactctctgaatccacatacagaactgagaacaaaccaaatcaaagcaccaatgatgaattctaaagcaccctcaactctcctaagcccaaaccaatgctagaccaatccagaatcccttctccatctgcatcaacttccttctaatcagttacctctctaactaactgacttatctatagtcgctgaaacagagctacaataaaccactgaagtaatcaaaatgcccctgaactaaattaacacaaaagctcctcgttaatgaatgatgacagtcatattcagcaggtctaacgcctaccgtgacaaaaagaaaagtttttgagtatccaaagatatgttcgatcgtaaaatcaactcaccttcaaggcatttttcacttgagtagactcaggaatcaacctaaatgccacaccattaacttttaactggaacacctgcaacaaacaacacacacaaaaatcaaaaccactaaacagaagaatactaaaggagctaattgagttattgattcctccttataccttgctaagagcaagagcaacaacttttgaaccttctttcctcatacgaggatccatactcttcatctctttaagaagagtctctgcatcttcctctttacaaaacaacaaacccagagatttcccagaggaagtccctgaaaccaacacaaactcctcattcgaattactcaacgcgtaaacaggaactcccgccaatctctcctcaatagcatcagcagataatcctttcccgcttccgcgaatcggaaccgtcacctgagccctcgcaccaccaccgtcgtcagaaattctcgcccagacaggtgccttaccagaattgaatcgagagattctagaatctaaagcttgcttagcttgatcacgaaacgaattgagagcagagaatatattaggtttgttgttgttcgtgttggcgttgaagagaggattaagggtttgtgaaacgttgaggagtaaattggagcattgagattggagatttgagaaggattgttgtatattattaagctcgttttgttgtttcgatggtgggaaaatgtttgaattcatagttttctcgggaaaatgatgcttgagactctgagaaagagtagtgaagggtttttgaaaggctttgcgaagaagacgacgacactgaggaaaaagatttgatctctttgcttgaattagaattgtttttgtaaagaaaccctctaattatccaatgtttacaaattgatcctatatgttttaaaatatagcacctgtgagctgacaaatgccacgtcaccttcatctccagtctctcactttcttatccaaaatggcaaaatccattaaccatcattaccttcaatctccgtggcttttttgctctaccgcgcaacaatg

SEQ ID NO: 2857 - DNA, 3000 bp, Unknown
  misc_feature (1)..( 3000): cDNA_ID_3070251_gDNA_ID_1620610_Annot_ID_161883 3000 nt of promoter + ATG
ttaagaagccttaaggttgattatttttccctttcagaaacatctagagaatggagagagactatttagtcgtttggatggataaagcactactttataaggaagaaaagtgaataatatctcgacagatcattggtggtctctggaatggaaatgaaaaaataattaatgtgtaaggtaagcaccagtaaattcagtattccaagtgtagtgacatcatccaacaacagttaaggctcaagcactaagaagattatgtaatagattgttattctcctacactatagagttcgaaagtgttctatataatcaactgcataccttgatccgcaacaagccatcgacaggagttatcagcaaaaagtgcaatcttctcgtctgctttcactccaacgactcgtaaaccctcaacaaagtccaagatttcttgttccaactgcaaaataagatgattgaaatgaaaggttccattactcatccaaatttagcatcactgtaaacttcaaaagtaattacccacctatctagcaacaggaagtatttcaggcagataactgaaacaacattggttcctaacatatagattaacacagcaaataccaagggacatgcctgacaataatcataaggaaatatcaatttagtatgcttcctaacattcgaatatggttcatcttcagcaccctctagctaccttcttattgacaagcagttaagatatgtagatacaaaactaatcgataaagaaaaaaagctgatggccaatcaatcttaactcttaaacttcagttttttccctaagttctgtcatttgctttaaaaacctctatttcaaaagtgtggggatctaaaataatagcaatgagatgcgaagtagtgttacctgtctgtacgtgaatgtagaaggcgggtcatgatacggatctaccaccgcaactctgtcaccgtacttctccacagatgatctccaaatatcaggaacagacttccattcattagagctcaaagcagcctcccttggcaatgataagcgttctaagaatggcgaacaccgccttaactccttctcctgaatctataagaacggtacacaattgatgttacatataattcaggaaatgaaccataaggtaaacttacaagaaccctataaaagcctttcaggatcaagctgtttaaaccctggtcatcagaagcaattcagctttcataagacaagtatcctaaactaataagactcagaagtcagagccactcgttgtctattttggtgcaacagctaaacttgaaccttccccaaagtcaattcatttctttagattacttacttcaaaaatcaaagtgaaaggagcaattttttaagtccacaaaccaaaaaggaactcgccttggattcgcagcgaactcgaaatcccctgcgtgaagttctgcagccaaaagccttgtaaccaaacaccaatctcatcccagaaacttgaaattcaggagctgaggagcagtgagaaacgagaatcgaagctccgagagacgttgaagccatggctgaggagataagaggttatcgtgatgaagttgcttgcatagagagaatatatgagaggagaaagagagaaagatgaagaagcaaagaaaggtagaaagaaagagacgagaaagtaggtcgatgtcatgattacgatttttcacaggaaagatcagttccaagttggttggcaccgctacagaagcatggcttcttcagactctcagagataataaaacaaaaaacagagctcaatacttacacttatataataactttttatttacttatatattatatttctataattagatcagatttaacctaataaatcaaactacccataattatgatgtcccaaatttggtaactatttgatgattatttctaaactgtaggagcaaccccaactttgtatcttagctaatttttaggtataaaagtgattaaatttaatgaaaccaataaactttagctaagataaacatctttattaagcctctccgtcactcaccaaaaaaaaaaacatctttattttattttttttggttaaacaaaaacatctttattaagatattttcttaaaactaagaaaagcatatgtgttgtgttttgagtgggtagacattgtgttgaaatagtttgttgtttcttaaaattctaatcgttcttaaccattgaagtagaaattggttaaacttcttcctaacttttcttaacttagtaaaaacaacattttaatttaaaataagcttaagatccaaaattaaaaattaattgattttaaaccattgggattgctctgagcttttttagtgaattatgtgttgttttttttctttgtgttttggtcaaaattaagttatatatgaaatttattaaaccaaacaaccaaatcgaattagatgtaaaaaccaaaatgtagatgttacaaattttggaaaaaaaaaaagatgttacaaattttatgtcatgtgaacttctaaatatatttccttttcactttaaaataaaaataaaataaaacttaaacataaaaatatagataccaaagagcaaaatttaataatattgtctactagtactagtgacgtcaatttcttcacttctctttgactgcttcgcttaaccactgaaaaagtgtgccaagggttttctacgtcgaatctctccgcattctcagcgattttccggcgacgtttactctgcactcctccgacaccgccgttttactccatcgtgccagctttaagcaatcaaggtacctattttaggtaatacgctttgattctgcttttaagcatcggagaatatgttatggagaatgattcggttctaagggaaagttgttgatttcgtgtttgtattcgcatgattgcattttcgtggttcatgattttcacagctttttaatcaatttctctgtctttgtttagggtttttgttcgtacagtgtgttttgaggtatgccagatatg

SEQ ID NO: 2858 - DNA, 3000 bp, Unknown
  misc_feature (1)..( 3000): cDNA_ID_2175252_gDNA_ID_1620610_Annot_ID_161885 3000 nt of promoter + ATG
cacttacattgatcaaagtcagcctggcatatacggaaatgaaaagagtttatgaggtttgtgaaccagataatgccctctttagtgtttcatgctacctaataatttggtttaaatgagttttttctgcttgttcatatttctgatgcttggagtcgtcataagtactttgctctgctgttgcagggtctttgtttgacaaaaaatcaaaagcctccaatgtatattgtttcgttggtggattggttgtgggcgagagtagttgcatttttcctatggccattgcatatgttggctgaaaagcttgtacacagaaaaattcgttcgtctattgggataacaaaggtagtattacaacattctacttcattttcagttacttgttttaaaatttttttaccttacaagcaatattgtaagactgacttgcaatctattctctgtttcctccaggctggtgttagtggaggtggtagtttacctatgcatgttgacaagttttttgaggttagaccgccaatattgtttcttgaaattagagataaatgtttttttttgcattcaaacaaagtagtctgtccatatgtaaacaggttagttctttatgcaggccatcggtgtgaatgtacaaaatgggtatggtttgacagaaacctcaccggttgtctctgcgcggaggcttaggtgtaacgtaagtttaaactcacacctcaataacctctccttttgtgacctctgcacagaaaaactgtttagatcttattcatcaattttcctaactttttttatgaaggttcttggctcagttgggcatcctattaaagatacagagttcaaaattgtagatcatgagactggtactgttcttccacctggttcaaagggcattgtcaaagtcagaggcccaccggtgatgaaaggttactacaaggtgatacacactttctgctcttagtttgattacattttgacgacaaagttgtgaaaggatgacacagctgtttttagctatcaaattttctgtccatgagtgggtttgtttgtgaatactgcccttatatataactagattatgtgaactcttttccttcttggtctcatcattaaagcatctcttggaatctacatttcttgcaatctatttcccttttgatacatatgtagactccttgaataatctctgtgttttcgatgaatgcttttagtttggtgattagatcagattaactcatctttctgttgattatctcagaatccactggccaccaagcaggttatagatgacgatggatggttcaatactggagatatgggttggattactcctcagcactcaacaggacggagtcgtagctgtggaggtgtcatcgttcttgaagggcgtgccaaggacactatcgtgctttccacaggtatatcacatttgtactgtttgttgtcagcgtccacataaaccagttcctcggaaacctgaaacaaaattatgtttcctactgtctgtatgataagcatacattttaaacactacaagtcttaacaacaaaatgtgcctctcaagttaaagatgaatccaagtgaattgtaaccgccttgctgcacaaatattgctaagaatatttgatagcagtttaattgttgtaggtgaaaatgtggaaccattggagattgaagaagcggccatgagaagcaatttgattcaacaaatagtggttattggacaggtacttgtttggagactttggtttaggaacaatggtatgggctgtttcacttaattaatcttcgatttggatgcgtccttgatcttttgttctcaggatcaacgccgccttggagctattgttatcccaaacaaagaagcagcagaaggagcagcaaagcagaaaatttcacctgtagattctgaagtcaatgaacttagcaaggagacgataacaagcatggtctatgaagaactaaggaaatggtaatgattcaaaccaagtgtgatcccactctaatataagagtaaactttacctaatcaggcaattactcatatatacaccatatgatgcaggacgtcacaatgctcgttccaagttggaccagttctgatcgtggatgaaccattcacggtaggttcttttattcgctctcactgataatcctttaatatgcaactcaaagatttgaacctcatgtgaacgttctatgaatatcgttacagatagacaacggtttaatgacaccgacaatgaaaataagacgggacaaggtggttgatcaatacaagaatgaaatagaaagactctacaagtagactagaaattttagcatcctctttattttacaattatcttgttaaggattagcaaatgtgaaccagttcttactccattgttaatataagctgcatatatctttgttcatcaactagggatttccaagttctgcagcactatggatacttattgagtctaatagaatcaataattggaagaagcagttaaaccggtcaaaagacctaagtatgttggagggtttgagatatcttgacattctgtgtttagaggaaggctagatgttgatacaatattgtataatttgcataattatattatccgttcaatccaaaagcatttaagtgcgatgtaaagtgatggttttttctagtttatgttaaaacaaatgattagtctcactctctagtcgatagaatattgcaacttgtttataaatttgattaggtgagctatgattagtagtgcataaatacattatctatgagacaaagaaacgtgataggttattgttttttcttgtttgcgtctggcatatgtatgtataaaaccaaatatcaagcagaacatatgcgattttcaaaatgtgggcggtgctgaaaacatatattagtttactccaacttgcagaatatttgagtatattaatgcaaaaacagtaaacgcaagagcaggtgcattactagctaagacagcttggttgagagatagagacgaaa

SEQ ID NO: 2859 - DNA, 3000 bp, Unknown
  misc_feature (1)..( 3000): cDNA_ID_2105199_gDNA_ID_1620610_Annot_ID_161887 3000 nt of promoter + ATG
ctttcactgacaaattttaaaaagaaaactaaaagtatcgatttgtaaagagtgaaaatcaacctattctattcatggcttcatgcaataaacatcttcatggatgttttatcagttgggtatcgtttattttttatctatttaagtaggcccaaattttgagtagaccaataataacccattaatggcccatagttctaaaaatgaaattaatcgatggttgcttttatgcatgttgatatgtataagtgtataaccatgatccaaatatactgctttctaaacgcatgccttcaacaatatattaccatgttcgaggctgctccatttgttatcttcttaaatccgatacttctttagaatacatttttatcagtttgaagcgcgttattaataacatgtatatagaaaatgtactgcactaaacaattgacattctgtttacaaatatttttaaatagaagacaattgacattttaactagaaaacgaaaagaatattgaaaacgaaaagtcttaagtgagtatacttttggtaactttctttttgaagtatatagtttgtgtggagtataatcacgtttaaaagaaacttttgggaatgtggtagttgagacttgagagattgagaactattctcaccgacccacaaagtgccaaagttattttggaatcaggtttaccaatgccaattatggagcttcataatgagtggcgtggcccttcaatttctacacacacaaaaaatagacgccgtgtcacttataaccaaatatctgtcgacattgtgacgttcactaatgtttgaactttattcctacttttattttttcgtttcttggtaagaattgatatgtgatgtacactttatttgttggttgagaattgattttcctaagccaatttttgttcttacatcaaatacaatgtatatatctattcgactattacaaaagtacttatgtatgagaggtttggactagtgtcccaccacaaaactcataaattagctttagccacatgctgagctaaaataattttattagggtaagaaaactagaccataatttttactcaaacaataatataaattagatcaactaatgtacctatactagttatatatctctgcaagatatcaaaggaacaaattgacatggctcgtgtacttgcaacgtctcatttcttgtttaaaatactccaaatatttaggaaacacaaaaaaaaggatatttaatgagttcaccttattttgcattcgtttattattggtgttttttttgttggtagggtattaattcagatccaccgacgcccttccacgatccagtgcaccgacgttcatattttttcttggctcaagaagaataaggtggtacattcaataataactaatgtttaaacacacacacacacaaaactatcggtgtgaaacagagataatggaagaacgacactattggcccagacgaataagaattaagatctatcggtctgaatgtgtgatgtgtgaaggcttgctagtgcaccaaagttctaaccttcttaaccttatcatgtaaaaatcacgtctctgatctatctgcatcataatattaatgtgtttttatcttgcatgccatttgacaaatcacctgttagatgtcataatatatacttcaatgttgttttacgaaaacaagttttccctaaatctttagtagtacgaataacgtgttggttatagtttcctcgtaaaacttgatcttccaaagacttatgaaccttcgactttttgttgccttaaaatagcaacaagtttccttaaattgcaggaaccactagagcttcagaaatttcatggaattgcaaacagttatataaatttccaactgataattgcaaccatttgaaggcaaataattatttgctcatcttaatttatcgtttttttcacatataactttgaattttttctatttttttggtttatatacttcgaaaatctaagatgaagaaacaatgtcatcaagataatgtaaaagaaaaagcttggaacaaaagcaatatgtgtttcacaattcacataacacttaagcatgatcatagttcggtcatgatctaattacatatcactttttttttcttttgtaaaatcgatgattctatatcaaaatatagggaatttttgaaaaaagttttttttttaaattatgcctataatatacttattgaaaagtaattttgagacaattttttttgtcacaaatctgtgatatttagatactatattatgactaaaataactcacaaattcatagtaatttcatcactatatttgtgacgaaaaggatcataacaaaatttgtcacatttagtgacgaacatccgatgataactaacactgtcaccaatgtcttgttacaaattagttacgaacttgtaacgaatatgaaaattgcaatttgtgatataagaatgagttaacattagtcacaaattaatatcaattgttttatgtattatacaaaagaccgtttttggtaatgataatatgttggccaaatgattttaaaatatattggccaagattaaaaccaaagatatgagtactttagaaaaatttgtacgtattaaaaaaaaaacaattgatgataaaataacacaaaactgttttagttttatttgcatatgataatatcagatttgtgtaaaaaaattttatacatctgaaacagaatttttcttcatgttcccctttttttgcaaaataattagtatcaataattattgattgtatgattaaccccatttttgaaaacagaattgtcactcttttcggaatatctaaaaaaaaggatgaaaagtcaatatcttttaccagatccaccaaactctctctacaactaatctcaaccgtccatctcactcccgcctttatctatttaacctcactccctcaccattctcttcctcctccttcatcacacagatccacacatcaagaaactattcaaaaatg

SEQ ID NO: 2860 - DNA, 3000 bp, Unknown
  misc_feature (1)..( 3000): cDNA_ID_3070247_gDNA_ID_1620610_Annot_ID_161884 3000 nt of promoter + ATG
caaataggttattgtctaatttgtaacatctttttgctgataaacactattatctgatgatagaaaattgtaactataatccgttttatggattgctgacaaacaaaatccgttttggcatagaaaataaagttattgtacgtattgaatggcaatatgcatatatgtatgtattagttaaactcaccttctcagccccctttatcacgaaatatccaccctgatcaaaggcacaatccccctttttgcagttttctttccctttctcgcttgttttgcaaaggatagatttcaccatgacaggaatgctaccaattagaatgtcctgctttttgacatccagtatcttcttctcgacatagttgtcttgtcctgtcttgaatttgtcgcttttaacaacagtattcttgaacacctagtcaatttatagagtgaagaagcagttagacaataaactacatttataagaataagatacatggacagcaaaacagaaacatcatcaaaagtttgacagtacaagagtcattgcacacaagcataaaacactcaaactaaagcacagtgaggcagtggggaagaactaaataaaaaaaaaagctgaagatgtttttcttttattgcatccaaactttaaaatgaaacaaactaaagcttatttcgtttgaatacccaccactacaaggaaaagtaatcacaattcaaattttaaacaagaaacatctaaagattgggagcagacaaaatcatcaatcttaaacacaaccaagcttgaaatacacctctacttcacacgaacatgtaactgtaataaatctcttttactagatattttgctcaggtaagaaatccagcgaatgcaaataaggaaccaaatccaattacagaaaacttgtaaagccaaaaagagtgaaaccagtttcagacaaatatgttccttaacccttagtaaattatttgatggcaagttaaattgagaaatctatgacaggaacctcagtgtatgtcaacatcttcatatatgtgtcagaaagagtctagtagaaacatcaagaaataagcttataccatgtgttctttatcattcatcaaatccagacaaggttacttaatttcgacaaagaatttctgttacctcaacttggacattgactttgatccttgcagagtatgtcatgttctgaagcctagcatgccatgggagaaactcaagctccttgtcatccgaaaagaaagtaggcttctccacagtgacttctccgaacttcaccgttgcgtatctccaatcattatccttcttctttacaacatcaaaagacggttccacaagcatctcaccaaaggattgaaacacattctgaagcccgtgttcaatgaagtagttgtaggagttgagctgatgacttataagtccatacttatcaaagaaagaagttgcagcttttttgcagaaactctgcagaaaaccttctcctagctcagatagattgatctccccagtagtagcctcgaactcttcaagatccttcacatcaatgtccatatctggcatacctcaaaacacactgtacgaacaaaaaccctaaacaaagacagagaaattgattaaaaagctgtgaaaatcatgaaccacgaaaatgcaatcatgcgaatacaaacacgaaatcaacaactttcccttagaaccgaatcattctccataacatattctccgatgcttaaaagcagaatcaaagcgtattacctaaaataggtaccttgattgcttaaagctggcacgatggagtaaaacggcggtgtcggaggagtgcagagtaaacgtcgccggaaaatcgctgagaatgcggagagattcgacgtagaaaacccttggcacactttttcagtggttaagcgaagcagtcaaagagaagtgaagaaattgacgtcactagtactagtagacaatattattaaattttgctctttggtatctatatttttatgtttaagttttattttatttttattttaaagtgaaaaggaaatatatttagaagttcacatgacataaaatttgtaacatctttttttttttccaaaatttgtaacatctacattttggtttttacatctaattcgatttggttgtttggtttaataaatttcatatataacttaattttgaccaaaacacaaagaaaaaaaacaacacataattcactaaaaaagctcagagcaatcccaatggtttaaaatcaattaatttttaattttggatcttaagcttattttaaattaaaatgttgtttttactaagttaagaaaagttaggaagaagtttaaccaatttctacttcaatggttaagaacgattagaattttaagaaacaacaaactatttcaacacaatgtctacccactcaaaacacaacacatatgcttttcttagttttaagaaaatatcttaataaagatgtttttgtttaaccaaaaaaaataaaataaagatgtttttttttttggtgagtgacggagaggcttaataaagatgtttatcttagctaaagtttattggtttcattaaatttaatcacttttatacctaaaaattagctaagatacaaagttggggttgctcctacagtttagaaataatcatcaaatagttaccaaatttgggacatcataattatgggtagtttgatttattaggttaaatctgatctaattatagaaatataatatataagtaaataaaaagttattatataagtgtaagtattgagctctgttttttgttttattatctctgagagtctgaagaagccatgcttctgtagcggtgccaaccaacttggaactgatctttcctgtgaaaaatcgtaatcatgacatcgacctactttctcgtctctttctttctacctttctttgcttcttcatctttctctctttctcctctcatatattctctctatgcaagcaacttcatcacgataacctcttatctcctcagcc

SEQ ID NO: 2861 - DNA, 3000 bp, Unknown
  misc_feature (1)..( 3000): cDNA_ID_1010811_gDNA_ID_1620610_Annot_ID_161881 3000 nt of promoter + ATG
tcatgactccattttatgattttattggttctgtttttttcttcataatgcgataactcataactccgttcaatcgctttgttcaaataagaacactatagcactactatatgttcttcatattcgtgttctttaggaacatgtgaatcaaaaacttcatatttctcgtatagtaatgatcgcaaaacatgttcttgaattagttataaaattctcataatttccttcagaacattaataaactactagatatatgagaaatgagaagggatgaggaacaaatttctatagattattatagatcttgcacaacaatgggacacaaagagtaaaaacttggaataaaaaggaaactaatcataattatcaagagatataatcaacttaatgcgaatgattcttttgatcctttcctccacacgcctgagtcacgaggcagcctcacaatgtaacgctaggaaacttgcaacgctcatttcctgtaacaagatagtaaccattacaaattacaatcataagaatattccagaatttcaccaaaaagttgaaattaaagagtatttacacgtctgtgtagagttttcttgtgagacaagttaagagaaacttaccagggttggtcgtggtctcacgagccaaaccattgaagtagcattgagagctttggttccggaactgagcccagtacgagctaaacgcatagcttgcatgccaagtaaccgtcaccggtgcatagcattctcctcctggagccaacgctgcacatgttgcattgcttcttccgcaagcaaagttaagcgcctgccctagctctgcctcatcggccccatcaaccgccacacaccatacattacctttaaacggaacattgttactcggtttaggcaacgaatcaaaaccagaaaacgatcttctaccgctgaaatcgatgtcgtagatcggtgtaccgtcagggttcaaaattccccaatgtctctctgttcccgaaccgggtttctggttttcattgaacaaagagaacaaaaacgtcggtataggtgcaccgcgcctagctggtgtaccgagtggcgggttagcagtcatcttcttgatcaaattccggttatacgtcgcggcattgacaatattagctccggtttcatggatatcaccgtcattaggccacccggtttcagagattgcgagactgatattcggataaccgagcttggtcatcgcaaagataaccgaatcgagcatctggtctagaagattggtgtaaaccaaaccggtttgaggatcggtataagtagaattcgattcaaacagagcaaaatccaaatggttattaaccggatcagtagaccaagggaagtaagggtaaacatcaaggaagaagaaagagtttgttccattgagaaacttcaacaacggtaacatcaccggaacagcgatatcttcccggaatgtaccactcgaaggaggaaaactcgaacgaagagcgtccatggcaagaggtgtcccaactttgatgttgtgaattccacgagctctaagagagttcactactttacgcatggcagggacaagattagcccatatttgcttgtcttgatcagaactgtagctgaggacctcgttgccaacgaggacgaatcggattcgggtttgcgggtgaaaaggaaggacattagtggcgacccagttatcagcagcggcttgatcagcacctattgagatgatctggttgttagggaccatgatggtgacgtaaagattggtcgtagagaggagctttagggtttctggatcggcgtcatagagcttgacgtggcctgctttaatggttttgatgaggttgattgattggtaaggaaaaggaagattgttgcctaattttccatagttgatcccaattctgcttgcaagtgctaacactgttctgttgttttgtggaccaatggcagagcaacatgaacctataaaaaaacataagtgagttataaaaagaaagattatggtttaagtaatcttaatgtatatataaggagacttacttgaaagggcaaggagagtgaagaggaacagagcaaaaggagtcattgttttttgtttttgttggagaaaaatgttgagaagagagagtggtgagtgtgatttgggataaaggagaagagagcttgttgaggagtatttaagaagagattaaggaagtgtgtttaaggattagtataatatcgttcatgcaagaaaagcttttagctcaaactattaattgcttcttgaactctcacagtgctttggtgtttcttttttaattagtgtcgttaatgaaaggttaaagaagactggttagttggttggttcaaaggcgaccaagaacgctttgtccaattgttcactcaaacttggtagaacgtattgctatttttttcttttccataattgagtgttaattaaataatatctcatcaacaaattatcatttacatgaaaaaagaagaaatgttgacaattctttgtttccccaacatattgatgtgtattttccagtttgagttatatatgtaaggttcgaatagttacgacggttgagacggacaaatctgtttgtgaattaaaacgcttttgtttatcatcattaaagtttgtagtagtgcaaatcggaaaaaagtaaaagaaatcggtttcggataaactataaaccatttttacataagaataaatttattatgctgtaaattgtcgtcctcttctataaaaatggtttattccgtttcgttttaaaatccattatctaatattttttttcttacttcaaaattttgcattgcatattatctttacatctacacctaaatttttacttaatttttttctattggtatcaaattttatttaaagtatagtataaaatatttgtatttaataaaatatattccaccgtggaaagatatatgaatgataacgttacagtgagttaatatcatttatctgaaccagaactcatcaagcgacatg

SEQ ID NO: 2862 - DNA, 3000 bp, Unknown
  misc_feature (1)..( 3000): cDNA_ID_2175214_gDNA_ID_1620610_Annot_ID_161872 3000 nt of promoter + ATG
taaaaaagagaaagtaatgataagaaagattaagaaattaaaaaagagtgaattttacagttcaaaaggagaagaatcttacgtgtgttttatgttaatgtgggaacattagatggtgaaagtgggtaggctgcttaggctggcctctgtaatcattggagtgagaataagagagaagaaagagagagagagagagagcatgtgcatggcagagacaggaaagttgtgggagagaaaacaaacaaaaggataaaattgtttttaattatcatgtttgattattcttggttaagagactattttaaaagatgatggtacttaccaaaacatggtgtcaaaaaagtcaattattgacttgagaaggttttagacttgaatttgatgtattatgagttgtttatgttaatgaagtttataatgtgtaactaaaaacattgagtatacacatatattttcataggtttgtgttatgtgtgacatataatgatgatacaaatgaatttgcatttttgccttttaagaatatttctgaagtagtctctgctccacttgaagttacattggcaagagtttgagatgcatagagctgaatatagtggctgagtatcaaaagtcttttttcgggttcttaggggacgcgttctagtacatgctgaagcgctttcttgattcctccttgttccagagacgttgtcaagtgtatctcttgcacctgtaatgttaatattttacttaaaatcaaaccaagaatctctctatctatggccatataaatgggtagcttctgagatttacctgtcttccagcacgggcaagaagaacaaacttcccatcagaaggcggtgtctgcgtgtgaacatgcgcatagaatcagaattttcacagagcagagtttattcttacgggaaagtaaagagaaacagaactcacatttgagagccaaagttgtaggtcttgtgaaaccactcttttctcaaatccttgccggttgattttcacagcttctattctgcaatatagaaatgaatattagttacacactggaaccaaaatgttatgcctgaaacatagattctataagtaatgcaattaacaatatccaactcatcatgggttcagaaaaagtatcagccagcaatagctattgacatgtatatattcaatcgcaaatcgaggagtgaacaaatctagtagagtagaggtgatcctagtcacttataataagcagatattatgcaaagagctgactaggactgcatagtaaatttaaattataaaatgatattgtctatatacccatcttcctttaaaagctcttcaagtattgtttctagccctggaagaggttcaattgtatccccattgttcgagcttagcgaaggagatccagtagaactgtcctgtaacaatattcaattatctattaaaaatcactaagacccacaagagacagaaaacacattcattcacattgttttaccttcaaaatcactttgtctaatgtttctagaagaggatcatcttctagttgtttgatggatagtgtaatccttgatttctctctgcattggaacaacttttgattaaaaactatatcatgagtcatggctaataaatttcagtaaccaaaataagcaactcacttgtcaatattcgtgactataacccgaacctcgtcaccatcgcgtagtacatccctaacatcttgaacgtaatcccatgatacttcggagacatgcactagtccagttaaatgataaagacctatacaccaccaccccacataactgacatcaatgtcataagctcaaaacaagaaaaagaaaccaagaaatttaggtaaaagcaaatataccatcatcaaaacgcaagtggataaaggcaccatagtcctcaacagaacctactcttccgttaaacacatccccaacattaacgttttgtgaatactttggccataatgctaacttctcagataaaatcaactttctattttcctcatcagcttgaacaacctaatataaagatttacctcaaattataaacaatatagagatcacaaaacaagccaaaggagaaaactttacctttacaggaagtttagaaccaaccaaagtcttagctatctcatgaatacttttctgaggctcttcataaagcaaaacacaaaccatcgatcaatgtaaaaatcgatactttaaggacataaacatagaaccttgtgaagaagagagagttttggttacctttacaagaacgggaaggacttaattgtggataaggaagaaaacccacaagagaatgaaaacgaataagtaagccaccaccattaaagccttgaacttcaccttcaaatgtatcaccacttttacaataagcttttgctgttttccaatcgcttggtcctgcagctgaagcttcgtcggaggtatcacggagaagagaattggaagcggagaggactgaggaagaggctgattgatcggagtttctatcggtatctgctgtggcggagcttgagaaggatttgactatgcagacgagagagtttctattggaagaagaagaagacgaggaaggaaggagtctaagtgggcaagagaggaaagtggattgttggtcgaagagatgagaggcgaatgaaacagaacctaaagtagtagcgccactaaaaaccgccattgttgcgcggtagagcaaaaaagccacggagattgaaggtaatgatggttaatggattttgccattttggataagaaagtgagagactggagatgaaggtgacgtggcatttgtcagctcacaggtgctatattttaaaacatataggatcaatttgtaaacattggataattagagggtttctttacaaaaacaattctaattcaagcaaagagatcaaatctttttcctcagtgtcgtcgtcttcttcgcaaagcctttcaaaaacccttcactactctttctcagagtctcaagcatcattttcccgagaaaact

SEQ ID NO: 2863 - DNA, 3000 bp, Unknown
  misc_feature (1)..( 3000): cDNA_ID_2175236_gDNA_ID_1620610_Annot_ID_161880 3000 nt of promoter + ATG
gatgcatcgtacatgcatgtattgttatatttttatataaatatcgttgaaattggtattgtgtcgtgtaaaggtggttataatgtataataattcaaaatttctcttcggtaatgtgatcatttcttttacttaaaaacatcctcttgttaaaagtgtaagctcgtatactcaatcaatagggcaatacttctattgtcgacaaaacaataactattttgggttttgggacacccaaaaaagggaaaagttcttacaggacatgcagacacgagaacagactgtcacatgcaatgctgatcgtcattctcattcatcaccaagtttctcacgtccacatatgtaaaagcagataatgcagtttcatcatttttttatatatatgagaagtgtaactataaccatatcgtataaaaaatctctatatatagatagacatagatttaggaaatatttctttcgattttcttccaaaatccagcagcgccgtcaagattcttaagaatgatttagtcacagctcatcgatgtattaaatgattataaaacaaaatcacacagctcatcgaatgcttttatgctcaagtgctttgtctactttacattacattcataaaacgaaaaaaaaaagataaagataacttcttcttatgaattctagagttttcagtttttggcatcttaaaaatattaagattctgaagttgtaagtcagaaatttttgaaaaagtgtaatcttgtcaacatttgagcatgttatctacacattcttgtatcaccaattctcgatgtagtcgaacttaagaagtagataagaatggcgtggacctcaaacatatattacaaactttaattttcaataaaactacaatattaggttggacgttttaaaatgtatactgtaaaaaaaacgaatgttagaaaattattgacgagatgtacaacaatatttttctaacaatgtattttgtaaacttctgattggcatgacacgctcgatcgcaaccctgctagcgactaatcaaaataaagacgtccattcttttctatttggctttccaaacaacaattaaccattttggaaaatgcattactaaactcacaactccgtcgatcaacaaaatcagaaactgcatctcttctatttgggattaccctcctctttgcaacaaaatgctcatgcaaacgtatttcgcagaaaattacccacgaaaatttctctcaattttgcttatactttctaaatttcgagaaataatatttttcttcatcttttgtaaatgcgcttctttctgttagcaataaactgtaattataataatttgtttgcaaactaaaacaaatgtactaaaatggcagactaaatttaataaccaaatagtgtttattattgtcatgtcatacaccgaatttacgccatgtagaagtaaaagatcaaattaaataacattactgctgaatttttcgttagtataattaaaaagagaacatgtataaggtagactgtatgtagtctatgtagatgttatataaatgattttttttttctttcaactatatatagattagctaggtcggttgtattacaaaattaaatagtagtaatattttattttaaaagaattgtgttgaaaattttgatcgatcgcctctcgctctttaataagccattgactctttaaaacaaaaaaaaacttgaacaaattccatttgtctattattttaataaatacggtgttaaactaaaatagtataaaataatatccaataaactgtatgtttgttgacagaaaagaatataatgattttaaaacttcaaagacccaagtttcttttgaccaaaatctattgccttcatttattataactcgcatactgttttactcatacagatcattaaaaaactataagcaattacataacttgcttacaatcattgaaatagacgcacatgtttgccggaatgatgaaaaccatattggtcacacccttcacctaacaaagggtgtgatcaccaaaaatcacatcacttgcttaatttttcataaaaaccgatatttctaatgatgttaattggcaaatatgataatatatgaaatatttactttgaaatatgagagtaaaaaaattgaaacaacatttcttttgttatctaattacattacgcaagttattttggttcaagttaccccaacattgcatgttatcatgttatcaatcaatacaataatcgatcaagttgcatagcataatagcatactccatttatggaactataattactcaactcgagcttcgaattatggtggaaagctgcagcaaagtattgcaatgaatgcggcatctatagctatgccagtcggtcaacacaatctataagctatagcactactatagtccttgtggtcctactcagccaccacaaaaggttcaaggcttcaagcttcaaaggttcgaccacattcattcacaatcatcatttaacacataaataatctccattatcacctccttaaattatgcttcaaaaactttcttaattaccgaccatactaccaaacacaaattatgattccaatttaatctccattattacaaccaccttccctcaataataacctcaaatcaattaaacccaaatttccattattatcatccatatctttaaaacactacttattacaaacaaacctaatccctttattcatacattattacaccttttatattttcataacaaaaacgcgtagtttctgtttttaacggaacgggacggaaataataatatggttagatttataatagtaatgatctgttgaataagctaagtaacgacacctcactcttcgcttgcttccattcatcatctctctctctctctctcttcccaaaaatcaaaaaacagaaaaattaccaaaccctaccaatctccttcttcctcctcctcctccttccttcttcatcctcctcctctctacgcgccgcgcgtgttctctaatca

SEQ ID NO: 2864 - DNA, 3000 bp, Unknown
  misc_feature (1)..( 3000): cDNA_ID_3070259_gDNA_ID_1620610_Annot_ID_161878 3000 nt of promoter + ATG
tgtattaatatttagcctactaactttctgacaaatttaggatcaattatgggattgacacattaaagtttatgtttttgtgaatataggaacatctcacagtacttacaaatttaagtacttctatctcttctctttttaccatattaacctttatattgttggaaaaaaaaatcaagcagaaacgtcgattttttctctccttatgctttcttcattcttccttcttcaagatcttgggtcttgagatgcgatgaagatgatttaggatttgctcatgattcacaattagattgcttttagttattgcgtacatgattgttttgaataaattttcagttattcacaatcaatgaatttgtgtctataattaaagccattgggttgcctaaacatcatcccttagggtttagatatcttgcatcaaatcttatttaattaattccattggattcatcgaaaaagagtcatagaaacgttgtgtgaatcaacggaggaaaaggaaacgatattgatggagtcaaaagtaatgattttgattgagtgtggagtccatgttaataaacaaatttgattatcacgacggagaggattgcagaaggtggagacagtgaggattgttgttctcacgacggagaagacgaattgatttctcatcaacacatttgagggcaaaatcgtcatttctcgaatcaagaagtacccaggcttataagtccaagtagaatgtgtttttcttcaaatttttggatccaaatatacccatatgtacaaaagccccgacaatgtatcagtgtttttatttttcatcatgtgcacaaaaaagaagagcaaatgctaatttatagtgagtaacaatgagatgaaaactaataatgataaatctggttacagatttaattcattattgtgagcaaaggtgcccacttgtagttaattttgtttaaacaggaataattagtgaatactataatgagtatattccctaaaaggtgaagggtttgtaatcttcttatgatggattagtaacagcagcatctcgtttgtatattaaaagtattttcgatagatcaagaaagattaagcacttgtcatccacccacaactcgatctaatttttttcatttaacatttctggatcatgtttttgagatttgatctattaatattagtgtttataagatgccagcgaagtagaaccaaatgtgaagattatacagtattagaaattactgaggtaatactgtttatatttgtgtaaacttgctatacaagtctctccaaacgaccaagcctatattaattaggacttgatcgacgtacctacgttccaatactataaaacctaataaaattaaaggaaggttttcatatcccagttaaaacattttacgtttgatcgaacatgaaaacaaaaaatcgcctcaaaaaccctatttatggattagagtctcgtgttttcgaagagttgcgttttttttttttttaattttctttggttcaaagaaaggaagagtttcgtttagaatttgaattttagcatgtacttactattcaataaaagaggtgagaattaatggagagaaacacgtgacctgaaacaggtatgatcgagagatgtcacaagtgtatttgtacttgaaaataaaataaaatggacagctaaaattgtgatttcttaaaattactagctacgaacctttctttttcattaaaccacaaagtacgttttctccttttcgtatatcttgttaagttcaaaaatccaaatgctttgatctaaaaaaaaaatattaattctaaactcttcaatcaattatggaaaaaaaaagaggctcaaacgaaattcgcaattcgaaactgtcacatgtgtattcgttatttcgatatagaaacctcaacttgaatataatagtttgtttgtttgcttgaagttaatctctctcttttttatcagctaaagctgcatttataaaaattctagtttaacttttaccatttgctataatttagagattttaacaagaaatctggcctagtccgcaaaacttatagaataaatcaaacattcttcaatattttacacatccacaatacccaatccaagaaatggattgcagttgcaccagagattacatgtctcgttttagtttgctagtcactcaaactcacaaagcataaattgtaatagaaaatagaactttatttaaatctgaagaaagatatatataaaaaaaaaaaaaaaagaagaagcaggctccagttttgatgggagaagaaaagagagctggcaacagctattcactgatagaccgatcactctcttctgtcccgcactcttttcttcttttgtttctttcttttcgacagctttcatttttcctccatttttaaatttgaattattttacagtcataaaagtacttcaaacgtatatgtaaataacgagcaacaaaacaattaactacaacaaaactagttctagctaagagaattagttagaaatttttattataatagttagtatatgtttattcataacacaattaattaacacacaaaatacatgtaatttcctctataccctcttcacatataattagagtagtgctttaatttaagattaattatcgatttacatcattaatgatcatctagtcttacacagagagtttcagtatctgcatgagattatataaaggaatgtattcatgtttttacttctttttattcatggttaaggatgatacattataattataaatccataatctatgaactcaactattctttataaaaaaggaattaaattctgaaaataaacaactgtagttggcttcccaaggctgctgcttcacctataaataccctatcctctttgaaaactcatctcacatcacaattcacatctcctcgaacaaacaaattataaacccattttccttcataaatttctaaaataaaaccccttaaactttcattcacatcatccaaccccca

SEQ ID NO: 2865 - DNA, 3000 bp, Unknown
  misc_feature (1)..( 3000): cDNA_ID_3070306_gDNA_ID_1620611_Annot_ID_161895 3000 nt of promoter + ATG
ctaatggcggtagactctgtactattttcaagattcaaaatcttgatctttttattgttctacttcagatttcactccatcactcggaaacactcctaagagcagcttctcagataggccaccacgtttccacaaccttatattccacgagaagaagccttcccgaggctcgtcttctccagcgccacttccaaggaggaagaagcttggtgagcttttcagagacagtataagagaagaacgagaagaaagcggttcatcgtcagctataagcactccttatctatcaggtgctaactcacgcgaattcaatgacaccgccatcgaaaaggaagagaagaagaagtctaactggcatcatcatcgttgtcttcctggtttctcttcatgtggtggaagtttcatggagaggaggaagaagatgagttctgaaactccagttgttgctgtgaaatgagatgtagagattatgaaatttggaaatgttttgtatatgaaagaaagagagggagagatacagagctctcagagtaaaaaagctctgctgaattttacagggcactctattatctttgatgataagagattgaatcaataggtgaagagataatgtaaaaaggaagaaaatgagatgcttgtgttttgataaattttgggacttggcttatgaaatttgtcaccactaaacatatgtatttaatagtttaatcaagcattaaaatagctgataattaattcgtgcactaaagaattttattcttaggtctcaaactctcaatagttaactcaatacttaatactgtacaatttattattccttttatcatattaaatcatgtattagggaaacaatttcatgataaaatttataaatattgaagaatgtagtatattatagaattcccaaaaatttatccaaccacacaaatttttttttatgtccattctgcccgtttttatttatttattaatattaaatattttctaccgtttttaagtttgagagagaaaataaagagtaaacaatgaaagtagaaaaacaagaaaaactacgactaaaagaactacgaatacgagataacacgataagaaaacaaaacgaagcaactaacaaaggtctcaagaggaaacaccggttccgaactgtaaagctctgtcatttttttgtctaggttttattttattttccccgattccgcagttaccattcaaaagcctcgatggaatggaaggattaaagaaaaacaaaataggaagtagaagctttaggtgaaagttaggtaataaagaatcttgcttgttgtatgcttcttgtcttcttaacttatttggcaattctgatgcatacattctacttgaacacacataaactaacaaaaataaccataacactaatttttaaagattctacaaccactaaagatcttagcttccattcaactccaagcttcgtcttttttttcttcttcctagatctcttacgcaactaatgtccatgcattccccctatatatacacgagctagcagaagtttaacttgaatatatcaaaaccgagttcaattcactaaaccaatgaaaatgcaagcagttcttgttatcttggttttctccggtttactttcggttaagacagcgttagcagcacgacatgtgatcggcgggagccaaggctgggaacaatccgttgattttgattcttggtcttctgatcaatctttcaaagtcggcgaccaaatcggtacgtttctctctaccctcaatttcataatcaaatcgaccggtttaatactaaccaatcttttttgtttcttgttagtttttaagtattcagaactacacagcgttgtggagctaggaagtgaaacagcatacaagagttgtgacctgggaacatcagttaattccttaagctctggaaacgacgtcgttaagctttctaaaaccggtactcgttacttcgcttgtggaaccgttgggcattgcgaacaaggcatgaagattaaagtcaacgttgtctcttctgactccaaatccgcttcctctccttcaggttcaggttcgggttcggattcagggtcgggttctggatctagttcaggtcatgggttacgtgcttccactggatacatgttcgttgttggatcgttggttattggtcttatttgggcttactaataattgtttagggcttttttgtaatgtatcgaatatatttggtggggagagaataaatatttttggaattattaattcgtacttgttgttgtattttatatagttcggatatttgcatttctgatctaattttctatatatatcttgtttttcatgttttctcaaccgctactccacttgattggttgagttggaatattctttttttatactttctcatatgaccaatcattttttttaattgtcatcaacattattaatttgaattagtttgttattttctttatctatataaaaaacattattaatttgtttcattccattgtacacaattttagcgtcgtatataaaaaataacatttcagcttcagcacatcaaataaacatttttatttattaaataaaacatttctaatctaaataagacttggatagtttctgttaatactttttttttgtcatcgtaaattttattaaaaacaaaattgtccatagaaattaagcagacaataaatgttgaaattttggatttagatttagcggttttgattgatataaatctacttttaatatttttttttgtcatgatcttatttttattttgaaacagaaaatattattttaatttaaggagtatttaattcgttcgagtttcttctcccaaaaaaaacattttaaaaaagacggagggagcgagagagagagaggacaagtgggttgctgaattgtgcagaaatcgtcgtcactgatcacttccgattccttttttttctccttaaatcgcaattttcactctcctttaccttcgccgagaaactcaatg

SEQ ID NO: 2866 - DNA, 3000 bp, Unknown
  misc_feature (1)..( 3000): cDNA_ID_3070290_gDNA_ID_1620611_Annot_ID_161917 3000 nt of promoter + ATG
ttaagtctttaagacttgtggtttacttggggaaaaattagatagaagaaagaggggtcaaaaaaatgaaaataagaaagagggcttatctgtaaaaaaaacaaaacatactgtgcttaaattgaaaatcacctaaaacaaaagcgcctccggtatatagacggtggatttgcagcgagcaagtaaagaataacttgaaccgggtctgatgtttgttgatgacccttctctacacaccttgaaacgcagacgactcgagatcaccgattccatggaagcttcttcttcagctcaggtctaacttcattcttcttcttcttctccctcattgatctatatcatctgattcctacttccatttcgattttcatttgatccgaaatttttctgtttcttcttcttctatatttgggggttcccgcaaagttttctagggtttttccatttcttgagtcgaattcaatatttatttgatggattttcgtaaaattaggctaaaattgctgatatgcgagagaaattagggcgagaggttcgtgttttcgagacttcgagtatctcacagagaccaagtcaagtttctagtgctggtaacttttttggatctctgattcttatattgcatttgatctgaatttgaacaagtcttgtgattgattgtttatgaaaattccacagacgatgaatctgatgatttctacgagttcacacctgcagatttttaccgccttttggctactaagaaagaaggtaacatgttctgaagaatctgtatggtttagtttacattcttcagccatttccatgaaaattttgcaaatctttgatcaaatccaactgtgtttgtcataatcggaatgtattgcttgctctaaagaaatcagtaccttggttgtttaattcttctaacatgtaatgttaaattacttatacaaaagataaatcgttgaagacaagaaaaatccgggaagcagaagaagctgctcgtcgatcaaagctcactaaggttctttttactattggtttcatgtttgggaactagttttatcccactgactatctatagattgatactgtctaggctgtaatccgggttcgttttcctgataatcacacattggaggcaacatttcatccatcagaaaagatccaaggcttgattgatcttgtcaaaagagtagttgcccacccagatgttcctttctacttgtgtatgtttccatcactcagatttcagattttacatttgtcaagagaagaaaacttgataacgtgccatctttttgtcagatacaactcctcccaagaaacagataaaagatttctcacaagacttctactcagctgggtttgttcctggagccattgtctacttttcaaacgatcaacctaaaggttagtttctgtcattaccttcacccaataccatagtctttctctggggaacttttttgcattgcgatatgtacgggattatagatttagtaagtgagatctttttgagggatggataactaaactgcacgaggaattgtccagaaactttcaaacttaggaatgaaatagtttgataagaagtttaggatcatgtgaatacatagggaatactaatcttagaaagctggttaaattaggtataatattgattccccttacatactaaagaatttgttgtgaagaggactgtgttctgaacttatctttaaaaaacccaatggtttttttgcagatgatggtggtagttcaactccttatcttaatgaagagattttgtcactgaaagatttagaggccatgaccaaagccgtggaaccggttgaatcgtcatcagagccagccacggttgactctagtgctgtacctgttgaacacgagcgtaaatccacagagaagaagaccacaaagcctaagtggtttaaaatgtgatttcactttgtttctcacataacaagaaacatgttacctttgaaaagtgacagttccagtgtgtcggcatcacttcacagtagcaatcttattgtgtcggtatgggcttttaatatcttggctcatttggatttcttgggcctaaaagttactttcattatagcgttttcttacctgtctcgttccaaagtagaagaaactaaatgaatgcattgcgctacgttatattagatgaatgaatttggtattataacaaacaatgacgatttattgcatgaattagtatataacactaattatgtcaattgggttaaagacattttgtgttaacactattttgtggtactcaccaaaaaaaaaaaaaaacactattttgtggtggctgataaaaaaaaaatgatagtagttgttgccttgttgggcaggtgaaatctaacggtcaaaaatgaatatgaaactcgtaaattattgggaaaaaaaacaacgtcgcatttattctttttgactttttcgtttccaaaaaatatctcagcatatctgatcattaccactttccattaaactaaccttacaataattcccttaatggtttcacgtaattataatattagtttcactactatccatttacaaacagtccctttatttttaatcatcagctttctaatttatctatataaaaattcgaactatcaaactccaccccataacaaaattctccaaactagtgaaaattttgtcgccaccgtcgcaggtagagagatctcttctcgtaatctttgttgatccgtttgatttctcgacgaaatctgatccatacaaattacttatcattcaattttcgtattgattctgtgttttattttcgcagttatgttatagcctaagttaagaatctttatcatcttcatgagactcgaattgttggaaaatgttataatttcacaagtaatctttgatttcatgattaaccaatcaatcaatcgtaacacaatgattccaatttcactaaacttcaattttacaggtttgttctgtattttggttagagtgttaaaaaactattggaagatg

SEQ ID NO: 2867 - DNA, 3000 bp, Unknown
  misc_feature (1)..( 3000): cDNA_ID_2175758_gDNA_ID_1620611_Annot_ID_161919 3000 nt of promoter + ATG
ctgtcacttttcaaaggtaacatgtttcttgttatgtgagaaacaaagtgaaatcacattttaaaccacttaggctttgtggtcttcttctctgtggatttacgctcgtgttcaacaggtacagcactagagtcaaccgtggctggctctgatgacgattcaaccggttccacggctttggtcatggcctctaaatctttcagtgacaaaatctcttcattaagataaggagttgaactaccaccatcatctgcaaaaaaaccattgggttttttaaagataagttcagaacacagtcctcttcacaacaaattctttagtatgtaaggggaatcaatattatacctaatttaaccagctttctaagattagtattccctatgtattcacatgatcctaaacttcttatcaaactatttcattcctaagtttgaaagtttctggacaattcctcgtgcagtttagttatccatccctcaaaaagatctcacttactaaatctataatcccgtacatatcgcaatgcaaaaaagttccccagagaaagactatggtattgggtgaaggtaatgacagaaactaacctttaggttgatcgtttgaaaagtagacaatggctccaggaacaaacccagctgagtagaagtcttgtgagaaatcttttatctgtttcttgggaggagttgtatctgacaaaaagatggcacgttatcaagttttcttctcttgacaaatgtaaaatctgaaatctgagtgatggaaacatacacaagtagaaaggaacatctgggtgggcaactactcttttgacaagatcaatcaagccttggatcttttctgatggatgaaatgttgcctccaatgtgtgattatcaggaaaacgaacccggattacagcctagacagtatcaatctatagatagtcagtgggataaaactagttcccaaacatgaaaccaatagtaaaaagaaccttagtgagctttgatcgacgagcagcttcttctgcttcccggatttttcttgtcttcaacgatttatcttttgtataagtaatttaacattacatgttagaagaattaaacaaccaaggtactgatttctttagagcaagcaatacattccgattatgacaaacacagttggatttgatcaaagatttgcaaaattttcatggaaatggctgaagaatgtaaactaaaccatacagattcttcagaacatgttaccttctttcttagtagccaaaaggcggtaaaaatctgcaggtgtgaactcgtagaaatcatcagattcatcgtctgtggaattttcataaacaatcaatcacaagacttgttcaaattcagatcaaatgcaatataagaatcagagatccaaaaaagttaccagcactagaaacttgacttggtctctgtgagatactcgaagtctcgaaaacacgaacctctcgccctaatttctctcgcatatcagcaattttagcctaattttacgaaaatccatcaaataaatattgaattcgactcaagaaatggaaaaaccctagaaaactttgcgggaacccccaaatatagaagaagaagaaacagaaaaatttcggatcaaatgaaaatcgaaatggaagtaggaatcagatgatatagatcaatgagggagaagaagaagaagaatgaagttagacctgagctgaagaagaagcttccatggaatcggtgatctcgagtcgtctgcgtttcaaggtgtgtagagaagggtcatcaacaaacatcagacccggttcaagttattctttacttgctcgctgcaaatccaccgtctatataccggaggcgcttttgttttaggtgattttcaatttaagcacagtatgttttgttttttttacagataagccctctttcttattttcatttttttgacccctctttcttctatctaatttttccccaagtaaaccacaagtcttaaagacttaaactattaaacaaaatgaaatgtatgaaataaactatttttttttgttgaaatgtcaaatttataaatcaacaaaataatttatatacaacttaatccatataacaaaaaaatcaaaaaaaaaattaaaataaaaaacattggcatctctcataatctaaaccaatattaaaaaatctcagagatttggagtctcaaaaaaatatagagaaattttgtgttcttcattttgtaagtgcaagatgtagtagataaatatctgaaatgccaaaataataaaaagataagtgagcaagttaaacaagtgaaatggtaaaatgatgaagtttggtcgtctaatcaacgatcaggtgaattttctagcaaatcaccattattcattcaaaccatatatgtaaggttttaagcataagcaacataaacagctcaagattcagtgcgattgttgaattttcgaaccttatgtctagttttgttatttcgaaactcatgatagattaatgaatttttgagaaatatttattacaaaagagaaaaatatttagttttgtcttattcatttgtaatatataaacattaaattattttgaaaaatacaaagaaataaatgtaatcattttgtacatggcatatcgacaagaaatgttattacataaatatgtgccatctaggttgtacaaaataaaagtatttacccacctgaaattaataaagtaccaaccattaaaaggaaaaaataaaacctttaaagaaaagtattgtgctacgaaaatgaaaatttattaatctgatagcctcttcccacctaagcttcttctttgcttattttaattttatctttttgttgtatccttcttgtctctattaacgctcatctttcaccttcaagctctaaatcgaagcaatcttcacactccacaaaccctaatttcaatgcaatcgcaattcaccatctcaatctctcttcatcttcctctatccatggatccataaatctctgtaacctcacaaaaggtgtttcca

SEQ ID NO: 2868 - DNA, 3000 bp, Unknown
  misc_feature (1)..( 3000): cDNA_ID_2175764_gDNA_ID_1620611_Annot_ID_161922 3000 nt of promoter + ATG
ccgatataataaccattaccgtcctttccaaggtttaccaaatatgaattgttattgtcttgtgcgtcttgttatgttctcaaccttatctttaggcaaaatcaaaatcaaacgattcctataactaacatcgctatctgttagtgttttttgtatcatcatagttggattcattttacaaaaacttaaggtgtcttaggaatataattaagatttgtttccaaaaactaaaatatttgaggagtttgaacagtataacgcatatatatatatacttctaggccaaagtaatgttccttagtggaaaaaaacaaaagttccttagtggattgccttagatatttatttcaatagtattaattgtattaaacacaactctctaaatttagtacatgttatggatatattttgtaagttagcatattattaatcctctaaatttacaagtttatctgttaaactagtcacatattatgctgaattgtatttacaaaaccttatttttagtgctttttttgaaaagtcttcccaagccaaatctattataatatctaagtacataaaatcttttaatatcagaaaaaactcattttccaagccacataaaaatgttcattatatctttgacatctaagatttatttgatttttacaataaatcttattatttttgacattaatatatttcaatttaaaaatcactattaataaccaaaaaatctagttaaaataatttgcattttttttttctaagaacagaaatacaattgccaacatcaataacaatttattggcaaaacaattaatatctatcaaccaatggcattataaacagaaagcaaataattagatttgctcaaacatgtcaatcaaataaatcgcgaaagggaatccacaagaccaagtgtgagtagaaaatcttcttactagaagaagaattcagcttggaccacccggcagcaaacacgctcgttccaggctaggccattcattattgtcgcagaccatgactggatgagagaccgagccattgcttactcagaagagctaaggaaagttaatgtagataatctcgtgcggccgtgctagtgtacaaagatgcggttcacgagtttgctaccctcaacatgtttcgtaggactcgacaagctcaggcttgtccagaagacattgcaatctgggccaagaaatacatctctctccatggccacgagttctcatactagtgttttgaaactccatgtggcaaaaaaggtcaaccaaaagtaaaccgtgtttttacgggagacaaagcaaaagaacacatgcagaccgaaaagattgatatcatcgttgcaatcatcgtatcatgtgatttgtctcttctatttagagttcaagcttctgttgtatatcatcgtatcgagtaacgtccattttgattaacccaaccaaaccaaatgcagaccgaaaagattgatctgtgtaccaaatcttaacttgaattttgtttgatatttatccttgatagtcctaactccttagtattccatcttcaaaatcctttaagtttctacgatcgattgattcgatgttaaacttaaaggattttaaaccattggctttgtgttaaccggaaattggattgcatatgcaactacgagtttaggggctaagttgttaattggattgcatatgcaactacagatatttttgattaagaatttttctgtataatcgcattaaaaaacgccactatatcattaatgcatgttaccaatcagagccaatagaaacgagtttaatgaaacatcatattagattgtcaatcattacttctccaagtccagttcttaataaacaagataaacgtttaaattttgtaaattttcctaaacctgaaaagagtttaattcagtttcggccatctatatgatttatttatttatttcattagtaaatttggactgtgttttgataatttataaaaagtttctattttcgttctttttttttccttttctaaaataccagttgtttcatcgttggtaacgttaggcccatagagtccaaaacagcccattaaactaaatataacccgactcgtaatcaaaacacccgaacccggatccggttaacgaaggatctccgatttattctctccctcctcggtttacgtgacgagcctaacctccgtcgcaccgtgcttcaaagttcgatctcttctttaaccgccggttcaattattccgggacatcgcctagttcttcatttaaaacggttagtttatcagtcattcaataatctacatcttttgaatcacaagcttcacggattctgagcaaaagtttaaaaaaaactcatcgatattaccaaattaagctcttagcttcgcattaatggcgagatccaaaaactataaattgtttcctttttccgccatatgtgttatttatttattgctcttccctttctgctaaattactgttactattttaagcttcttccatttttttttttgttcattgactagtttcatttgaatctcatttttttttctctgcgttatttcttgatttgtattgttttagttgtttcttctgtgtagtgattttagatctaagctaagtaatgtatagtggaaaagtttggaaacttctcacagttggactcaatattactgtttatagttcttcatttgtttgaatctattggatactaaaaaaagtttatgtactcttgttttaggagctatatgctttgtttgattctctgttttttcactttcctcttcagcctatgtttaccaaaaagttataatcatgtactagtagttgcttttatgttccataaaaagaaaagaaaatgcaacattcaagctccgagctagtataatctgccaccaaagctctctctcttttacctctgtgcttccagatctatcctcactttcttcaaaatacttcctcatagatcaaggaaacaagagcactttcactctagtactcttgaaagcttgaaa

SEQ ID NO: 2869 - DNA, 3000 bp, Unknown
  misc_feature (1)..( 3000): cDNA_ID_3070286_gDNA_ID_1620611_Annot_ID_161918 3000 nt of promoter + ATG
gtaagaaaagcttccatgcgagaatgcacataggtttgtcgtagaagtaggaatttgcctgtttgatctcagactgtgtgggtacgctaccgatgaagaacgggtacattaggacttgagccacaaccttgacaggatctagattttgaccaacttcaatggctttgcgggctacatagtctgctatattggcaccacagctcacaccgagaagcacacatctgaagtttcaaatttcgagaagtcacagaactcagtaagatttttggtcatatgaaagcaacgatctacaaaatttatctatactcagcaagtgttgttaagaaccaaaagcagaacatttatggaatgcaaactccttgaactacgtgaaagcagtgatcatttaaaaaatgagaaagaaaaaaaaaagacttctggtgtgacatgcatatgaaccacagttgacaacataccaagcacattttcaggaaactgaatcctaagcagaaggttttctcatcaaaaaacaagcttgataatccaatccaagaagattcctggaatccaaaggattgaatttacatatctagcatgtactaagacccagaaattaatgacgacgaaacaattccacatctcataccaatgggtaagaccgtaagaggagaattagcatgagaagtcctgaaagaaagcaagtgtggtttgaataatttcaagacatgataaggacctatcaagactattgaggttaaggagtaagctgaacttagcatcagtagatcacaaatcaaagatcgtaaaggacatcgtataacatatagagttgacactaaagcttagattttcaggcaggcatgaacacacacaaacacattcgtttctaacaaattcttggctctttcactagtttcactacctaaacaagacattgtttttacctcgagggatcagcatgatttgccagccaaggctccaccaaggaagcaccaaaagcatcaactatatgcttattaacttctgatttcttcacctcacctccaggtcgtcgagaatttcccatcgacttattacattcagccaaattcgcctgcttccccagccatttcaacaccttgaacccatcctcacacgcagcaggataccgattctcaggcgcaagcctgtacccgactgccaaaacaatgatgtcacagtgcttcgccatccttctacaaaagaaatcattagccactgagtcattacttccacttacccatccaccaccatggaactgcaacatcacaggaagttttctagagtttccacccgacgacgacggtgcgtatcctctatacacgtcggaggatcctgcctcaggggaggacgaaccagtggtgtaaccgtaactgttccttctagattctaccttatgagacaacaacgaattagacgaacctaagctatttctcctactaagaagatccgatccggcgatgttgttgagagttcgagccttaccggaataaacacaggcggaggtactcggttcaagcggcgtaagagcagattccggaagaaaaattcgtacagataaagaagttaacggatcgatatgaatatctttggttgcaacaccgtcggtgaataacggattcggagcagcgacggattcttcgggtcgggtcgtgacaccaaatggatccgaggaagattcatcaccggaagattgaatccggttttgtaaacggtgtttcaaaaggaacttgaagaagacactgtagagcttcacaccaacgcttggcattggaaacaccttttgtgaggttacagagatttatggatccatggatagaggaagatgaagagagattgagatggtgaattgcgattgcattgaaattagggtttgtggagtgtgaagattgcttcgatttagagcttgaaggtgaaagatgagcgttaatagagacaagaaggatacaacaaaaagataaaattaaaataagcaaagaagaagcttaggtgggaagaggctatcagattaataaattttcattttcgtagcacaatacttttctttaaaggttttattttttccttttaatggttggtactttattaatttcaggtgggtaaatacttttattttgtacaacctagatggcacatatttatgtaataacatttcttgtcgatatgccatgtacaaaatgattacatttatttctttgtatttttcaaaataatttaatgtttatatattacaaatgaataagacaaaactaaatatttttctcttttgtaataaatatttctcaaaaattcattaatctatcatgagtttcgaaataacaaaactagacataaggttcgaaaattcaacaatcgcactgaatcttgagctgtttatgttgcttatgcttaaaaccttacatatatggtttgaatgaataatggtgatttgctagaaaattcacctgatcgttgattagacgaccaaacttcatcattttaccatttcacttgtttaacttgctcacttatctttttattattttggcatttcagatatttatctactacatcttgcacttacaaaatgaagaacacaaaatttctctatatttttttgagactccaaatctctgagattttttaatattggtttagattatgagagatgccaatgttttttattttaattttttttttgatttttttgttatatggattaagttgtatataaattattttgttgatttataaatttgacatttcaacaaaaaaaaatagtttatttcatacatttcattttgtttaatagtttaagtctttaagacttgtggtttacttggggaaaaattagatagaagaaagaggggtcaaaaaaatgaaaataagaaagagggcttatctgtaaaaaaaacaaaacatactgtgcttaaattgaaaatcacctaaaacaaaagcgcctccggtatatagacggtggatttgcagcgagcaagtaaagaataacttgaaccgggtctgatg

SEQ ID NO: 2870 - DNA, 3000 bp, Unknown
  misc_feature (1)..( 3000): cDNA_ID_3070294_gDNA_ID_1620611_Annot_ID_161914 3000 nt of promoter + ATG
acgtcagcggaggcgctgatgacgtcatacccagatgggtttgggtttcgtggaccgttgttattgttactgccgttaccgttagtatcctttggatttggaatttgtgggtactgttttttcaggaaagatattccaaatttaccaaaaaggttaggtaaaaatatatttacagtttccatattcgagattttgttatctaatttgagcgtaaattaatatctccgaataaattatgttcatggatttggttgcatatatataaaaattgtccgggacaaatttttaaaaaaattatatcttagattccaaaataaagtctcaaaataattaacatatagtcaatcaaagtttttatatgctattagagttgtttaatagtaaaaaaacaaaaaaactttggttgactctgtcaagaataaaatgagatttgttctctaattttagcgtaaaataataaatctgaattaatcatatcccattatctctggacttggagctatatgatcagtactatcattgaatttagacacaaattggttataagggtgttcgtttaatatagtttggtattcggtttttacaaaataaatttgaaaatccgagacaaattggatattcaaaataattgacagatcgtaaggtttatttttattgaagatagaatacttttaattattattgtgagtcggtcttaggttgttgagacgaaagttaattataagaatgtttgtcacaacccattactaagtctaaagcatagaaaacttgggatgactaaacttggggtgacttgtacaatatcaaaaatcgagatcattgcctcggacaataataaattccacaaaagtacgagtgactagtgtccacgagactagtggttgaaaattaggacttgaattcattccctctagaagtttatacaaatttcagaccaactttttaattaacactttttttcatttattttttcttgagcaaaataagagaggaagtaagatagattaaaatttaaacaaccacaagataaacatgctttaagattctagttaagagatggataattgaacgaatccaaaccaattggaggggaatggtctgttagatttcacatgttagaggttcctccatgaagtctagagttagactctttcgaaatctcacaaaatgtagcttgaaggatgagtttgacatcaacaatctgttggtccaatagtaaatctcccagatggaggtgttgagttcaaagcatgttgggagggattttttctcctaaaaagatgaatttaacttggtgtaggtctcgccaggctgacctcgcccatatttacaaattacaatatcatcaaaacccgaaggagtaaacaaagagtggtgattaaagaatgaagtgtcattttaaatagctcccacttgtttttctctcgatctcaatctgacagaaactgatatattccactgatcttcatcgattcatcaaagttttagattttaattcagatttcatcttaagggagggtattacgagtataggaatgtgattatcatattaatgaaagttgaggttttaaaaatagcttaaccaaacaaatgtaatcttgccaaaaagatataaaatgagtccatcaacaaaatttatcggagttacaagatcatcagattccgaaaagcttttctgtttatgcgagcggtaatagtgttttttgatgtctccgtcgatttctttgaaggtggccaaaggcgaaacggagacactattgtgcaacaagttgttcatttgtttccaaacatggtaagctgtagcatgagcaactcctactaatttccaaagaattgtgggagcagtctctgtttttagcttagtccaagccagaattgaaatccaagtaataaagatataaggcgatatcgttaatcctcttctggtgttttctgtatgtaaaacggcgtctttcttttgattcgaaacggaggagtttgtgaagggtaacaagacggaatggttctttatatctgggaggaccaagatggggaaatgtggaaaaagaatgaatcgtagagacaatggaggatactggagggtagtatcatctctgccaagaagattcatgctggagaagcaggccttgtcggctacaaatactcactagagtactacattggaaaacaaccaaaatggcgtaaaagagggttggttgatgcatgaacactggcttaagtcttctgatgatattaataactacgagctggtaagagtatatatgtacgtttacttacttggtttccaagttattgagactcttgagttttggtttttattgtgacgacttctgttgttttgtttgagtagggcaattatgctatgtgcaagatctatctgagtccacacgcagcaaagaagaagaaaacacacgatgaagagatcgacgatttagttcaatttgtggaagcagccttagatgtttctttttatctacttttgctgtccaaagtcagaggtctcattgtctttatatagaatttcttgtatataacattttccactggttgtatagaaaaatcaattttagtcttttgtgcttattcactctaatcaaaatctctaatcaaggtgaaggaggaggtggaggaagaacattttcatcttgctctctaagaagatccaaaatctctgcagggttgttatcaacacgctcttcgtctctgtcttcctctccggatttagtttcgtttatgggcaaataatcaaattcgggtttaatcttccaaaccgttgtttccttttatattacatcatttccttttccttttttattattgggccgaagtagtttatattattaatgggctttaaacaagcccatattcaataattgtcggccaaaaaaaaccctctcttccaagttccaaaatcatttcataaaccctaacaaacccctaaatctttcctttctcaattctctccttcgaagcttttttcttgtgaggtcagaaaagaaa

SEQ ID NO: 2871 - DNA, 3000 bp, Unknown
  misc_feature (1)..( 3000): cDNA_ID_2175700_gDNA_ID_1620611_Annot_ID_161902 3000 nt of promoter + ATG
gcagctgaaccagaaatggaagagaggaaactggtaggtttatctttctctgttcgctggtgaacattgtattttctccctagactatgcaattaatactagatttagtttatgatcgatcaagttgacttagagaaccaattgttgtaccaagtgtgaagtgctactagttcttggtctgctactaagataataacatttagatatgctgtgaacacagtttgactcgttttgcagacacaaacctcagcttccagaccgatacaaagaattgacttttttttgaggttacattttacatggcggttaatgttggtttcactatttgcagatgggtttcaaatggatattcctactctctctcgctcttctccaagctgcttactacaggcgactaaaatggtcggttctcaagtcccgcaagctggttcttgacgtggttaactaaagcgccgctgaaaagcttttgcattggcctggccacacacagtcgtattttcaacaaaggatgttaaatagagaagagcctttctctgggtaataacgtatcatcatttttatgtgtcataaaaatctttgatgagaccagttctcacctgaaggtgaaaagacctcatcgttcttctttttccttcgattattactagagagttttatgaggataatcacgaaaacttgtttttttcgcctcataataatcacacatgattttgagattatatcatttgttatgtttttcctcttgtctcaataaaaaataactttgtactctgattttgttgtctattttcggcatttcttgcatctggctttggttgcatgaggagaatttatttcaggtataacaaaaacacaattaatggtactcatttttatttgtatggtatatatggatattataacagaaaagtagtaataataatcgacaaaatttcaacacattatactgaaaaacttttacaaatgattttctccaattgccctggtaaatatataattgcttattcttcttctctggaataaatatcacctaatgacctccaaatttataacctatgatcaaatgtaactataaatagagagttttactcttatggtcggtcttaccattacgaacttccttttgcattcccgatcaagctctcactggcttttgcagaacagctgagagataaacttgtgcatcagccttctctccaataacccatttaagcttcttatacccaaacctctcaatcatacgtgtaagttctttcttcttctcatcattagcacaatagaagttatccaaccagaacaatccacggggtttcaaaacccgatcaagatcgaacatcaagaactctagcttctccgctttaccctcaacatctaatccgctagaagcatgaataagatcaaacacattgtcaagaaaaggaaatctatggtctaagctcaagaacaacggaaagagccctctcgcagctataaactcactaaacggagcaccattattcaaagtgttagtgattacagtcacgttcttctcagccattctcgctgcgaaagtccctgatccaccgctaatatcgaacccgattcgaattttcccacttcctaaacccaacacatcatcaatcaagaaatcattcttccccttaaccttcacaaacctatctttctcaacccctaaatcgaaacaaccaacacattccttgctaagtttcttacctttcaagcaatcaaaactcttgcaaccaagtccactccaattaacactcttgttactaacagatctccataacgaatcaggagacttactcaaatcttgcttctgcaccgttttcgccaaacaccgtctccgcggcaacggctcacaagcacgaagaatcaacttctggccaagactccaatcatcaggacatctatcaaacaccttatatgacatatactgagaaagcaaatccgtagatttcccacaagaatgtccaacggaagacaccatttcagtgatcccggtacgcgaatctttccctaaaggaagctgatgacgctggaggaacaatttgagctcaggaacaatgttaggtcgagagatatcaatagattcgtaaccaagcatctgtttctccatctgagcaagcttgcgttgagacgaatcgatttctcggagaatcaaagagagatgttgagaaacgagtgagatattgttggagctgtggagaagtggcgagtttgcttgggaatgagaggagaacgcgtataaggcgaagagatttgtggtgacgacggagaagagcatgaggaggttcacggcggatgaacaaattgatgttcgtcggaatctggctgttccatcgccgatctttaaagatacagatcccatcttcaatgcagtgaaagagagaagaagcagagctcaagctaaggtttgaggtctcactatataacttggatcttcttcattggatctgcaagaaatttcagattccagcttgatttaacaaaaaaaaactaagagtacttcgatttgaagaatcattcagatctagcagaaagattcaacaatagaaattgcgaagaacagaaacaaaatcaaggttcatgagaattgcattaccgtgatttcagcagaagagacttggtgaagtttactggagagtgaaagaaatcgccgacatgactcgagagtcaacacgtgagtgactatatgattctatttttcatgggcttttttatttttaattgggcttagtttttaatcaagcccatataattacaaacaaaccttttgtctcgttaagaaggttcaaattaggggaaattaccaaaaaaaaaaataataatacaaaattggaaaccaccggcgtgatttctggttggggaaaaaccaccggcgcacatattttttcggtaatgagagattcttcagcgacgtgaaatcaaatcatcactgtttctcgttgcggtctatatgaatgagatgtctctttcaatagctctgcataaacacaaatg

SEQ ID NO: 2872 - DNA, 3000 bp, Unknown
  misc_feature (1)..( 3000): cDNA_ID_3070298_gDNA_ID_1620611_Annot_ID_161904 3000 nt of promoter + ATG
ttttgtagatttaagataagggtaacaattttatttttttaaaatgtatattgaacgattcattttgtaaaaagtttttaacaactccgatccgccgatccccgatacagatcatgttgatcaatcataccatgtcttacgacgtatcgccatatacatctatgtctatggtacgcgtggggggctgatggtacgtcaatatatatgtcagtcagtcagtctatatacatgacacatatatgtacatatgtgagatctatagaagaatattttctaaggattttatataaccacatccatcgattgtatgtatgttgcattgcattgtttttaataccatacacaaaactattatgactacaaacaaaaaaaaatatagaatggaagggatagaacaatcgttttgaatttaaatcaacatccacgtacatttaatttaaacaacgaaagcattaattgttttttttaccttgcatatgccatacaaaaattacggataatccggattataagtttataatacgatgaccaggaactattagattagcaagagcatggatggactcaacaagagtaaatataaaattatggtcacttaattaactttaaaaatattttttgttgattagcaaaatgtatggtccaacacataatatacagtattaaattttgacggccggcaactataggcgaagaaacacacacgttgttgaatagaagcaatgtgaatatatctttacccacatagatgcatacacataggtccatatgataagttaaatggtatgtttatttccccaattttcttttatttttagttgagatttttatattatatgaacgcatgggtcctacgtaaacacacaatatgctgtttcaccttattcgaaggctcttattggtcctcgtaatctccgaccaatcaaattgcactatgtgtcctccatttctcacttgaaaagctgttatgtcatgactcatcaaacattcatacttacatatgcatgtctacgttgagcacgaaaaaagaagaaggaattatgcgcatcattagcatgccgatatatgtgagtaaacgaataagaaatgttagcgatctaatgatatttgcagacataatatagttgttaaaaaaaagaaaaagactaatgtattaattaattgttaaataaaacaagcaaaaactgaaacgagtagagtttttattttttaatagattttatcaaaaaaaaaagactgcgtctgcatggagtaattaatactgcgttgaattataattttgtttaggtgttttgaatagttttttttaatctatattttcacaacaacttttgttaatatagtccagatggatgccacataacaaaaggtttttttctagtaacaaaacaggattagtaactaggcatacactgatacacattcggttcggttcaattcttcgggttttgggttattcgtttttagctttttagcatccataaggaaaccgaatgtttttcagttcagttagtcttctttctttgttttgtgttacaaattaagcgagcaagttagctctccagtttataatctctctttgttgtcactttttggtatgtaacttactaacttgtgttgttgtcatatgaagagaagaatgggggaccaaggatgaaggtaaggttcggttctttgagtattttggtttctttttgggtacttcaagtaaaaatatataaaccgtaaaaatatccaaacctttggaggctgctggtgatgctttaatttattccaaattgttgaaatattgttgaaaacatagtttaaaacaagtatttctaggtcttgtggtacataaagtgttccagggattttttctcgctgaagttcgatgttttgggaaaaagagagtacaaagcttggttcccgcagttaagggccatttgaccgtgagtcttagtattattttcctttgtgattgtggtagattgcttgtttgttctttttaaaatttctctctgactttttgtcggatatgcgagacatatgtttagtagatgaagcatagtttctgactcggtcgatggttaagttacttaacttaagtatgattccacttgatagtaaaatgtgattattccagctaatcacgcatatcacatcagaatgattaatggtccttagatcaaaaattatccacagttgtaattaacatctcattatcaagatcatatattaatagcacaagtgattagaagtgaagcttcctcctaagaagtttcaaaagttgtgattgccaaaactttttttaaagcaaaatcgtgttttcaaattttcactgtttgtttatatatataatatgaaatgattagaccattaagccagtttgaagtacaaacattgtcactagtatgataattcaaacatttttttaattatctccatattgattttttaaaatccaaccaagtctacttctggtgatgtatgatcctaaagtcatatgttttacgttgcattcggaagatttttcttctcaaagataataaagatccaccaagcttttaaacttttcaagtgttatctacttcgacattttctgggctcaagcagtacgttgttggcccattaaggcccaaataagtaaaactgtggtcgtgtgtctagcagccgctgtgtcatcgtggaactcccattttctctcttttacttgttcgttcccaaactcttctccctcgatcgtctccgtcgccgatctcgtttcttcattttccggtgagattctctctctatttctctgtatatctcgtattcgaaaccttcgttttcttctttgacatttgattgatcagagttatctatattcgtcggatctgtgtagactcaaattttctagggcttgttcgcttttgtttattcgtatacgtgttgtgaaatcgcattttcactgaatcagtattctgattcaatttctttgtttcttcagcgtgttgattggtacaaaggtttaatcaaatg

SEQ ID NO: 2873 - DNA, 3000 bp, Unknown
  misc_feature (1)..( 3000): cDNA_ID_2175732_gDNA_ID_1620611_Annot_ID_161911 3000 nt of promoter + ATG
tttaggtaaagagctcacacctatctctactctatagtgttatatagtgtcaaaatttaacgaaggcattaaaaaaataaaaacttatataccatacttaattccaaatcgaacaaaacacaaattgtacccgaatcaaacatattgaattgaaaccaaatcaaactgaaaccgaactgaactagtttagaaagttttactaaaacctaatcaacaaataccaaaccaaacgggaaattatgagaaaagtagaaaaaggcccaccaaaagagcgtccaccattacttgattgtgtatgatacatatataaattggtcttatttgtaatacaatcaagtgggcttagcccatccttttggtttgtttacttgtgtgtattgggtcgaattcttctagaaggcctctttttaaaaacggtttgtgtaaaattgtcaacaccattttggacttttgtgttatttccattactaatctctatagtttaggaatttctcgtgttataaaactcaagtacaaaacacaggaatcatatatatatatatatgaaagttggttaatataaatgacacattatcacacaacaaaatgacatatgtcattcgatgtttttttttaaattaataaaactaataaaattaaataaacaaattaaatgtattattaattctatttttaattgaattttccaaaataaaaataaaaaataaaattatgtaaacaaattaaatactactttcattatactctttttattatattaatttttttattatcaataatcatgactaatttttttattgtgttgtagttgtttgctacctaacctcttattagtttattagtttaattttgagtttttgataacattgacattcaagttttttcaaataataaaccttcaaaatattagacttaccaaataatataatacacaatcatttctcttatattgatatatgcaatgacagaagatctaaaagtattgactttaatgatactttaatttttgctttctttttattattttcatatgaatactcttgaaatcttatttagtttatatcaattctatatatttaatcataaacctataacaatgttgttggagtattatatcgggggaataaataaaaccataaatagtttatttataatcaagttgaagaattttcaaattatccaagacgcaatcatttctctaatattgatatatgcagtgacaaaagatccaaaagtgttgacttcaataacattcaatttttgctatcttttttatttttttgtatgaatactctttagatccttttcagttgatatcaatccaaactttaatcatgagtcgatcacaatgttgttgaagtacataaaacaagaaattgatttattaataatcgagttaggaaaattttaaaccacaaaagtaacatagttacacagaattgtatcaaaatattattattgttgttatatgtattcatgaagtgaaaaaatattaaaatcttataaataatcagctttatacacaaaatatataaattaatatatagagtcacaaatgaatctaaccataaaaattgtaactacatattatggatctaatttcattaacaatacaaaaataaataaatagtaaatataattagcataaataacaatcaatgtaattttttctttaacaattttcacaacaaatccacgcgtagcgtgggtacccatctagtttctagtaaaaaaagaaatagataacactcttgcccaacacaatcaataacagttcaactgaacaacatatgaggaaacaaatcatacttgccgttttgctatcgactacaaacttcatgtcgtttttcatttagctagtgaactaaccaagattctagagtgtaataaaatattaaaatctataggcaaactcacatgaccaattaaacaagttaacgattactgtccaattaaacgtcacaagttaattttctaccgttaaaatattgccacgtaggacgcgtacgttaattaactcgtaaaatccgcgcagacaaaatcacattgaccgttagatatagatttggcggctagttcttcaatcaatataaaccgtccgtcaaaaatcagaggtaggcttttgacggtgtagttttattttaaaaacataaaataaattagtgtaagaaacttttttctctctctctgagtcttcgacttcgtttttatctccagctttttttttctcacgcgaaaagctcctgttctttaaaggatttgatcacgagagtttcaggtttggatttcgtagtcaatttccagattctagggttttggttggtcaaaatcttctacttcgtcccgtgtttgtggattggttcacggatctttggagattccgaaattggaggcgatttttattctagggtttcggtgaaatttgtaccgttttttggattaattcttacgttgatcgcttctctcctggcgagctcgcgtttaaaggtttagatttcaagctccgtgttgtctattttgaagctaatttatctggtggaggttgaattttggtttgtgaagaatttgtgtggattcagctgttggagattcaaatggtaagattcgatctatttttgatttgtgggtttttcttaattcgaatgattagaaaaaatagagattcatttgaatttggcatcaagctagggtttgagttttggggtccaaaaacgaaattggacagctaaaggtttaatttttacggtcatatctctcacgtttttgagaatcggaaattcttatttcacattgtttagatctggggttcttgtgtcacaacaagtttcttggcccaatgttatctatcgaaatagggaaaagaatcgtcttagtggttttgaatgggactgtattagtttttgttgatttaagtgaaattatatatgattcaggtgtcttgcaaatgagttgtagaagctagtgagaattatatatattgtggtaagtcttgccaaaaca

SEQ ID NO: 2874 - DNA, 3000 bp, Unknown
  misc_feature (1)..( 3000): cDNA_ID_2175689_gDNA_ID_1620611_Annot_ID_161898 3000 nt of promoter + ATG
ctgttttcacaaaggtatagacttaattgtgccaatcccataattgatccatctaactatatcataaataattatactactaaacaaaaagaaaaaactatcacaataatattagacagttagtattctagataatattgttacaacatttcaatggcatatccttcttgagatattttcccaataagtacaaacttgtcaccaaataaataaagaaaaaaaaattatcccaaaaaggaaatacaattaaagaaaatacaaaccttagaaaattaggtgtttagtgttcgtgtgtaatagaaagttgagaattccataaagatgaccaatcctgaaaagactattatataatgcgtcaattactcattatcacttaattgtgttagtggtcacggaaagagaaatctgatgactatattactggattcattactagcttcatacatgctttatcaatataaaaatcaataattacaagtttgcttaacgcaagagtcggcagaacaaaacagatggcatatgtatcaatcaatctatgtattgtcaatcgtcgggaattattattttatgttctaaacttgaaaatttggaacaaaatttggcatccagtgacaatacaaactccaatacactttgatggttctcttaaactgaaatcaatgtgtaaattatatatatatgaaagttggccaactctctccaaaatgattgacacattatcactttagcatttgtcatgtgtctattaagtaattaatataagcttttcaacttctaatttatagattaatgatatatttattatttaattttatatatttaattatagtattactaaatttattttaatattatatgatttttcaataaaactattttaatagttttctcatactcgaaaattttattttgtaatccaaactcaaagtaactatgaatatataatagtcgtggattacttaatgatttgagtaagttattctcttaaattgatatttatattcatttaaattgatatttatacaataaatcattgagggtgaagaatacgtaaggagctccatcatcaaattcttagggttttagaatccaaaactactctctgttaagttggtttaatacaaacgttgtttatgaattatgtgtatgatgcattgttgataatgttgttagaaaaaatatttttaaaactaaaagtaattgcttattgtataagtgaataattagataaataaaaattatatttaaattaaacaatacgaaaaaattcgaaaaaaccgcggcgtagcgcggatgatcacctagtacattgaaaaaaaaaatcaattttattagaatgtcccacattgcttgaaattaagatctttgaatattatataaaggatgtggcaatccttaattattaaactagtttttgtgttaagttaggttatattcctaataaatatgtatattgacaattaccaaaaattatacccgaccatcaaatattttttaacttcataagtttgaaattacaatgaagttgatacgagattttaaacttcattttttattacatagtattggcatatctaacatcaactaaccaatggaattcacaaatgacttaatcatatggagtaaaatatctaaatcatatggagcccgcttttatggctatccaatagatattctaaagaggcatatgccttttggagactaaaagttttaattagtagttgtgattaacgtttcgaagtataagctgtgaatagtcaaagagtagctcaatttcagtcacctaatcatataccaatctttatttcatttgaaagatagaaaaattgaaaactgatataaaaataaaaataaaaaaatcataacatgtcactatacgcattcaggatcaaacattatcttaatatacacttatacgataactatatgataaattcttaagcaagcaaagatatttcataagtattcattacacatgcaaacaaaaatctatttctcggtggtgttatctgttattagactcatagaaaacaaattaaattaatgatttgggatgattttatttagttctttcgaatcagcccactaaacattgagattttgtggcaacaaaattttcttaaacctcaagattgatttcgatatcctttcatatacatcactttctttaatttgttatagtggttacgacctcgatagaatataacggtcaataattgtagtatatattttaccaaaaactaaaaaacatgacggtcaaagttacgatacgaatcgcattaaagaaaatacgtatgaattattgaatactgataataacatattaactacttagacctttcctgatcagatctaaattctcatatccattatactttataattattctgtaacaatccgaaatatttgatatttttctaaatttgtggaagtttatatagtaatacaactatttggatacgggatttcgcattatagtttgaataatagtttccaattatttggaccaaaaaaaaagtttccaatatcgtttacccggtataacttgttcagatcaaaatccaattaaaaccggatatttggttggttgaaccggatattaccaagttttgatttgaattttcggttatcttttaatacgtaatcactaaagactaaactaaaggatatttacataattagtgccacgtgacaccaaaaaagtcacgcacctggtcccatcatgatatgtcgcacgataactacgtggatagagagagccccaatacgacaccgtctcactcctccaacacgaaaactgagtgggcaccgtgtacgtgtgggacctacttctctttctccgacgaaacataaaaacaaaaaacaaaagagaagcaataagattagtctctttctcgctatcgatctcgtttgatcataatttctcaatcaaatttctttctctaaaaaggttttgctctttataaatttattttgattacttatattaatctatgaatg

SEQ ID NO: 2875 - DNA, 2042 bp, Unknown
  misc_feature (1)..( 2042): cDNA_ID_2049353_gDNA_ID_1620612_Annot_ID_161930 3000 nt of promoter + ATG
aagcttgcatctctcaagaactctgacaatcagtcaaagggattttctctgagccttatcagcaaacttgaggtaagatcatgtttctccaaactcaacactttcttctcgattttacaattccatcataaacaaaggtcttctctgttccttctccaggtcattgttgtcagtcttatttaatctctcaaatcgaacatttaggatatgtaataacatgattaagccattgtcctagaccaaatacagtttgcaacattgtagatgtaagtgcttttggttttgctcagcgtaacgatttgtctcttgctctactagtcaggaactagcgaactccttggatttagagacccggcaaaacttatcaggcttcatggatgctgttgagaaaatactcgtgcagcaaacccgtgaagaactcaagtccaatgaatcctcccaaaagtgagtaccaagaaccacctcaagagtttgtgcagtttctatctccttattgtttttgtcttgggttgttatctgcaactctttgttgtaattactttggaaattggaattgtatcaatactcttgcttatgtcctcaagtttcctttatatatcaatatccttaaacacattattatcttactctccgccatatataatcagagaactaatgaaataatctccaaataatctccaaatacttctccattctggttaatggaggaaaacaccaaccatatataacttacggagaagtaatctccaaataatctccaaatacttctccattctggttaatggaggaaaacaccaaccatatataacttagtgattacttctccgtaaggtgacaacaaaactcagaggtctctttaaatggaagaagctaaagttgttctttgagtgttttaactgttactttagtcaatttaaggaagtcaatatggcttagtaaatcaattaagaaaaccatttaaaatctaccaagtttagtctaaaagactgttgtctacacttagctaaaccaaaaaacagaaccagaaccagcaccaaataaacctaatgaaatttccattttaaattaaaccacgttcagattgttcttgtcttcacttgagattcttgtgcagtggaacctctttgccttgtagaaagtttttcaatcgtttgcttcaagacaggtttcaatctttctcttacaagagtgacctcgcgcagtttctgattcaaccggttcaagatcgcaggtaaaactctttgatgattttctttcactatttcaagcatatctctaccatataaattttctgcacatctgtagaacttccctccaagatctttcaggtccctctctccgttaataacttcctctgcattcttcgctgcacttgttagaaatcccaccaacatatctagctcgaacatctgatcttcccagttgtacatatctttttcgatatcggttaggttcttctgtgcctggatatcataactgttcacaacccaagtgttgtttagtactgtagacgagaccggtgtctgttcttccttgggaattagcttatagttaggtgtcgctcgttcagtctttctccttttcttcagaggtctctcaggttggtctgattcctttggaggcaacattcctctcttcccctttccctccaacttgatcttatccgactctgtgtcttgggggttatcatcaactttaaccctagttccagcctcatcttctccatgaccgtaggcaatgtctacgaaccgttgataaagattcttgtatttatcgatcaaacgttgaagagacttaacgaattggctgtaatcgattctatgagacttaaagtctttacacaagcaagtgtaaactctcaattccgaccgagttagtctctcctcgatagccttcaataactctgtcaacttctgtttcgcttctaaacggtccttcatctttctctccacatcgtctttaggtttataaactatccgtatacgaggtatcatctttggttcattaagaagaatagggttctcttccggcttctcatcatg

SEQ ID NO: 2876 - DNA, 3000 bp, Unknown
  misc_feature (1)..( 3000): cDNA_ID_3070333_gDNA_ID_1620612_Annot_ID_161951 3000 nt of promoter + ATG
ttttttcctcttttttctaagatacaagaaacttgttaatcaatcattatatatagtgttttttttttctaatcttgttagtatcaatgatatacgaatcatatttaaactgctagttgtaattagtagtttgtatttatgtcaccatgttcaatcttataatgtgtttagtagtagtttccttttgagctaaaaaggtttgcaaagattgtttgttatttggtccttacaattttagcttgatctcttcggagtactcagattggcaataacattagtttctttttaaaacatactcatttaaaccttttttttggataggttgtgccaaatgaatccgaaaaacaaaagagtttataaaacaagtaacaacaaatctagagattggtaataagaattataggatgattatagcacaaaacacgtggtggtacgcatgtgtgtatagatagatacgatcgataataatgctaacgacatttatttcggagaaagagagtaggaaccggcttttaaaggcaaaaggcaatttgtattctctagtctctccactctccaactctcattttcctcatttattatcttattttcttttactctctttttcttttattctaatgattgtaacaaactcatatcgcaatctttttttagaccttatgatttgtgaaacaagctcataatatctaaggacaacttcaacttgtatatcaacaaggtaacggtatggtgtggatctgtgacaccttgtatgaaataaaattgtaactaggattttcgaagtttaattctctacaagctaacaatctcaaaatgcacaatatcgcgtcttaatggtttgaaaatggacaaatttgggtaatattaaaaaatgatgtgtgagtgaagttaaggccaaagggaaggaaaagttggtcgtagacttttttccagtctcttctcttttgtcaatatacattgatcactacacgacaaaactaagctttttctccagtatttcagcctttatacagaaccgaatttatttagtcaaataagtatgctttttttctttaggtcaaaaagtcaaaaaagttatgctatacatatgatggaattactcttcttgtggagaatcgctttgcccctcgtctttagttatctacggaaaaaagtacagcttctatagtatcgatcactctatactaacacaattaggcatagaggctagcttttgtatccatacatgcaaaaacaacacctaaaatattattcttcttctttttgtgaaaacagtaattatattcgaatgctttacacatttactctaaatcattaactgtgaagataaaggaaaatttcaaaccttttctgagtttaatgtaaaataataattggtccaaatttggaagaagaaaatgacaaggtatggacaaaacaaaacttttggggtctggtccttcagattcctcatgggcggttgtgtgcttcttgtctttttttttctcgcccagatatctctggttttacctttgaaccaatttaaacctcacataaatttgagtacttttgagttttaagcgaagttattggggaccttacacgttctggtttcgatattttagaggcttttttattggctatccctagattaggttttcgacgattgttcattgtttttatttgttgggtatcttttcttatgaaaagttacacagacgcattactttgttatataagttatatatatatggtttatacatataaaacacaatattttcacacttaattcagtcctttcaatgagtcttttaagattttccaagtcatctcacgtgtactgtttttttattccgtttttaggcttttcctcttcatcacagaaatttaaagagcatggattccagtttataaaccaagtatttgcagctagctagaaaattttgtttcaagagaagtcaaagaagtacaccttttttttttatctccgtttttatacacttttaaataccagtttccccggttggtggcgagatattgactccacgcacagctactgcttttgaaatatcaaatatagctaatgagtcattggtgtatactaatatatgtgttttattatactatataaattgaaaacatttaattacaataaatatcgttttctttcatatccattcttctgaagatttgttattaaagaaagaaacttgattacaattagttgcttgtattttatatttttccgatgtgtctatatatgcgaaagtctaagggagagaaacgaaaatgatgtatatataatagaattatattaatttgcgttgttattattgtaagacaaaaggtcattttatacgtttcgtagatgactcctatgattagcaaggattgatgttaatcaatttattagaatttgccgtgtgctttattcttcattgactataacttaattaagatttatggttatgttaatgtattgagaatttgagatcatgttgacgtctaaatgtcagattagttaatgcatttattttttcgaaaataataataaattagctttaaaagaaaaaaatattgtttttacaacaaatgcattgtttgatagaaaaaaagacactttgatacacaccaaaaaaaaagaaagacactttgatactctaaactttacacatacaaacaaaactagtatatatacttcatatcgagtccaaataattattacctttttaatactaccaaaaagtagagtttcgttttcacatggagtagtatattcttatttatgatggatattgttttatcctctaagatgctatgtagatggacaatgaatacaaatacagccattgttgaaaaggccataaatgtttggatgtaccaaaatgcgagcctaataaaatcggtggttgaatgtcaattaaagaaccataaacctaatccatctctcttctcctttatatatacgcacacaacttatcaaagttgtcccatctaacaaaactcttgtacttaagcatg

SEQ ID NO: 2877 - DNA, 3000 bp, Unknown
  misc_feature (1)..( 3000): cDNA_ID_3070337_gDNA_ID_1620612_Annot_ID_161950 3000 nt of promoter + ATG
gagagagatcgatggtcttggcacacggtttcggaggcgaccagtcggtttgggataaaataataccggtcttgtcccaatccttcaaagttttggtctttgactggcttttctctggagccattaaagatcaaactctctatgacccttcaaagtataactccttagacgtcttctctgacgatctcattgctcttatggaggagttgaagtttggccctgtcgtgttcgtaggccattccatgtcgggggtgatcggttgtgctgcttctattaaaaggcccgacttgtttacaaatcttctccttattgctgcttctccaaggtacgcttcactcttagtataacacttacccttaatcataattggaagtaaaaatcaaagcatatgtataatctatttctgttctgtataacatcatttaggcctatatattgaatctatttataaaatatgataatatatctgtaaataagatgaagaccgatgatttagaatttataatttacgttcgaaagagaaatctaagcacatgcaatcaaaattataaggttatacagtctgaccgatcgtacaagattccttcgtgaatatgtgtttgaggaaaaagacaaaataaaaataatgatttacaataatatactatattagccaatatttaatagtttttatgtggttgatatctatatgtaatgaagtgtaactgttgccaagtgttgaacatgtggacatgatcagcttctagcttgttggatggatatgacatatgatcacatcttctcttacttctctgcagtctacgcatatatacgtagatgaatatatgtaaacatgctacatatgctatcaatatgtcaataagacattcatttcatacagatacatcgaaaattagaaaaaatgtgttatgattttattatcatatgatgaatcaatatatttattgtcatttttaaagttagaagtactaaaacttaacccatctttatatatcacgtggaccactaacatactatattctcctatatatagaaattatcgaatgggagttaactgtttgaagtatcatactttgactgattactttagatatttattatagttataggtgagaaagtcggccataatttaatgcaacaattgataatgtttgactatatatatcaatgcaacgtacttataatataaaagaaaatgattttttttttttgcgcaaagagaaaatgatatttagatgatcaaattagtaacgttactagattgaaatgcaaataggtatataaacagtgaggattacaaaggagggtttgagtcaaaagacattgacacgatcattaccagcattggctccaactacgaagcttgggcggttgatttctcctcattcgtggtcgactcgagagactctctctcggtccaaaggttcgagaagtcccttaagaagatgaagcccgagacagctcttgccttagctaagatagtgtttggtagcgacgagagagagattttgggacaagtgtcagtgccttgccatgtcatacaaccaggaaacgacgtcgtagtgcctgtctccgtcgcatacttcatgcaggagaagattaaggggaaatcgacagtggagatcatcgaggacgcgatcgggcattttccacagatgacatcacatttggagctgcttggcgtcatgaggcgcctccttgagttttaaggcttatataagagctttgcgtcgtttgatcgagtttcttcttgtctataatatcgtattactaatataacgaagtgggtctattagaatttttcatatatgtttgtgtaatgtgaatgtgttattatattcttagcacaatgattttcatttttagtgttttttttttaaacataggattgaaagtaatatgttataagtttctttatatcacactgtcaaattttttatttcttacgataattttgttgttgttgaataaaacattccaagaaaaagacaaatacataatgaaaaaggttatagtgttgtagacaattgatagtggactttgttttggccattttggcatgcttgtccaatgtccactaccaaattattttgaccttcttgtaaacatacacacttgaaaatcaacaaaagcttgatccattcttgaatgacgtcgtgtattaagttcttcgtttgaacgttcgttgtttgtccgatgttttataagccctatatattattacatagtcagagtttcgacctaagatttcctaagttaacaaaaataaaaataatactattaccaacattaagtaaaattggttgttcggaccatatatcactggtatttttattaaatcaatttgacaaaaacaaaatatttgaccaaaccaaacttgacaaagtatcattgcaatcagtcgttgacttctgtttttatttctacttagattaagcgtcttgtgggatgttttaaacaagatatatagaatgatacgacattgaccctgatacaataataattatttacataaacatatattatctgaagagcaaaaacattatctggatatctgaaagaaccatattgatataattggcctgttattacgaacctttttttttttgttaaagctgttattaagaaccttgattgaatatgattaacaaaatacttatttattgtccgtacgtttcagtttgaatggattattttggtgtaacttgatgttagatagttaataataaacatcggagaaatgtcaatgtagtaagtgctctcatttctttctttcgcttttgatgcaagaagaacacaaactatataactcatacaaaaataagattacgtatattctcctctatatcggtgtaccaaaggttttttaaaaagattgaagtaatcaaaactcaagtctagtctcggtggcaagagagatcagacctcttttcccgcttttaacattcttttttcttctttatcccgtcgcttatttttttttactagcgggaagatatg

SEQ ID NO: 2878 - DNA, 999 bp, Unknown
  misc_feature (1)..( 999): cDNA_ID_3070329_gDNA_ID_1620612_Annot_ID_161953 3000 nt of promoter + ATG
ctttatttcattttttgctctccaaattctttgaggtttgtggatactacttcagaaatttcaaaaccttatacctatagagaaaagatattttttaaactccattctacttttgatttctttatgtaatcttattcaaacatgttttatgtttctttaattatgtctgagtaatctccttcttgggtttaaagtttatcattagaaatttagatgaaatcgtaaatcgataatctgttagtatttatccctagagttcttctcctttgattattcttaaagctagttctagagtaacgaactaaaatttgattataagttaatatgtaaaatccgagatgcgtttattactggaattattgttaggagagccttaataactagatgactgccaacccggtttagatgcttaggtaaacttatcaaactgaattctaatgcttgcttaattctagtaattttagatggagacacaaaaccaatattgttaggcatagttagtcaattataacgagagtcgattaactatagattaagatttgtagttttagaacggtgcaataacaatcttgattaattgctagatctactattagtctatttttttgaaaatttctctaaatctaacattttaatcatctgaatttacttcaatcaaatctgctttcctgtctttttaagttttaatttacttaattttgatttatcttaatttcgaaacatttaacattttgtgttaacaaaagaaacttttgtagaattcaacatacatcagtaaaaacttaattttgatttatcttagatgtaatttgacacacatcagtaaaaaaaacaataatatctgattacaaatgtaaaaatttatgatatattgaataataataataaaaataataaaaagctttgaaaaagttttatcttttaaagagttgagcgatcaaattatcacagaccgctagttttttttgccactctcttcgtctctctcttgtagcaatg

SEQ ID NO: 2879 - DNA, 3000 bp, Unknown
  misc_feature (1)..( 3000): cDNA_ID_3070368_gDNA_ID_1620612_Annot_ID_161940 3000 nt of promoter + ATG
ataacagatgctcatatagtacttttttgcttaaatataatggtgctggtgatcttgtcgtatttgtaagagtcaaaacatccatgtgtaggtagctgaggattttcaccctattatatcaagaattaaggccaccactgcttcacttggtggcccgaaaggcgaaatcgcatatgcaagagagcatgagtctgtttggttcaaggggaaacggtttacgccatctatctgggctggtactgcaggggaagaccaaataaaacagctgaaacctgccttagactcgaaaggaaaaaaggttggagaagaatggtttacgaccccaaaggtggaaattgctttagtcaggttgtttcctcgttttattgaaccatccaaaagaaatttattcaataatactgggtatgtattgatatatcatgttatgcttttgttgcagataccatgaagctagtgagaatgcaaaagctcgggtgttggaactgttgcgcgagttatccgttaaattgcaaacaaaaataaatgttcttgtctttgcatctatgcttctggtcatttcaaaagcattattttcccatgcttggtaagtttgcgcttaatcaattctcattaagaaatttctgtagttttaatctaagtactgtgcacaactacagtgaagggagaaggcgaaagtgggtttttccaacgcttgtcggattcagtttagatgaggtaactgtgcttgctagtcgttgagtttgtagacagatgcgtgcaatttctaagaaatcacaaaacatgctgggctgtcttattcttatatatctcatgcacctattttgatatattttaatatagggcgcaaaaccattagatggtgccagtcgaatgaagctgacaggcctgtcaccttattggtttgatgtatcttctggaaccgctgttcacaataccgttgacatgcaatcactgtttcttctaactggacctaacggtggtggtaaatcgagtttgctcagatcaatatgcgcagctgctctacttggaatttccggtttaatggttccagctgaatcagcttgtattcctcactttgattccatcatgcttcacatgaaatcatatgacagccctgtagacggaaaaagttctttccaggtatatatataagcatacaaatctagaattcaccaaactgtttttttttctttaattgtaatgtttgatatcctctcaactggttctgtgccatcaggtagaaatgtcggaaatacgatctattgtaagccaggctacttcgagaagcctagtgcttatagatgagatatgccgagggacagagacagcaaaaggcacctgtatcgctggtagtgtggtagagagtcttgacacaagtggttgtttgggtattgtatctactcatctccatggaatcttcagtttacctcttacagcgaaaaacatcacatataaagcaatgggagccgaaaatgtcgaagggcaaaccaagccaacttggaaattgacagatggagtctgcagagagagtcttgcgtttgaaacagctaagagggaaggtgttcccgagtcagttatccaaagagctgaagctctttacctctcggtctatgcaaaagacgcatcagctgaagttgtcaaacccgaccaaatcataacttcatccaacaatgaccagcagatccaaaaaccagtcagctctgagagaagtttggagaaggacttagcaaaagctatcgtcaaaatctgtgggaaaaagatgattgagcctgaagcaatagaatgtctttcaattggtgctcgtgagcttccacctccatctacagttggttcttcatgcgtgtatgtgatgcggagacccgataagagattgtacattggacaggtacatacttaccatattaatattataaaacttctcttagaatagacagaaaacgaaagttattgattctgaggatttctgttacgaaactgcagaccgatgatcttgaaggacgaatacgtgcgcatcgagcaaaggaaggactgcaagggtcaagttttctataccttatggttcaaggtaagagcatggcttgtcagttagagactctattgattaatcaactccatgaacaaggctactctctggctaacctagccgatggaaagcaccgtaatttcggaacgtcctcaagcttgagtacatcagacgtagtcagcatcttatagtttgaaacattagctgtgtttgtagttgatcatctctatgtgcaattgaacaagtcagtttgctagaactagagtagattactaagaaaccatgccgtttttcattttgagattttgcaaaacggcatgcagttcgggtaagtcggatgccgcaattaccaattttgggtcagtctgtgtaattgtcgtttcataaatccgattaacgtgtactttgaacaaaactcagcagtaaacttctttattcatcaataagtaatgctagaaattttaaccaataagaatatgaccatataactaaataactgataaaccggacattggaccagacaatgatagcaattgcaagataaccgggtttagaatagacatggtttatctaaaactacgtcgtttttagttatttctcttcttccccagaaatcaaaatttgaggtgtcttctacagatcaatattgatctccaacactctctggttcccagatcttcttcaaccttataccctagtttcgcaatttcattctcattttctccgctcttcatctctttcgatcaaccaatgtaagtttgtgacccttatatcccatcaaatcaatcgagtcttctgataccgttcctgtagtgattcgatcataattcatacagaaaccattagatggttatacgtgttggatgtttagagagctattagcagattgcattgggagattccgtagcttgtttatatctcttttgattactaaactctgcagttttataatttatgaaatttgcagttacgacatg

SEQ ID NO: 2880 - DNA, 3000 bp, Unknown
  misc_feature (1)..( 3000): cDNA_ID_3070360_gDNA_ID_1620612_Annot_ID_161943 3000 nt of promoter + ATG
actgagatgaagatgaagaagacccatttgcccatggaagaggaacagattcactagcagcagccttagcagccaaaggacgctggcgaacgaatgggtttgttgattcttttgaagcatttgaagagaagagttgccttctactttcatggaccttcatattctgcaacaccagacaagtaaatcatagctcagtcacgactgcatactcaagctttatcgaaaagaaatcgacggaacaaagaaaaaacctcggttctcatggtaagaacatccttaaactctttggtagtatccatcaaacgatactttagatcgtcaacaacagttgctgagtgagtacttttgtccctgtctctagagttattcccttcatcattctgagaactgcggaacaattgaaggtcgaccagagcagaatttagagcagagatctcttgcttgatgactaccgtcagctcttgtatctcctgagtaggatcatcaaacactgatgtcctctttgcaactgatttgcaacaaaaacgacaaagttaacaattatgcacaaaatacagcatcttccataccaattacacattctcgagtactaagataagcacttgagaaattcacaccactaaataaatcggttctcgatctaagcaccattctaattcctaagctaaagccattacaggttaactaatccagattcacaagatctcaccaaatcaaatgagctaaacactaaaacaacttacgtttcgcaagcttcgatagcttctgcgacgtttgattaatagctaaaccaatatgagaagctctcttgttgaactcggatttgttgataagatcctctcttctcgcaccatcgttccgattattaccatacggcacattattcgccgccggagccggagcaatcgatctccttagagtctccacaattttgaagaattcgtcactccgatctcgatacgacgattgcccatgccttgccgacattattcttcctccaattccttggatctggactctctcagaagctaaaatcaagcaaaaaacgttgagattcaaacgaaaatggatgccaaggtgtgcttaatcttagagatgaagaaagaaaaaacgaaatcggaagaaaagagctaaaaaccgatcaacgcgttggcatgatatttatcattttgtcctttgtgtttctaaaatgttacattttgaccttttactttttattgtttaaatggtaaatttagatcgggaaaaatgtcaaaatttttttgcaaactttcaaatttgggacataaaaacatgaattttcaaaatgttaataaaatcttaaattttggtttgactttataataaaatagtaaatttcgttgattgaatcattataggcatatcgataaatttccgttaataaaaagacgacagagttaatttttcgtttgggaaataaataaatcttatatacatatatgatgtcattaaagagaaaaaccatcacaacgtagggtatcagaaagcttatgaggtatctttctaaatacatataaggtatcgttctaaacccaaacattatgaaaagttaactcggtcatcttttaattaacaaaaatttaacgacatgcctaaaatgactcggtcaacaaaacttaaccattttattataaagtcaaaccaaactttgagatttaaatgacatttagaaagttcatgtttttttgccccaaatttgaaagttctcgttacgagcttttacatattttagaacttgagctgatccgattagtctgatcggtggaacctaaacccggttagataattcgattccataagattttgtatttccaattttataactcgttgaaagttcaaactcaaaaatagaactttagaaatccaatctcaaaaatataattttagaaatctaataataattgaactctcacataaattgctttgaggaattgagcctcttcatcatatttttttttatataactaataaaatttaattcgtaatatactaccagaccatttttttagattgttacacattttaaataagtattaaagtgatataatttatttttttagtatttttatatatagcctctggtatgtataatttattactgtaattataaatttagaagtgtcaaagttaacattctatttaactcattctctatcatatttatattaactctaacatgttctactaattattccgcaaactctttttatttttgaaacaaacaaataataataatcttctatttaagttataatacatgttttgatagattaaaccgcaaaaaatatataatcgtaaaagttgtataaattgcatatctctgtgagtgactctgtctatgaattttcgccattagatttgattaccacaaaattttcataaaaaatttacaattcaaatcagcaatgatctcacctccagattttcgttctccagaagatatctttctctaataacccaacactaaatcgtttgcagaaatattagtcacatactcacatcaaaacataaaggagagaatcctaagcaaataatagaatttttgtccttaccagcaccattacaacaaaaaaaattagtaaccaatttgtaaaatatatttgaaatactaaaagcttttcatttttccactaatattttgacccctattaaatacctctatctactgacagaaccagtaacatccacctttaactttgaaactctcatgtcaatcaattcccaccaatagaaatgaagcaaacttatctattaattttcacttagcccctcatcttttcaaatattacaatttaccctaataaagaaacaaacaaaaaaaaaccttttttattgaatgtttcgagaaagttgaatcgttaccgccaaaggcaaaaaaaaaaaaatttgcagagacaacagaggagagaggacatgagctttcttccttcttcgtcaaatccactattctagggttttcgatttctctcttcagccatg

SEQ ID NO: 2881 - DNA, 3000 bp, Unknown
  misc_feature (1)..( 3000): cDNA_ID_2049313_gDNA_ID_1620612_Annot_ID_161944 3000 nt of promoter + ATG
cttatgatggtatactttttcacttgggttcttttcgcatgtagcatcgtctctggtaccaccctcttcatcctcagaacaaacgaaatcactatcagagctctctacatcagaagaatctgaactttcccccacgtaatcagatgagtcagaatcattagcatcttcatccatatcactctcaccagaatctctatcttcgccactaacttcctctcttgaatcagtccctaattcctctaaagggtcttcctcatcatcagaactagaacttagacttacaacctcatcagacacataagtcttctcctcacccctcaaattagcatcatccagaagaatatcacaaacctcagaaccagcattgacatcctcgacatgctgattctctcccgcgatagttccaaggaaaacaacatcatcatcatcatccggagataaagggttctctttaccactcactttagcatcatcctcatcaaaatcacaaaccctaggagaaatcaccgaagcagaaccaacattgtcatcatcctctacatgatcattctctctctgaacagttccaacgaaaacaacatcatcatcatcatctatagggttaaaattagaagctttctcttcacatcccaaattacgatcatcagcatcaaaatcacaaaccctatcaccaaaatcaaacgatttcgattgtaaattcccagaagtagaaccaacattctcatcatctcgcttaccttcaggatattcagttctaacaaatacaacatcgtcgtcatcatccttcctccgccgtcgtttcttcttcctcggagaaggtgaacaagcatcacgcatgttaactctcctcttctcagtcctcgaatttacacaacccagagactgatcttcttcttctccagaaatcccctttgatttattgagaatcgagttcaagtaagattcagtcctcgaacgagttcttctagcaacacaactagtcatatccatggctgaagagagaaatcgaaaaccctagaatagtggatttgacgaagaaggaagaaagctcatgtcctctctcctctgttgtctctgcaaatttttttttttttgcctttggcggtaacgattcaactttctcgaaacattcaataaaaaaggtttttttttgtttgtttctttattagggtaaattgtaatatttgaaaagatgaggggctaagtgaaaattaatagataagtttgcttcatttctattggtgggaattgattgacatgagagtttcaaagttaaaggtggatgttactggttctgtcagtagatagaggtatttaataggggtcaaaatattagtggaaaaatgaaaagcttttagtatttcaaatatattttacaaattggttactaattttttttgttgtaatggtgctggtaaggacaaaaattctattatttgcttaggattctctcctttatgttttgatgtgagtatgtgactaatatttctgcaaacgatttagtgttgggttattagagaaagatatcttctggagaacgaaaatctggaggtgagatcattgctgatttgaattgtaaattttttatgaaaattttgtggtaatcaaatctaatggcgaaaattcatagacagagtcactcacagagatatgcaatttatacaacttttacgattatatattttttgcggtttaatctatcaaaacatgtattataacttaaatagaagattattattatttgtttgtttcaaaaataaaaagagtttgcggaataattagtagaacatgttagagttaatataaatatgatagagaatgagttaaatagaatgttaactttgacacttctaaatttataattacagtaataaattatacataccagaggctatatataaaaatactaaaaaaataaattatatcactttaatacttatttaaaatgtgtaacaatctaaaaaaatggtctggtagtatattacgaattaaattttattagttatataaaaaaaaatatgatgaagaggctcaattcctcaaagcaatttatgtgagagttcaattattattagatttctaaaattatatttttgagattggatttctaaagttctatttttgagtttgaactttcaacgagttataaaattggaaatacaaaatcttatggaatcgaattatctaaccgggtttaggttccaccgatcagactaatcggatcagctcaagttctaaaatatgtaaaagctcgtaacgagaactttcaaatttggggcaaaaaaacatgaactttctaaatgtcatttaaatctcaaagtttggtttgactttataataaaatggttaagttttgttgaccgagtcattttaggcatgtcgttaaatttttgttaattaaaagatgaccgagttaacttttcataatgtttgggtttagaacgataccttatatgtatttagaaagatacctcataagctttctgataccctacgttgtgatggtttttctctttaatgacatcatatatgtatataagatttatttatttcccaaacgaaaaattaactctgtcgtctttttattaacggaaatttatcgatatgcctataatgattcaatcaacgaaatttactattttattataaagtcaaaccaaaatttaagattttattaacattttgaaaattcatgtttttatgtcccaaatttgaaagtttgcaaaaaaattttgacatttttcccgatctaaatttaccatttaaacaataaaaagtaaaaggtcaaaatgtaacattttagaaacacaaaggacaaaatgataaatatcatgccaacgcgttgatcggtttttagctcttttcttccgatttcgttttttctttcttcatctctaagattaagcacaccttggcatccattttcgtttgaatctcaacgttttttgcttgattttagcttctgagagagtccagatccaaggaattggaggaagaata

SEQ ID NO: 2882 - DNA, 3000 bp, Unknown
  misc_feature (1)..( 3000): cDNA_ID_3070341_gDNA_ID_1620612_Annot_ID_161949 3000 nt of promoter + ATG
cacgtccaccgcatttcatgagcagcggcagcagcggagactacgactcaaactactcggatcaatcagttcttcctccaccatcaccagggcttgcattaggcttaggcatatatcaaggcactttcaattacgaggagctatctagagccaccaatggattctctgaggccaatttgttaggacaaggcggtttcggatacgtgttcaaaggtatgttacgtaatgggaaagaagttgctgtgaaacaattgaaagaagggagttctcaaggagaaagagagtttcaagcagaggttgggatcattagccgagtacatcatagacatttggttgctcttgtcggttattgcatcgccgatgctcaaagattgcttgtctatgagtttgttcccaacaacactctcgagtttcacctccatggttagaaaaaataaaaaataaactctcttattgtttcttgcatccttcaatgttttcaattagtaaattcttgggaatcgaatttgtgacaggaaagggacggcctacgatggaatggagttcaagattgaagattgctgttggttctgccaaaggattgtcttatcttcatgaaaattgtaagtctataagatcatgtgtaataaatataggtcatggtataattccatatttgtttctcaaaataaataaatatatagctaggtcatgtttgtttactcgctaggcatttatatatatgcaggcaatcctaaaattattcaccgtgatatcaaggcgtcaaacatattgatagatttcaaatttgaagcaaaggtatgatttattcttccttttatttgttatttggtacgatattgtcatgaagtatctttgtatcatgtgtctctcttctatttcttaggttgctgattttggtcttgccaagattgcttctgatacaaatactcatgtatctacacgtgtgatgggaacttttgggtaaagataatcttgaagctaccaaatatctacatttatgcagttttgttaaaagtttatgtgaatctttacatattatgaaacttttggattttaggtatttggctccggaatatgcttcaagcggaaaactcacggaaaagtctgacgttttctcatttggcgttgtacttctggagctaataactggacgtcgccctattgatgtaaacaatgtccatgcagataacagcttggttgattgggtaagtaatataattacatgcaaataatctaaccttcacataatgtttacgatgtgatttttgaatgaagaaaaacctatgtgtgaataatttggaacaggcacgacctttgcttaaccaagtatctgaattaggaaactttgaggttgtggttgataaaaaactgaataatgagtatgacaaagaagagatggctcgcatggttgcttgtgccgcagcttgtgttcggtccacagctccacgtagacctcgcatggatcaggtaaattaatcattcttttcttttctctaaaggcatttacgctttccggttttcaaactgtatacggagttagaaacctagaaccaagatattttcatttgtcagttcagtttagtttttggcttcggaacaatataacttacaaagattgatttatatttgggtcgttttggttgccgctccgaattggtttcggttaataccgtgttcgatctcagttggtttggtatgtatgcctagccttatattttgcttatttgatcagccctagcaatgggacaaacatgttttcttagctacaccttttttcaatttgctaaatagtagtcattttaaaatgttactaatgctaatcgaatgagtgattggtgtaaaaataacgagcaggttgcacgtgtgctagaaggaaacatatcaccatcagatctaaaccaaggaatcacaccgggacacagcaatgtgtatggctcatctggaggaagcacagattatgactcgagccaagacaatgaaggcatgaacaagtttaggaaagtgggacttgagactcaagatttatatagtaacccaattagtgaatatgatttgtacccgtcctggtcgagcactgacggtcagaccacacagggaaaggcgaccggcaatattaaaagacccggtcaaggttatggttaaagatgcaagaaattacatgtttttttttttttgaattcttctttttaactgtaaagatttgaggaaatgttttaactctattgaactacgatctatatatgatacacttatatgattttgtatatatattttttttcattctttggtatctttccatagaagatgtgatgctaataataatactcacattgaggaaaaaacaaagattgaggtttggtttgtgccgttttcttttcaatcatcaattaaacaaaaagaaattttcacaaaagtggacgaaaaaagatttgctctcaccgtttgtcaaagtgagaactggttttcacgttttgtcttttcattcaatttcggaccaaattaccttgggaaaacttaataatggcacaaaccaaaccgtgcagcagttcgtatcggttaagttgacggcgtaaaccaaaccctacagcagttggtttcggtttagttgatgcggttcagttttgaaaaagacaaaaaaaaaaaaaactgaaacgaagaaaccgagaaaacgaaaaagagaataacggagagattgagagagaatcagaaagcgaaacgaaattcagtatccattgcttcaaaattcgacataacttcgaattgttgggtagttgaattgtgccactgaactcccacatccgatgaagtgaaacttactgtttttcccggcgaagccaagagaaagttactgtttttcccggcgaagccaagagaaagttactgtttttcccggcgaaaccaagagaaagttactgtttttcccggcgaagccaagagaaagttactgttttttccggcgaaatttgaacctccggcgaaatagcatctttagctatg

SEQ ID NO: 2883 - DNA, 3000 bp, Unknown
  misc_feature (1)..( 3000): cDNA_ID_3070364_gDNA_ID_1620612_Annot_ID_161941 3000 nt of promoter + ATG
ggcagcatatgatcgacaacttcaacaaaccagacagtggatctaaagttctactggcatcaacaaaagcatgttctgagggtatcagtcttgttggcgcttcaagagttgtgattcttgatgttgtttggaacccttctgttgaaagccaagccataagtcgagctttcagaattggtcaaaagcgtgctgtgttcatttaccatctcatggtcaaagacacatctgagtggaacaagtactgtaagcaaagtgagaaacatcgcatatccgaactggtcttctcttctaccaatgagaaggacaagccgattaacaacgaagttgtttccaaagatagaatcctcgacgagatggttcggcacgagaagctgaaacacatatttgagaagatactttatcacccaaagaaatctgacatgaataccagcttcttctgattgaaatatcatttctctctgttaatcccactctgagactctaggtgtttatattacttaacttccagctttggaacagatcactctagtaatatgtaattctgtgattcaatttcttctagttaatgaagttgtgtattttccaaggctatgctaatcgaagggaacaacctttagtttgaaagattcttttgcaggaagtaaaacttgagagatttacaagacataacaaacaacaggtacttactacaagatgggaaggaccaacataactaaaaccgcggctgcgactctggtcaacactcttgaagatccaggctgcaacctcgttgaatctcctgtatcaatcattacagggaactcgcaaagttcatcagatggatcttcatctgtgatcaaacccaaccccaagaaatcgcagtcccatgttttctgatcgtgcatctgataatacatattaaaggcatatgaaacatttcctgtagcagtgagatggttacaagaggatccatacccgagtgctgtgcaatcagacaaactacaagcatagtcgatattatcaggcaagtcatcgaggttatatgcattagggtcaagaatacaccaagttttgggcagatacttcacatcttccacaggaaccaaaggcttgtcatttcctttacctgacaagtcaagctcatatttcggtctcccatcaaactcaaagatcccccagtgcctctcaaaagtccccggtgctatactcttggcgtcctcatcaacaaggctgaaaaggtaaacatccataatcactcctttcctcgcaggcgttccatttccagacatagcatgctttaccattccctgattgaatctctttgcactctttacattagcgttcttgtctccatccgtaggccacccgacctctcctacaatgatcttcatccccaagaagctatatctctccatagcacaaatcaaagtgtcgagattcgcatcaaacacattggtgtagaccaaatttccatctctcaaagacttgttagtcccatcaaagaaggcaaaatccaaaggaaagtaagcatttccatagagactaagaaaagggtatatgttaaccgtgaaaggcgaatcatgtgaatacaagaaattgattatctcaatcgttgcatcccttagctcaggtctaaagtctccagctgatggaacagggttcgcttcaggggaaaaatagatgtctgcgttgaaaggaacagtgactttcacatttttcagatcagcttcctctagtgctcgttggatgttgataagagctggtaatgtgaactcaacgtaagttccattatatgtctgaaggaaaggctcgtttccaacagctatgtacttgatgttgactccaccgttgtaagaataagcagtaacgttttcttcaacccatgaagctgctacagatgtatcttgagccatttctttaagaaaccggtttggtattcctatcatgacttcaatgtctgagccaattagagcgtctaagatgttttggtcggcttcaaatagtttcagcttagtgaaactattgtccattagcatcttcacaaccttttctggtggaagctggtgactcgccattattccccagttaactcctacattactcgtgttgcttgaggcaatggaaacttgtgagatgataagaaagtaacaaagaataatctgatgattataaaagtggtttgttgttaactttgatctctctcctgccatttttttctctgtttatgagtcttttcttctcttttctttatggagtctttgttaagggagaagatgaaatgtgattggatatttgtgatttgtacttagttcagttaaagaagcagacacaacatgcaaaatagccattggtgaaacactttgtgcatgcctatctgataaatccattgactcaccacaaattcttatgtaattctagatgtttcgtatttgttgtgccaaacaaacacacacactcacacactgcactgagtctagacatttagtggttttgttttcttattattaatactcattagagtattaagtttgtatagaattcagaaacaactgatagtcattttaagatttctaattacaaaacttttgatcctctttgaaaagcagagaaattacaatctttacaaacaaaactgagagattagagatgtgttcatagagatgggttctttgttagacattccaaaaagatacaaaactagccgatgattaattttggtaaattaatgaacaagaatgtaatttgaaacattatagggagcaaatgagaaattactctttttaaaaggctaaaatcctaattacctttaaactaagaagacaagaagagaagagaaaacatgttttccattagaggactgtgagattgtgaattgcatagtcgtcgtcttctggcgggaaaagaagccctagaaaaagggtgaaaggtgaaaactctacttcttcttcttcttcttcttcagagtgtgagagagatgcattggattgctaccagaaacgccgtcgtttcattcccaaaatg

SEQ ID NO: 2884 - DNA, 3000 bp, Unknown
  misc_feature (1)..( 3000): cDNA_ID_2025284_gDNA_ID_1620612_Annot_ID_161938 3000 nt of promoter + ATG
acaaatttgagaattgctttgtgaacaaaatctgattaaaatacttagaaaataaaaatctgttgaaccatttgaattttcaccatagttctatttgtgtttttcgactcttccgatcagtcatgtgatttatattttataggcatcaaatgtctttggaaagacacgggaactatattctagagattaggtcttaacgtatttcgtttcacttcttagaaattgtcctaatcttcgaagtgccccaatagttccaccgtaacagcttgagagattcaaaacccatacgatcagtttacgcattatttaagtaattatgatttgatgatgtaccttattttggcatttaaaagattcattcataggtaatctatattaaaaagaaaatctattacctttgactagcaagtggatcggtcagtcgatcggtcaagcttggcatgaaataccctaaatccgaccctagttctagaaaattagtctaatgtttgtagtgctaattaactaactactatgttttgtcgcatcaaaaatttggagttgacgttagttttgtcatggacttaacaaaagaaatttcaaccgtccaattgatattttgataaataagttgcaatatgtatacacgtaaacttaacattcagtatcctatttattggatgttactgaaaatgttatatgtattttagaaacaaaaaccaaccgatagttttggttttaggttcatctgaaatacgtacccaacatgaaaccagagacataatacatagtttgtgattttcataaaacgctattaatgacatataataactcatctttcacgtagatatttcttgttatattagtattttgcagtatttttttgtttgatttctactatggaaaaagatggaaacgctagacattcatttttttggattgatcacaatatctagaaagaaatgagaagagacattacaaatatctaagaggagagaattataagaccacctgtcccatggtgacgtacaaacaccatcaactttttcatattatttggtttgtttctatagtttattgtaataactccttatgtggaatccaacgaatcttatacgacaacaacaaagattagtgtaagatcgcatgtataaatatccttgacacttggagaaaccttagtggttcaataatgtgtataaccttaaaataatccagcaccatgatattcttttacttttaattatgctttctaagaaaatgttcattaaggaagttaaataattataataatcataatatatgtccctgcattaaacctctagatcatatacgtggcaacaaaacacaagttgtaaataactttagcttaaccctatcaaaaagataaaaatttagattaaaaggattattctattggatttgatgccttgttaaaccatgttacctaatgccttaacattatttctttaatcttgcataaaataatggatcaaaatgaatagccctgtaatatcctcgtttcgtgtatatgagaatgatgaagcttgggtggcttaataattataacatttaaatttgatttagtttcttaaacttttcaatagaattctaactgaaatcaaataaattatgctttggatctgtttagtttttgatttaggctgaattcgtttatatatatatatatatatatatatatatacaaatataatttctgtttgatttaatttatttttcttttttttggtttaacatattaaaaacaaaaaccctaaaactaatgagtttaaaacttgtgtagtaagtgaacggttatcttggtctgtcgaggttatgtaggaaagatactctttgggaagaccttttcagaaattttgatgtgggatcgatagctcgtaaaattcttctgattcattccaccatatgcgtaagaagtatttgcttatagcctatagggagacgatcagatagtgcttcaagggaaaattttcattggacccttcactgtttcatttgaagatgaaaattttgttataggttatgaagaatatttttctataaggatatatattgataggtttttgaaactgattgtgatgaagtagccacaactcaccattgttacgtctccttggaattaatccaaaaaatttcaacctaccatgacactagtttacaatgtgttaacttttctaatttctcgggttttattaatttctatacttgtaattcccatacagagactattaagcttagattcttagaattgtttttaaaaaaattaaacttgtaaacttttgtctttcagatttggttagcaactaaggactcaaaatgtagttggagaaaagaagaaaagttttggtttaatgtatcaatgcatgttttcatccatgattaaaactcaaaagaaatataccaacaagaggggtaatttagtaatttgtgtatgatgatgcctttggagatcaagagttgaatggacagaggaaatgatacatacgaaagacttatgaaaacgaccagtgaaaaggggtaacgagagcacccaagttctcgtaattcttttgtgtttacattaaattctaattattgctaattaagagcttgtagaactatttttgtagtttaaggggaaaaaggtatgtatattgcacggaattttcttttagttagtggttagatgatatttatgattctaaaaggtacacaactctaaaaatgtaaaaagattgtcttgtcactagtctatatctctatagaaaacaaacaaacaaaaaaagtggtggagccaaggagctagagtgagtgtatatataaataatgaaaggggaagaggaaaaacagaacaaaacacaacacaaagacaaaacagaggaacacttaggtttcacaagacagagagacaaaaagagattggtgggactgttagagaaggagaagacactacttctcttatttagctttcactaaagaaaaaaaaactaagaagaaataatgagtttgtggggagggatg

SEQ ID NO: 2885 - DNA, 3000 bp, Unknown
  misc_feature (1)..( 3000): cDNA_ID_3070429_gDNA_ID_1620613_Annot_ID_161961 3000 nt of promoter + ATG
tctgccggctctggaaactctccatcctcttcgtattctattttttccttggcaataaagtaagtgtttcctttcaaagacgctccacgttgataagactctatttcccaacggggagcgatatcaagaaccctccatgaattagagctaaaatcgtagatttcgtactcaagaaatctgtgcttcatgttaaagttgtaatattccagaaacctcaagattttgtgtttacggttattgtcgtatccgatagcatacctgtcgaataggcggtaattagtgttaccggattcgatccacctgatttgacccaaataaggattccataccacgagcctaatgttgtcctctttggtcacgcacaacaataacccgtcgcattgaaaaactttagatatcttgacttgattaaaaaaatgacctaactcctttatagatggatccacgaattcggtacctccatcttcgtttaaggttccgttgagatcaaacctcattgaacaaagcttatacttcttcattatgaaccgaaactgatcccttgtttcttctgctttacatagaattcgatctttgaataaagtgttccaccgtttgcaagtggatcgtactgctcctagagaagttctcggaaccctagacaatatctcctctaacaaatcctgcgaaagatcactcatcatcgtcattgtttcaaatataaattagagttctcttattttgcttgcacactcttttctatgtcttcttattatataaaacttttacatatcttcttattatataatgcttagtttttaaagttagtaactcataagattttgatatgtgtaaaagataaatatatttaaattaaaatgaaaattatacaataaattacaaatcctaaaaataaaatgattgcaattactttctttaaaaaggtttataaaattaacaaataggcatttaaattaaatagtatagtaaataactaatcttgaaaatatctagtattaaaaaaataaaagtatacaaaaaagatgaaagcatataatcttattatataattgttgatgtttaaaaattagtaactaattaacatgattgttatatgtgtcaatcatttgatgagatattgatacacgtaatgagattttgatacatgtaaaaaacttcccccaattatattttgacacatatttacacaaaaattaaacttacaaatttgtttacataaaaacatatttattaaagtatataattaaagtataattcaattaaacaataaattttatataaagggaaaatataaaaaataattactattactattttcaaaaaaatattattaaaaggcaatagaatataaattttttatattttaagtaaaaaatcttattatatagtgtttattgaattatccaagatctctatgatcgtgaaatttattaagttatcaaagatttttatatcatcatgtttataattttctatttcatttttttttctaaattatttattttgatttttactttcatatttgaattatataagattttatcatatatcatcgtgcttataattttagattgttacatgtgtcatgatatatataaaactttatattatatatttccaatttgattttctagttagaaatatgtgatgatttcaaataaatgattgtttttgaacttcttttttcagttagtaggtaagatcaacgtagaaatgttattgtggaatcagtagtaagtattatatcatcaacttgagcttacaatcatttcattagagttgatcggtaggttaaactgaggcttagtttctgatttcagcaattttatgaggatttaatatatctaatttatgggttccataccacgagctggcgagcctagtcttgtcctcgttggtcacgcataacaataacccatcgcattgaaagacacattagatatcttaacatgattcagaaaatcatctaactcctttatagttggatccacgaaatcgtcacctcctccttcgttatattttccattgagatctgaacctcattgaacaaagcttatactttttcgtcataaaccccagaaactgatgtcttgcttctccattacataaagtattttctttggataaagcgttccatcgtttgcatgtggttctcaccgctccgagacaagttatgggagccctagagagtatcttctctaccaagtaattcgaaatatcagagatcgtagtcattgttccgaatagaaagaaatgagggttttctaacttgcccactctcttttatatatagagagacatacaaattaggttacccaagtatatttgtcacacaaatatacgtatatgtaggtgtcaaacacggatgtgaacaaattgttgctacttgtatgtggtttataattctcccttatgtcgtgtaaacaaaaccctagatctaggagctcatttagcaagttttgactctattaatttgcctattctttcacaatttcatgtgtagatccctaaccttgctttagctttccgacttttcttaattaatacgcttagaatttaaaccttcttttccatgtatgcagtagtgtcatgctacttgaaagattgtttattttacttgaagtgtaaagagtaattactcgtcccgttcagtttccgatcttctctccgactaagtcttgccggggcttctgcttccctttttttgtaacccgctagaagctgtattggcccattaccaagcccaagttgctggattattaaaataataaaaattaatcatcctgcctaatcacggtttaaattgtgtgctagtcaaagaaaaagtatgattcttctgaagagaaattacataattaccaaagaaaaaaatgatttttttttaggggttttaattagttagaaaaaaggaggctcctttggaagaacaagtattacaacagtcgtcgtcgtcaagcggcgtcagagaaagtctctctctgtgtctaactgaaaaaaatg

SEQ ID NO: 2886 - DNA, 375 bp, Unknown
  misc_feature (1)..( 375): cDNA_ID_3070398_gDNA_ID_1620613_Annot_ID_161988 3000 nt of promoter + ATG
gattatagcttcaggatatgattctctgtttgtgaagaggttaatgaatgagttcaacggtttcgtgtgcttttataaagatggcgtcttttgatgatcttgttgttgtttttcctgattattgagttgactgaattttttagcttcaggaaatggtaaaaatcttagtctgaaatttcgatccttgatatgtagatttcgttcatgtcttgtcgattacttgtttttttgttcttgtgattaatgaaatttgggaccatatcttaaagttcttagctttttgttctcttatggactaaggttttgctctatgtgtcaggtgttgtgaaatttactttgtatgatatatagaaacttgattataatagaagtatg

SEQ ID NO: 2887 - DNA, 3000 bp, Unknown
  misc_feature (1)..( 3000): cDNA_ID_2029104_gDNA_ID_1620613_Annot_ID_161986 3000 nt of promoter + ATG
ttggcttatgtttttcttgtagcatgtcctggagagagggaagcccgatgaaaggagacagatcattgagaagttgacagggaatgttgttcagatgagtcagcacaaatacgcatctaacgttgtagagaagtgtttggaacacgctgatagtaccgaaagagagttcctgattgaagagataatgggcaaatccgaggaagacaatcacttgctagtaagaacaaaatcctaaagatagctctttgaatcctcctggacttattttaacactcttttgttctgcaggcgatgatgaaggatcagtttgcaaattacgtggtccagaaagtcttggagatcagtaaagatcagcaaagggagattctggtgcagaggatgaaaattcatctccaaagtttgcggaaatacacatacgggaaacacatagtagcccgattcgaacaactgtttggtgaaggtacttttctctaaaactaaaacttgagttgtcaatatgactctgctaaagaaatctgaacgttctaatatgttattgttacagagagtgaagtctcagaagagggaacagaaggttagacagaagattttcttttgggttgcagatttgtacaatgtttgacttagacaaatatgtatttgaaaatgcttatgtatatatgcttgtatctatgaatggaagtgtgatggtattacaatatgtatatggtgtggacatgatctgtgattaataatttgatttgcttcttacttctttgttttgacgagaagaacacagagaattagcctcaagaattaaaaaaaactcatcttctacttctcatgggaatcataacactcccaggtgccaaaaaaacatctcatgtccaagccaccacattccctaaatcataacttagaaatgtgatgacaggctttagctttaaagaaacaataataacttaggttacaatttcgtcattatatgagtggtttggtgttggcggcaagcaaaatatctttccaggcttcatagaagacccaagtaatgcctgaagatggcatgactttcaaacaacttgctccccatcctctgtagagtcccatcactccttctttcttcactacttctgctattgctgcagccatgtttggtgggcattctcccttcagagctccaaccatcaaccgcttccgcgctacttccaaggggaagcttatggtgctcgccgttagacctgaccccagtcacaactcaatgagtcttaaacatgatttaagtaaggaaatactgtaaagggagtggtttcttcaattacttaccagctaaagctccaagaacaagcatctctggacggcttaaagcctttttgttcttggatttgcagtatgaggtcttcattttgtcatacatgaagtaataacatgtgctgtaaggaagcatcccgaccaatgttggtcctaagccagcgtaaaatccacggattccatcggctctaaaaattcttggaattgcaaggcttaagcttggataaatctcagggctcacagtcaatctatcctggtaaagatcagagaacatcactctctttcaactctagactaaaaaaattcaatagcgttataaaacagactttgattgactaagacattaccttgaggacttcgagaggatggcaaacaagtgtactggcaataccagcagatgcaccagccacagcaacaggagagatccacgatatggacggactgaaactaaaatcaccgatttcaatcttggcgtcctcaatcttcttcaacttcacttgagctgatgtcattgcacgttttacccactcgaatgtccctaactcaattgcttgcgttggaatgattcgaatcatattgatttcattgccagcccaaagaccttgccacccttgcttctgtacaacttccagaaaactacctggaatgcttctcgatccaacaccaacaatcattcttgtcctgccagatttcacaccgcacaatgcaatttttagttaaattttagacatcaaagtgtattattgaggagatcacaagggactatacagaccttatagtctcaagtggagcaagaacagctttggtcatagctccagctaaagccccactaagaaactcacgggcttccctagacttgaagaaatcctgaatcaaacataacagagagaaaatatcacacaatggttctataaaatcattcaatcaagtagcagacccttatctcatgcatatccaaacaacataataccattaccaaaacataatccagaatgttaaaactccacaaattcaaatatactcataaaagcagagagagactggaccagaaagaacaaaaagaaaaggaactgactttaacaggaatagtgaagtcaggaaagtgaggttggagacgaagatgagaatccgatgaagctgaagaaacagattccttgtccataaccacaagcccttcttttggaacaaccattgccattttctctcactctctgtctccgtttgttctttcaaagattttatcagagagacagaacaagagattcaaaaaagggcaacagagaatattcaattaaaacataattagaaaacaaagaaaaaaacaaacttccatcagattgtgaacagagagacctagaagagtataaactaataatttatgggaagaaagatttaagctttttagggtttatgtgtttctcccaatttttattttattttaacaattttctagtaatttatttacaaccccacttatggaatcaaaacgctcgtttttggccctttatttctccaaaatatctttataactcgtaaccgggcgtttggggttgacgattcgatccggttcaccaattttctcaggtttttaaataaccgattttaactggtccaatcagccggtcctgggttagcggccgagccctatccgattagtttactttctcccactccgagagctttctttctcactcttcaagctcgacgaagatg

SEQ ID NO: 2888 - DNA, 3000 bp, Unknown
  misc_feature (1)..( 3000): cDNA_ID_3070402_gDNA_ID_1620613_Annot_ID_161983 3000 nt of promoter + ATG
gttatttagcgaaaaaaaaaaaagaaaaagaaaagttcattgggatcgaaaagaggtaagattgttcttgaagaatcgattctatagagcgtgttagcttcaatgctaacttgggagaccccagttatgcttgcaagcaacaccgcctcaaccaaaaagctagccttcattaccacctttctcatcattgtgttatgtccggtcacaatggtcatgtctcagccgcaggcggatgttttgccactgccagcctcagacgcagattgcctcttgagatttaaagatactttggttaatgcatcgttcattagcagttgggatccttccatctccccgtgtaagcgaaactcagagaattggttcggtgttctctgtgttaccggtaatgtttggggcctacaactcgaaggaatgggcttaaccgggaagcttgaccttgaaccattagctgcaatcaagaatctacgaaccttgagcttcatgaacaacaaatttaacggttcaatgccatctgtcaagaattttggtgcgttgaaatcattgtacttgtctaacaaccggtttacaggggagatacccgcggatgcgtttgatggtatgcatcatttgaagaagcttctgttggctaacaacgcgtttcgagggagtatcccttcttctttagcttatttgccaatgcttttagagttgaggctaaatgggaatcagtttcatggggaaataccttattttaaacaaaaggaccttaagttggctagcttcgaaaacaatgacctcgagggacctataccggaaagccttagcaacatggatcctgtctccttttcaggtaattaaacaaacagttcaagtacatctgcaaatgtttggtaaactataggagttcttatgtaaaaacagaatctttcttgctttgttgacattgcagggaacaagaacttgtgtggtcctccactaagcccatgttcgagtgattcaggatcttctccggatctcccttctagtcccacggaaaagaacaagaaccaatctttcttcatcattgcaattgttctgattgtcattgggataatactgatgatcatttcgcttgtggtctgtatccttcataccagaagacgcaagagtttgtcggcttatccatccgcgggtcaggacaggacagagaaatacaactacgatcaatctacggacaaggataaagctgcagattctgtaacgagttacactagtagaagaggagcagtaccggatcagaataaactcttgtttttgcaagatgacattcaaagatttgaccttcaagatcttcttagagcctctgctgaagttcttgggagcggaagctttggctcttcttataaaactgggataaatagcggacagatgctggtcgtgaagaggtataaacatatgaacaatgttggaagagatgagtttcatgagcatatgagacggttagggagattgaaacatccgaatctgttgcctattgtggcttactattaccgcagagaagagaagctcttgatcgctgagttcatgccaaatcgtagcttggcaagccatcttcacggtatgtaacattcaacttttttggtcgattaaaattgtaactttatcagttttgactaaaaaaatgctctgtttcagcgaatcattctgtggatcaaccgggattggattggccaacaaggctaaagattatacaaggagtggctaagggtttaggttacttgttcaacgagctaacaaccctaacaatccctcacggtcatctcaagtcatcgaacgttgtattggacgaatcatttgagccactcctaaccgattatgcactaagaccagtgatgaactcagagcagtctcacaatctaatgatctcttataaatcaccagagtatagcttaaagggacatctaactaaaaagacagatgtttggtgcctgggggtattgatcttggagcttttaacaggtaggtttccggagaattatctaagccaagggtacgatgctaacatgagcctcgtaacttgggtgagcaacatggttaaggagaagaaaacaggtgacgtgtttgacaaggaaatgactgggaagaaaaactgcaaagcagagatgctaaaccttttgaaaatcgggttgagttgttgcgaagaagatgaagaaaggaggatggagatgagagatgctgtggagaagatagagaggttaaaagaaggagagtttgacaatgatttcgcatcgacgacacataatgtctttgcttctcggttgatagacgacgatgactttggtttcgccatgaatcgatgatgaaactgatcagtcttctccagaacaatggaaaaagctaaacaatttgtaatctttgatgccaaataaaaagaagaactttctttttcttctttgttatgtaactttttccattcttataaatcattctcttcgtgtaattgtaaatccattttgcagagttttgaaaattttactcatttcttattttcaagtacaagaatcaaatccatgcaaaaagtaatgaatccatgcgtagtgacaacatagcttgagatcgaaatactcaaattgcattgtatgtggatgaaaagtttccaacttcaaaaaaagtttggaacttttttctcgagaattgtattttagggctaaaaattgaatttttggggataaactaattactatggcggagaattcgcggctacgagagctacggagacacagatgatgaaagagagaaagagagagagagagagagagaatgtgaggttaaaattatccattgttgttcttcagtgcaccactgaatcgaagttttctaatttggagaaagaggatttctcaaaacccctaatttaggaagaccgcagatttctttagtattgagaatgagattctccgagaagatggattagtgaatcgagaggttgatatcgttaaatgcggggattttgcaatctagggttcttaagcattgtaatcg

SEQ ID NO: 2889 - DNA, 3000 bp, Unknown
  misc_feature (1)..( 3000): cDNA_ID_2176007_gDNA_ID_1620613_Annot_ID_161978 3000 nt of promoter + ATG
gcaaagaatgcacgtgaaagtttgaatcaactaagagttagtcttaaccgctctttgatgctgccaaaaattgataatgacgaggaagagataacggttgatgaggatgattttaaggaactgcatctgcagatcaagtccttgcgtggttcatttaaccagaaactaaagaagttccctgtcaacagagactcggtcaactcatcctttgtaacagcattcggtgaatcagagctaatggatgatgatgagatatgttcagaagaagtagaagttgaggagaatgattttggtgaatctttggaagaacatgacagtgctgcaacagtatgtaaatcaagtgagaaatccaggatagaggaatttgtatcggaaaacagcatatcaatcagtccctgccgtcaatccttaatcttgcaagaacccatccagtcagagtcacctaaattcagagattctctacggaagagcatagctctttcttcgtcatgtctcaggaatcagaatagcttggcgaagagcataaaatccacgtgttttgcagagagccaacatatcagatcatctttacgcggaagcaagatattcacaggttctacagaatctctagctgcaagtctgcggagaggcttggatattattgacaatcccatgaaccctgcatcaaaccgatgctcagtttctttgtcttctgataacttgaccatgcaacctcccacagatgatcgattacctctgtcgccactctgtccaacctgcagaatttgcagctctaagttaccaagtgtagttgagggagtaagtatatgatatagcagatacaatatgttttaatagatttagtttttacagttatcctgaagctaacgttgctggatttattgttaatcaggatggatatcatatggaaggggttcttgagaagcagcaagagcttgaaaaattgtgctcagagcaagcagccaagattgaacagctaacgcgcctggtaacccaatttctatgtcttatgcctactgaaacttggatcagtacatatggttaagcagtctggttatatcatatcttcttaaggtagggcaacacaaacttcaaactgaggatgaaacagaaaaacttatgggagcaagtaatggagaacgacttccttctgcaaatgaaaaccaggttggttcttactttaatttactatgtgactactatagtgaagaaaatatgatagattgtaacataaatcccaactccatggttctgtagcttctcagctgtataactgaaacatatgacgtaaaacaaatctcggatgatgactccaagaagacagactttgatattggcgagaaggaggcattactcaaagaaattgaggatctgaaaaaaaaattgcagacgcctgtaaccatgtccaccaatgaactgagatcatctctgttggctcgttcgtttcaactccgtagcaagaatgctgaaaaagatatcgaggaagaaagacttaggtgcacagaaatggaaagcgagtggatatcattgactgacgaattcagagtagagattgaaactcaacgtacacgcgcagagaaagctgaagcccagcttaaacaagagaaactatcttctgaggagctagaagatgcacttcgcagagctgttcttggtcatgccaggtttgttgaacactacacagagctacaagagaagtacaacgacttatgctcaaagcataaagcaacagtggaatggataacagagttgaagaaggcagtagcaaaggctggtaaaaagggttgcggttctcgttttgctaaatcacttgcttctgagctctcagcacttagagtagaaagagaacgagaaagagatctgttgaagaaggaaaacataagcctcaagattcaactaaggaatactgctgaagctgttcatactgctggagaagttcttgttagactcagagaagccgaacaatcagcatcagctgctgaggtaaacaaatttttcatgttttaatcgatgaactgttggattgagactgtgacattgttttctgagtgactgtttggttgcaggaaaagttcaatgaagtagaagaagaaaacgagaagctaaagaagaaaatggaaaagttgaagaggagacacaagttggaagtggtaacaatcaaaaagagtctaaagcaaaacacgttgccagaatctgcattgcagccactgcatcagaggaactcggctattgaggaagaaggaatgtagaaacatcattataccaaagtgcataacttgaagacccttcttggatctgattggtatattatacacatctttattctgcttatttttcactttattgcttctaataaaattcaaatgtccttattccacaaggcatttttagttttttcccaattgaattatttgttctgctgtatttgatttgaatctcgtgtttgtggcgtgcaaactggtctctgtataactttaactttggtatttcattttaattttcttacatttaaaattgttatctttctttccaaactcaaattcttcttacaagatatatatattgttgatcatgtaatacaagagaaattctaatcaaaatagagtagactttaattatgggaatcctattttgccaaatcgacaatcttactctgtttttttttttttgtcaaggatcttactctgtttaaagttaactttttgttgtatatgtcaatttagttcaccaaaaaaaaaaaaaaaaactcatgttttgttatgcagtggtaaaagttttggaaagtttatgtgtttatatatagaatatttcttgtttatgaataattttctataattaagaaaataaatctctacattatcgaaagcaaaatatacggacatataagaaaggaaactagaatcataataccgaattataatcgaagttgttccattgtgtcatcgaagttgtgcttttagggaaaaacaagaatacagacagctctagaaaccaagaaca

SEQ ID NO: 2890 - DNA, 3000 bp, Unknown
  misc_feature (1)..( 3000): cDNA_ID_2176003_gDNA_ID_1620613_Annot_ID_161977 3000 nt of promoter + ATG
tggaaggagaggatgtcctggatcaaatctagcttatatgattgtaggaagtgcaataggaatgatggtgcagtgctttgactggagaatcgaaggagagaaggtcaacatgaaagaggctgttaaagggaccatccttaccatggctcatcctcttaagttaactcctgtcactcgacaaccacccttgacttggatatgacactgaatttgcagacaataaaaatagatttctctctattttttgtttatgggtttcccggtattagtctggtttggcatttgtagaggaggatgttggggcaatgatgttgatcttgtttctcgaacagaccctctgtcgtttttacatttaaatggttaaattattttgtaattcagacttgagtgcacttcccaatagacttgctaattgagcgtttctatcttgtgtcacatatgtcatatgtcagagactttaaaacattacatctgttgttgtaaaatctgtttttttttatcttcacatgcacatttcttagttacaagactcattaagatccacgtgtggaaccttaggtgtcggtacgtggggaattttttgatttttgaagattctttttcacttactgaatgattattatgatcacgaatgtcaaggaacagttttgacccgaaacgtttcttgttgaaaaaatagttatatactttcttctttccattttttcatagattattgataagaggatactctgtttcatctgcctcattagtttgagcaacaatggcagcaatgttgactgttgagtttcaaaactgcttgatctttatcctcctctgcatccttttactcctatgttaccctctctttttcaagaaaccaaaggtctcacaagatggatttggtttgcctccaagccctctatctctgccaatcattggtcatcttcacctgcttttctctaatctaactcacaagtccttacagaaactctcctccaagtatggacctctcctctatctccgcatcttcaatgtcccgataatctttgtttcctcggcctcagtggcatatgagatcttcaggggacatgatgtgaacatctcttttcgagggaaccctcctatcgaggagtcccttttggtcggatcttttggatttttcaccgctccttatggagactattggaaattcatgaagaaggtcatggtcacgaaactgctcggaccgcaggcactacaaaggtctcgaggcatccgtgcagatgcgctagaacggttttacatgaacctgcttgataaggcgatgaagaaggaaagtgttgagattggtaaggaaacaatgaagctcatttacgacagcatctgcaagatgattatggggaggaatttttctgaggagaatggtgaggcggagagagtcagaggcttggtgaccgaatcgactgccttgacgaagaagatttttatggcaaacgtgttgcacaagccccttaagaagctcggaatctcattgttcaaaaaggagataatggatgtttccaacagtttcgatgaactgctagaaagatttcttgtggaacacgaagagaaacttaacgaagatcaagatatggacatgatgggcgtgttgttggcagcttgccgagacaaaaatgcagagtgtaaaatcactaggaaccacattaagtcgttgttcgtggtaattgtgtcttttagtaggcagattcgtccataatccaaaatatattgtcctgtctaagaaactttttccaactgcaggatcttgttgttgcaggcaccgacacttcgagacatgcaacacagtggacaatggcagagataattaacaagcctaaggttcttgaaaaggtaagagaagaaatttattcagttgtaggaagaacaaggttggttcaagaaacagatttaccgagcctaccttatttgcaagctactgtcaaggaaggactgagattgcaccctcccgggcctctctttgcaaggacagcccgagaagggtttagtgtcggaggattttatgtaccagagaacacaccacttgttgttaatgcttatgctatgatgagagatcctggttcttgggaagatcccaatgagtttaagccagagaggtttctaggttcaggaaaagaagacgagagagagcacggacttaagtacattccttttggtagcggaaggagaggctgtcctggaataaatctagcttacattcttgttggaaccgcgattggagtgatggtacagtgctttgactggaaaatcaaaggaaataaggttaacatggaagaagctcgtggatcactggtattaaccatggctcatccacttaagtgcattccggttgctcgaacccagattcccagttgctaacactaagctcgggaaacgtaaaccaagtagtttgctttcttctgttagtcatgtttatcgtatcttttaatctgcagagtccgatttggtgacttattgttatctggaagatgggaatttgctttcctatgatgtgttcaacttcatttgttatgtttgaaagtctcacactttcaaataaaatagcagtagaaaatgacatgacacgatttgggactaatcaataaaagtctcctaattgtatcatttatcaccaaatcatgaacagtttgaaaataattattaaattgttcatgatgactaacctacatttaaatagtaatcaacaacaacattaaacttttttgagaatttttctataattgttttttcttgaactgcatcaactattatctctcacctaataacaataattgtttttaaaaaatacagaagaaaaaatcctataacggtcgtgtgaagtagatccgaatccaatgatcaatttgaaactttgaatagaaagaaagacaaaaggaaaggcaaacgaattttataattactctttttccctctctttcaaattttgaatctttcgtcgtctcccattttctcgatctcgcaagctgtgtcatttgagaagcc

SEQ ID NO: 2891 - DNA, 3000 bp, Unknown
  misc_feature (1)..( 3000): cDNA_ID_2113679_gDNA_ID_1620613_Annot_ID_161969 3000 nt of promoter + ATG
ctctccatgaagcagttcacattatctcagctaaattcctaactaaactacatatcatgtccaattataaggctacattccatgacacatgaaaatagagcagcaactatcatcaattaacatagtttcttactctttagttcttcttccatgagaagcttttgacactccagaaacttgtcgtccctgccagatctgtggatcaagattgttatagttacattagcaaggctccaacttctctaaataaaaaagaatgtctgggaaaatcaagacggtaaggtgaagtacatgcctgattgaaatgatttcattcctcaacttctcaaccatctccagagaactctgattttcacctctcaaatgttccatcaactcctctgaggctgcaaatagcaaaagagagaaaagacagacacactaagaacgtattcacagacttaaaaggtctcttgttataattctcgattccaagtgtttgtaattgcaatgtgaaatcaaacctaactagagatatctaaaattcaagtatggaacaaaggaactcaaactcaaagaacgaatctttcgaaattggtacctgaaacaaaggtaaggaatttctcttcttgttccttattaatctcatcgtattcggaatatttcttcttctgaaaaaaaaggagatcgaaatcaaaatcgaacccagaaaagcgaaattccggagaaaccctcagaaattgacaagaaaattaaacggaagatgttgcagaaaacctggagtttggtgtatttgtcgtagagcttggcgtagagagcttccattttctgctcactgtagaagagtgaagaatcaaatcaaattgattacccgacccggaaagaagcaaaatcgacgagcttacaaattcgattcaagagagcaaaacacactcgctttggtttccagatttgaaggagaatgacgaaactgatgaattcaaaagagaccaactttataaaattcccaaaccgacgacgcctatgacactgagaagtggattttaattctagggcaacggtttttttcttcttctcaaagcactatttttcttctatctttttatttaattttaagttcttaattataagaatatgaaaaccaagttatccattggattcacacatttttttttttgatgaaaagatctattttggtccacacttgtgaccataattgtacatgccatgaaggtcacgagagtttcgctgggaacttagtacaaatttcctctgttataaacaatcctgattgattattgactacggattcctcttgtttcatcaacctaccaaaaaaaacaatgatatcaccgttgacgctcaaaactccttcatcttcatcctcttatgtctcttctcacttctctgttgctatctcttcttcaagaaacctaaggatggctttatagcgaataagataatgagatttttggggaacacggagaagaggagccaaaggacatcaagatggagacatgatggacgtattgttaatgcttatgatgatagatcctgaatcttggtgatgtcctaatgagtttaagccagagaggtttttagcttcttttggatcagggcaagacgatgcacttcagtacattcttttcggaagcggaaggagatgctgtctgggagtaaatctgagttacatctttgtaggaactgcgattggaatgatgttgcaatgctttgactggaaaaccaaaggagacaaggttgacatggaagaggccattcgaggattgaacctgaccatggctcatccccttaagtgcattcctgttgctagaaacctaaaccctttggcttgctcgaaccttaaaccctgtaactttgaatttgcaaaaaagttgttggtgagaggaagctctgctccgctttgtatgttcccgtgtccaagtctcccggtttaagtggctaccttttggtttagtttggtttattgtgtgaaattgtaaataattgtgtagtgttcttcggtttaaggcatatatcggtttcattgttcactgacttcactgacttcattcacttcaaatcttgtgtttatgatcttaaaaatgcagcggtttttaaggttgattttgttttctccgattcgattctctgtataatgcgatcccactcatatgtgactaattgggtttttgcccatataaaggaagcaaaattcaggtgatgaaggaaaaagatgaagatgtcggctttgaagtgaagaaattggagatttaacaaattcagaagtttgagggaaatttacagcattggaatccctctagacactgctggttaggattgggaatggaggaattaacagctgcaagatcaagaaatcccctaagcagctgaatcgtgtgaccagaaaggggctgattgttgtgaattgtgatcgtctgcttttcttttacttgagattcttgaatctgatttctgatagcgttcgagcgagagagagattttcatgtctcggaagctgatttctacaagagtttatggtcaagacatggacttcccaacatcacttattttgcttggccggacacaagaaggtgggttgggatttagagttagaccactttgacatgtttacttctttgagattgagctaccctattttggtatgtcttgcaactcctccattattcttgtttgttccaatgttttggtctcttaatcctatcctaggaatttgctgtacttgctctggagtcaaccataaatccagtagggaatgattgaatcacatccagtaacatgtttttagtcaaaacatctatctgagattcttagtagatataagaagtttgacaaaaatgaaatgcttatttatagaagagtgatgaactatcttggtcccacactagtaaccacgatgaaaaatacattatttgtatctaatatatacagaggatggtcgattcttgattaacgaatctcatgtctcatcttcctctttcactttgagcaattatggcagca

SEQ ID NO: 2892 - DNA, 3000 bp, Unknown
  misc_feature (1)..( 3000): cDNA_ID_3070421_gDNA_ID_1620613_Annot_ID_161971 3000 nt of promoter + ATG
ctccgactcttcccatcattggtcatcttcaccttcttctctctgttctagtccacagatctttacagacactctccaccaagtatgggtctattctctatcttcgcgtcttcagtttccctgtagccctcgtctcctcagcatctattgcttatgagatcttcagggaacacgacgtgaacatctcgtctcgtggtttccctcctaccgatgattccctttttgctggatctttcagcttcacctctgctccctatggagattactggaagttcatgaagaagctcctggtcacgaacttgcttggaccccaggcactcgagcggtcacgaggattccgtgcagatgagctagatctgttttacgagaacctgttggataaagcgatgaagaaggagagcgtggatatctgtgtggaggcgttgaagctcagtaacaacagcatctgcaagatgatcatggggaggagttgttcagaggagaatggtgaggcagagagagttagggctttggctacccagttagatggcttgacgaagaagatcttattggcgaacatgttgcgtgcggggtttaaaaagcttgttgtctcactgtttagaaaggaaatgatggatgtttccagcagatttgatgagctgctcgaaaggatccttgtggaacatgaagataaactggacatgcatcatcaaggtacagacttagtggacgcgttgttggcagcttgtcgggacaaaaatgcagagtataagatctctaggaaccatatcaagtcgtttttcgcggtaaatgttcctcccataaggtggtttcattgagaatgcataacttttttgcctaagaaaaaacgttttgcaactgcaggatctcttatttgcaagcactgacacctttgtgcaaacaacacagtggacagtggcggagatcattaataaccctaatgttcttgagagattgagaggagaaatcgattccgtggtcgggaaagcaaggttgattcaagaaactgatttgccaaacctcccttatttgcaagcggtggtcaaggaagggctaagactgcatccgccggggcctctctttgcaaggttctcccaagaagggtgtaggatcggagggttctatgtaccggagaaaacaacattaatgattaatgcttatgctgtgatgagagattctgattcttgggaagatcctgatgagtttaaaccagagaggtttctagcttcgtcaagatcagagcaggaaaaggagagaagagagcaagcaattaagtacattgctttcggaagcggacgaagaagctgtcctggagaaaatctagcatatatctttttaggaactgcaattggagtgatggtacagggatttgagtggagaatcaaagaagagaaagttaacatggaagaggctaatgtaggactgagcttgaccatggcttatcctcttaaggtcactcctgttcctcgaaccctagtccccttaactcagaatccactgaaccggagttcatgaatctttggtaagtaattaggtagccttgtttttacgttaccgtgtctgagtttactggtttagtttggctaatgtgtgaaaccgtaaacaattgtgttgttattcggatttatttgtggattggttcatatatggggttatcttgaaagcagcaaactttagcttcttcatgttacttggttcaatggatttgaaggatgccagttggagtagcatagaaataaacattatattgcaatcacatgagtttcttttgcgaaccattcatgtttcagggaagggagggaaaacttaagatcttgcagtagatttgagaaatgttttggtctttatatttgtcctctccacctatgatatgctactcatgtgtggtttctgtgactttgattgaatttatgacccgaaaggaagaaaatttcagttgtgtagggtttttgtaatttagatattaaagctctttacggagatttctgcagtaattattcttcttttaatgcgctttcaagtagtgatgtttgcggcttcttggctccctggatttacaacgttttcctggcaaactcatcaaatttcttcaaaccaatgctcgcatattcatcagaacaagctcctcgacatcaacgcactctcacaactcacaagctccaagctagccttcaatatcttcattcaaccataatctcacttggtaaatatctctctttcagtaattcctctttctttttcatgggtactacattacaaaaatcagacaaaactttcacggattcctctttctttttcatgggaactacattacaaaaatctgacaaaactgatagaatattaaattcacttgtcgtaagatgtgagttattagcaaaatttcacggagttccaataaagaaaaacatttcttgatctagtaaacaaaacatggccatacattagattcattgattcttgataagagaaattgtatctaatggcaaagatatcttgatgattttaaatgctattttcttaagaaaattttcaaatatgatatgaaaccaaagatcacatacaatctaattttagtggttaaaaaaacaaaatcaaattaaccaatttaaacaacaatttataatgattgtggtcctcagtttacaaacttttccaaattgagtaaggctattacattttggtaacaaagggggcacggcacctcaactttccaagaaatttgtatttttatgtgctattcaaacactacattacggattcctctttctttttcatgggaactacattacaaaaatccgacaaaactgatagaattattaaattcacttgtcgtaagatgtgagttattaccaaaatttcacggagttccaataaagaaaaacatttcttgatctagtaaacaaaacatggccatacattagattcattgattcttggtaagagaaattgtacatttatatgtcatttgcctcgtcttcactttgagtaacaatggcagca

SEQ ID NO: 2893 - DNA, 3000 bp, Unknown
  misc_feature (1)..( 3000): cDNA_ID_3070417_gDNA_ID_1620613_Annot_ID_161972 3000 nt of promoter + ATG
cttgataagagaaattgtatctaatggcaaagatatcttgatgattttaaatgctattttcttaagaaaattttcaaatatgatatgaaaccaaagatcacatacaatctaattttagtggttaaaaaaacaaaatcaaattaaccaatttaaacaacaatttataatgattgtggtcctcagtttacaaacttttccaaattgagtaaggctattacattttggtaacaaagggggcacggcacctcaactttccaagaaatttgtatttttatgtgctattcaaacactacattacggattcctctttctttttcatgggaactacattacaaaaatccgacaaaactgatagaattattaaattcacttgtcgtaagatgtgagttattaccaaaatttcacggagttccaataaagaaaaacatttcttgatctagtaaacaaaacatggccatacattagattcattgattcttggtaagagaaattgtacatttatatgtcatttgcctcgtcttcactttgagtaacaatggcagcaatgatcaacgttgaatttcaaaactgtttcatcttcatgctcttatgtctcttctcactcctctgttactctctgctcttcaggaaaccaagctcaagacaaaactcctatgactgtgatctgcctccaagccctccttctatgccaatcatcggccatcttcaccttatcctctcttctcttgtccacaagtcttttcaaaaaatctcctccaagtacggacctctcctccatctccgcatcttcaacgtccccatagtcctcgtctcctctgcgtcagtggcctacgatatcttcagggtgcacgatgtaaacgtctcttctcgcggtccccctccattcgaggagtcactcttgttcggatcttccagcttcatcagcgctcccctccctatggagattactggaagttcatgaagaagctaatggtcacaaagctgcttggaccgcatgcactcgagaggtcacgaaaaatccgtgcagatgaactataccggttatacacaaacctgcttgacaaggcgatgaagaaggagagtgttgagatcggtaaggaaacaatgaagctcactaacaataccatttgcaagatgatcatggggaggagttgttcggaagagaacggtgaggcaaaaatagtcaggggtttgattgccgagtcatttactttgtcgaagaaatttttcttggcagcaactttgcgcaggttgctggaaaagctcgggatctcgttgttccagaaggagataatgggtgtttcccgtggattcgacgagctactagagaggattctgagggagcatgaagagaaaccggacgagcatcatgatacagacatgatggacgcattgttggctgcttataatgacgaaaaagccgagtataagatcactagaaaccagatcaaggcgtttatagtggtatatcattctatgatcacttttggttctttgagattaaccacacctaacagttcacaccaatacttgtccttgaataataagatacgttatacaattgcaggatatgttcatagcgggcactgacatctcagcgctaacgacacaggggacaatggctgagatcattaacaaccctaacgttcttgtgagaattagagaaaaaatcgattctgttgtagggaaatcaaggttgattcaagaaacggatctaccaaagctcccttactcacaagcggtagtcaaagaagggctgagattgcacccgcctacgcctctcatggtaagggagttccaagaagggtgtaaggtcaaaggtttctacataccagcgagcacaacccttgttgttaatggttatgctgtgatgagagatccaaatgtctgggaagagcctgaggagtttaagccggagaggtttctagcttcttcaagattaagggaagaagaagagataagagagcaagccctcaagtacattgcatttggtagcggaaggagaggatgtcctggaacaaatatagcgtatatctttgtaggaacggcgattggaatgatggtgcaatgctttgactggaaaatcaaaggagacaaggttgacatgaaagaggccattggaggactgaacctgacattggctcatccccttaagtgcactcctgttgctcgatccccaaaacctttttaagttcaaattattaaaaccgatgttcgatgtttgatgttggtgactggactatagtgttgtaagatgaatgaagttataataataacgaagcttgctttttgttgttctgttagtactcgttcattcattctctattaagacactcaaaatctcataccactctttatttttctcaaacctcacactctctattattttctacgttgcttgatattgtaacttcttactcttgtattgtatgttatggggatgattgctctcgtttattctctctcaatctatgttctacagagagtctgcagcccacttttgttgacaaaaggagaaaccaacacatcttattttcaataataaacactatttaatttttcaacaaaaaaacactcctttgactaagaattagtgaattaccacatgtgatgcaattctagaatacgtggtaacagagattatttacactatgttttatctacctttccggctttgagcaacaattgcaacaacgatgatgaccgttgagttccaaaactggttccttttcatatattaaggagagaatcatatctttgattattttattcgaaatcttatacaagctggtgcactacgtgtctctcatgtctcaacccatgatcagttagcagacgcattgacgaaaccactaccacgtaccagttttcaagctgcatgttccaagattggagtgacaagagtccctccatcttgagggagcgtattaaggagagaatcatatctttgattattccaatcatacctttgatttctcatatcattcgattactacaatc

SEQ ID NO: 2894 - DNA, 3000 bp, Unknown
  misc_feature (1)..( 3000): cDNA_ID_3070409_gDNA_ID_1620613_Annot_ID_161974 3000 nt of promoter + ATG
cttttttttgactttatatggcttctcatcaaaattacttaaacatgtctttgtaaccaaatcgttgccaatataactactttcaggtgctaatgatttttctctggaatttcattgactcttcaaactttgaaaatggttagggaatcctcaaatttgtgggagaaatataatacaatcgttgcaaagaatcatatagcaagattctttatttctctacatattttgtagtttacactttacataaccacacagacttacctggtttaggaagaatatacttctttttgaggttttgcttcgctgattagattgtttatcatgttgtgtagtaaacaggttttcaaagaggaaaaagaagaaggttatgaggaacattacttatactgtgagtcaatcttgaatccttctgtttagttgcattattagcttgagaggttatgaactctatatttattattattatcgcttagatcacgagtgtctcttatctgagtttatcttatttcaaaaacaaggttctagttctccaatatttcaccttttttccaaagaaaagcattttttaaaacggatccctgattatgtttcatacttcttcttcactttggagcaacaatggcaacacttatcagcgttgactttcagcactgtttcatgtacataatcctcctatgcctcttctcacttctctgttactctctcttcttcaggaaaccaaagggcacacgagttggctgtgatctgcctccgagccctccgtctcttcctatcattggtcatcttcaccatctcctctcttctctaactcacaagtctttacaaaaactctcctccaagtatggacctttcctccatctccggatctttagtgttcccatcatccttgtctcatctgcttcagtggcatatgagatctttaaggcccacgatgtgaacgtctcatctcgtggtgctgctgcgatcgatgagtccctcttgtttggatcttctagcttcatttacgctccctatggagattactggaagttcatgaagaagatcttcgccactaagctgctccgaccacaggtgctggagaattcacgtggtgttcgtgctgaagagttaaagcggttttacaggagaattctcgataaggcgaggaagaatgagaacatcgagatcagtaaggaatcggcgatgctcatgaacaacatcttatgcaggatgagcatgggaaggagtttttcagaggaaaatggtgaggcagagagagtcaggggcctggtgggtgaatcatatgccttggtgaagaagattttcttcgcagctacattgcgcagactgcttgagaagcttcggatcccactattcaggaaggagataatgggtgtgtccgacagatttgatgagctgctagagaggattattgtggaacacaaagacaaacttgaaaaggagcatcaagttatggatatgatggatgtgttgttggcagcttatcgagacaaaaacgcagagtataagatcactaggaatcatatcaagtcgttttttgtggtaaattttcctcattttaccgatttcgtttgagtatccatatgaaaattacttaaaaatgttccatgtcttcgcctgcaggaccttttcgttgggggcactgatacctcggtccaaacaacacaatggactatggctgagatcattaataaccctaacattcttcagacactgagaaaagaaatcgattcagttgtagggaaatcaaggttgattcacgaaacggatataccaaaccttccttatttgcaagcagtggttaaggaaggactaagattgcatcctccagggcccctcttgataaggacttttcaagaaagatgtgagatgaaagggttctacataccggagaagacaacactcgttatcaacgcttatgctgtgatgagagatcccgactcttgggaagatcctgacgagtttaagccagagaggtttctaagttattcaagatcagggcaagaagacgagaaagagcaaacacttaagtacctttcttttggtggcggaaggagaggatgtcctggagtaaatctaggttatatatttgttggaactgcaataggaatgatggtgcagtgctttgactggaaaatcgaaggagataaggtcaacatggaagagacttatggaggaatgaacctaaccatggttaacccgcttaagtgcactccagttcctcgaacccaacctttttcttttacttctaatctcgagattcttagttcctgacactcagcttgggaacacatatgaagtttgttttcttctgtactatacatattcatcaaagacggttaattacatttggtgtctttatgatttcctgcccttttcacaaaatttacgtacctttgttctttcgttttatatgtcgttgatcaaattctctaggttgattgtttccctatccgaatccatttcgtccctagagctgcttggttctagtatctgctttgtattgttttcaggctaaagttagtgtcaacaaaagctggattcctctgacgagcttggtcgctgcaaaaacgttttcaggtggcgtagctactgaattagtgaattctctcagccttgcaagctcacaagccccaagccaagtatccttcaaattctttattcattcataatctcacatggtaaatttctatgttcttgtcagtagttcagacttgtctttctttgacagctgttctcttggaccttttttctctatttttaggatccgaagaaagtgattgaaatctatgtcccacttactgtacttgcaaaccatgttatctttgcttatacatgtcttagtatatttgacgtgtcgcaagatctgagtatattaacaaaaacatttcaattattaataggtaatcaaagcataaccatacattagatttcccttattgataagagagtattatatgtgtcatttgcctctttttcatttgagcatcactggcagca

SEQ ID NO: 2895 - DNA, 3000 bp, Unknown
  misc_feature (1)..( 3000): cDNA_ID_3070413_gDNA_ID_1620613_Annot_ID_161973 3000 nt of promoter + ATG
ttggtgactggactatagtgttgtaagatgaatgaagttataataataacgaagcttgctttttgttgttctgttagtactcgttcattcattctctattaagacactcaaaatctcataccactctttatttttctcaaacctcacactctctattattttctacgttgcttgatattgtaacttcttactcttgtattgtatgttatggggatgattgctctcgtttattctctctcaatctatgttctacagagagtctgcagcccacttttgttgacaaaaggagaaaccaacacatcttattttcaataataaacactatttaatttttcaacaaaaaaacactcctttgactaagaattagtgaattaccacatgtgatgcaattctagaatacgtggtaacagagattatttacactatgttttatctacctttccggctttgagcaacaattgcaacaacgatgatgaccgttgagttccaaaactggttccttttcatatattaaggagagaatcatatctttgattattttattcgaaatcttatacaagctggtgcactacgtgtctctcatgtctcaacccatgatcagttagcagacgcattgacgaaaccactaccacgtaccagttttcaagctgcatgttccaagattggagtgacaagagtccctccatcttgagggagcgtattaaggagagaatcatatctttgattattccaatcatacctttgatttctcatatcattcgattactacaatcatggacttatttatgtatagtacatattctgatttatgtctattgtaataccctagctagcatctcctctgtatataagttctcactctgttttaataaaaagatatcacttctacaaactcttatatcatactcctctgcttcttgtcactcttttgttactctctcttcttcaagaaacaaaaggactcacaagtgcttccgagccctccggctcttccgatcattggccatctccaccatgtactcttttcttcagcttacaagtctttacaaaaactctcatccaagtacggacctctcctatatctccgtatcttcaacttccctgtagtcctcgtctcctcggcctcagtggcatatgagatcttcaaggcccatgacctgagcatctcctctcgcgagaaccctccaatcgacgagtccctcttgcttggatcttccgtctttgtcagggccccttatggagatcattttaggtttatgaagaagctcttggttacaaagcttttaggaccacatgcactcgagaggtcacgaggcatccgtgcagatgagctagagcggctttacagaagtctttttgataaagctgtgaagaaggagagtgttgagattggtaaggaagcaacgaagctcagtatcaacagcatatctgcaagatgagcatggggaggagtttttcagaggagagtggtgaggctgagagactaaggggattggttactgatttagatggcttgacaaagaattttttgttggcaaacatattccgctggccgcttgagaagctcggaatctcactgttcaaaaaggagatagtgtgtgtttcaaatatctttgacaagttgctggagaagattcttgtggaacatgaagagcatcgaggaatccacttgacaatggctcatcctcttaagtgcactccagttgctcgatccttaaaccctttaatatcttatctgtaaaatcgatgtttgaatcaaagttggtgtctggactaataataaggacgattgcgctctgttgttctgtaacttactagttcattcatcttattcaggttcccggtttattagctttatatttggtttactgtggtatgattttttctctcgtttatatttgttgaattgtgttaaccaatggactcccgaagctttggtttagtttcccgattaagcattttaggtttggttttccttaagaaaccgtaaacactgtttattgtgttttgtcttgtttaggaattagaacggttgaatttcagatttcgagattcaaatgcgattattgaaggtgatgtccagaaagcaaacaaatttcgtcggtgtagggtttggtttgtagaagttttgtgtcaaaatgtattttttttttttttttttttttaccaatttcgagtgacggaggaggaaaataagatttgggcttcgaagttcagtgaactaagtgtgattttgggagaaaatggagtaaattatccctgcaagaaatccatcggtgagtaaactactatgttgatgaatcgcattgtgttagtgatgattgcatctcttgagtcaatcaagattgattatttattgagatatgttcgtcttttctttgccttttttttgactttatatggcttctcatcaaaattacttaaacatgtctttgtaaccaaatcgttgccaatataactactttcaggtgctaatgatttttctctggaatttcattgactcttcaaactttgaaaatggttagggaatcctcaaatttgtgggagaaatataatacaatcgttgcaaagaatcatatagcaagattctttatttctctacatattttgtagtttacactttacataaccacacagacttacctggtttaggaagaatatacttctttttgaggttttgcttcgctgattagattgtttatcatgttgtgtagtaaacaggttttcaaagaggaaaaagaagaaggttatgaggaacattacttatactgtgagtcaatcttgaatccttctgtttagttgcattattagcttgagaggttatgaactctatatttattattattatcgcttagatcacgagtgtctcttatctgagtttatcttatttcaaaaacaaggttctagttctccaatatttcaccttttttccaaagaaaagcattttttaaaacggatccctgattatgtttcatacttcttcttcactttggagcaaca

SEQ ID NO: 2896 - DNA, 3000 bp, Unknown
  misc_feature (1)..( 3000): cDNA_ID_2175968_gDNA_ID_1620613_Annot_ID_161967 3000 nt of promoter + ATG
tttatcttcatgttccacaaggatcctttcgagcagctcatcaaatctgctggaaacatccatcatttcctttctaaacagtgagacaacaagctttttaaaccccgcacgcaacatgttcgccaataagatcttcttcgtcaagccatctaactgggtagccaaagccctaactctctctgcctcaccattctcctctgaacaactcctccccatgatcatcttgcagatgctgttgttactgagcttcaacgcctccacacagatatccacgctctccttcttcatcgctttatccaacaggttctcgtaaaacagatctagctcatctgcacggaatcctcgtgaccgctcgagtgcctggggtccaagcaagttcgtgaccaggagcttcttcatgaacttccagtaatctccatagggagcagaggtgaagctgaaagatccagcaaaaagggaatcatcggtaggagggaaaccacgagacgagatgttcacgtcgtgttccctgaagatctcataagcaatagatgctgaggagacgagggctacagggaaactgaagacgcgaagatagagaatagacccatacttggtggagagtgtctgtaaagatctgtggactagaacagagagaagaaggtgaagatgaccaatgatgggaagagtcggagggctcggaggtaaatcatagtgaagtcgaggttcctttggtttcctgaagaagagagagtaacagagaagtgagaagaggcttaagaggacaaaaaagaagcagttttgaaagtcaacgatgttcattgctgccataattgctcaaagtgaaagaggaagatgagacatgagattcgttaatcaagaatcgaccatcctctgtatatattagatacaaataatgtatttttcatcgtggttactagtgtgggaccaagatagttcatcactcttctataaataagcatttcatttttgtcaaacttcttatatctactaagaatctcagatagatgttttgactaaaaacatgttactggatgtgattcaatcattccctactggatttatggttgactccagagcaagtacagcaaattcctaggataggattaagagaccaaaacattggaacaaacaagaataatggaggagttgcaagacataccaaaatagggtagctcaatctcaaagaagtaaacatgtcaaagtggtctaactctaaatcccaacccaccttcttgtgtccggccaagcaaaataagtgatgttgggaagtccatgtcttgaccataaactcttgtagaaatcagcttccgagacatgaaaatctctctctcgctcgaacgctatcagaaatcagattcaagaatctcaagtaaaagaaaagcagacgatcacaattcacaacaatcagcccctttctggtcacacgattcagctgcttaggggatttcttgatcttgcagctgttaattcctccattcccaatcctaaccagcagtgtctagagggattccaatgctgtaaatttccctcaaacttctgaatttgttaaatctccaatttcttcacttcaaagccgacatcttcatctttttccttcatcacctgaattttgcttcctttatatgggcaaaaacccaattagtcacatatgagtgggatcgcattatacagagaatcgaatcggagaaaacaaaatcaaccttaaaaaccgctgcatttttaagatcataaacacaagatttgaagtgaatgaagtcagtgaagtcagtgaacaatgaaaccgatatatgccttaaaccgaagaacactacacaattatttacaatttcacacaataaaccaaactaaaccaaaaggtagccacttaaaccgggagacttggacacgggaacatacaaagcggagcagagcttcctctcaccaacaacttttttgcaaattcaaagttacagggtttaaggttcgagcaagccaaagggtttaggtttctagcaacaggaatgcacttaaggggatgagccatggtcaggttcaatcctcgaatggcctcttccatgtcaaccttgtctcctttggttttccagtcaaagcattgcaacatcattccaatcgcagttcctacaaagatgtaactcagatttactcccagacagcatctccttccgcttccgaaaagaatgtactgaagtgcatcgtcttgccctgatccaaaagaagctaaaaacctctctggcttaaactcattaggacatcaccaagattcaggatctatcatcataagcattaacaatacgtccatcatgtctccatcttgatgtcctttggctcctcttctccgtgttccccaaaaatctcattatcttattcgctataaagccatccttaggtttcttgaagaagagatagcaacagagaagtgagaagagacataagaggatgaagatgaaggagttttgagcgtcaacggtgatatcattgttttttttggtaggttgatgaaacaagaggaatccgtagtcaataatcaatcaggattgtttataacagaggaaatttgtactaagttcccagcgaaactctcgtgaccttcatggcatgtacaattatggtcacaagtgtggaccaaaatagatcttttcatcaaaaaaaaaaatgtgtgaatccaatggataacttggttttcatattcttataattaagaacttaaaattaaataaaaagatagaagaaaaatagtgctttgagaagaagaaaaaaaccgttgccctagaattaaaatccacttctcagtgtcataggcgtcgtcggtttgggaattttataaagttggtctcttttgaattcatcagtttcgtcattctccttcaaatctggaaaccaaagcgagtgtgttttgctctcttgaatcgaatttgtaagctcgtcgattttgcttctttccgggtcgggtaatcaatttgatttgattcttcactcttctacagtgagcagaaaatg

SEQ ID NO: 2897 - DNA, 3000 bp, Unknown
  misc_feature (1)..( 3000): cDNA_ID_3593850_gDNA_ID_1620613_Annot_ID_161965 3000 nt of promoter + ATG
caaccggtaatttgtttttcctgcatgatctatttactttgattcaaaagatcttttgagatcatcagccaccagaaaagcaccaatgctgattttgtttccctgattattttaccataacaggtttatccttcagcctaacttttataaataacccaaatggtgaagaatctgagctgctttacaagcctgcatcactcggaacatttcaaagagtggcaccggaatggatgagagaagttataaagttcagcacaagtatgtgtcccatcttctttgaaagagtctctcgagtcattaagctcaattgttgatcggtaccgtatgtacatctccctccccttatcttgtgtagtcatctctgatggcttcttagtgtgatgtttctcaataggtttgaaaagctagggaagttatcattgtatctatagaaatgtgtctctctttaactttggaattagtttcaaagatagtgtgtccttgtgatgaatcatattgtaacaagatcttgatttatcctttgctctcgataccctctcctcttgtagacctcataaatctctgatctattgagcattttacatgattcaacattttacatatttttgtaacaaattttatcattggaaagattaaatagccgttacataaggtaggtgaattttcaattcaaatgcatcaaaatagccgctataacctaagtgataacgttcggaaaatgctttaggataattcctttttattgcttttgaaaacgacgacgtttcttgtgtcgtacacgttttataacccagacccacgtctctctctctcaaagaagagaagaagaactctctctctatctctatctctatctctcttctccttcttcttcagtttcgatcattcttgaatctgattcttctcgagaaaaaagcgtttcaatttcagaaatttcgactacgattgttgctttgttcaattagaagaggcgaaaaaggatggcgacggttaatgggtacacagggaatactccggcggcgactacaccggcagccaccggatcaaagcaatctgctcctccgactaagaccgtcgatagccactccgttctaaaaaggttatttcttttttacatttttccgatcttggaatattctcgcgtccatttaaaggaattagtctttagcctcttaatgattagaatcgctgcgattgtttatagagttgttcatgtttctttaggtagattagattaggttttggctctacccatatccatttcttgtggtctacatgctttctagatcatttttagagaaaacgatggatccaaaactgattgtgacttctcttgttctcttctgaaatgatgggttctctctttgtctaccaactgtttgttataatgtctctaagagaatgatacatcaaactttgtatgtactacagatctcaagtactttcttttatgtaccctttcttgatcaaagcaaacaaattcatggttttgctaattcattgtttttccttaattgcaggctgcaatctgaactaatgggattgatggtaagctatcttttctctgcataactgaacctgttgatatggttggatgcttatatagaggcctttgggtttatgtattgcagatgggagctgatccggggatatctgcgtttccagaggaagacaacatattttgctggaaaggaacaattacaggaagcaaagatactgtgttcgaaggaactgagtacagactctcactcactttctctaacgattatccttttaagtctcccaaagttaagtttgagacatgctgcttccaccccaatgtggatctctatggcaatatttgcttggacattcttcaggtacataacaatcacttgctctttctacttgtgttactgtaaatcccatggaatcacatatcagagaagcagtacttaaaacagaatctgttttcacatcttttgtaggataaatggtcatctgcttatgatgtgaggacgatattactctcaattcaaagccttctcggaggtaaactctatggctgatataactgttgaggttacttatgaagaatttctctgttggtttgatccagtatctgatttttcctgttttgttttaattgatcagaaccgaacatcagctcaccattgaacaatcaagcggctcagctttggagcaatcaagaaggtaaaattgcaatagttatcagattacacatctctggacgtctccatttttcgattcataatgatattcgtcttcttgaacttgtaatgttatacagagtacaggaagatggttgagaagctctacaagcctttaaacgcatgattctcaaaaatcactgtaactgattttaaaatctcaactgtattggatcatatctcttttacttttataatctcaatttgagccaatattagcaatcaaactctacctttattacagttccacaatcaccacctatatctcttccgtaactgagatttgagaagttcataatagtaactctgaaatgttgtagtaagtatctgaaagtataatacaaaaaaaagtttctgaactattgaaaaatccagaaaccaaagttccccacgagagaagtaagactcaaacatgtgaaacgttggcaccggacaaagtactgaagactaatgaaatgttttgaaattgacatttatggccttctttttaaatccccaagcccataattcgtgcttaactctttattacaaatgggctttgagggtatatattatttcggcccaatataaaaacgtcgccgcttcattcataccctggccgtacatcccagaaaccttgaaagttaaaaacccgccggagtctctcactctcacaaacttttgagaagcattttcgcttcaattcaataaaaggcgaaaaatctctcactgcactttatctcgagagctcagatctccgatctagagcctttcgcttctcctcttctgttcatataacaactgaataatg

SEQ ID NO: 2898 - DNA, 3000 bp, Unknown
  misc_feature (1)..( 3000): cDNA_ID_2106933_gDNA_ID_1620614_Annot_ID_161999 3000 nt of promoter + ATG
ggagtcaacacaagtatggctgcgtaaaccaaatccaaaagttataatggcaaaaatctgtcataacaaatccgagttttaaggtaaaaacagagccaaaacatagtgattagcttctttccgaatatgagaacgaaccttctcaaacaagggctcttgacttttaatgtctacgttggatacacatcgttttaatgtatatttatggtgaataattcatgttgtcgtcaatatcgttataaatgcatggtataatttttggtacgcattgtctgctccattgtgtgtagaataactattcggagctaatcttaattttgaaaatgcgcggataaaagaccgtaattttacatggcttttctcttgatagaacttatagtaatacgacaaatttaaacatgactaattttgttgaaatatatttctttcgtttgtaaaattatgagtttaaactcacattgcagatagactaaagacttgactatcaaaaaatcaaaaactaagatcagaaatagaaaacacataggcaaagttcctaatttgcaaaaaaacaaagacaataccaataatctatatatgcaaacgaaacgaatatgatgatgaatacgtatcatttatgctatgtagtattgttcttgataattacgaatggtttaacaatataattatgtagataacgtttaatggacaattgtatatatgtcgagtacttttctcaacctagctatacgccttcaattgagacgtcttatttgtcttcattacaacaaaacaacaaaagacatgcgtgcttacgttacggtcactcaaaattttatacattttttgttaattgtatttaatcttattaattattatggttaccattactctgttcactttgcactacttgtttagcatattttgtaataactaaatttattttactcattaccttcaatgtatttcaatattctagtcaccaaaatgtaaatttcccgggttcagtgatcaataaaacagtacaattagtctataactatttgtttatgtttagctaattgaaatgtgtttaacactaaaagcatttcattcaaatagaggataaaacaaccatattacaaatttaattaatgtgatgcgaagctaaggcaaacaaagctgtaacaatcacatacttagatgtccccataaaggacgagaaataaataaaaacgaaataattagtatgaacattttgatttatatctttttctcttatcacaatttggattcaaatccgatgtatgtgtattgtagaaaataagctattaatatgttcgcctccatctattgctctacatgtaaattttgttttaagtttctaaatcataaaaaaaaattaggtattaataattacagaacttctccttaattaagtttagatttttaattataagtcctggtatatattttcctattagcttggaagttggaggagaaaacatggttcagttgattagatttaataccaattaattagtagacttttcctaatttactgacacttttgtatgttatgcaaacaatgcacacaaataaaggacataattaagtaccttgtgtccccgtggtaatcatgatttagaatctaaggaggcataatctgagatctgaagcaaccatatgggacatatatgatatatgccattaaacatcaagtatactaaatctctcaagcttccgaaacataggagttaaattaggaagcagacgaacttatcatgactactttttttgggtaatccattgcaagaccgaatcaaagtccacgctgctttatttttttttcctttttttttgcggtctatatagattcaataaggaatatcaacacattgattcaaaattatttgtgctactacaagctatgtgtaataagttttaagccatgtgaacacactaatttaactaaaccagttcatctaaattgatttggattactacatatgtgttcttgtgacatatcatacatgacaggaagttaggtctataatcttgaatggaaagttatgttcaatttcggatcaaccacaaacttcctagatcaattctagatctttctataattctatggatccaaggtgggataatatcgtaaatagtaatgaaatgaaaatagaaagtcaaggtcatcacatggtattgccttttagtgacatgcacataaagggccacattgttagctcaacatggaacacttctcttaaatcccacttcaacttcaacaccagctttgggaacattcagctttttcatctatttctccattaaaatgtccaaaatcctcgtccattattcagcataactatattatatacaattctttcaattattaatcttttactagttttacaaaataaattttgatttatatccatacaaatagtttttaaaagttaataatatatgataaagctatataagttttcctttaaattagtgagtactttttattataaatattcatttctaatctatgttactctatgtagatgagataaagaaaaatataattttatttaaacaaattttgtttgaggttttatcaaagattcaaatctctttctctcccattacatcattgtctaggtttattgatctcttccctctctcccttgtggtccttgacctctttaaatctctcttatcactttctcattttctttatatctcgaagtgtctctattacccgaaacactttcttacaattttctcttctcttctcttttcgttgctcttctttttctttctttcacacctcttcaacacaaatataaaacctgtagaataaacacaaaccttctacataacttctctcacttttttttttttaaaactctcttcttaataacaaacccttctctctcaatctcttctctattatctaatctagaaaagagagaaagcatacaacataaaggttattttcttgcggcattgtagtgttacacctaatcacaaagtaaaaacaagaaaatg

SEQ ID NO: 2899 - DNA, 3000 bp, Unknown
  misc_feature (1)..( 3000): cDNA_ID_2175827_gDNA_ID_1620614_Annot_ID_162004 3000 nt of promoter + ATG
gattagacttcgtaaagtcaaactcaccagccttagtaaccacgacagctgacgaataagtatccacaactgagactgggacgacatgtgaaacttttcggacgacctgtttgggtggtatagctctgtaggtgacattagaaaagtttggtgtagaattatgtggagcggtacgcttaacagacgaagatggaatcctctcgatatctggagctgatgggcatctgtgatagagatgtccaaattctttgcagtagtcacattttggaggaagacgagggtattctaccgaaattctaacttcatttccatcatcatcctccaccaacaccgattgtggaagagttttcttgagaaggatctcgaccttgatccgggtatgaactgctaaaggatgaagctgatgtttttcagtgtgtaaagggtcaccaattcctgaagcaataatacttagaccaggcatagagtataattgaggtggaaagtctttgaggattatccaaatcggtaacgagactaatttaagaggagttaaggttactgttggagagcaagcggtaacagtaaacagacagttacccgcctgccaacacccaacctcaaggacccaattgcgagtggcctcagaagggatataaataagcaccgtcccactcggaagacaacgaatgttaatgcgcccatctttcccccaaattggatttaggtccacaaatattttgcccgcaggtggaggattaccatgaaaatgagcaacgatatgatctttccaagtatcagttgctttaagaataacagatgctggagctctaacctttggagttccatcttcggtgaaggttggttgagaagcttttttcaggtttcgaagattggcactaaatctagcagcccaaataagttgagtatcatcaatcataggagtggtatcttctgcaagcttttcaattgctgggagcggatctatagttacttgagatgactcaattccatccacaacgggtacagaaagagcaatggaggaagataggccatttagttggttctggatagcagaggttgcagaaccagttgtcggaataagaggagttaatacatggtcgtcatcttcactcgcaggaggaatttcgtgagccgaggatggatctagatctagaattggagattggtgagtaacattcacaacaagagcattacgagtcggaatcggatccggtgggtctggagaaggaagaaccgaattagaaatcaaagaagacattacagaaaagaagaggggggagaaagaggatattctcgacggcggcgtgaggccacaccgtcggcagcaaagttaggataataatcgccttattatcgtcttgacttttttgcctcaagtatacagatttagcttagatgagtctacacatgctgatataagaatgggcattgttaagttttcgcttttgactaccttgtagcatcaaccagagccgtcatgatcactttcagagggtcaatttatgattccggctttcatctttgcctttgtcttagaattcgaacctgggatgggatcatcatagaacatgcagtcaattggcttgctaaaaaaacttaatgacttgagttagctacgaaagaaaatgtcagctcttaagctactgaaagggaagtaaaaacctagatgattgggaacgggtcaaacttacaaattgaaggctcttggtagcaagtaagaataatacaaggatatcatcttatcgttcctgattacttatcagtctgataacttaagtacccatatagttttttttctttttccttttttgaataaaatttaaatttattcgaaaaaacgtttttacaacaagtgcaacatttagttaataatatcaatacacaaatttcctatgagctttctattcctcttggcttttattttgtgtcaaaccaaacttccatgcatccatcatagttcatgtctccttgttcccgaatagaagagattcggttccggacttgtttgtcgatgtttcgaagtagttgagatggcggtaatggtgtgtcatcaagaagatttttattcgtcccaatgaggcgtctaagagcgtagcttggatagcgatccatgttgttgtgaacttgtgtctgaggatcttctttacaagtaatacaaatttcaggatacaatatacaaaccagaaagaatcagcaacttgctatatgtatcaatcatttggagaaagtgtattgtaatattattcaagaaaaggaatgggaagcaacaaatagatgaacttatgtagtagattcatggaaaaccataaacaactcggcagtgaaagacggagagtgttcttaccttataattttgttatctctgtaattctatccttaaggtataatagcaatccatggatcaattaagatgtctcattagacagtggtgttcaaaatttgtgctgtccaagcaagccgtctagttttggaatatactatacatttgttctgtagcatcaaacctggaggtagaaaaatatttcaatccactaaaaccaaccacgggaaaaaaatatgtcaaggacattaatctctattatattctacatattatgaattattaacagctaaaatcacatacacagtatgcattaagtaaaatatactaaaatttgatatgaaaatattttctatgaaatgatgacttttgttttaaatagtttgtataaatttatagaaacaactactgatttctcacagcctctcaaaatttaatttgcgtttcattttttttttcagtttgaaagacaaataattttaataaatgaattattacaacattataatttttggttaaaaaacaagtacatctaaccaaccctaaggtcgtttgttatctctcactttttgctttcgaaaacacaaaactctctactttctgatttactaaaggcgaaagctttcgttaaacagaaattttcagaattcaacttttgttaccctcatgctatcgat

SEQ ID NO: 2900 - DNA, 3000 bp, Unknown
  misc_feature (1)..( 3000): cDNA_ID_2175831_gDNA_ID_1620614_Annot_ID_162005 3000 nt of promoter + ATG
agatacccatcaattccaaaaattgtctaatgaggatgctctatgttccacataaaaatttatatttgaaaaatgtttttctatttccttatagaaaaaacaaataaaacaaataaaatttgttttattttaacatctaattttatatagaaataaacggcaaacaagctcttcttcaaaaataatatataaactagattttatcccgcggtataccgcggtgacaatttatctttttaaagttagtataattttttttttgcaaattgtatctatctataatatatttttattttatagtttacaattgttattaagtatcgtcctgccaaacccatcccgccaaacccgtcccgtaaaaaaccatttatttatattaatgttgatcttatttatgatatgtttataaatcattttctaaatatttttgtcgatgcgggacgttgaacccacacattttttgctaattggttaatatatgttcaattttaaaattttgaatcataaaatatgacggaaaaaattaagattttttaaactctatatattatataatgatgttaaaaaattgtaatatatcaaactttttataagtttaaatattaataatgttttataaattttaaatatataaataataatatttaaaaaattaatatttttggttataaggtaatgacataataactctaaaagcaaggatttagaagatttaaatctttaattaaatattttcattaataaataattaatgtcagtgacatgacattgtaaataagttcaaatacaaaatttatttatttaaacaaaaaacgtttagtaagaataatatttatttaacaaaaaactttgttttaaaatattgttaacaaatatgtttatgctaattttaagggactcatttgaagtttggtgggattaaatttgattgataatatgattgacaatttaaatcaaaaatttaaagtaaaattaattattttggaaaaaagatttaatgctaatggcattagattgtaaataagtataaatccataatttatttgctaaaatggctgcaaaaatgtatatatagatgttatttttgtgtgttaaagtttatttttgtatgcttcccctatactttgaaagcgtttctgatctaaattgaaaaacaatttaagaagaagtattctcaacatcactacaagaacactttaagatgggtatatatcagattatgcttgattttggttttccatttgaaccaacattctaggatctccatcctccagtcatgtaggtggaatttctaactttctattaaatatcatcgttagtgtagtagttaatctactatttcgaaataattgaagagatgcattttcacacaaattttttaatgcaaattaagaaaaagtagtactatatatttaaagtattttctttaaaaacatacaattttcaggaacaagactacaagagaataaaatttagtttttagtatttcacaaaagaatttctaaatttgaagtacatcacaatatttttatcaactaatggtttaatttatttataaaacacatcataatttctaaacataaaacataaaattctttaagaaatatattaacaattatatatatatatatatatatatataatttaaatgtaaattttgactatacattcaaaattaatattgaaaatataactcacgcatcgtgtagacaactttctagtagtatatatatattttttgttcacatcaatgcatcacccacaaagttttcttctgaaatcattcatgccaaaggatatacgaagcagatcacatatgccttctgaaaacataaaatcagagaaaacacaaaacaagagtatgttgaaattggataattatccattattaacaacttgaactccaagctatcataagagtataagactttgtcaccaagtcttgtatagtttattcattaacttccctatatatatctctcatattctcatttatagcttaacgtcataataataagaagatttgctccaacacttcatttctctcgtctcttcctcgtgtcccatttcatctttttctttgctaaatattttcacttttataacactatataatatttaatagagtatttatatgttatactcttccgagttcgctggcatgtgttaaaatgggccttcgttttcttttatccgccttcattgttgggccctatttgcgcaaaattgatacatcgatggggatggactcttgacgctgtcgatcatcactattcactaggactagtaacaactaacaacaagtcattgcttcctgcagaattcatttcccacgatcaatttaatttggctggacaaagtacagcgtttttttcatgttccctgtacgtaactaaaaagtaagagcatgcacatagttggtactcatagagtatcatcaacaattttttattattaattttaatgcttgtttattgtttgagattttttatgatactcataataatctctttccagtggtaagaccagtattggtatcatcaaaaaataaaatttatttgtaaaatcgaaattacatgctagcatcggctactggagcgatagtcgagagcaaataatttttttttctctcattttccacaaaaacgcgttttttcgactaattacaagtcgccacgtcattagagacaggtatcagaaatatcattccagtgatacttctcaagtccaaatcagttgctttgtctattaatttaatatttttaggcttatgatacccacaaaaaatctcctatgtacatggtcttattcaacgtaaagactttttaagtcgttgcgtttaacgtgaagaacgcctcgtagggtcaagctgtgttggaattatctttgtggagtagagtctattattatgtatataaagaaatgggcatgaaaacattttacgtaccatcacaatttccagattttattcaagaaaattaaattagcttaagaaggatg

SEQ ID NO: 2901 - DNA, 3000 bp, Unknown
  misc_feature (1)..( 3000): cDNA_ID_3070446_gDNA_ID_1620614_Annot_ID_162013 3000 nt of promoter + ATG
ataattaattaaattagttattgagataatcaataaatgggttactatattcagctaccttatcacaagcgaagaaccttccatatatgttaaggaacaatcaatctcattcattcatttatcagtaaatacacatattgattttgtaacaaattcctttcacaatacacttaacaattgtcttgagtggacgacattgaattgaaacacgagtacaccacacatgcttcgtcagcttcgacaaaataatcaaaatagatcaaaatacaataacatgacccaaccagaatacaaatcaaacaatataatacatgaaaaacaacaataatcttaatatttcacttcagaagcctaaccttttctgaacattctcaaaccccaaaagcatccaattattataaatctttcaatgcttccaccaccttcaatctataaatctcttatagtttcttcttaaattcacaaagaaacacaagcctttcatattaaagaagaaaaaaaagcaaataaaatattttcagtttcatcatctgtatatgtaacacacaaacacactcatagctagctctagatttttcttatctaatttccagtagaaggaggtgaattacagtcgcaaacaacctcggtttctatttctctccgatggaaactgcgatggcagccacaggcggcgcacgttagcgctgccacggtaccttcctctcctcggcttgccatgaactcacggcagccgtcaacagcgtaacctcccaccgccgcagcgtggttcttctgacattctccgtacctcacagttctcactgtcagagacgaagccgtcgacgagcttctagaaggttcctctggcgaggctctcctcaacaccacctgacgcttcctcatgctttctcacttcaattctcgtctcagctctttcttcttcttgacttttttttatgaaatctaaacttgtaataatgtatatatattaaagaggaagagaaaaatgtataataaagtttttgttcttttactttaatttctacggctcgaaatagttagggagtgaaagatcaaaacaattacaagaggacctcggttgttaaccctaaccctagatgtgatatttatagcatttctgatagcaatcgacaaccaaaccttagatatttttcttgcaactgcatatatatatatatatatatatgtgtgtgtgtgtagatgtacatgtcatggtatagattgatgcatcatcacaaccaatcagacctactaagctaatctaccagaattttgtttttgatgggtatatcatatatgtatatctgtcttttgtaattaaatgaccacaactatgcattgaattataattacaagttttgttttcttgttaccaacctaaatatggtggatgttttctttttggctcatgttatacaaaattcagattatgtttaaagtatcgtaatttttgtttttggaatactaagacactttaatattgcaataatgcgtactagtacttgtctcatccggttagaagaaattgaataagtttatgctgaatcgaaattggaatctactgatctccagttaagaaagagattatatttgtcatcgttctgatttttgatccgaatggacggaccaaaatgtcataactccagagatacaaaaacaaaacattcacgagacatggagccaccactttgtgagttaggcacccgtctttagttgataatatcacccttatacattgtatttggatcttccaaacttctgctagattccactttcgcagaatacgtactcttacattccaacaaatatatattgtgcgctaactagtaaccataaccataagccatagaataaaatgaagtggatgaagaattacaacctgcaacagtaaatatattacgacaaaaattaaattatgtgtggaagtttgtggatgcaacttttgttcgatttattttgcgagaaaaccctaaaatgatgagaaagcttttctttaagaccaaacaaagtgattggttttaaaaggaaggaaacagctaagcttgtctttttaagacctaatatgtactgtggtggccccctttaacattcatcctctttaatcctctttttatttccttctttcattctattttatttcataattagacaggtggttacgaaaattatttatacgtatcataaagaatcgaacttggtatcgagatcgaatatatatgcatagaccaaaaagtgattatgtcggctatgtgatatcttgacccacttctatagtatacccgaggaattgtacggatttaaataaaaaaaatcaattttcgttgtaatctaagtaccaatcaatatatttaagattgtatgatgaatagtcatgaacaaaaatagaagtgtgtataaatgtatatacatttggacctaacaacgtgggactgataagttgggctaccaaacctattttgtacatcatgaggacaacgcaatccttcacgatcgcttgctcctttgcagttacgtatcgatttttttgaattacacatgcatacattcattcgtttttcggttagacatcaaattttcttattcatgtgttccgtcaatcctttgatatttttataagaaatacattgatattttctccttccaaattagatataaacataaatcatgagatggtatataacaataattgcataaccaaacgttgttggtactttataatatatatttaaaaaaaaaaaaaaactgttgtagtttcattgttccacactaaacgttgtttcatgagattaacatcggctgaaaaaaaaaaaaagtttctctcccaggcacgagtttcgaggtaactaaatgaagcaaatgttttcaaaaaaacgggatcttacccactttttttagctattcttggaaactcccacttctccctcgccgacatccccctcatctcccgttattccggcgtctcatctccgtccttttgctcacctatctatgatgatg

SEQ ID NO: 2902 - DNA, 3000 bp, Unknown
  misc_feature (1)..( 3000): cDNA_ID_2175817_gDNA_ID_1620614_Annot_ID_162001 3000 nt of promoter + ATG
gggtcgacaaacaaatacggaaccaactatcatccattcgagcaagcggtgataggtggtatgactaaggtctctaaatttggtttacggcgaaaaattaattgatcaaaaaatttttggtttagtgttttaagatctttttcaaaaaaacgttgtatttgatgtataaacgctatttctttttgaaattaatttaatattatttttgtttgaaaagaagaagaaacataattcaaacaatccctatctttaatgttccaacatcttaataaatacataattaaaactctacgatcaatactacacttctgacgattattaaatcgcatcgtcgtacactattattacaaagaccgttctatctacattaatattctttatatatttttttttttcattttttgagattgttggagtatatatccttagattttcttgtatataaaaatagataattataatgggataaacgaaacatcgttgaagccgtgaagtggcattggtctacaccagagcaacacaaaaagacaaccacttcacatggtctgctcttacattcataaccgaatctaagtcacttttagttggttgtaattttgtaactattattccaacacctctttttttactttttagattgttttataatagaaatattttaattcctaaattaataatgaaagtaaatgtaatatgagtcagtacaatatgtgaaaaacttaaaaagttgacagaatttagcatttgattaaaagtgtatgaagaagaagaaaaaagaagatctttttgtatctatagatttagtgcataacttttctcagattttcgatatatacaagaatttaacataagaaaaatcaagacaaatggacctggttataatcggttatctgttgtaaatattatatttcatattcttctccacttcataattcttattggagttccttcaccaaatgtttgatgttccattaaattaatctaccactctaataagaggtatcgtactacaaattacacttcataaacaagagaagaacataaatttgaatttttttaaaaaaacatatgcgttataacaccaaacagtaacggactagctgatccttgaatttatattagttgcaaaaatttatatatcgaaattgaaacatgaatttttaaaattattagaaaatgtatgatgttgtctaaatgtgacattacaaatacatgatgttgtttaaaaattattataaaacaaccaaagtttggcgtcattctggtaaacgcacttaatgaatttatatacagttaaagattttaacatcaaattttaaaatgacaacttaactaaaatttgtatcctaatatttttactagagaaactcacacatatttttcaaacaaatgattagttatatatccttcgataataggtattgtgtaaaactgtgtggtttgcacaagtgatccctcgatattctttctgctaaagatcgacttcccacagtttcgatatctcgggtttgggtgcaatagcatatgcttgtttagtatgcagataatcgtatgagagagtcagagagatcatctatttttcatgatatggtctgagctaatcgatcatttgttatttatactcgataacgttctaatttgtatgatttttcagccttgatctatcacaaaatggagataatgaaatggtagtcataagaaaggtaatgatccccttgacatgcttattataacacaaaaagtaatcgctactgattagcttaccctatgatttgaatcatataactttatactaattgtctaagtgtgatgatataatgtatatgatgtcatttataacttattagtaaaaatataaagttcttcatcattgtcataaggagttaattggatatacatcaaaaaatttcctaaatttttagaaattattaatcaagttataatagaaattattaaataaaatatatgatgttttctaaatgtgacgatacaaaatacatgatgttgttcaaaacttattagacagaaaccaaagtacatcatcattgtgatgaagactttaatggatttatacatttcaaagttttaaacattacttatttaaatgaaaaattgagctaaaatttgtatacttatatgttgaccatagaaatacttctatataattttagacaagttgtctatacatatatatatatatatatatatatatatatatgtatttacacaaaaatcaagttttcttaatgtaacaatataaaaatataaaatatctaatgttgtttaaaaattatttagaccaaaaaaaaaaaaaactgtaatcaaactttcattggattatatctaactctaaacatgaatttttatacaatgacatgttcaataaaattcccatttcatagtttgaccagaaaaaatgcttgcagatttgttaaaatctctacttatgcaaaaccattgaatcacaccagattttgatttgtagtactttaaaaatattaattgaacacaacataactttaacaaaaaagatctttataaaaaaaaaactttctaaaatgacattaattaacacaaattagtcaattcaaacaatccaataaaatcaaagtaaacccttaattgttttttttttccattttacaaaatgttaaacattaattacatcaactagcaacacgaatctctcaatctctcatgtctcaatgagtctttgaccactagtcttcatcactctctctccctcctatatataccaatcacacccttctccaaccacactctcattctctctctcttctcaccacttcaaaacaagacactcgtaaaagagttcttgaacttcacaaaacaattgtcagattttcaagaaaaactttataaaacaaaaaacatttcattctttctctctctctctctcactgctcaatgatctcgttttctcactaaaccaactcgtttcttcttactttctttaactcggatctacaaaaaaccatg

SEQ ID NO: 2903 - DNA, 3000 bp, Unknown
  misc_feature (1)..( 3000): cDNA_ID_2175927_gDNA_ID_1620615_Annot_ID_162042 3000 nt of promoter + ATG
aattttctgtttcgacgtggaatattataacgttacggccgagttatgcaataagatttcgtattttggccgagttatgagataccatatgttattatgatatatcaaaccagccaccaaattgttggttatattagtagcgtcaagatgtgcaatttgaaaacagaaaataacttttattttcagcaagtgtcgattgacaaaacatggtctgtcaaaacctctaggaagtatgttgttggatatagtatgatgttggacaaagtaggatgttggataaagtttataggatatgcgctagtttcacggttccactagttggaatgtggttatgatatgttaattacttgattttcacaactgttggctcaagaaaagcactttcagggttttgccgagttataacaaagtgatggctgagttattcctatattgtggctgagttatgttagaatgcagagaaaaatattctccgctattgaccagatacgacgtcggtttgttacagagtctccgttattgaccagatacgtcgtcgtagtgacacacttataaatccccaaaacgaaaccctaatttataaaattccaatttctgatttcagatccggagcttcttcttgcttttcgtttccgaatttcccagctaaaaattaaagaaatgagtagcaattccgagaactcgattgcgagtacgcaatccgtcagccgttggggacgtgggttaccatcgaagtgtcattgcggattagacgtggtcatctatacatcgacgtacgcaaagaaccctggaagaccatacttccgttgtcctacgcgtaaagatgtaagtatataattgatttgagggttttattggtttcgatgttaattgcggatgtgattgaatatgcaggaccatttgtttaaatgggtcgaagatggtacatacgaagtggttgtagacagttggccgaaattgtccgtcatggacagtgagttaagcgcggccaagtccgaggttgctgtcgagctagaagcgttacaggcgatggtgaaagaactgaaggaaaaagtaatgaggagcgaaagggaaaaccagatatggaaattgatgatcaaactttgctgcttttgtcttgcctttactatcattgtcattgtttttggtatcttaatgttcccaaaaatcaacgaacagaggctttttcttggctactagtttgttttatgtttgtatgaattgctagctactggaatccattatgtgtttgatgtttttctcagcgtatagggttaattcgtttttttggttcaaagtagtagcttgcaatgaaatggaactttgtgttcggccaagctaatccaatatcgttgactgagttatactggtaatgttgtggctgagttaatcatacgctgtggctgagttaatatatgttgtgtcttcggaaatataggttacggctgagttattataatgttgtggatgagttaattatacgttatgactgagttaatcatacgctatgactgagttatgataaaatttaacaagtaacctcaagcgataacaactgactttactgagaaggcgatcgtagataacatactgagttcataggaatgagataaagggacgataagtaagagacacaaaagcattcaagacatgaaaccaacatcatctgggccaaattcagtaaacatgtccaccaaatcattccaaactgttgtcgtcatccacctcggcttatctaaaccacgcgcccatctcgtttcagcgcccgcatattgtcccggtacaacgttctagccaccaaattaaactgcgtccacaccgtcagcgtgtgccttgaatcccaggtgtgcatacgctaaaaagagagcaaatagtaagaatttggtctacggtttacagaaagtgctttatataaaaactcgatgcttatcgtgaggaggaaaaaccatcttgccttgaaaacaacgggaatcatctggtacgtcggccacgcatggtgaaagttgcgctggagtatatcaccaatcgcgacagctagttggtgattgaatttgaaccacgtaacagtggttttgtcgacccatgtacccaatccaaggtttagaactgggagatctgcacgatcaggagcagtgagcacgacttcgacatctcttagaaactgtccgtcgatgtgaggcaccatgtcgttaagatgtgaggatgagacgtctaaatgatgagttcaagtaactgatatatagaaaagaaaagacaggtagaggaatgcgaaaagttccgtgtctgttcgtttggcgggaaaaatttccgtactacggctgagtttggcggcaaaatatattgttacggttgagttatacccaagacatgtaactattatacggctgagttgtcaagaattattaaaaaggacaggtaaaggaatgcgaaaggttccgtgtttggcgggaaaatattccgtgctacggctgtgtttggcagcaaaatatattcgttacggctgagttacactcaagacatgtaactattatacggctaagttgtcaagaattattaaaaaggacaagtaaaggaatgcgaaaggttccgtgtttggcgggaaaatattccgtgctacgactgtgtttggcggcaaaatatattcgttacggctgagttacactcaagacatgtaacaatgttacggctgagttgtcaagaattattaaaaaagacaagtcaaggaatatgaaaggttgcgtgttacggctgagtttggcgataaatcgtccttgttatggctgatttaaacaacattacggctgagttgtcaataaaaacatgaagttcaattcgatttactgactaaccgaggtacggttatctccggcccaattaccagcggtttaatacgcctataaaatcggcttctcccataaacaccagaaggctaaactctcacaaacagaagctaacgagttcaaaatatttctttaattttcaacgactcagaatttcacc

SEQ ID NO: 2904 - DNA, 3000 bp, Unknown
  misc_feature (1)..( 3000): cDNA_ID_1818849_gDNA_ID_1620616_Annot_ID_46893 3000 nt of promoter + ATG
gactaaaaaaaatcactcaacatgctagagcgtcttaagaaaccatacctatttctcccagaaaaggcacggtagacttcagcctcttcatcttctgtgagaggaataaaaggttcacgaggcaccttcattatatcaacaacacaacaaacatagtgttaacaacaacaataaacatagaaacacactaacgatctcaacgctaagattacaatatactctaataagtagaagaactttgactctgtgtgcataagtaataactgcagcttaataaccaataaagccaacaagtattgtactatcttcagtctacactaacaaacagtaggcgataacatcatatgcattttagagaaacaatccaaacaaagcaatgtcattaattatatccaattcaagaaagattagtataaatctcatcacctcaacacgcttttccacagtctttgggcgagactgacgcagcagtgacaacttcttctcattcaacacaatctcaaaacccaaagcttccaactttgaattcctcttctccgcactttgcataagctttctataagcttcgaggctcgaagcatcattatcgacatctctatctaacgacaacgaatccagcatcatactagtatcctcaactctaaagttctcccctttcttaacatcagtaacaccagaagaaaacgaaggctgaagattcttcttctcctcatcatcatcacaatcaataacttcaattgcttgaacacttgaatcatcagaaacaacttcctccttttcaacctcatcacccaaatcaacaaagtctttacctttattaacgaatctcaaagcttccaaagctgatctctttgcatcatcatacttacgaacaaagaaatttgcgtccttttcgcagtaatcattagattttgcctttccatatctaagaattcctctactaggagcatgaatctctcgtctaagaggagctttagcatcagggtaccttgaaatcctcgaaattgttgggtttgaagacgctggcttaccagaatcttcagacatagcgaatgagaatcttcgtttcttggaagcttggaaatacggtgaatttcgtaaagggttggttgattgttgattaatgaaattgaaggattcgtcgctgcgtttacgattgatcgctacggcacccattagggtacgaatttggatgaaccactaaaccctagagattgagtaatcaatgagatgagaaccattcgagagacacctagaacatgaaattagggttctgtagaagaaaagaaagctcaaagatgaatgatttgattttttctctttccttttaaatttgggggttttctccaaaaataatatttgaaagaaaaaaaattgtggttttatacttaactaaactataaaatttatgaaaatcaaattaaaattttttcataacaattaaagtatggtgggatcatgatataaatattctccttaccaaaataaataaataaataaatatatatataaatattcttggtactactcttcagtctttggtggtatacgatattggatgttgaagctatcacactcatctatggacatgtcaatcggaaaagaaataatgtggcagatgcactatcccaacaagcctttgttatataggttctttgtatcaaacatatacaacaccaccatatgtttacaatttaatgcaactagtacttgttaacaaaaaaaaaagaattttgattaatggttatggttttctttgtttttgaagtggcttttggtttaaattttttcacaattttgtttaatagccacaacttttagaaagttattacatttcagtaattgagttaactgtatctcaagaaaattatatctttcggaaaattatgtagacgctaactaacctttacaaagacgcctatgagactgcaaaaattcttgtcatatttattgatcaaactaacgtagagtttgaccaagagaaaaagaagtaaaaaacaacaacaatagatatggatgttaacgttgatttttaaatgatggagatttgtttgcacttttttagatggagatggatcttatttttgccacttggaggttttttaaaaaatgaaaaactaaacatgttttacagtaaaacctctacaaattaatttttgataaattaataaatacaaggagataatattatattagtttcaagtcgtgtgaatgtaaaatttaacataatttgataaaataataagttaacaattttttaaaaccctatataaaaaatatgattttaataacatcataaattaataaccacaaaaatataatatatatacgataatatatataatctatagtttaaatattttttgaactattgaatgtttgttagagtttgtcttgaactattattacatcaaacaatgattttgtctctaattttcattaaattatgttgtgttttaaaactatcatattgtagtatcgtttataacttcctaatacaattagtcataagtttttataagtatacaacttcttaatctgcattattttcatttcaatagtctactacatttaaaaatctgatagttgaggttattaatcataaacttagatgtatgtatatctattatataaatgaattcagttatagtcattgtgatttattgtcaaatgagttttttgaaatattaaattttcaattctaatactacacaaatttcaacatccaagtcattaatttgatgtatattgaattgtgtcaactcgtattctttaaaaaattaaataattaaaaaaagatctatatagattaataaatatcaatttaaagataaactaatatcactataaattcagaaaatatcatggtcccaacataggttgtattatacactgaagaagataaatatgggggtattaatatacattcttccaaaacttttcaaaagatgacttaatgaaaacgcttatgttttgcctataaatttggtggtgaaaatg

SEQ ID NO: 2905 - DNA, 3000 bp, Unknown
  misc_feature (1)..( 3000): cDNA_ID_3070480_gDNA_ID_1620616_Annot_ID_162052 3000 nt of promoter + ATG
ggttaaccatggcgaagatgtgtttggctgacgggaagcttgctaaaagatatctccctctctttgcacaggtctgtctgcatttgctgattcatgtgtccattttatcattttgattatttctggaaaggaaacttttcgttccaggaacttgattcattggatggtagtctcctttgtctcttcaattttttttaacctatgtgaacccgttgatgccttactcttgcaggaacttgaaaagagtgattgtgcagccttgcgtaacaatcttgtagtagcgatgacagacttttgtgttcactatacagccatgattgagtggtatttcattcacagaacattaatttttcaaatgttaaacatgattgcgacattctaatggtttgtttacctggatagttacataccgaagattactaaacgtcttcgggatccttgtgaagttgttagaaggcaaaccttcatacttctctcaaggttactacaggtattgctattctccacagattctttatcttctgtttttaaaaagtattgaattgacaatgaataagcaggcttgttttcttgattcagagagactacgtgaaatggagaggagttctcttccttcgattccttctatcgctagtggatgaatctgaaaagatacgtcgacttgcagactttttatttggaagcatccttaaaggtatgagaactcacgtgagcaaccatgaaatgcattctttcattcccatgttattgaaaattcttacagagagacatgatctctaggatttttgattattgttacgccccatgttgcttatagtaaaggcgccacttctagcttacaacagtttcgtggaagctatttatgtcttaaacgactgccatgcccacactggccatagtaatccagattctaaacaatcaagaacaaaggatcaagttttttctatcaggtacttgtgttaaagttatatagtctatgctcatacgcaaacttgacattttggtgtgaatgatcttagtgattatctttgtttcatttgttctgtagagggaatgatgaaagggctaggtctaaaagaatgcagatctacgttactttgcttaaacaaatggccccagaacaccttttggccacattcgccaagttatgtgcagagatcctcgcagctgcttctgatggaatgctcaacatagaagatgtcactggtcaatcagttctacaggtaacttccaaaatggctacagagccttttttcttcttgtgattgccgatttttaactcgttttgtctcggtgtaggatgcgtttcagatcttggcgtgcaaagagatccgtttatcagtttccagaggagcatcgtcggagacagcagatatagaggaagaaggtggagatgcagcaactgcaaaaggaagggccataacgcacgctgttagaaaaggtttgattcagaacacgattccaatcttcattgagctcaagaggctattggagagcaagaacagtcctctcacaggttcgctcatggactgcctccgtgtcctcctcaaagactacaagaacgagatcgaagaaatgcttgtcgctgacaaacagcttcagaaagagcttgtttacgatatgcagaagcacgaggctgcaaaggcaaggtccatggctaaccaaggggttgcctgcgggacaagtcatagaaacggtgaacctgaagcatcagcagcaagcgaggagaatgttagagattcgggattggaatcaagagtggtttctgcggctgctgatgtggtggcggctaaggcagctaggtcggtgttgagagaagtgaacggtggagctgcaacgccgcctctgagcgcaatgagtgttccgaagctaaggtcgagccgtggagttagccagagtggtcgaccatcagctgatgtgttggagtctctgagaagaagaccaactttcatgtctgatgatgagagttagaacttaaaaatgagactgtagaaaatagcttttgctgtaaatgcatgacttcgatttttctttttgggagattagatcgagactctattaaagtctaaatcgtatttataaaccgcataagacactaaaacctggtgtgtgtgtgtgtgtgcgcgcatttgtttgcttgctcatgtttgtccttgtgtgataaatccatccctgccctcaaattgatttatgtgttgtatgtgttgattttagtgataacatctcaaagtgattaaatattttcaaaaatgctatttgatgtctataacggctttaaaacttttgcaagttcattagagctatctctagcacatatatggcgcttagagatgttacgaatatgtaagactgattacatatctctttggcttaataaatataagtatttgtgttgaactctttatcttcttcttgaagatgtcttatgggaaacatgttaaatggatagtaaatgagagattcgaaaatatagtgtgagcttccttctttggtttatgcattctccatgtggggggcaaggtttttgaagatttatacttttgtggcaaatctcttgtttgaatactccatgggagtctctcatcaaaactatgctgcaaaatatttgaaaatttataaatctattgtctttgagaaagtgttacaaaatttatgacctcaataatattgcatgaaaactttcatacatcatttggtatatgtatgtttaagaaaaggtaaaaccgtaattataaagagaaagaaaatacaatatcttaatacatatcaatctaattactcattaaccatattaagaaaatatgtgtctttattttttccttttaacataaagcttaaaaagaagatttgtagccagaaaaattaattgtgttcatttcccttttaaaagaatttttcggcgcaacaaaatcgtgaaattgatataaataaactcgagattattaatataaccctttttcacttcacttctctttctctctaaaccctaaaagaagaacg

SEQ ID NO: 2906 - DNA, 3000 bp, Unknown
  misc_feature (1)..( 3000): cDNA_ID_1814718_gDNA_ID_1620616_Annot_ID_162051 3000 nt of promoter + ATG
tgaatggcagtgagtaaccaagacaagctgtggccttcttatacgttgatgaatcctctggcacttaaatctgtctttctttaattatttttttcagctggtaagcgattctggttataattttaaagctgtcaggagatggactacgcagagaaagttgggatatgctcttattgactgtgacatggtaattttgtcgaagaacctgaatttgaagattctcttgttaatattacgcatgtagtccaatttatttatgtttaacttagtctgtgccctctgcagatatttgttcccatccacaggggtgtgcattggaccttggcagtaattaacaacagggaaagcaagctcttgtatcttgattcactgaatggagttgatcctatgattctgaatgctctggtatgatttaatttctaactcttattcgctttatttagtctattaataactgacatgttggatgcattaaaagatattagatgctgataaatctttatcatcatttcttgattctgaaatctgtttggagacattatggagatgccagaagctgttattgctttttaaatcggacactactgtgaaagtgttctaaccatatatactagtcgttatagctaatgccagatctgatattctgcttcaggcaaaatacatgggtgatgaagcaaatgaaaaaagtggaaaaaagattgatgctaattcgtgggacatggaatttgtggaagaccttccccaacaaaagaatgggtatgtaactatgcttgaacttgctatgatccatgatcatgtgaaaggaactatcttgttaaagagataacctctgtagaatcagatacttgtcttctgatgtgggaatatgggtttttaagacaaaggatagatctggtttgagattgattaggagaaattcacctgatataaattttgataatggaatcaacaagggtataacttaactgttcttatgctctttagcactctggttaagctctctgctaactctatattgtttctttgttgcaatcttttatattctcaggtatgactgtggaatgtttatgcttaagtacatcgattttttcagcagaggcctggggctatgtttcagccaggtaagctatcagaatccaaatctctgaatgcctcaagaaactgtagttgagaataaaaactggttgtcttgaaacaatatggaattagtatatccccctagcagtttatgtaacttgtaggatttaggcatttagcgtaataacattgtattactttgcaggaacacatgccatacttccgactcagaacagctaaagagattctgaggctacgagctgattgaagttgcttgtgctaatgttttttcggctattaggaatactatttttggttgccattgttgatttgttcaaactttaaatcccactccttttaggcagtgaagcactcggctttaaaagcagaggtaaaaactgagtcaagcccagagctcttagctcgttccgttattgtatttttttccttcttcttgttttaaaatgtagatgaagcgttttggatctctatgttggttagtctagctgaagatatatgagatgttgaaaaccttatttatttctctccggtcttgaccagtgcgaacgcaatttaaagtttccatctagtatcggttcgatatattttcctctgttcaatagccaaaattccatgaataatctcttgaaagcaaatgttttcgatatacaaatgttctgcacaatttccccaatacatacacgaatatgttacaaatatacaacaaactgctgtttgtgagtacaaatgttgacaaggacacagaaaaaacaaaatcccaaatgtaacattgacatattaaaacccactcccaaaaacaaaaacaaattccccaattcataaaacacgagaggaaggaagacttgtgtgtatctcctaacaaaaactgactggaaggcaaactaacttccactgcctttcctagcgcggaactctcttccggctaagtatctcctgttctttcagacggtgttggaaccgagcaagacgggcttgaagacttacaagaccagctgctttacgggacaacacaaagctcagctgtgtaacatagttgtcaatcatgctccctggccgatccaccttcgctagtaatttcatttcctacaaaaaaaaacatgaaataatgttaaaacaatcacaagacatatgagccataacctcgtgaactatttccattgtatcctcgatctcttttctgtgtgctgtaattaaggtctcttcttcctgccagagtttaaacaaaataattaccatattacaggttttctaaggttattcgtgagcgatattcataaaattccctcacgctcatagcataatttagaagtatagaagggtcaaatggctctttacctcaagcaatgcatcaatgttttcatcaagagaaggctccgttgtttcatactgccttgaagatgtatcgcttgtgttctgactgctagccatattttgttgtctagaatttgtcatggcagggacatcagtcttgagaataagatgagtgaatcctttgactagtggagccgccaaaagaagattttaaaatgttaagcataaatcatattccttaaatgttaagtgaatcctttgactagtatagtatagtgtctggtttttcattagactttctgagatgagaggtatttctattaaaacttaagttgaaggttttaaaatgaatcagccaaaactgcagggtttgtttcattaaaatcccaaaattgtttcgtatacatcatattacccactgaggactctgctctttgtggaaatgctaaattagccccaaacctttttctaagtcccactttgaattctaataagaacgaacagatcgcgggaaatccaaaatgatttgaaaccttttcacctgaatttctgtgaaatccaaaattctctctctatcagtagagaatcgcc

SEQ ID NO: 2907 - DNA, 3000 bp, Unknown; identical to SEQ ID NO: 2905
  misc_feature (1)..( 3000): cDNA_ID_3070480_gDNA_ID_1620616_Annot_ID_46896 3000 nt of promoter + ATG

SEQ ID NO: 2908 - DNA, 3000 bp, Unknown
  misc_feature (1)..( 3000): cDNA_ID_1818903_gDNA_ID_1620617_Annot_ID_46897 3000 nt of promoter + ATG
gtttctgaggagaaaggaattgggcagtgttcttcctgaagaaaggggattccttgggagagaaacaacaaccaagagctgatctgggtgtgcagagatgagaagtcttaagtagaagtgagtggtttctaacggaagagaaacgataaggaagagtcatgtctgaaaagaagaagaagaagaagaattagtgaatcaagaggagaaaatgaggaggaggtagagagatgagaatctacatagatgagaaatgggccatggatgatgagaatgaagttggtgatgatattgatgatgatgaaaatggatttgcataatgggattttgatttcaggagaggcgagaaagggtaagtgatggtggcacaggggaatgtgaggtggaggtgagaggattgcgtttggatgcttctttgtgttaggagtgagacttttgaatttgtgtggttcttgtggaatgtagtgagaggctcttttggttgggcctcacaacctcacaaatgcccacttgtaaaaaagaagaataaaaatgatttgggaattttgttctttgtttggatgtagtcaaagaagagaattagatgcactgtttaaatttttcttcaattttaataatgatttaacaaaatggcattatctcttatgttaaagtaaatcaatcttcaatttttattacatatacaaattgtcaacagtaatactaaatattacaaatcaaatcaaacattttagttcttaaaaaaacatggagctgagtgtgttcgtggggtaactcgatttcatcatgtggtttatgaggtaggtgaggctggttagttaggtgatggacaccatcttctcttaccattatggcttttgttttccttttatgtcaaaaaaactttaatacattttccatcaaacatttaatagatttatccagcttggttttcaaatattcgaatatgtttagtttcattcagtttggttagtataaaatttgtgtgtttcgattaaaaaatgtttggtcgacatgcattaaaaatagttcaaaacatttctaagatatgatctttggaccaatttggtcgatatgcatcatgataagatcgattgtggaagattgggatgatcgatcatatagacatatatgtatatagttttttatttacctgggagatcatatattgatcaacaacttcagtttaaatttgtatttcagaaaaaaaaaaaaaaagacttatttagaacttgtattttgaaaatcatcatgatataactacacaaaataaaaccagaggtggattttctttcggttttaccaagatattttgagttttcggcccataattttcttgagtaagagaggagatcattttaattcaatcatttcccatcatggatattttaatatataattttgtggtaaatttttttttggaagacccctaatacacaaatataactgcatatacgctcgagaaaataaacatactcattcacatcaattataaattatagtaattcaagtgttagtttgagggcatagtgtttagttaactatatgtcatttattaacttggttttcatagatttcaccttcgattcaattagttttgataatttagcatcctatttgtagccaacaataaaacaataaaaaacttattttttcgtttgacatagtgttaatgttgggacgaattatgtacacgatcaaatatcaaccgaaagacattcatcatgatgattaatttttctccttttttaaaattcaatgatttttttttgtgtgtggatatgactgaagaaaatttcttattggtattatcaactttttatacaattttagttcttttcttctttataaatctttattctataaacaaaataataaaaattcaacgttgataaagatttcctaccaagtagtccaatacatatgatagcttcttccgtatatttaggaaaaatattggtaagaagagtaacaaagtattatttgaataagtggtatacttatttgcgattttcaacgattttatttttatgttgcaatactatttggatatagttagatatgatctttagttgatcaagaaaccttgtgattaatgtgtatgtattggggataacaatctgtttatttctctataagatattcaagttgttttgagttttagagttataaatgataaacgcacctctactctgagtactctttcatgttactagcattagaaaactaaaaatgcggagttcactaccatattatgtactcatttctttttttaagatgatgttgcgttatttttagattgaaaaaccttttaaacttttcttttaaattaaaaattcaacaatttgtttattctttcagaaaagataaattgtttatctccctgtttttctaaacaatgtaagagcatcttcaatggtgactaaattgggttctctcagctgtttttctggaaaaagatgattaaaaataaatcaaaatcatgtattattgagaaagttgtctctcttgagagagtttttgaggaggatgagagacgacgacgtggccgttctgatgtttttcaattatacaaattgaaggttagctatattgaggaaaaaaacaaaaaaggtaactgcgaaagcccattaactttaagttgttttgcatcggcccaaatataaatcctaaagaaaaagttacatatgtttaaaaattaaaacgcagcgttttaagagtcagctatttcagaaaaaaataggattagcaaaatcagaactctgcgagcgtctataagaaaaaaccctagaaagaagtcgattatccagaaacagtgtcttcttctctttttgttgttacttcctttggtttcttcaatggaaaaagaagagctcaacaaattgaatcatctctctctcgtctccaatgtctgcaacgaattggaaacgcatctaggatctgcagaaaaagttttggctgagttcattatcgatctaggtcgtcactctgagacagtcgatg

SEQ ID NO: 2909 - DNA, 3000 bp, Unknown
  misc_feature (1)..( 3000): cDNA_ID_4359839_gDNA_ID_1620617_Annot_ID_46898 3000 nt of promoter + ATG
ccttaatcgctaagcctttgaatttctgatcatcaccttcctctttcttcttctccgacttaggcttcggaggataaataccgtggattgtagttaacaacgaccggacgaagtaatccggcatctctgcacctgccttccttaagattcttatcgaattcatcgactgtctcagagtgacgacctagatcgataatgaactcagccaaaactttttctgcagatcctagatgcgtttccaattcgttgcagacattggagacgagagagagatgattcaatttgttgagctcttctttttccattgaagaaaccaaaggaagtaacaacaaaaagagaagaagacactgtttctggataatcgacttctttctagggttttttcttatagacgctcgcagagttctgattttgctaatcctatttttttctgaaatagctgactcttaaaacgctgcgttttaatttttaaacatatgtaactttttctttaggatttatatttgggccgatgcaaaacaacttaaagttaatgggctttcgcagttaccttttttgtttttttcctcaatatagctaaccttcaatttgtataattgaaaaacatcagaacggccacgtcgtcgtctctcatcctcctcaaaaactctctcaagagagacaactttctcaataatacatgattttgatttatttttaatcatctttttccagaaaaacagctgagagaacccaatttagtcaccattgaagatgctcttacattgtttagaaaaacagggagataaacaatttatcttttctgaaagaataaacaaattgttgaatttttaatttaaaagaaaagtttaaaaggtttttcaatctaaaaataacgcaacatcatcttaaaaaaagaaatgagtacataatatggtagtgaactccgcatttttagttttctaatgctagtaacatgaaagagtactcagagtagaggtgcgtttatcatttataactctaaaactcaaaacaacttgaatatcttatagagaaataaacagattgttatccccaatacatacacattaatcacaaggtttcttgatcaactaaagatcatatctaactatatccaaatagtattgcaacataaaaataaaatcgttgaaaatcgcaaataagtataccacttattcaaataatactttgttactcttcttaccaatatttttcctaaatatacggaagaagctatcatatgtattggactacttggtaggaaatctttatcaacgttgaatttttattattttgtttatagaataaagatttataaagaagaaaagaactaaaattgtataaaaagttgataataccaataagaaattttcttcagtcatatccacacacaaaaaaaaatcattgaattttaaaaaaggagaaaaattaatcatcatgatgaatgtctttcggttgatatttgatcgtgtacataattcgtcccaacattaacactatgtcaaacgaaaaaataagttttttattgttttattgttggctacaaataggatgctaaattatcaaaactaattgaatcgaaggtgaaatctatgaaaaccaagttaataaatgacatatagttaactaaacactatgccctcaaactaacacttgaattactataatttataattgatgtgaatgagtatgtttattttctcgagcgtatatgcagttatatttgtgtattaggggtcttccaaaaaaaaatttaccacaaaattatatattaaaatatccatgatgggaaatgattgaattaaaatgatctcctctcttactcaagaaaattatgggccgaaaactcaaaatatcttggtaaaaccgaaagaaaatccacctctggttttattttgtgtagttatatcatgatgattttcaaaatacaagttctaaataagtctttttttttttttttctgaaatacaaatttaaactgaagttgttgatcaatatatgatctcccaggtaaataaaaaactatatacatatatgtctatatgatcgatcatcccaatcttccacaatcgatcttatcatgatgcatatcgaccaaattggtccaaagatcatatcttagaaatgttttgaactatttttaatgcatgtcgaccaaacattttttaatcgaaacacacaaattttatactaaccaaactgaatgaaactaaacatattcgaatatttgaaaaccaagctggataaatctattaaatgtttgatggaaaatgtattaaagtttttttgacataaaaggaaaacaaaagccataatggtaagagaagatggtgtccatcacctaactaaccagcctcacctacctcataaaccacatgatgaaatcgagttaccccacgaacacactcagctccatgtttttttaagaactaaaatgtttgatttgatttgtaatatttagtattactgttgacaatttgtatatgtaataaaaattgaagattgatttactttaacataagagataatgccattttgttaaatcattattaaaattgaagaaaaatttaaacagtgcatctaattctcttctttgactacatccaaacaaagaacaaaattcccaaatcatttttattcttcttttttacaagtgggcatttgtgaggttgtgaggcccaaccaaaagagcctctcactacattccacaagaaccacacaaattcaaaagtctcactcctaacacaaagaagcatccaaacgcaatcctctcacctccacctcacattcccctgtgccaccatcacttaccctttctcgcctctcctgaaatcaaaatcccattatgcaaatccattttcatcatcatcaatatcatcaccaacttcattctcatcatccatggcccatttctcatctatgtagattctcatctctctacctcctcctcattttctcctcttgattcactaattcttcttcttcttcttcttttcagac

SEQ ID NO: 2910 - DNA, 3000 bp, Unknown; identical to SEQ ID NO: 2780
  misc_feature (1)..( 3000): cDNA_ID_1807441_gDNA_ID_1620617_Annot_ID_46899 3000 nt of promoter + ATG

SEQ ID NO: 2911 - DNA, 3000 bp, Unknown
  misc_feature (1)..( 3000): cDNA_ID_1818895_gDNA_ID_1620617_Annot_ID_46900 3000 nt of promoter + ATG
tcctagattttcgaataggctttacacatgtaggaatttcaatacatttcgtgggcttaatccttaaggaaacaaaaatctatcttcccgggttagttttgcttgtagtaggcattttagtttatccccatactcttatatcctttttgaatataactatgatttaacctgcggtttatcgcaggttaatcagtttatttgattcttatactaaatatttgaataaatttgatatcctaaacttataaatataaattttttaatcaaacataactaaataataattgagatttttttgggttgttatttagtgataagaggaatgtgttaaaatgtgtttaaatttttgtttggttgttatttacttatttttgttgaacggtttagatttaagaaaattaattttattgaacggtttaaattgaatcggatcatataaagtttaggagattgttaagactaaattatccttaatgattttgaatagcaaagaacaaaatccaaaattgaaatcaaaattaaggccaaattagacaaaattttaatttgtacttcctttttaataataagaggatgcagaaaaacaaaactattttttgcggctttctccatcataattcgattatagatcctactatattatttgggaattacattttaaatgtaaccttaatttttgtaattaattacatgacaatgccattaaaaaaatttaataaaaaacaaatcctttaatgacgttaaggttaccaaaattatttaacgacaatattcatttcttaattatagggcttagtggatctaaagacggatcattaaagatttcctaaactgaagcaaaatataccgaatattcaaatatctatctgttaccaaattataaacaaataagttcgtaaaataatttaatattttttatacgaaatcaattaaatcttaatcacataaaaattagcacaaaaaaatattcaacaattaaaaaattatcaaatttctgtgttatataagttttgatactatattcgaataaagtgtaatataccttttcaatttgcattctttaactaatatatttgttaatcttatatttatcaaaaccgactatcgtttcttatctctatagcatttttgcaagactgttttggtggatttgggtaaaagtgcattcgagtcatatggtacattcccctattaaataaatatggtgcactcctatgttattagataaaatgtttagattataattcagagtcatatcataagtaaaattaatattaataaaataaatggctttttcgcaagacggatttggagggacgggtttttgaatcaacattaataaaaaagtaaaataaaattaatccaccgtttcaatacgggttacatcttgaatttttttttaagaccactaatattaaacatatcaaatcatcttaatttagaaaatgttatataaaaccaaaaatgttatgtggtatgtataatgttactatatataaaattaaactataaaatataaatgtattagagaatgatacaatttgcaaaacttttatatataataaataattcttaaattttaaaaattactacttaaaaaaaatcacgggacgggtaaagaaattaccgaacgagttttattttggaattgggttatatggtggatgtatttgaatcaatatttataaaattttaaaatattattaatatgttgttttaataagggttaaaacttcagttttttaacaattgtctcatggattcgtggtatactgttacttaataacaattatacactgtaaaatataactattttataaaaataaaatttgcaagttttaatatctattacctttaaaaaataaatcgtctcgcgatataccgcgggttaaaatctagtattgttgtattactctacgatgtggtgttttggttatatataaaattctatagattcgaatggaaaagaaaaactacatatataaggatttcaatttaaaaacttatcgtcaaccattgacataaaaatctctaaaccttcaattttcaacccacagattgatttcctactaaatatctcaaaaggtgctgcaaattaaataattttactggtaacaacttgttgtcctactaatcttatggttaagtctaaaccacatgtaaccctttttatataagggagagtcttgtaacagaacaagttaagttgagagtgaaagacattgattgatggattaatatattatagttttttttgaatgatgaaacataagttttcttcgttttacacatgaaaaagcttagttaattttgcagttggttaaaaggaaaaagtcgttgattggctttctcttaacacttgtagggttttttttacctcaaagtctctaaattaaataattaacacatagcagcctctaaaaagttagtgtattttgatataatagattaaccatcaccatgtcaattcaaatacaagtgtatgtcttcaaatttcattaatttattttcttctcatctataaaaacagcatcagattttctttttcaaaatggttaagattttattcacccaaaacaaaaactttttttaaaagtttttaacaaaaaaaaatcaaatcaatacccaaaaaaatattagaaaattgattgctagtaatagaatcctatattataatttgactagagttttaaccaaaattcaatactgacacatatcatttaataatactaccaaaacaaaacacatgtgaatccatccataatatataccataatttgattaatacaacaatgattttgtctacatttagccattttattaaatgctagttgctatattagctattttttccttaatatcataaaaacaatttttttggtcgcacgtattaacattttttttcctatataattcatgaatgattaaacccaagatcctcactcgttggtccttagtcttcgacctcctttaatctctccatctctttctcttaagatg

SEQ ID NO: 2912 - DNA, 3000 bp, Unknown
  misc_feature (1)..( 3000): cDNA_ID_1818875_gDNA_ID_1620617_Annot_ID_46907 3000 nt of promoter + ATG
caacgtttctcattggcatttgattgaatacaatctctgcagaatctaactgagaattggagacaagaccataaagcatagtagtccatgaaacaatacttctcccaggcattttatcaaacaccttacgtccactatctggtttcccacacttaaagtaaagatccatgagagtgttttggaagaagacatcattaaaaaacccagctttaatagctaaaccatgaacttgggtacctaaacgaatcgacgaagaagcgagacaagctttgataacaaaagggaaagtgaatttatcaaactgggattgatgagagatcatcataaggataaagagaagaagagcttcacgaggtttgtgattaacagagagagatcttatcataaggttccaggtaaaagtagaaggagattgaagttgattaaagacgagagaagcgtattgggtttctccgaaggaagaagaaacacttatgagctgacgaactagtaactgatcgttggtgagattgtgtttgatgattttggtgtgaatttgtttcaattgagagaaatttgaacaagttcggagaaagtaagaagcttcgggagatcggaatggtggaggagagaggaggtttggtggtgaagacggcgacggagccgccatggattaacgataaatcaccaaattctcacattcactctttcctcgattgatcgtgtgtggatgatgatgaagctgcatataaaccgaactaaaccgaagtttggctgatttggttcggattcggtttattgtgtagcaagaggaagcataaccagattgattcgactaggaaccactaaaccaaacgaaatacagaaatttcgaaccaaaccggatcgattctacgtgtattaaacgtcgtcgtttttgttagctaaaaagaagaaatagtaaatatccattagaagaagaagacgaagcagaggaatctagggtttatgctacattgaagcaaagatggttacgagcagcgatcaaatccaaaatggttctgaagagcaatcaaaaagatcagagatttacacatacgaagcaccatggcagatctacgcaatgaactggagcattcgtcgagacaagaagtatcggctcgcaatcacaagcctcatcgagcaatatccgaatcgcgtcgaaattgttcagcttgatgaatcaaatggtgagattcgttcagatccaaatctctgcttcgaacatccttacccaccaacgaaaaccagtttcatacccgataaagaatgtcaaagacccgatcttttagctacttctagtgatttccttcgtttatggcgaatctctgatgatgaatctcgtgttgagcttaagtcttgtcttagtagtgataagaatagtgagtttagtggtccaatcacttcatttgattggaatgaagctgagcctagacgaattggtacttctagtattgataccacttgtactatttgggatatagagcgtgaagttgttgatacccagcttattgctcatgataaagaggtttatgacattgcttggggtggtgttggtgtctttgcctctgtctcagaggatggttccgttagagtgtttgatctccgtgataaggagcattcgacgattatctacgagagtggtgagcctagtactcctttggtgcgacttagttggaacaagcaggatccgaggtatatggctactgttatcatgggcagtgctaaaattgttgtgttggatattcggtttccggctcttcctgtcgtggagcttcagcgacatcaggctagtgtcaatgctatagcttgggctcctcatagctcttcccatatctgctccgctggagatgattctcaggcgttgatttgggatatatcttccatgggacagcatgttgaaggtggtctggatccgattctagcttacacagccggcgctgaggttgagcagcttcagtggtcatcttctcagcctgattgggttgccattgccttctctaacaagctgcagattctccgggtctgattatgttttacagatttctgttggatacttggatgtaaaaactcgttgctattgttgattaatgatcttttgatctctgactctaagcctcattgagtttctttcatagtatggtctgtgtaggaactatgtaccttcaaaattgtgaataactagctttagcattggatttgattagacgtatggaagttagttttaacagagagcatgtggcataacggggaacttgaagtagattatgactaacaccagcatttatgtttctctgccctcgagctgatggagttgcaggattttgaaggagtgtgtgtatagaggtagttcttaacagaataatatttctctgcctcaccatcgtatggaatgtgtagctttctatggtagttgttataagctttgtctccattgtccatgtcatttttgcaatgatacttaaaacactttatgggtatgtagatttgtgaaattaggcattagtaacatcgtacagatgatgtattcttcattacttcaatacaggcatatagattctctgtccaacttaaaaggcatacaagttccgtggtttaaaaaatcagctttcctaaatcctttggccaatactctctcagccagtcctaagaacctctgctctaaaaagtctgagctttgaaaggcagacaaatggagagcagccttatcctccttttataactgtgaccacacacacaaatgaagaagcccaaatgaaaggcccaaaaatctaaaaaaataggtgaaggagggactttgtgaatatgtgatcatagaaacatgaggagacaagagagtgctaaaatcacaaccatagaaacaagtaagaaagctatccagaatctaatcttatttgcctccaagtcatcaattctttatcctatattactagtctctgcttcaccaatcctttttgctctcctgtctgctacaaaccttaacttggattctttctggtcacc

SEQ ID NO: 2913 - DNA, 3000 bp, Unknown; identical to SEQ ID NO: 2692
  misc_feature (1)..( 3000): cDNA_ID_1818871_gDNA_ID_1620617_Annot_ID_46908 3000 nt of promoter + ATG

SEQ ID NO: 2914 - DNA, 3000 bp, Unknown; identical to SEQ ID NO: 2692
  misc_feature (1)..( 3000): cDNA_ID_1818871_gDNA_ID_1620617_Annot_ID_162077 3000 nt of promoter + ATG

SEQ ID NO: 2915 - DNA, 3000 bp, Unknown; identical to SEQ ID NO: 2690
  misc_feature (1)..( 3000): cDNA_ID_2167656_gDNA_ID_1620617_Annot_ID_162075 3000 nt of promoter + ATG

SEQ ID NO: 2916 - DNA, 3000 bp, Unknown; identical to SEQ ID NO: 2912
  misc_feature (1)..( 3000): cDNA_ID_1818875_gDNA_ID_1620617_Annot_ID_162073 3000 nt of promoter + ATG

SEQ ID NO: 2917 - DNA, 3000 bp, Unknown
  misc_feature (1)..( 3000): cDNA_ID_3069731_gDNA_ID_1620617_Annot_ID_162061 3000 nt of promoter + ATG
aacggtggattaattttattttacttttttattaatgttgattcaaaaacccgtccctccaaatccgtcttgcgaaaaagccatttattttattaatattaattttacttatgatatgactctgaattataatctaaacattttatctaataacataggagtgcaccatatttatttaataggggaatgtaccatatgactcgaatgcacttttacccaaatccaccaaaacagtcttgcaaaaatgctatagagataagaaacgatagtcggttttgataaatataagattaacaaatatattagttaaagaatgcaaattgaaaaggtatattacactttattcgaatatagtatcaaaacttatataacacagaaatttgataattttttaattgttgaatatttttttgtgctaatttttatgtgattaagatttaattgatttcgtataaaaaatattaaattattttacgaacttatttgtttataatttggtaacagatagatatttgaatattcggtatattttgcttcagtttaggaaatctttaatgatccgtctttagatccactaagccctataattaagaaatgaatattgtcgttaaataattttggtaaccttaacgtcattaaaggatttgttttttattaaatttttttaatggcattgtcatgtaattaattacaaaaattaaggttacatttaaaatgtaattcccaaataatatagtaggatctataatcgaattatgatggagaaagccgcaaaaaatagttttgtttttctgcatcctcttattattaaaaaggaagtacaaattaaaattttgtctaatttggccttaattttgatttcaattttggattttgttctttgctattcaaaatcattaaggataatttagtcttaacaatctcctaaactttatatgatccgattcaatttaaaccgttcaataaaattaattttcttaaatctaaaccgttcaacaaaaataagtaaataacaaccaaacaaaaatttaaacacattttaacacattcctcttatcactaaataacaacccaaaaaaatctcaattattatttagttatgtttgattaaaaaatttatatttataagtttaggatatcaaatttattcaaatatttagtataagaatcaaataaactgattaacctgcgataaaccgcaggttaaatcatagttatattcaaaaaggatataagagtatggggataaactaaaatgcctactacaagcaaaactaacccgggaagatagatttttgtttccttaaggattaagcccacgaaatgtattgaaattcctacatgtgtaaagcctattcgaaaatctaggatcaaattatgggaaataaaagatagtcacaagcaataccacacgcaacttgatatcaatgatataacatacacacgttattccccattgtttttgcattgtatgcaacataaaattatttgacaaaaaaacacacacataaaattacctcaataacatatatttcctgaatatgataagaatgtaacttcttctttttgggtcaaaaatgataagaatgtttgttacatctcggacttaagaccctaattaactaagggatgaagtttcatgaattgttttaatggctggtgtagctcgtgattgcgggagtaacaaggcttctcattctttgaagggatgcaagtggacgccaatcctagcaaatacaccaaatatttatattactgcatgttgaggattatgattgtatggtaactctactgcgtgtcgatgcatgcatcagcttgaagaatttctcttcttgataccttttgatccaagtatgcaaacgatgaaaaggatatgacgcttgccaaaattacggctggtcaaaattaggagcatgggctaacgactttatgaacgatcataatatgggctgaataaatgcccactactagcaaaactaagcccacaaaataggttttttgtttccttaaggactaagcccactaaatgcatactgaaattccactgtgtaggactattcgaaaatctaggaatcaaaagtcatgtcaactaaaaaacactcacaagcaaatgccacacgcaacttgatagcaatgatatatatatatatatatattttttttccgactgaatgattccattatattaggcgaaagtggaatgcatttttgaaatacaacaacgataagagtcgaaactctgtcagaaattaagtcggagaaagacaacaatatcttctgaaacctaagcccaaaagagagaaacaaactgtaagcaaaaagttacaaaaaagtaagcataaaaataacctaaaagctaaatctgaaactcaaaacatcataacctgcaatcaatcccatagtaacgattagcgtcgagctgaaaccaagaaacatgagccccaagaagaaccaactcagcggacaaactccaaaagaaaggaaatcccgaaaaagaacgaatataaaggctcaacaagcaacaacccaatagaacagataacaatgatatataacacgatattctagatttctagattttttttgcattagtgcgcaacataatattaaacctaatcaacaaaaatatgccaaattcctaaaaatgataagaatgtctcttaaatctcgaagttaagaccctaattaacttcattaacgcttcttaatctataaatatatagttcttcaaaaatctttcaacgcattaattattcaaaaagtaaacacatggaagccgtgtagttcacgcgccggtcaaatcgaaaccgtagaaaaaagcaaagaaaagaagacaaaaacggacttgacttatagagaaagacttaaacaatggcgaagacgaagacgatgagcaacaacaacaacaacacactagtaacaacagtagcatcagcttgaaagagagaactaaaacctagaaatcgagagagattggtggaagatttttcaccagatttc

SEQ ID NO: 2918 - DNA, 3000 bp, Unknown
  misc_feature (1)..( 3000): cDNA_ID_1818895_gDNA_ID_1620617_Annot_ID_162059 3000 nt of promoter + ATG
attcatttcttaattatagggcttagtggatctaaagacggatcattaaagatttcctaaactgaagcaaaatataccgaatattcaaatatctatctgttaccaaattataaacaaataagttcgtaaaataatttaatattttttatacgaaatcaattaaatcttaatcacataaaaattagcacaaaaaaatattcaacaattaaaaaattatcaaatttctgtgttatataagttttgatactatattcgaataaagtgtaatataccttttcaatttgcattctttaactaatatatttgttaatcttatatttatcaaaaccgactatcgtttcttatctctatagcatttttgcaagactgttttggtggatttgggtaaaagtgcattcgagtcatatggtacattcccctattaaataaatatggtgcactcctatgttattagataaaatgtttagattataattcagagtcatatcataagtaaaattaatattaataaaataaatggctttttcgcaagacggatttggagggacgggtttttgaatcaacattaataaaaaagtaaaataaaattaatccaccgtttcaatacgggttacatcttgaatttttttttaagaccactaatattaaacatatcaaatcatcttaatttagaaaatgttatataaaaccaaaaatgttatgtggtatgtataatgttactatatataaaattaaactataaaatataaatgtattagagaatgatacaatttgcaaaacttttatatataataaataattcttaaattttaaaaattactacttaaaaaaaatcacgggacgggtaaagaaattaccgaacgagttttattttggaattgggttatatggtggatgtatttgaatcaatatttataaaattttaaaatattattaatatgttgttttaataagggttaaaacttcagttttttaacaattgtctcatggattcgtggtatactgttacttaataacaattatacactgtaaaatataactattttataaaaataaaatttgcaagttttaatatctattacctttaaaaaataaatcgtctcgcgatataccgcgggttaaaatctagtattgttgtattactctacgatgtggtgttttggttatatataaaattctatagattcgaatggaaaagaaaaactacatatataaggatttcaatttaaaaacttatcgtcaaccattgacataaaaatctctaaaccttcaattttcaacccacagattgatttcctactaaatatctcaaaaggtgctgcaaattaaataattttactggtaacaacttgttgtcctactaatcttatggttaagtctaaaccacatgtaaccctttttatataagggagagtcttgtaacagaacaagttaagttgagagtgaaagacattgattgatggattaatatattatagttttttttgaatgatgaaacataagttttcttcgttttacacatgaaaaagcttagttaattttgcagttggttaaaaggaaaaagtcgttgattggctttctcttaacacttgtagggttttttttacctcaaagtctctaaattaaataattaacacatagcagcctctaaaaagttagtgtattttgatataatagattaaccatcaccatgtcaattcaaatacaagtgtatgtcttcaaatttcattaatttattttcttctcatctataaaaacagcatcagattttctttttcaaaatggttaagattttattcacccaaaacaaaaactttttttaaaagtttttaacaaaaaaaaatcaaatcaatacccaaaaaaatattagaaaattgattgctagtaatagaatcctatattataatttgactagagttttaaccaaaattcaatactgacacatatcatttaataatactaccaaaacaaaacacatgtgaatccatccataatatataccataatttgattaatacaacaatgattttgtctacatttagccattttattaaatgctagttgctatattagctattttttccttaatatcataaaaacaatttttttggtcgcacgtattaacattttttttcctatataattcatgaatgattaaacccaagatcctcactcgttggtccttagtcttcgacctcctttaatctctccatctctttctcttaagatggcaaaagacaaagatataacggagacgcttctcactgcggcggaagaacgttctgatcttcctttcttatccgtcgacgatattcctccgatcaccaccgtcggtggcttcgttagggaattcaacgtggaaaccaaaaagctatggtacttggccggtcccgccattttcacatccgtgaaccaatattctctcggcgctattactcaggtcttcgccggtcacatcagcaccatcgctcttgccgctgtctccgtcgaaaactccgtcgttgccggcttctcattcggcatcatggtaaattatatccacgccttttattttgtggtttgcatttattatccaaaatgcgttttttttctttctttgactaagtttcattattaacttaaaacacacaaagatccaaaagttgggagatgtccaaatcattcaaaatgtttttgtctacatttctataaacaattttctatattttaatttatatcaaaagaccattaaattaaaaaaataatttaacatatatacattaaaaatgtaaattcaaacgcccaaaaaaattgaagaaatgaattcatgattatcaatttgtagtcactagtcaaagtacaatttatttatcaaatggaccattttctcaagtttaaaaattaatatattttttgccttttgtaaaagtttcactttatttttttttgtaagatttaagaagttttgttttgatcattgtaatgaatgtgattatgaacgtccgcaactagcttggaatg

SEQ ID NO: 2919 - DNA, 3000 bp, Unknown; identical to SEQ ID NO: 2780
  misc_feature (1)..( 3000): cDNA_ID_1807441_gDNA_ID_1620617_Annot_ID_162058 3000 nt of promoter + ATG

SEQ ID NO: 2920 - DNA, 3000 bp, Unknown; identical to SEQ ID NO: 2909
  misc_feature (1)..( 3000): cDNA_ID_4359839_gDNA_ID_1620617_Annot_ID_162057 3000 nt of promoter + ATG

SEQ ID NO: 2921 - DNA, 3000 bp, Unknown; identical to SEQ ID NO: 2908
  misc_feature (1)..( 3000): cDNA_ID_1818903_gDNA_ID_1620617_Annot_ID_162056 3000 nt of promoter + ATG

SEQ ID NO: 2922 - DNA, 3000 bp, Unknown; identical to SEQ ID NO: 2688
  misc_feature (1)..( 3000): cDNA_ID_3409127_gDNA_ID_1620617_Annot_ID_162083 3000 nt of promoter + ATG

SEQ ID NO: 2923 - DNA, 3000 bp, Unknown
  misc_feature (1)..( 3000): cDNA_ID_2992438_gDNA_ID_1620617_Annot_ID_162082 3000 nt of promoter + ATG
acagtgagttgatctcttttcacaattcttcatgttaaactgatgaagagaaatttcagtattttaatttcctactttctagattgggcctataccagctgatgatggtattagcaaagagattatcactaaacttacaaccaccatgaagacaaatggaacattttacacagactcgaatggccgtgacttcatcaagcgggtattagatgcaaaattcatgtgaagtagtttatttttatttttgtaacaaggggtattttgtttttattgtaacatactttgttacattttcttgcagattcgggacttcagaacagattgggacttgcaagtgtaccaaccggttgctgggaactattatcctgtaaggcatcaaacccatctgagattccttctcgtggtgtactaaggtcttgtactagactgagctgcactatatctggccttttgtctaatatatatattttcttccagctaaatctcgggatatacatgcaagataaaacctcagagctatccgtgttggtggatcgagctgtaggtggatccagcttagagaacggccagatcgagttgatgcttcatcggtttgtcaactaactttctctatataaccaagacaagcatatgttgttttgcttgtatttcacctttttttcattcatgtaggagaatgcagcatgatgacattagaggtgttggtgagattcttaatgaaacagtctgtctccctgaaggatgcaaaggattaacggtaagcttaagttctcatctcatttttagctgtccaagttgcaacgtatcagcttttaagggaacatgtgacagagcttgtttccaaggtggtattaaatcgttatagttggtcttataaccgttatggtaactctgaattgttttgcagatacaagggaagttttatgtacagatagataaacctggagatggggcaaaatggcgtcgaacatttggtcaagaaatttattctccactacttatagcattcacagaacaggttgctcttaaaaaaaaaaaaatacttacttccctccagttctataagatagtgaagtgagataaggtactttttttgtaggaaggagatagttggattaattcacataagacgacattctcagcgtttgaaccgtcatattcattaccaaaaaacgtcgcattactcaccctccaggttagttggattgtgtactgtatacatgtcaaagacggttttttattagtttgaccacactcacactatgattaattctgacattttcaggagttggaaaatggggaagttcttctaaggcttgctcacttattcgaggttcttacttgtcctctctatgcgtttccaccgttaataatgtgttatagctatgtgctttttggttgtggaaatgtagtttaacactaggccgattaaactagcaaataattagagatatagaaaaacttgtattactcagaaaacccaaatcttgcagtgtcaggaaaccagacaattagttgtatagagttagttcataaaaccaaaccgtaacgtttagggtgtatttttcacctaaaaatcaaactgttttcatgtttatactcgtaaaaagctgactatgcggttgatcatcgtgctatgtcatttggttttccttaatagttccacatgtgaaataagatgagacctaaagtaatatagaagggagatggtcaagtccactaattggttttaaattgagaacccatgaacttcgacagtgttgcttttttggttcactaagcaacgggtaaaatctaatgtggaatttgataattattttctatctcttctcttaatggtttcatcgaagttgagtccttctgagttactgtcttgttaaccttgtgaaggttggggaggatagtgagtactcagttatggcaaaagtagagctcaagaaactattccacaacaaaaaggttcgccaaaaaaagacgacccttctcttatttgtctcactgtatgttaacaaaaacaactgccgttctgtttttaatatgttttgaacagataagggaagtaaaggagacaagtctttccgggaaccaagagaaggcggagatggagaagagacggctaatctggaaagtagaaggctcggccggggaggaagtgaagagaggagaggcggtggacgcagagaagctagtggttgagcttgttccgatggaaattcgaaccttgttgatcaagtttgatgatcaaattgaaatggttggtgataaagagcagcaacataggttatgaaataatacacgttgttgttgtctttttaagtttaatcggagaagagaaaaaagtttgaatttagtgtctgatgcgagtttaaaattcgggtgattgcaacagtcacgagtgcgatcccggtagagtatcgcaatttctgcattaacatttacgtttgctaaggggtgggcattttaaccgaaccgaaccgatccgaaccaaccgaactcaaaccgacccaaactaaacccggattaacactaaaattattcggttaggcttcttctcaacccaaatagttcggtttaaaaacctttcctatcacgacaataaattttgtttggtgtttacataaccgaattaatcgtaccgaatccgaacttaaaccgaaattcccaccgttaacctggctatactgaaactatatatatacgtatatatatatatatatatacatgcgatgttgacaaatgaacacaaaagtagataaactcaaaccggtagttattacattaactgtgtaataaagattcggtatatcccacccgcgaagaaaaggaatcatatcacgggttaacgaatccgggtcgggtacacggagcaatcataaagaagaaacaaaaactacgacgacaacttttttttggccttggttaaaaaattttcataagtgaacacagaagaagcggtggctctgagccggcgaaatctcctttctcatccctaaaattttc

SEQ ID NO: 2924 - DNA, 3000 bp, Unknown; identical to SEQ ID NO: 2689
  misc_feature (1)..( 3000): cDNA_ID_1818857_gDNA_ID_1620617_Annot_ID_162081 3000 nt of promoter + ATG

SEQ ID NO: 2925 - DNA, 3000 bp, Unknown; identical to SEQ ID NO: 2691
  misc_feature (1)..( 3000): cDNA_ID_1019757_gDNA_ID_1620617_Annot_ID_162080 3000 nt of promoter + ATG

SEQ ID NO: 2926 - DNA, 3000 bp, Unknown; identical to SEQ ID NO: 2691
  misc_feature (1)..( 3000): cDNA_ID_1818861_gDNA_ID_1620617_Annot_ID_46911 3000 nt of promoter + ATG

SEQ ID NO: 2927 - DNA, 3000 bp, Unknown; identical to SEQ ID NO: 2689
  misc_feature (1)..( 3000): cDNA_ID_1818857_gDNA_ID_1620617_Annot_ID_46912 3000 nt of promoter + ATG

SEQ ID NO: 2928 - DNA, 3000 bp, Unknown
  misc_feature (1)..( 3000): cDNA_ID_2992438_gDNA_ID_1620617_Annot_ID_46914 3000 nt of promoter + ATG
ttttaaccgaaccgaaccgatccgaaccaaccgaactcaaaccgacccaaactaaacccggattaacactaaaattattcggttaggcttcttctcaacccaaatagttcggtttaaaaacctttcctatcacgacaataaattttgtttggtgtttacataaccgaattaatcgtaccgaatccgaacttaaaccgaaattcccaccgttaacctggctatactgaaactatatatatacgtatatatatatatatatatacatgcgatgttgacaaatgaacacaaaagtagataaactcaaaccggtagttattacattaactgtgtaataaagattcggtatatcccacccgcgaagaaaaggaatcatatcacgggttaacgaatccgggtcgggtacacggagcaatcataaagaagaaacaaaaactacgacgacaacttttttttggccttggttaaaaaattttcataagtgaacacagaagaagcggtggctctgagccggcgaaatctcctttctcatccctaaaattttcatgtccatcttgcctcctccgattatccaaggtcacaattcgtcttctccttcttcagattcctctctaaaccctagctctgagcatggcaacaactcttcttcttctctctctcctcttccctcctctcctccttcccggatctcttcttccaccggaactcgattctccggacattctgaatcctctcacaatttctccggtggctctaggggtaatggaattgattgattaactcagctgcttgattttgccctaaattttagggtttttacattaaaagttcgttaattttgttgagttttgatttgggtttttagggtctctttgaaaaatcttagctttttctctaattttttattctttctgttaaactgtagaaccgagtgttgcagctgaggagggacatagccgtggatcttccaaagaggtaaactttagatgcttctcagtaaatgatgagactttaagtccttttttgttgaatggtccgttacttttgtttctacgctgcagatgacacaaaatggagcagggaaggagagtttttccccacctaatgcagataagcgtgaccattttcgatatgatggtcgaaggaataggtctagagggagaggtactggagctgctggttcttcttcttctcaattgcagcataattccggaccttttaattctcctagaggcggtgtttcgcatcataatccaactggtagaagagctaatatgataagtgggaatcatttactgaattttcagtatgatccgatttcgcaaccgcaatctaggggtcctcctccgcctcaaagaaggcaacaatataaggggaggccttttaacaaggatttgtttcttaaggccaattataagtttgttgtgttggacactggagatcattctcctgattcaatggatcctgataaaatgctgcagtgggatgatattatttgtgtaaggtattctactccgtctcctgtccagtgtccgatttgcttggagtatcctctatgtccgcagattacttcctgtgggcatattttctgtttcccgtgtattctacagtacctgttgactggtgttgataaccacaaggtggactgcttcaagaggtgtcctttgtgctttgtgatgatttctccaagagagttatacactgtttatattgagaacgtcaagcagtattctgttggagatcccatcgagtttgtacttttgactcgcaagaaagattcttttgctcctacccggaaaaatgagcatgacttggctgttcctaatggtgaaaatgagatatatgatccgttctcaaagttcactttcacccaagatgttgatctctctgtcagacaagcagtttcagagttagacagttggattgcaagagcagatcctcagctcgttgaagacttggagaagcatctttatgtaaatgccgctttagagcgtttggagcagagaaaattgtactggaatgagcataagctctctatttacagcaaagtgtgcacaacggctagaaatcagactcaatcattgtcacctcctgatgtttctcgagttggttatcaagcacccatggggggccatggagcgccagatagcggctccaatgatcaagataaatcaactgaagattcttcagcggataagtcagatggagaatctcaatcaagtttggaaaagggttgtgataatgatcttggtcatcctctagaagatcaagacgcaccgtcatcttcctcatgcaatggaagtaaaggtttcctgtctcaccaaattgacaccaaagacctgaaggacaacgacgcgtacaacttttatcaggtaatcagtttctgatgcatactgttgtgttttcataaagtactaatgagctgcatgatgattgttttattgctatgggctggtcaatctctataatctgaaataaatgttattatctgttttcgataatctaggtgggtttattaaataattgtggtggttctatccatatatgcttaatttgtcttacctttgtgctcttgttgtgtacctatacagtctgttgatggtcagcacattatccttcacactttgaatgtgaagtgccttctgcatcactatggaagctatgactttcttccaccaaggtaagattccaggtcgtttatgcatcacaattctcatttttcaaagactatggaataagttccaatgggatcttcttcgttatctaatcatttctgcatgtatttgggatgctgattcaaagtgtgatatatggcacttttcgttgattaatcaagaaccgttcgtataaagatccaactcttatttagtatgaaaatcagaacggacaatacattcaagtaaaaacggttcagtacaagatgttatcatctctagtttgttgttctaatagacttctgattttgatccattaaacggcagattgagtggaaagatactggaa

SEQ ID NO: 2929 - DNA, 3000 bp, Unknown; identical to SEQ ID NO: 2688
  misc_feature (1)..( 3000): cDNA_ID_3409127_gDNA_ID_1620617_Annot_ID_46915 3000 nt of promoter + ATG

SEQ ID NO: 2930 - DNA, 3000 bp, Unknown
  misc_feature (1)..( 3000): cDNA_ID_1819051_gDNA_ID_1620618_Annot_ID_46916 3000 nt of promoter + ATG
ttacaacaacctctacgaattcatatcatttatttccttgtctagattcatataccaccaataattagctaggaccatttgttatagtagctttttggatatcttgaccattttgttataatgtttttgtatatatatatataaatacataagaaaatattatacaaaacacttaattcagttcttttatgtataaggaccgtagtgttatatctctaatatttatataaatcgtagatgaacacggagtaacattttttgataaacatgtttaggagatatctgtactttgcaattaaattatgatgaatgatttattggtagtgactaaattatagaggtccccaatggaaaaaagaagcagcgaaccagtcacaccgtcgttgtaatctacaactaaaaaaatgcttgatttatttttccttatcaatatgttttcaaaatgaaaacgtgtacatataaaaaaaatggtcctaagagacatattaattttgattggtccacctggaaaaccggcaagggatggccatggccacgtgggatttgtggtccatgctgggatcaacgttcctcaatgtgccacgtgttttgatcatccagcgtgacagcctgtgttttcaacttttcatcaccaagcttcaaaatcttttttactctttttatttttatgcttaaaaataatttagaaattgatatggtcgaagagtaataataacttctcttgtcaaaagggagtaattatataatatgaaaatggatttttgtcaatacataaatttttattttctaaattaactgttttgtttttttcaacatgatttctctgttttctatttgattcaacggcgcatttttttaaaatgaaaattgtttgtagctcaatattaaagatattatcgtcaaaaattgttagacaaaaaaaaaaaaaacccagcccacaatcattatatgatatatggccactgataatacaactatctgtaactgatttaaacttaaaaattattctacaataagggttttgattcgtcggcccaaatttaccatatgggccttaagaagcctggttaaaatatatggccactggataatacaactatctttctttctttttttctttagtaatatatggcatcagtattagtgtcaatgatttatagatgtgaataaagtgaaatttttggaaagctaattgataactttgatgaccaatatataacaaataagtttgtctattgcagtactttaattcattgcttgcgtaagaagtgagtgggatcacaatttaaagaacgtcacttgattcaactactactaaaataaaacaatcagaaaaaaaaaatattaacagaggaaaataaaatatcctggagtagttgaatcatcttgctaagcacctaattttgataaaacttgcggtggcacagtaagtttgggcacctaaacaactaattgattggctaatcacaatatacacgttttttttttcacatgtggttttatattgaacccaccgaattctcttgatccttctaacaaaatttaatctcaaccacaaaaataaaataataatatatataagaaactgtaatgtacaattgtgattagcaatgggtcatctcatctaattatccagataatattgtctatatttttccaattaatttggtcgtatgtaactaaataatgcattaggttgagctaaataaagtattagataaccttacctactaacaattttcaatgatttttttcagtttctatatttctgctttgtatttttgtgtaaaattgggtttacagaccaggggatttcgaacagggtgatgtgttggacacaaaatttattccattcatgtgcgagttattattcattgaagtatattaaacttttgttttattttacttttttctattaattttaattaaaaatttgatgtgaaagaaaaaaacggtattttattgtgaatagtaaaagtcatgagcaaaatcatcaacttaggagtgttgaaaaaaggctaaagaagagtaaattagaggagagtcaaagattgtgtgtcactagtgttaatgctagtaaacatcagctcttttttttcttctctcttaatttttcaaacatttgatttctataaaccttcttaataatttcttccgtaaaataatatgattagtttttttttttgtaaacaagtgcccacttgcttgaccttcccaaccaaaaaaaacgtaacaatttccatcatcttctccataaagttcttacctttaagtgtgtttaatggagatttatcctctactcatctctctctctctattctgttccatttattaagctttcttcacgctttttaagataattaacagtcacgggttctaaaagctaaagggttttgcttcgaattcaagtgtctcccttcactttctctctctctattgctgctctgtttctgctgtcaattccctaagaaagtcctgatttttagggtgatcgagagaagttgaagaatcatgtttattgagtttccttttttgatccatagggtcatctaattttgctaattttattgtcatctccttcaggtaatttgcgatttctctttactctgtttttgacttgtacttagattccttttctttaacagtaataaacttcataaagatttcatttttcttcttatgggtatttggaatgatgaatgtagattaggttgattgttttgaggatgatgtggataatctttttctggatattattacaatttagggtcttgagattgtttgtaataagctccgtactttggtcccttattttcaattcagtctttaagatttcggtaacccttttatatttgatgcaatctccctataataataccttcttcaattgctgttttgccatttgcatattatttaactttctttgttggatcagtctgattctttcttaccaattattgtcttaatccttgattaagaaaaaacaaaaaaacaaaagac

SEQ ID NO: 2931 - DNA, 3000 bp, Unknown
  misc_feature (1)..( 3000): cDNA_ID_1819048_gDNA_ID_1620618_Annot_ID_46917 3000 nt of promoter + ATG
cttatgctggctctacattagtagacatcgcatcttcttcatcatctgctgtggtgtcagcatcgtccaagaaaggtgagaggtctgattttgagaagaaacttggtgagtttttcaagcatcaaatcgagtcggattcttcatcggcatatggggatgggttcaggcaaggtaaccaagcagttcttaagcatggtctgaggcgaaccctcgaccatattcgcttgaccggtacatttcctaaatggatttaaactataaaaagagagaaaacaagctttgttatagttttttagagtatagacttgagaagaaaagaaaaagaaaaatgtataggttacaacaatacacacatttaagtgtcataaagtttccactttttaagtaaaaaatcaagagtcaagaaacaagaccaaaaattcttggcttggtttttatctttttttgccaaacgttttgcttgttatttcttagatagcaaattattctgttttcaaaatctaaattactacaatcactagtttgacttcatcatatctggaccagtggataaaagtatgaaagataaggaaaatccgaaaatggatagacttgtatatccacaattccacattatatcataatatgtactgtatattatggctcttctattcgctgagaggacgaaggtcaaatatgtagaatgtagaagtatcctcatattgacctgtctaactagattaatattatagtatgcatgcttgccatctgttaattaaaatacagacattgtgaaaaaatacactccatgctctctatctttctatcgtttgtaaaatgatattttgttgatcaaaactactatggtctacaagatcgtgtaaaacaacattcaagtaacttagtattatgggaagatgagttctctcgatcgagatgttcagtcaattctctagagtataaaaaacgaaaacgtctcaagtcaattgtcaatcattaatttccaaatataaatattagacattatcaacaaatgatgataaagagatacaaaaaacattgtgaagatgtgggatatgaggataaacatagagagataggatgatatattcacacgtgtttcccacttcctcatccaacttgtcgcggcgcctcgtcgccggttctttcttctctctttggtttttttttctaaaacattttctctatcaagcgtttatgtttcaacaaattttatttaagctaatgttttttcttataaccaaatcaaaattttattcatcgatatagaaattaatggttttttgctaatattgaaatctaattttaaagtatatattaaaaagtttttgttaaaaaaaaatgaggatactcatgttggagagggagagcaaacggattcttgatgtttttacgatcgattaaagtgaagacgttttagtggacatgatatatttctttggtatgacatattttaaaagtcacctctaagaattcaattttttctagatattatcgtcattcgtcaacattatatcgtatgatgttaacaaaattaatggttggtagagtactcgtcatttagaattagggctaatgaattgatcgttcataatgtcttgtcgagggcaaaaacgacgtaacgtgacaaaacgtattaacctttgtttctttttcttttttttttgttatttcagaattcatgaaccagagaatttcattaatccactagctaatcttgaaattattctattgccttttgaaaaagttgtaaagtataatttgaaggttgcaaaattttaattttggtttttagtgtttgagaaacaaatcaaaactgcaacattatatacagaactatcttcccttttttttttaactaacttgaaatttatgcaaaacagttcaccaaggtgtcattaaaagatgtcattaaattcgaaagtcggttcatgaaagatgtcgtcatcatcgtaacatgatgccaccacgcagtcagcactaagcaggctatttggctttggcaccttcattcaaaaataaaataaattttaaattcctggttcagtaaaaatgtggaccgttgttttgggggcagccaatcgcacgaatatggtggctacgccacaaagttacaaatgtacaactttgtcgggcttttccagattcattaacatcaataggcaagtaaactacaaaatgcaagttgcttaatcaataatgttgtaaagcttttacagcatcttttataccataaaatgtcaacatcatggagtttactccaattaagttctcgtacactttgatttgaataatcagtacaaaacataaccaaaccggattagatgtggttttaactattgcatacatttccggccaatggattaggattactgaaagaacattaaaaacatatatgtatgacgacgaaaacaatttcttagggcttaggttatatatatttcgcagaaatgtataccaaaatgttggagaatcgtgaaaaagaatatacctaataaaccgtactaaaaaggctgaacatctgagattcagcagagcatcaaaagataaaagagaatatgctcattaatcataggtcgactgttttctccaccctccaactttaatttttgaaatctcttgtttttatgtgcccttgataattattaatcaccttaacattaacaacttgttaatgcctgttaatccaaaagtaaagcaatcaaagaactatattataagattaataatgtaatgattcgaaacattacaataaagtataacgtaacaagcttagatatggtgggtaaaatatacgaagtaaaataaatggtcccaagtatatgaatgaatacatgtatttacagatatctctctcccctatctccttatgatttgtcattttcctcacccataatcctataaaataatcaagaacctccgagggagagagacatacacacagacagagtaagacatatataacatatatagagagagaagacctaaacaaagagacat

SEQ ID NO: 2932 - DNA, 3000 bp, Unknown
  misc_feature (1)..( 3000): cDNA_ID_1819044_gDNA_ID_1620618_Annot_ID_46918 3000 nt of promoter + ATG
gttgaagccaattccgaaattagttttagttttaacttaaatgatttttagtttataaattaaacaagtataacatatgcttaatgattgtttcggcgggcttacataaatgattgatagaacatgttatgcgtgggagtagtcgttgtaagttcaccgtccaagtctccttttaattaattcacgagaaatcaactacgaccgtgtaaataaaatacttagtttggtaggtcaagaatcacttctggaaaatgagactaaagaaaagagtcacttgtggaaaatactatcaagtggacaaaaccaaattcctcatagtgaaaaagagatatattacactgttcctgccgcatttgtttggtacgtatctaatatttttgtttactcacgtggtactataacgcttattgccaatataacgattaggacaatttgatttctactaattttatttgatacgtatcaaatatcttctgtcttagctggtcatcaaattgtgtgaaatagtaatttaatactaactcgttactgattactgatgtagattcatcttcgtaacgatcgcccgatccatattccaatatttgcattttgttttacgtaatgcactctttctcatctgtagctccttgagtaaaacttaaaacttaaccatgaaggcatctgtaaattgacgcttgtctgaatttctcaacaccaaactctctttcgtgtctagaggttctttggttttcccacctgcttttcgattatggtaatggtcaacttgacgcgtaccaagttttctgatctttttgaagatatttcaaatatggtttgctatttcgattttcgacaataacagtaaaaccccattaagaccataaatcttaaaaattttcataaccgttttacaatattcatttatgtagccaaattaaatttgtcacgtaaatgtgacaattaatattggtccacatcattttgctttcatgacaagaccggccatttagtgacctactgtatgttctacaacaattattggaaaatggaaattaaatatcccaacaaaaaaaataagagcagaaacagagattcactttgcgaaaaagtcgcacgcacacatataaaagacaggactagaggaacagaggaagaagaagagtcactgtgatcaccaccaccgtacgatcaaattcaaactatgtcaacggctctgattaactctattacctacttcctctccgaacatccatacatcgtcggattccgttggagtaacagccaatcatggggctccacgtggtctttcctcttcacatcaatctccctctatatcgccgtctcatcctccctccacatcctcctctccgccgtacgccgaagtaaccgttccgttcctttaggtcacatccccgaaatccacagccttctcatgtcgatcctctccgccaccattttcgccggaatcctcctctccgctgccgcagagatccgtgacacacggtggttatggcggcggagcaaaaccgccactcctctccaatggcttctctgtttccctctcgggactcgtccctctggtcgtgtcttcttttggtcatacgtgttttacctcacgcgctttctccacatgttccgtacgattttcgccgttttacgtagccggaggctcgccgtgtctcagctcttttgtaactccgtcatggccttcacgtctttcctctggctagaattctcgcagtcgtaccagattctagcgattctatcgacgactctggtttactcggtggtttacggttatagattctggaccgggtttggtttacccggttcggctttcccttcgtttgtggtgaattgtcagttggttctcgtgggctgtaatctcgtgtctcacgctggggttcttacgatgcacctctttaaaggtggatgcaatgggattggcgcgtggggtttaaactcggttctcaacggtgcgattttgttgctttttcttaacttttatgtgagaatgcattcgccaatgcgacgccatattaataaaatgaatagccaacgtaacgcttaagaattaattgatcctttttactagtttttactttttactcaataaaacaaatctaatcttcttttttgtctttcacttttaaaactgaagtataatctaatttgttttctaataactaaaatgttctgcgtctaggtctgtacatcttctcaaaccgggacaattttttttttataaaccatcgatctctgactttgcatgagatattttacatttgaactattggctcttagttaacgcaatctagttcttgtttttcattcttttaaatctagttttgtgttttttaagtggaaagaaattatgtcgattatttataaatatatctttaaaaatatttatttatttcataagaggtttttgatccaaagactcaaacttggggtaactttatgacgtagatataccacaatacccaccaaaatgtggtgatagaggaaacaaaggtttacatggtggatcatggacgaggatgatcaaaagcttatactctttaccaagtgaaaatgcattttggataagaggaaaaattattaaaagcgagaaaacataatatggtttgagactgatgtgttagattgtaagagctgcaattgtatctctctacttggggacacacttttgattttctatttaccgtttgaatgccgtataaggaaatgtacaggtcaaacgaatatggtcgagtgttcgccttagaccattgtataaggaaatgaactatgtcgactatatttaatatttgggcctagtataatattactacacttaatcaaagttaaggcatttataactgtagaacaagatgggcctaaggccacggttttctacttaactaggcacacatatgacatatcccatagtaaaaaagcttacataataaggcccacatctgaaatctgattctccactgtaaaaataaaatcctcttaagctctcgatcgatg

SEQ ID NO: 2933 - DNA, 3000 bp, Unknown
  misc_feature (1)..( 3000): cDNA_ID_1807583_gDNA_ID_1620618_Annot_ID_46924 3000 nt of promoter + ATG
acaacacctcctcctataccaccgattgtaccaatgaggttcaacattccgaaaccagctcctctcgcaccatccttataactatctgcaataaacgattgaagcgcgggtataacaattgccaatccaaaaccattcactgctctccataaagcaacctatatcacaagaccattcaaaaacttataacttcaaaatcaaagtccttaaagaaacagatcaaaaagtacctgaatgaagtagctgctggctccaactgcagcagttgataaagcccaacagaaagtacctattgcaagaacaatgggacgatcataggtaatgacaagaactcctgctaatggtgatgcaagtccttgaacaaagtttctaacgaatgttaagtagcctaaatctgatggtcctgcgttaaatgcttcactcacttctttataaaccgaaggcaatagattctcgtctgcacgttccatgatcgcagctaagtttataagaatcaatgatatcgaaacccccaaaaacgttcctgttctgttcaaaaacagaataaacaaaagaaagttttgagttttgtaagattcagaaccagagacaatgaaacggttaaccatttttttatgattactactaaattcaaagataaagtaatcgattaaacagatccacgagccaatcttagaaccctaaaaagtttgaacagattctgattcgaatcaaataaaacccaaaaggagaaaagtcaaaaaggagctaactttatcttcatgctgttagtacggtgatggcgagggaacagagacctgaagaatttaaaagcgacggagatgataccggtacgagttcgagcatgacccatcaaaatccaaaacttgaactcccgagtaaccggagccggagtttggttgctttctataaatatcggatctaaagttccgacacgaatagttttctcgtacgatttaacaaccgccgaatttaatattaattacagtaacatgttggatattctttttgttactgacgtcatatttctttggatgattctttctggataagtcatgaagtggccattaagccatttaattatgtagattaacgtatttattggatttaaaaagatcattaagcacgtaacgtagcttgtttggtggatcgttacatggtaagtgtcgggaacgtgattacatttatctttattcatttttgggatgtgaatggattggtaacgtataatttaagttatatgttaatcttggtaattttcaatttagagctgaaaattattgttagaaataacattattagaaaagtcttcttctttagctcctccatgttaccaggaggaaaatatcagaaatattgctgagtctgaaattaagggcccatgggcctcggacacatatactagacaaatcatgtttcattcaatttaataacgaagtgcccaaattcgttaatattaatgccgagatcttcggctgtctgacaattttcataatgtctacatgcagaatgagctagtgatacaataatattgtgattataagaaatatgtaatgtaatgtagcaaacaaatcgaaacgtttacaaaagcacatataatttttctttttaaaacgcaatactaaccaatattgaccgatgcattgaacaatagtgagaatagttggattatgacttaaatggacgccgcacgattaattagaataatcaacaaattaaattaaaagtaagtactaagtaagattaaatgtacgtgaccacgccgtacaaattgaaaatttatgttaaagattcccccacgtgaatgatctgatccaaagtcactctgacagattggattttttttggcgtcaccgattttatttttcattttaaactttagtagtttttggatttgtgactataaatgagaagacgtggtttaataaaataaaataataaacacaattattaggaacttttttttgtttcatttgattgtctgcaataataacaaatgacattttatgaaattacttttattaatttaaggttgtgaaaatttaacaaatatgtaaataggatttgttaaagtactatattaattagttggctaaaaaaataataatggcatgagtccagctgggtgattctgcttcctggctttgctcacgcctaactggaaccgcacgtgctccgaccacaatagccaaattgctgtttgttatcttatttccatcctttttaatattactaaaaaatgttttagctagcttccctaattatgtggatacatttttttaattcacatcaatgaatttgggaaaatcaaataaacatgtaatttttggaataatttgttcgtcattttctaaaatccaatatgaccgttttaaaactctttagatgctatactaggttaaaaattatgttaggaaaatgagatcagtttcgaattacgttttgacaactccaagaaataacatcaaatttggtgtaaagcttttgtgagttgtattaatgcgttacaatatgaaaatgtgcaatatgtcgtcataaaaaacaatgcaaaatcgttagtatatccagtttttatactgattcttaattcttacaacgctttttgtttttgtttttaagatacaaatttaaattaaagaaaatacgaaaaaaaagaagaaggaaagatccgaattcattgaacagtggacgggagggaaacaacggggaagggaccacagctcgtgcgttacataaataggacacgtggaagctgacttccagaaataaatcgatcacacgtgtagaaacagaccacacgtgtggagacaaatgaatatttgaatttatttatacttaatgaatgaaagttacagccaatccgcttcagactcacacacacacccaaaacaaaaaaaaaaacaaaaaaactaaaaagaaagcttcgtctctctctctctatccctcgtgcgccagtctgacaaagacttagagatagattcagagattcagagctcttca

SEQ ID NO: 2934 - DNA, 3000 bp, Unknown
  misc_feature (1)..( 3000): cDNA_ID_3438222_gDNA_ID_1620618_Annot_ID_162123 3000 nt of promoter + ATG
ctaccttcctctctgctgctttaactgcagatgtacttatcatttattttcttactttaccatttaaataatatatcaaaacactgtagtttgcttagcattgttaaacaagactactcacttggtacttggtcgtggaatattatacggtatgcaatgaatttgcataataatctagattcggagcagtatcattaattaattttgttaggttaaaacgttttgttattaaaaatcgcttagaactgaacaaaaaccaacacatatttagaatattcattgcaacatctttgtagacaaactaaaggagcaaattcacatgtaaatctaaagaacaaaagaataaagcatagattaatcatacacacataataagaccgggaccaaattttcctcttttgccaagttcccaaattctctataaatacttcttgtctccatttcacaacagcaacgtggactctttctttgttttggctgactcttctttcaccgtttccttagagaacttattcatctcataaacaccacacacaacacacacttctctttctccttctctctatatattttaatatcaactttctagggtttccaagttcatatatagtgatgggtttctcaatgttcttctcccccgaaaacgacgtcagccatcattcctctccatatgcttctgttgactgcactctctcacttggaactccctccactcgcctctgcaacgaggatgatgaacgtagattctcgtctcatacctccgacaccataggctgggacttcttgaacggttccaagaaaggcggtggaggcggcggacataacctcctcgctcgccgttgcgccaactgcgacaccacttctactcctctttggagaaacggtccaagaggtcccaaggtatttaatatgtaacctttacatcaaatattttatcatttcttgatgtgggactaatatttctctctgtacaacaaaacaaatattgataataactttatatgatttttaatttggtcagtcgttgtgtaatgcgtgtggaatccgattcaagaaagaagagagacgtgcatcgaccgccagaaactcgacctccggcggaggatcaactgcagctggagttccaactttggatcatcaagcaagtgcaaattattattataacaataataaccaatatgcttcatcgtcgccttggcaccatcagcataatacgcagagagttccatattactcgccggccaataacgaatactcatacgttgatgatgtcagagttgttgatcatgacgtcacaaccgacccgttcttgtcttggaggcttaacgtcgccgaccggaccggccttgtccacgattttacgatgtgatgagtgatcatttcatagatattccccttataagtcttagccttggataccttttaacaaaaaagaaaagtcttagccttcgttaaattctttattttactttcctttaaatataaatatttaatgtctttttttggtctctgtgtaagtgtttttcttaaatttataattcgtatgatggatgctacttgtgttttccttgcatgacttttaaaatgttctctcgggtaatgaactaataattcgtgactttataacctttacatgatgtgtgtcctactttgaccacgattcagtgatatactatacatatacagaatacatattcattcctttaatttctttttaaagcatctttgggtttttgtacggagaatgtgaatattttgggatgcagatactatcttcacaaatacttatatcttaaacgtttaatttgtgagtttcttttccaaattgaaataatcaaatacttggaccgaatttgaaaattaagccaacaaatatctgcagggtggccaagctgaatgtttgtcgtgttttgcccaaattgtcttggaaatttgaccatcaattaggtcttcgtgtgctgctctgcttaaaactgttgctgccaactgcatgtgaagaatatttatctttttcataacgtgtttagttattgtattaaaaaaacgttagtttttatttgattgtttccggaaacacaatccaagataataaagtgttttgaaactctataacaacagaaagcgagagtaacaatttttttttgagtcatttatgagagtcaagacgaaaaaagagtcactaaactactaaatttgtcttccaattagaataataatgaaatgtttttctattttttcacgaataaaattaaatgtcttcagaatttctactttccactttcaaccgctcctgaccgggaatgagcatataagttgcgattttatttgggcctaagcccattcgatataaattccattcaaagtcaaatgaaattccaaattgaaacgattttttaaaaattggaatatagaccaccgccagattctatacctataaaactctattttaccaagacctacatatacatcatacaaatatacattacttatccgctacgcaagaagaaactgtaacatacggatttaagtaggatgtttaggtcatccaccgggtatctccccaactgtaattagatccaacaaacgctatcttgtcatcattcattgaaaagctaattaagtcattttctcaaaatcatgcataatgacaaacaaacaaaaaaaattaccaaagcaactatcaaatggtggtaatctagtgatttcggtctatttaatatcataaatggaattttgaagggatttgactgtactatgacacttttagtttctagaattgttgtgttcttgtactggttaagaggctaattaaaaaaaaaacagaaaagcatagattaacaacccaacacctaacattttaacaaattccaaatccaagtgccaattctccaagttacatttgaaaagatcgaatggaaaaaatgtttatataatgttgcatcccatttgggcttctcttcaaacatctctcaacaacaacaacaaaacaaaacttgcaca

SEQ ID NO: 2935 - DNA, 3000 bp, Unknown
  misc_feature (1)..( 3000): cDNA_ID_1818992_gDNA_ID_1620618_Annot_ID_162119 3000 nt of promoter + ATG
ctagagtagctagctcctggagaagtaatacgagtatcgaaggtctctgatttttgatatgatggcgtttggactcgattcgagcctgcagtttcgattgatatatactctgttgttgtatcatttcgtacagtagttttttttagacttttgcattctgatgggatctttcaaatttaataagtcagtttcagtttatgcattgatcattgtttgatatcatacaactctgtggtgttactacttcaaattagttctatttgatgattttatatataaatttcaagtttgatttatatctaatttggttttattaaactcttgcaaccgtgggctttccgtcttcaggatgcttcaagtggggtggaatattggagcgaccatattagaaatgattctcggtagcccatggagttgatccaaataggcaaggtttgtgctaatagatctgtaagctcaaaatggtagagctctcattatgagaggttggtggttcgaatccatccagatctgtcgactttctatcctcttttacctttatcatgtcattgtataacacaatatttcaaatctatgtgtgttgaatatgatctgccgatgttattgctaaaaccagggcagccgtaaaagggcctctgtaaaatttagcatctgccacggaggaaggtggaattgatcatttttaaagcaacggcgtctaaacatggactgacatcctaagtcctaactagttgtgttatttggactacaagcaataagcaaggagcataattcacttaacagtaataaaaaaacatactaatgaaagatgactgcaaaactctgttaatcattgttgggttatgatatttatcaaggctaactcattcaccatctctatgtattcgtcatttcttagttgataaagaatatttttataatataaaaaaaaagttaaggtaattaatttcatattttttaaaggaactttaaaaattcatgtactttcttaaacaaacaatgtcatattgaatatatggtttaaatatgttatatatagaggtggacaatccggtttacttggtttggtttttaggttttagaaagagtgaaaaccagtgttacattttcgttttgctataatgctagtttttttttttttttttttttttttaaaacctagtattaataatttctaataataatttgtgtgatacagactattcaatattataaatacctttcattcatatagataacattatgcatataaagttttgttaaattccagttgattgaggtcggcaacatttgaatactaatattttttatgtggtaacaagtaacaacaacaatttaacaacaactgataagatgttctttcgattatatgaagaaaacgtcgactccaaatacagagaaactatcaatataaaataacattattctcagtgtatacctatttgatagaagaccaatatatatcttggtagaagagatgatatgaaagtatcagattaagaaaagatttggtgtcggattaacgtcacatggtgttattttaaattgtatgccatttaataatcgtccattgtcaatgctgttaatataatacaaaaccaaatatatgttaactaacatagtccaggaaccgtttaatttgattaaaccaaatcatacgcacatgattgcgatgataaaccgaatctttaatattataaaaatcaatagatcgagtaaaacgttacattttaattattattattagctgatgctgtcctttatggacttttcttcttcgtttttttgttcttctacctaaaaccatgaaagagtggtttgcacataaatacataatgaatatagtatgaaaaaactgttacatttttttaattattttgaagctaattagtgaactcaataagttttctaatcataatttacctgttctctatcgtgacacaataaacaaagacagataagagttagttaaacgtgaaagaaggttagaattttggaaaatgaccaaatttgttattacttcaccaaattcggatcttgtcctcttgtcataaaatcatttcagatctgagttatttggtccaacgccaatactgaaaattaatgttattaaagtaaatcatatttattattttcaaccaatggggcctttcacaataacaaacaaagggccagctttaaagttttattgaaattttacatgccacataaattggttaaaatacattttcttcacgtttctcgctttttaagtccctttgaagtgggaatgatactcgcgtgacgaccaaactccatcgagcctctctctctctctctgtgatcagtttaatctactgaaagaaagaaagaaagaaagaaagatccgtattattaggtaagaatgagattcccttttacgtttcgattttgattcgtttgtgtttgattctcgatcgttttgcttcgatttagcttccttctgtttttacaagtctctcttgattagaaatgtttaggtttcaatgtttcatgatcatatttagaaaaaagtttcatggtgaccaaaaaagaaagaaaattttgatggctgagagatgtcagagtcttgttttgtttttttgataaattctctgtttgtgtgcttttaaaaagtcaaatataagaaattctttgaatcatttaaagccgtatttatgtccttttgacaagtcgatttaatgctttctagaagagagtttatcagatgttaagaagattcaaagttggattataacgaaaatttgtatacctcattagagatttttcaagtggtaaatactaatagaattcatgatcccgttttagatgtaagatttggttgtgtttatcagttttctattaatagccgatattattaaaaccttttgcttaatcttggatctgatttaatttgctttaaattggacttgaaagaaatctgaatttgatttgatcgtttctaggcttcgaagctgtctcaagattgttgtttaattaaac

SEQ ID NO: 2936 - DNA, 3000 bp, Unknown
  misc_feature (1)..( 3000): cDNA_ID_1818996_gDNA_ID_1620618_Annot_ID_162117 3000 nt of promoter + ATG
ggcaaggagatattggaattggtatctaattcccctgaagaagcagaactccgctttcaagacatcaaagctgctgcgggaatcgacccgaaatgcgtagacgatgttgtgaaaatggagggtaagaagactcatggtgaaggagtgtggaaagagctcattctaagaccaactcctgcagtgagacgtgttcttttaactgctcttgggattcatttcttccaacacgcctccggaatcgaagcagtgcttttatacggtccgaggatctttaagaaagcaggaatcacgactaaagacaagcttttcttggttactatcggtgtcggaatcatgaaaacgacgtttattttcactgcgactttattgttagacaaggtaggtcgaaggaagcttttgttgaccagcgttggaggaatggtcattgcgttgacaatgttgggatttgggcttacaatggcccaaaatgctggcgggaaattagcgtgggctttagtactgagcatagttgcggcttatagtttcgtggcgtttttctctattgggctcggcccaataacttgggtctacagttctgaggttttcccgttgaagcttagggcacaaggagcgagtctcggcgttgcggtgaacagagtaatgaacgccaccgtgtcgatgtcgtttttgtcgttgactagtgcgataaccaccggtggagctttctttatgttcgccggagttgcggcagtggcgtggaatttcttcttcttcctcttgccggagacgaaaggaaaatcacttgaagaaatcgaagcgctttttcaaagagacggtgataaagtacgcggcgaaaacggtgcagcttagcatgatgaatataatgttatcattaaatgaaacgacagcgtttggggtttctcactcattacacgacgtcgtttagttgtacttttgtgtggcttttatcaaattataaatcaacggtcaagattgacgcacgctttagtatttttttcattaacaatttaagatcaacggctaatacatcgccaattactagctaataatggcccagtagtgtgaactgtgaagagagtgaactgatttttttttttttaaagttctctctcagatttaacaaaatcgagccgacactttcccaattgaactgaatctactgaaatcgattcacgagagctcagatttggtgttagcatcactcactaagcaagattattgagttgtaattagtatttgagatcaagatgaaggaggacgatgcattgccgacgacgacgacgactggtacggcgacgggaacagctatggcgaattcgaagaaggaaagctctgactcggtcttgtttggaagaggtcgatataagttctgggcgtttgctgcgattttgcttttggctttttggtcgatgtttactggcaccgtcactctccggttatctaccgggaatctgaaccggttatcggaagatctagggattccgaactacgataatctcgacgttctggttgtttactctctctgtttctatttcggttgatttggtgtgtaatttgattgtagtctggtttttgaggttttggaatttgtggtattttttaggaaatggaggagagagagaaagtggtgaagcatatgtgggatgtgtatactaatagtcgtcggatcaaattgcctagattttggcaagaggcttttgttgctgcttatgaagaactcactagtgatgtgcctggggttagagaagctgctattggtgaaatcgccaagatgtcggcgcggtcgatcactcttgatccacctccttctagatcaaggtgatgattcttgctttaaatttcgatttgttttcactatattagtcacttagaatcagtaggtagaggtatagatagatggtagtcgatcttgcctctgtgctggagtaaatagtaatgttcaatctggtatctggagtttagatcttgagtgtacctagcttaggttgttcagtttgatggtcaagttcttctgtgtctggagatatgccattaagatttagtgttactctttaagttattacctgttaaagttagtttgtgtatactctatctttgtttgtgattggtgaccagctatatggatccatgcttgatatccaaacatataaagacctgtatgaactttcgatacacatagtaccttataatggtcaaggtctaatttttctggagactgggtatgtagatctagtgtaagatactggtatgcataatagcatgtggttgagtagattatgtcttcttaaaattatgttatgagatttcagataggtatagctttcggttttgtttcttgcatttaatgctaaacctcttttgtgaaagttggttgatcaagtttggtagagcttccatcacccaccttagcttcttgatcaggattcatcttttaatttcttctcttaaattgttcatagacttaacctgagtgttaaactcttttttcttttctttatcggtttgttctcagagtgcaagggatttgggaagaaacttgaagagaattctacacaagccagcagctagtagctgataatgatattggtaacatatgtctactacttgctgaagccaaaagatgaactaccaaatggatagatttcattttgggactaaaattcaattttcgaaatcaaattgctctttttacattctatcgttggtaattatatagagctacttttataaatatatgtagaagcaaatggaaccttatgactttacacgaaaaagcaatggatcccttatgatatatttcttcttctgatatcttcaaaacttgggactcttgaatctgtgttgttattggcaaccttttgccactgtagattaccaaattaagatttgttgactaaactaaaatacgcggtttgtttactcttgtagtataaaaaagctttaccacactcgcacgtgagagtgaaaaaaaaaaaaacacaaacgtaaagaaacacaaaa

SEQ ID NO: 2937 - DNA, 3000 bp, Unknown
  misc_feature (1)..( 3000): cDNA_ID_1819004_gDNA_ID_1620618_Annot_ID_162115 3000 nt of promoter + ATG
cttaatagctcaagagcatttcgattgaacatcttattttgttgcttgaagacttgttgaaaactatgatctagtatgcaggtttatttataagctgctcctgcatttttctttcctcataaattagcttgtaaaagcttgacggtttgttgttggaatctctagaattccatagtcaacaattttcaggttcatatagttcactgctttgttctacacacttgtgcttcatgatgaattcaagtttctttcagttttatgttgtttttacatatccttctacttgcaactaaagggtcaagctggttctgttggtatagctaaactctgtttcttggtacgaagatggtttcgcgtatagtggaatcttgatctcgttggaactcaatttgacttggcttcccctaattttgacttgcacgaaagataagagtgacaaattttcaacaatgattttgataggtttctgatcaggtaagtatttgagttgcaacatctttcagagaatttgcaaatcctaaggttgcaaaatgttaatcatcttgcgtagttgtttgcttattttgtatcaatagctctaaatttaattaaaaagattccaaagttcaaacgaaaattacgggaatcacataagtaatactatactatatagtctacattatatgtaatgtttttaattttctgtaacactgatgtctctataatattttaatacaaattgtggaacatttttgttgaaaagtatgctttcttcatactagtaagtcaaatataaacttttgacgaaataatccaataacatcacctactcgtccggaaacagaacagtacaaagttggtgaataaaatctatggatattttatatagtgagctttttgagaaacgtgatctactttgatgtactaaagttaacttttaacaatgaaaacaaaaattgaaaaattaacaacgttaaatcagaaacgtaaataaactgaatcatcatttcaacagttgattccacaagctattaaaattttaaatattagaaagtattttaaagatgcttgaaacttagcagacagtttggtttaaaagagtaaaagtggtaatgagctgatgttggcggctaaatctctaaaatcagtaaagcatatcgcgaaccaaaagccaaagcaccaaatgaaactgagttaggttcgttgtacacacgatgttttccaataaataatcctccacaaaattcaaacaccggatgtatctcgaaaacattagatgttctatatacaaacatatagaatcatggtattgagttcgtgattttttttttgtaacatgatgtaattagtaattcatcctaatatatgtaatcatctttatattttgataatacattcgtgattcgttcgatgacattaccacacgaggttacgactgcgcacatatggtgtattatgagtccaccatacgataaattattaaaagtgtggtagagagacttttcttatggttgataaattattattttcaatatcgtcaaaattacttattcattttctctttatttggaccaatttagatttagactcgattagtttttctatagatgtaggttcttcctctcaagatgtagcgataggttttagggttaaactttgtcgtggatataggaagaaactgcatgtagtttttgatgggttacacttttagttacaacacgaaagtttatcggaaatactagttggctcatggctgccttacgttagacaattaattacaaacatctctttttttctttgtcaataattgtttcttattgtaggcatactattggagaaacatgaggtacgaacttcccaaatcagttttttttttttgggaaaaagttgaaattatgcaaaacactgaaaaaggaaagaacaagtaattaaaatgcaaaaaaaaatttttaattaaaatgcatgaacatataaacaaataacatgttataggttcaaatctcatccactgatccacaaaccgtaatcaccatcaaaatattcatgcaagtcaacttgaggatatttacatactataattaagaaaataccacaaatttccaaatcaagtttttttttttttttttggctattggcttaattaacaaacaagaatttggctattcacgtgattcaaagtctaaactaatgaagcccacttgacttttcgggcaactcatctaaaacttcaaactttgaaatctaatttaaaaatggacccatgacgttttacactctgactctccatagttgactccatgagtccatccaaatcgagtgtttggttacacagtgacatgaagttttaaaattctcgcgatctaaaacaagatatttttaaaatattcacgtgtataaaaacaagaaaatttaaaaatattcacgaggataaaaacaaaaagcacctattagaaatagctcttatccaataaggcaatgataacggactcgtgtcggtgtctacccatatcttattaatcgaaaaaaaaatcttagttagtccaaaactcacccccaaagagtcaactttgttacacatacgttcttatccaaaatccaaagttaacttattaacgactaatgccaactcaggtttacacatgacatcagagcttccaagtttatagtctggtcaagctgtaactgttaacttttaattacagtcaaggtctgtaattagaatttgatcacaaaacatgtttcattctataaacatatattaaaacgatgtggatgactcttgtccattggattcaaataactaaatcatctcttaacagtagcttgtggctttcacgactactgttttgtcaactattttttttctatataatcaccgaatcttttctttggtactgagagagcaagagagattagtaagacctaactcttaacgaacttttagataaaagcttataactgagagagacatagatcgacaaaagtctctataccttcttgtaacgtggtggttaattaatc

SEQ ID NO: 2938 - DNA, 3000 bp, Unknown
  misc_feature (1)..( 3000): cDNA_ID_3070548_gDNA_ID_1620618_Annot_ID_162113 3000 nt of promoter + ATG
tgttcataccttcacaacgtcatcatcaacagttatgatcacttatcagccagatttttcaaactcgagctttgtattttagcggcaatttgtttttggtaacaaaggaacccatgcacttgtcagcgtaaagcaaacacgtgtccaaaccattaagccacgtggtcattgtccgactctacaacctctctctgtttcttctctcattcctttatatgatactacgatttaatacgctttgcattgaataacaaaaaaaaaaacagagcacaatgactagatttgcggtattgccactctctgttcttcttctcgttctcttgttcctctgcactgagtcgttggctaagtcggaggagtctgaagaatacgacgtcgctgtgccttcatgttgcgggttttcgtctcctcttctgattaagaaagatcaatggaaaccaatcttcgagacgaagtttggacagatctcaaccgttcaaatcggcaatggatgcggtggaatgggaccttacaagatacattccataacgttggagccaaacacaattttgctccctcttcttcttcattccgacatggtcttcttcgttgactctggtacataataaactgtttaaatttcttcggtttggtttacagatcagtttcggtttaggtcaaaattggattgtgatttgtataggaagtgggattctgaattgggttgacgaggaagcgaagagtaccgagatcagactaggagacgtttacaggctacgtcccggttcggttttctacttacagagcaaaccggtggatatcttccttggaaccaaacttaagctttacgcaatcttctccaacaacgatgagtgtttacatgtataagtttgatatgattctttcttttttcactttcttgacatctttttcttcttcttattgtatctgtattccatggatgcaggatccttgctttggtgcctattcgagtatcacagatctaatgtttggttttgatgagacaattctccagtcagcttttggggtatgtcttaatctgccgatgaataagttacgaattgtctatatcttacttgggaagcaagataggaattgtgtatatcttacttcccaacttactctagtagaggatattttgggttgtattaagtgatatattaaattcaatggttttaattaggttcctgaggggattatagagctgatgaggaaccgtacgaagccaccattgatcgtgagtgagacgctttgcacaccaggtgtggccaacacttggcagctccaaccgcgattactaaagctctttgctggaagtgcagacttggtggataacaagaagaagaaagagaagaaagagaagaaggagaaggtgaagaaagcgaagacattcaatgttttcgaatctgaaccggatttcgagagcccctacggtcgtactataacgattaacaggaaggatctgaaagttttaaaaggctcaatggttggagtttccatggtgaatctcactcaaggatcgatgatgggaccgcactggaatccatgggcttgcgagatttcgattgtattgaaaggagcaggaatggttagggttcttaggtcttcgatatcatcaaacacatcatcagagtgtaagaacgtgaggtttaaagtagaggaaggagatattttcgcagttccacggttacatccaatggctcaaatgtctttcaacaatgactcgttagtgttcgttgggtttactacttcagctaagaataacgagccgcagttcttagccggggaggactcggctttgcggatgcttgaccggcaagtattggctgcatcgcttaatgtgagtagtgtgacgattgatggattgttgggagctcagaaggaagctgttatcttggaatgtcattcttgtgcggaaggagagatagagaagcttaaggtggagatagagaggaagaaaatagatgatgagaggaagaggagacatgatgaaaggaagaaagaagaagaagaggcgaagagagaagaggaagagaggaggaaacgtgaagaagaagaagagaagaagcggtggccacctcaacaaccaccacaagaagaagaacttagggaacggcaactaccgatggagaaagaatgggaaatggaaggtgaagaggagagttaagccggaggagtaaaagagaaggccaacgtacgtcaagagtgtgtttggtttgttgttagtggttagaactttggttctgacctctcttgtaactttttttttccatagtcttgtttatttgttaatgtacttttgcattgtttttgttgttgccatgtttaaagttgtattgtgtttgtataatgttttgttttgtttaaatctttgtagatggtaaatgagaaataagtaaatatttccgagagactgttgagtgacgacgttacttcttgttattgataactctgtggtttattatacacttgtagtagtagtcgtacttgctaacttatgtcatttggtttacaattgtataatgtatttgtaaccctcttgctatagcttcggcatattaaagttttgaatggtgataacggaggagtcgtagataatgcaatcaacttcccatgctctgttctcttgttgttgcaagagatattggaataaaaggcaaatttatctcaaacacagattgggccatatcttgaaaaggcaaattcataaaactctcaaaaagtagatttatcccaaacacgaattgggccaactattggaccggatgcgctgaataatgggccttatcagatttggaccggcctgtttttatatgacatttacaaaaataccctcacaggaggtcccgtgttggctataaaaaaatagaataatccgtaattgccctaaaatagtttggtttctgcatccacccctttcttcgaatctcgacggctgaaacagattctaaatttatctccggtgagaaagagatagagagcgttgattccggcgaaaag

SEQ ID NO: 2939 - DNA, 3000 bp, Unknown
  misc_feature (1)..( 3000): cDNA_ID_1807560_gDNA_ID_1620618_Annot_ID_162108 3000 nt of promoter + ATG
actataaagtcggagatgatggcgatgactatgatcacttgttttatccggtgccggaaaatagttacatcgatgaagcggaatggatgagtctatacatataaattactagcttaatgtaatattatatcaagttagtatcgtgaattagggaagcatatttctaagtaaatttactagattatataactgttgcatttctaatgtacaaatatattgacgatgagtttctcgctaatgtaatttggctatctttatgaaagcaacaatataaaattgcttaagtagttaaaaaaaattagctactttgttgaattaaatttctaagaaaaatatatatgaattcgttaggatttaattataataagtaaactgtaatttggtttcactaacgaaaaaaaaagtgcggccataaaagcagtatcggctgcaagattcgaaaaacctttacttttaaaattgtagaagacaaaggactagatgacatgcacatgaagataagatgagcaaatttgttaaaactttttatctccatggataagagtttgcccgatttatacaaaagagaagttcggataaaatataactaattctggtaaaacattttgagtcaacttttatagatcggttgacaactaatgtgtaagcttatattatggtttatacataatatattcatcacgtaatcattattacttattagtgatctgatcgcataatataaaatgagagtattagtcatcaaaagttaccacgtatcatgcgtttctcaaaatgttagaaaaaacacatcgttttctaatcaacggaaaaatcaaagtgtctttggacaagatcagatgttcttttgattaaaacctcttccagtaattgtaaactgtacaagtgcattttctgaaaatcaaagttttcttggacatgactagagattctttgattagagtcttctggattttgattgacgttaagatatttttgatttagacatatactaaatcctaattaattaaaattatagatcgaaaacattatggtctcgtaaagtttagaaactatggacccacgaagaagtgtttggcgaataagcgaaggatttaatttagttttgggtatatagaaaacgaagtgtaaagaaaacgtaacgttatggctctttctaaattgggtttgttttaagtactcgtaaccactttcaacacattcactgtatatagtgtgttgtattatattgtttgagtcgtcatatgatgagattgtatatatataaagaaaagtcttggaccttttgatatggtgatccatcacatcaactacgtaatggtaatactaatgctctacgatagatgctatatttacctaagaaaaccgattttttaagaatgcactgaattttgctatcaatcagttaactattgataagtcatatttagatttttattttgtttcatttgtaaacagaaaatcacaagacgttggagacatcttggcttgctcctggcacctataaaaaaatgtatgtttgcaataatattagggacttattaaagtaggcccaatgggcttaagattccaccaaattagcttgacaaacactaagggcctgtctcggatattagttgtttttaattagcaattgaataaactgatgcacgttgactctctttttttcgtcgtcatgtttgatttttttttttttttgtcgtcatgtttgattagttcttaaatcttaacgataagttaaattatcgatttaatatcaacaactgtagcaaattttaatattctacgttaaaaaacttactactattttttttttttttttcagtaaaatgacacaaacatgcaaacctagaaaatagctttgacttggttagtttcttgttaaagaaaaagattacaaacaattaacataatatattatgcactacaacgggaaacaaaattaagaaaaaagactctttatctacaaaaaaaaatcatataaatgtaaaaagggttttatcattgacaatttgacagttatcaatttacatcaaaatatattttaaatgtttttaatattcatgtacttaattagatcgctaataatgataataaattgaatatcctttttgattgtaataaatgagtagatgagtcacaccaactgtagctaccgtgtcaaaaccttatccagtaacacgtgtacagctggacctctcattgtcgcacgtgtcagatcatcaaaccctaaaattaaaatcccaaagaaaaaaaaaactttcctctttcttcgcattcttctcctcctatcggactttgccacaccagatcggaaaatcccaatcctcttttcctttgttttttttgctatcttcaatcaaaaactctccgacagattcaatgaagcagcaaaagagataaaaccctaacaaaagtaaacaatcggagttttaatcttcttcttcttcggagccggagttttgtctgatctgtcggagaggacgtgtcggcatctattaaaatcctagctggacttccacatcactttactcaattagaagctggtctgttttctctgtttttattctaactttttctctcgtttaatttctcatatgcaaacaaacacctttgcatgtaactgattctgttgtacttgaattgaattctttaatcaattatgcaaacagagcttgttttggagatgatgattcacaagtatgagattgtctttctgcttaagaattcgttgagtgttggtttctgaagtttgaattgtgtgtgtgtgtgtgatttaaaatactgatgcatggttcgaagcttagagattttagattgctataaatgaaagcaaaagaacagtgcccttactcttgttctgttttaaagtcattgattgttataattgaaagcaaaagattttagttttgatgttttatgattactatttatcgttaagatttttgatttttgtttatagttttgagtaacacaagtaagtagtaagcttataaaaca

SEQ ID NO: 2940 - DNA, 3000 bp, Unknown
  misc_feature (1)..( 3000): cDNA_ID_1819024_gDNA_ID_1620618_Annot_ID_162107 3000 nt of promoter + ATG
ccaatcaaaaatataaaggaattatggctggtgacggcgacggttatgggagaacaaaaaatctaattggtctgaagaaatgagtcaggtttcatgaactgaagttgaggacacgtgtacgaatacaagaggtggtctacattattaactcgtaataagtcgccacgtggataaccccatgttcttccctggtcacttttccttctctttggcgtggctgtctttttcacctcctgtttttaataattttcacctccgggtaaaaagaaaacacaaaaaagagagagcagcatagatatatttgcaaatagtaattaactaattactatatctaaacagttgcaaatacataacattaatacaactgtcaaaattacttcaaccctaattctcatgatgtgtgttatccaaattaaaataccatcaatccttaataaattagcaatgactcatacataagttccaaaaatagggtattatcacatgccagactttttaggtggtactttcagtatcaatattttggttccaataaggacatgtggattttcttttacaaaattgtttttaaaacactttcttcaacagtacaaaaattgtatattgagaaggtaattggaggaaagagagagatagagatgtaagggtgggattggaagaacatggaaagtagtagagacatggcagtgtttttaaagcagacacaaacacttacgagaagaaagagggagacaaaaggctttggcttccattgtctacttctctatattcttatttaaaccaattttaaaatatttataaaacttatttaacattagaaacgtacgtttggttgtgttttattcgccacgtttcgttgttgtattcctttcatatgactcccatcgtgttcctttgtctcccctttttctctctttacatcatctcatagaaaacaacttttagaaataaaaaaacgtggcacattatattcaataacgaattcaaatccccaattcaacttatgagtacgaaccttgtagtcaccatccacatgattcctctagagaccgtaagattaatcgggttgaagagttaattgtaatttgttttcaatatatatagttgtatgatcaatcacccattctatcgttttattatatggatgcgtttgtgcagtttagaagcatcagtgattcacttttgtataacaatatgtatatatatatatatatagttttgaatttataggatctgattctactgtgaaactttcattgtagatttttgcttaattaatcatgattttgctagctttattctagatttgaatttattagtacacaattgatatatttttcataaaaagactgaccgatgaatgtgatattaagctcaagaaataaataaatgggtctatgggaaccaaaataagatgcacatagctaaaatatccctcacaaaatgataatagcaatattccataaattgaaaaatctagctagatgataactaatccgtaactcttaactccaaaattatacaccgtttatctaataaaagttaaaaagataagcctttaaaagcagacattatccttaagacaaataaacaagtatcttacccagtttaggggttcattggtccaatattttattaaagagtccacatctacaagcaagtatcatcatgaacatgaacttaaacccatttaaggataataactataactaatcaatgatttacttgggagttcgaaggtgtctgctacactccttccaagcctccacccacattaaagtttctatcctctttatctttttttatccccaagaatatcctctgtggcaacaagctactaatttagtcatttatttgctcattggctgcttgacaaaaaaaaaaaaaaaaaaaaaatttgctcattggctacccattttttcctctaatttgcacgttccgtaatagaatatactcattaagatatgcttttcttggatgttcataatgtccatcagtccatgtatatatatcattgaattgatcatttctcaaatccatatggattcttagaaaatataacctcttacaattactcatcaatttataacctatcacacaattctgtcgatattcaacctctacattaattagtatgcgagttaaaaaaaaaaaaaaaaaaaaaaattagtatgcgagtttaataacaagaaattaaaatttatgccttttttttatctaaagtatatatatatatttaatgtttttctatgatttttctttcggtagtaattaacgttatcaactgaaccttaagtctatgataaattctggcttatttttacggcactagctaattttctaacgaataaactaagaaaattaacaattgatctctaactacgaatttagagaagagtctaaaaagtaattaaggggcttgattgggtcgtggaggacattgagaccggtgaatgtcctctccattggacatcacattctcatttaccaaatagtctctgattattggtctcccctccccaattgtcatactactatatagttttctagactcgcaaatcttattaactacgatagattgatttatgtcattttattttggtaatgaaaaattcactttagtgtgttcacgtgccaaagctttcgacttttcatgttcctatcaatgacgtgttgaaagaatacgtctttgtttagtgttgttttgtattacgcatgaaacagtattaaagttggtgacaaagaaatattttcttctcttttaatttcactgtccttttaattaatattcctaagtactaaatcacgtccagtggtaattccgtaatttaaaataacaagaagcccacatcaggaaaatgacatttcataacccaaaaaaaaaaatcatttcttgacacctactctccttataaatcataggtcttcctcttccccaacaacacttctcacatttcataaaaagtgagacaaattaaagacagagagagatccaagaac

SEQ ID NO: 2941 - DNA, 3000 bp, Unknown
  misc_feature (1)..( 3000): cDNA_ID_1819028_gDNA_ID_1620618_Annot_ID_162104 3000 nt of promoter + ATG
cattatgattgataattttcatgcaactccttttctctagatcgtaggtaggaggatattaggttaatttgactacgctagagatttaaattagtacgctttcgaacaagtcaaaagacaccatcgggttagccactaagaaagcaatcatcatatacatcaattaattataatactacttatatacctgtactatatacactcatgcataaaaagtaaaaacgattctctctttatcaaatttagattctggatcgttaaaaagtagtaaaaaatgagaaaacttttacaagataaatttgatgagtcaccctcatcatattatagttagaggctaataatttataaataatgtcaaaacaattttctctatgtacatattattacggagcgattacatatatcattcacaactttagtcattttgttaaccctaatataatgtgatatcaaaacggaatattaataacgttatacattacaatttttgtaataaattttgattttaatcactaatcagttacttgttgccattatattgatcggggatcccttattgataggcccaatatgaatgagctcagttatattttgggttttttctcatagcataaatggcccaatgaaagcctattaagtgatcgaaggtcagacgttggactccttgtatgaaaccaacagactaggcccaaattatcaactcaaaattgaccgtaacatatacggcgccgtttttgtagacctgagtgtgataaagtgagctgttaaatcttcacttaaccccatttttaatcacgaaattagagtggtgattaaaaatacaactaaagttgtttcaagtgattgttttcatttatttaaattttaaattaatccaactttatcgttgacggaaaatttgggagagaatattctcgatggggaaaggaggaggttgtgttccgagcaagaagaagaagccggccaccaccggcgatggtcccggaatcgatgatgataacgacgctactaatgctccgatccaaattgacgatgatcaaaccaccattgacggcgatcgaacaacggcgacgaatactggaggaacaacaacaccagcgattactactacggctgctaagatctcgtcaccgctcaagatcttcgtcgtgttctattcgatgtacggacatgtggagagcttagcgaagaggatgaaaaagggagtggatagcgtcgaaggagtggaggcgacgttgtacagagttccggagacgctttcgcaggaggttgttgagcagatgaaggcgccggttaaggatttggagattccggagattacggcggcggaattgacggcggctgatggatttctgtttggatttccgactaggtatggttgtatggctgcgcagatgaaggcgttttttgattcgacgggatcattgtggaaggagcagagtcttgctggtaagcctgctggattctttgtgagcactggcactcaaggaggtggccaagagaccactgcgtaagcttttgcttctttcttatactctttagtaccatttgcattggttctaaagtatattagttgaatttggagtacaagtattgaattgctataatcacagagtcactatgtgaaataaatgcaaccttgaatttgatgtatataggtggttgctaaaacctgaaaggttgttgtggtcaggactttgtctagtactttagaggaaacttgtcagagatggctatcattctggtgaattgcttgcttgatctttaattgctttcttaactacaccattgaccatttcaagtccaatctggtcaccattgaatagtaccctggtctctcttttggtacgataggcttgcacttatgctacgcttatgttagctctagtaaggggagatctttagaacatgtaaaactggattattttagattctcactttctcatcacccaaagtaccaattctataggcatgagtgttgcctccgataatttgcatgtgtttaagctctgagatagattcctcaatgtatgtggactctctttagtcatcatttgcacttagatatttgtctgttttacttcagctgattcactcggttgctgtgatagtttgcgaatatagagaagcataacaatgcggaatcttaaagcttttgcgtatttctccaagtgtgcaatgtggatatttttattgccatcgtttccacattaaagctcagaaacacttgctgatttccatctcgtgtgtgttctgttgcagatggacagcaatcacacagcttgtgcaccatgggatgctatttgtaccaataggctacacatttggagctggaatgttcaagatggactcgatacgtggaggctctccttatggagcaggtgtgttcgctggtgatgggtcaagagaagcaacagaaacagaattggctcttgctgaacatcaaggaaactacatggctgcaatagtcaaaagacttgctcaaccttaaaacaaaaacaaaaattgcttcctctatttgtctcttttcattcaattcctcctcctgctaaataatcataaaaaaaaaaatcttcctttcttttctcaattccatcgaaatttctttcttttctttatgagtgttttcagtttcgccattaatggttagtgtgtacatgtttctttatattatttgtctcttatttattccttgttgtaaaataaaaacaaaatttcattacgtgttctttcattggagttgttgattggatattttatcaaaaacttataatttcacaaatcgttaaagtgtaggaaaaaaaaataattagttgcgtcagccattaggattccttggaacacgtaaagtttactaacataaaactgtgatatctgtacttttttatatctatctgctgctgcatctgtgttctgttcgtccttgaagcagtcaaattcttctctgaactccaaacatcgccatgtcccgagattctctcttcgttgaggtcactaatg

SEQ ID NO: 2942 - DNA, 3000 bp, Unknown; identical to SEQ ID NO: 2931
  misc_feature (1)..( 3000): cDNA_ID_3070562_gDNA_ID_1620618_Annot_ID_162093 3000 nt of promoter + ATG

SEQ ID NO: 2943 - DNA, 3000 bp, Unknown; identical to SEQ ID NO: 2941
  misc_feature (1)..( 3000): cDNA_ID_1819028_gDNA_ID_1620618_Annot_ID_46926 3000 nt of promoter + ATG

SEQ ID NO: 2944 - DNA, 3000 bp, Unknown; identical to SEQ ID NO: 2940
  misc_feature (1)..( 3000): cDNA_ID_1819024_gDNA_ID_1620618_Annot_ID_46928 3000 nt of promoter + ATG

SEQ ID NO: 2945 - DNA, 3000 bp, Unknown; identical to SEQ ID NO: 2939
  misc_feature (1)..( 3000): cDNA_ID_1807560_gDNA_ID_1620618_Annot_ID_46929 3000 nt of promoter + ATG

SEQ ID NO: 2946 - DNA, 3000 bp, Unknown; identical to SEQ ID NO: 2938
  misc_feature (1)..( 3000): cDNA_ID_3070548_gDNA_ID_1620618_Annot_ID_46933 3000 nt of promoter + ATG

SEQ ID NO: 2947 - DNA, 3000 bp, Unknown; identical to SEQ ID NO: 2937
  misc_feature (1)..( 3000): cDNA_ID_1819004_gDNA_ID_1620618_Annot_ID_46935 3000 nt of promoter + ATG

SEQ ID NO: 2948 - DNA, 3000 bp, Unknown; identical to SEQ ID NO: 2936
  misc_feature (1)..( 3000): cDNA_ID_1818996_gDNA_ID_1620618_Annot_ID_46937 3000 nt of promoter + ATG

SEQ ID NO: 2949 - DNA, 3000 bp, Unknown; identical to SEQ ID NO: 2935
  misc_feature (1)..( 3000): cDNA_ID_1818992_gDNA_ID_1620618_Annot_ID_46938 3000 nt of promoter + ATG

SEQ ID NO: 2950 - DNA, 3000 bp, Unknown
  misc_feature (1)..( 3000): cDNA_ID_1818988_gDNA_ID_1620618_Annot_ID_46939 3000 nt of promoter + ATG
tgttctctatcgtgacacaataaacaaagacagataagagttagttaaacgtgaaagaaggttagaattttggaaaatgaccaaatttgttattacttcaccaaattcggatcttgtcctcttgtcataaaatcatttcagatctgagttatttggtccaacgccaatactgaaaattaatgttattaaagtaaatcatatttattattttcaaccaatggggcctttcacaataacaaacaaagggccagctttaaagttttattgaaattttacatgccacataaattggttaaaatacattttcttcacgtttctcgctttttaagtccctttgaagtgggaatgatactcgcgtgacgaccaaactccatcgagcctctctctctctctctgtgatcagtttaatctactgaaagaaagaaagaaagaaagaaagatccgtattattaggtaagaatgagattcccttttacgtttcgattttgattcgtttgtgtttgattctcgatcgttttgcttcgatttagcttccttctgtttttacaagtctctcttgattagaaatgtttaggtttcaatgtttcatgatcatatttagaaaaaagtttcatggtgaccaaaaaagaaagaaaattttgatggctgagagatgtcagagtcttgttttgtttttttgataaattctctgtttgtgtgcttttaaaaagtcaaatataagaaattctttgaatcatttaaagccgtatttatgtccttttgacaagtcgatttaatgctttctagaagagagtttatcagatgttaagaagattcaaagttggattataacgaaaatttgtatacctcattagagatttttcaagtggtaaatactaatagaattcatgatcccgttttagatgtaagatttggttgtgtttatcagttttctattaatagccgatattattaaaaccttttgcttaatcttggatctgatttaatttgctttaaattggacttgaaagaaatctgaatttgatttgatcgtttctaggcttcgaagctgtctcaagattgttgtttaattaaacatgttcagaagaaggaatgctcaccaactcgacaatgatgattctcaacaagataacaaggtacaataagctgcttctttttcacactatatgaaaacattaacatatattttggaaagtatttaaaacacttgtacaaatttcaggttagagaattgaaatccgcgataggaccattatcgggacatagtttagttttctgctctgatgcttccttgaggagatttctagatgctcgtaattgggatgtggaaaaagccaagaaaatgatccaagagactcttaaatggagatcaacttataaacctcaagagatccgttgggtaaatatttgactttattatatacttcattttaatcttcttgttactttgtatttttttcttactttttttttaatcatcttcttctgattctcttcagaatcaagtagcacatgaaggtgagaccggaaaagcttcaagagctagttttcatgatcgacaaggtagagtagtgcttataatgagaccagccatgcaggtaactaagcccattgtcacctttatgaatatttttcttgagttttttttaaaaatgatatctcacttaataaaaatgaaacagaactcaacatcacaagaaggtaatatcaggcatttggtgtatcttcttgaaaatgcaatcataaatcttcccaagggacaaaaacaaatgtcttggctcattgatttcactggttggtctatggctgttaatcctcctatgaaaacaacacgcgaaatcattcacattctacagaactattaccctgagagactcggtatcgcctttctctacaatccaccaagactcttccaagcagtctacagggtacacaaaaaaaacattcgtcattattacaaaaccatcaaaatggtctctcttctctttttctttaaaaaggtttactatatacctactatattctttcatgtaggctgctaagtacttcttggacccacgtacagctgaaaaggtgaaatttgtgtacccaaaagacaaagcaagtgatgaactgatgacgacacattttgacgttgagaatctccccaaggaattcggaggtgaagcaacactagagtatgatcatgaagatttctcacgacaaatgtatgaagacgatctcaaaaccgcaaaatactggggactagaggggaagcactatccgaaaacaaacggtttctctccatccgatgttgttcctgagccggcgatagaaatcgcatcagcagctagctgagagttgaacgatatatacacacaagagcaagaagagaagaagaataaaagggttattctcattcatagaagaaaagccaatagaatgtgctggttaacttgatgatcaataaagtttcaaatagtctttgcctctttttcttattagtgagccaaacactttgtaacgtttttaattagcagagactatcctgtatgtgtgagagaatattgttaccatgtgtaatactactagttttgtgttattagttgaagatatgagattatccttttagttctattgtttctcaagttaaatacagttatgatgaaatcagagaagttattgtcgtctagtgaggtgatgatcaaatcttagactttaaatataatattaaactttaaatataatattgaacttaaagagaacaaaaggtcccgtagctcagttggttagagcgttggtcttatgagccgaaggtcgcgggttcgagccccgccgggaccatttgtccttaattcatttaaatttttaaattttacgattttttccttttttttcataatttatcaacgcacgttgtgaaaaaaataaaaaatcaatcatctctgttgtaattggattttgtaacatgatgaatgcgtggtgattcccagaagaagaacccagaaatcgatcgaagat

SEQ ID NO: 2951 - DNA, 3000 bp, Unknown; identical to SEQ ID NO: 2934
  misc_feature (1)..( 3000): cDNA_ID_3438222_gDNA_ID_1620618_Annot_ID_46941 3000 nt of promoter + ATG

SEQ ID NO: 2952 - DNA, 3000 bp, Unknown
  misc_feature (1)..( 3000): cDNA_ID_1818967_gDNA_ID_1620618_Annot_ID_46947 3000 nt of promoter + ATG
tactttcatctaacctatacatctactgaatctaaacaggtctaccacctactctaaacgcgtgccttaccaaaacttggaaaattttcaattttgattatcatgtgggtgaaaaacatcaaaaaattatgttgatgtattatctaaagtcattcacaattaatcaagaagtgtacttgttgtgagactgagagtagctttcacttgtcaatgagtaggtacctattcatttggccaataacaaaatgacaacaaaaatttacctaaaacttaaataatttagtgatttggtcagtaagcctaattaaaccctcaagcagtttacatcacaatcaagcttgaagcttttatttgatttggccaatgaaggagtttataaccctaaaacagttcacatcacaacaaaaccatttgactcgttttctgattaatttggccaatgacgagtcatcttgggcttcacatatggacattgatgttgtgtccatattacgacacacctttatcattttccatttcaaaaaaagaaaacaaaaacacccatgctattttttaaaacacacttaagaaacaaaaatcaaattaaatctttaacccatgatatctactaccaacaactaacaatattttacatcaagtgtgtcgtcaatagtagcactattatctaatttagatctagataaagccagataacactcttttgaactttccatgcttgaatatttcttctataatatcatcattaagaaatcttctcccattctttggcttcttttagaaaagatactctattagattttttagcgagtgaaagaagaataaaagatggaccagtcaacaaatggagacgaacaagtctttatacattgttgataatttgcgtttgcgaaggatgtggtcacaagaaaagaaagtattccgtccctctctctagctaatggcgtgtgatgtgactactacactctctcttctatacatgtttattttttccagaaatgtctgtttgaatataaactttttaagtgaaattgttgggcacaacagaaaactttaacaccaaaaaaaacgcgacataacatgttgcattgttgattagtttctttctactagagattagcattctcagactccgaacggtgactgcgttttacagtgcggaaaaaatgcggtacggtttaaatattaacgaaaatacataaatacatatgtataaatagagattttaatactgttatagcactgttgcggtacggttttgggtgcggttttgatcaccatttacagttttttttattcagattagatttctgtaggtaattttgattaaaatcttttggtgataacgcagtcttttcgtctggactggacccacgcgaggacccaaaatttgaccaatatgcgatccaataaacaaaaaaatggtaatttaaaatgaaataatccacatgtatgatgtcaaatgtattattttacattcacaattaaatacaggtcagcgaagtaattgttttgacaataaaaatggtaagaattacttggaacgtcatctaacatcattttaattaatactaacatcatcattttaagtaaacaatttttttagaataatagacagaaattaaggtggagttcatctttttgataattagcattaatccctactctaccatgtttataattgaaatcattatttcatattttgataattagaattaatccctactctaccatgtgtataattaaaatcacaatttcatgaaaaagatcaactaacttaaccaaaactatagtcaatgtcttttactgaaaaattcaagaataaaacaatcttagttacgtcactatcaatctccattagaaagaatggtttaaaatcattagtttttaacaaactctaatcatgattattaaaaaaaccaaagaagcaaggaagacttttattcaaaagattaaattttcttccatttaaaaaaggaataaaaagagatgtcaaaataattactacaaaaaacattagaatttgttggatatgtaattgacctaagaccataacgagcactcagacctcgtcctttcaatttagtctgcgcttgacacggcactcttaaaaataaacacggtgacgtagacgccgtcaccgtccaatctcatcgtcccttttttaattagcagctcaacgatttaaaatcgactgtcatttacaaaggctgtcatttcaacactcttcagtccttcttccttataatcctctcatcttctttttctccaggtttttaccaaccagttttttttttttcaaccctcgagatctttctttgcacgaacaaacctcgaaaaactcattctttatcttgacccatctgaaaaagtttctctttttttgtcggaataccatagagtttcattattttcgttttagggttctttttttgtaataaataattggaagcagaggagctatgctcaagttctcagatgaaattctcgcttttgatcatcagttcttgtttctctttctgatttacgctggatttgcaagggaaacactctgactttgtcaggactcttctgtgaaattctgcaagtttatgacttttctagtgctttttaactgtttgtgagtttgaagaaaacaaatttcaattgagttgctttggaatccgttgacataatagggtaagtcaattttcttactactaatatttatcccattaatgcttgagaattgttcctaatagaactctttttgctgtttgttaaatttgcagaatttagaaacttctcgtttagatgaggatcgattacacagaacggatgcctcaatcctataaggtttgttgttttatcaaatatgtcttatgatggagttttggtgtcttaaggtttgttactgtaatgactgacatgttgtgttgttctgtttcagatgcactcttccattgtgcttagaattgaagaggctagttgatagaatcatgagaatctttcctgatatagaag

SEQ ID NO: 2953 - DNA, 3000 bp, Unknown
  misc_feature (1)..( 3000): cDNA_ID_1016101_gDNA_ID_1620618_Annot_ID_46949 3000 nt of promoter + ATG
gagatgtggtgtggtctgagtttatgactgagtaatctaaagatccttgctgatgtaatggaaaagaccgaaaatccgccatgattgactgcttcgagtcaccttctggaggacctgtgaagtaagcctgaaactagattccaatatttaaccagtcaataaatgcggtaattaaactcttggttagttcttgggatgaaaactgactattattcacctgttttgcggataaatcatcgatatgacactcaagttctggatttatgacagagagtttcatcgacaagaactcgacttgttgttgcagagattggacatagttgatgatctcatcaagcataccagcttttccagtaactttgttgcatccaggaacaatatcttgtagacatttcatcttcttgcttatcttttctcttcttgcctgccaaaatcccacaaatataaaaccactcaaatctctaatgaaagtaatttctctgaaacctatttaacaacaacactttagttaattaccctctctgctaagctatgtctgtcggtggcttcacctcgtctagccctaacatgaatgtaatctggtttctgaatttctgaagatgtctctgtgttactcatgtttgatttccctttcatgcttggctctgtttcatcctctgctttgatcttcttcttctctctcttttctgtcttaccctaaaaccaatagttaaaacgatcagaaacaatgtttcaaacaaaatctaaactctaatactcaatactttcttgagctacaaacctctggttttctcttgttctgcaaggtaatggctctgctgtgtccattattcttcactggctccatatggaagctacttgtcctagaaatgcagccatcagtagtatcataatccggtccgaattcgggaaaatgtctgaaactctgcagctcatcattgttgtttcccaagtaactctcaactcttttgagctcttctctcccatctgagccaagtatctgaagaaactcaggtgaaaccatttgttgctgttgcagccacttaagcctatcaagtacagacaagtccatgaagagaaggtaaaaaaaaaactttaaaaggctcttatcttttctttgagggggttaaagcaaaagagaaaaagagagagttaagttatatatgtgtggaagaaaagtaatccattagatataattattcttagctttaaatagaaagcaacattgacccacacacatgagattcgaaatctagtgagagagggacaaaattgataaaagtggaggaggttggggacaaagaaggtgagatgagaagttgtggggtctaattgacataacctaccatgtggtcatgtccttatgaacatgagatgaggagtctcttaagttagtctcttttgtgtcttttctctgtgtttttttttttccttttggcctttcaagtttttgagaggatctttttgtttggcaacaataatcaaactttgtaaaacttaaggttcatgagggtattatcatataaatatcctcttttgtaaaatcaaatcattgagtttttggtaagacaaccttctaattgtaccaatttgttttgttagagagagagagagagagggtctttcttaggcttgaaggtggagaatgtggggaatgtgaattatgaatcttaacttgcaaatgaatagaaacaatggtttgaatcatgagtgatatcatttcaatgtcttgttgtgaatctatacgtgatccttgtgacgtatgattactacccttcatcaatccatagattacaccaataatttaagtggatttcatatattagagagatggcaactcgatgaatatatgacatattataatatcacatattataattcataactgatagggacacaaaataagcgacctaaagaagaaaatgggtttgaagataagtgataggaaggtaggcgacaccattgcttttgatctaagtgtttggtccctatactttctttttttccctattaattatatatctatacattatctataatgcgtgacataattcaagagaatcaatactatttcgattttttttttttgaagaacttgaaaaaatatatccaaaattagaccgatttcaataacacaccgtacaggttgctttgaggtttccatttcattggttctttgggaaacatcaataacaagctgcttatgagatgagaagagtaaatgcttcaaatgccaaaatacttaacgttgagagtatctgttgttttttgcaatttccacaaaaaagttttagaaagtttttgattcaatgggtttcaggatgtattcttttgtaaagaagtttgtgtcaatgcattcatgttgcaattaggcattttgtcgaatcacgaaaacggaaggaacactcgtattcgtcacatcaaagtataaggccctagatcgtgtgtatcacgtctctaatttgcttacttacaaaactgtgttgtttgctcttttcactaatgatggatctatgtgataacaggaatcacattccacgtcaattatttctgtttacttcaaaagaatgtcacacctatgcaacagtgagacaagatctgaggaagagagttagagaacatgaaatttaagaaagagtgcttcaatatcttgttgtgtacaaatcaatagttctgtttgataatatcaacttgacagcttttgtcaaaatgatgagtaaaaaatcaggatctttgggacaaatacggctgaaccggccggtttagctaagtcgaaattaccggcctaatcgttaaaccataaaaaccgcaactttcagaaacactctgcttcgtcgagcggattcgacttgtctggctcaggggtcgccacaactctcccgcaagttcacacatacactcggtgctcaaaaagtttgtcctttttgcatctctcagttctgaaatatctggttctcttgtccttgaaaattttacgaggttgttctctgtgaataatcg

SEQ ID NO: 2954 - DNA, 3000 bp, Unknown
  misc_feature (1)..( 3000): cDNA_ID_1818959_gDNA_ID_1620618_Annot_ID_46950 3000 nt of promoter + ATG
ctcagatcgtagcttattggtcaagattgatattattcaattgcagaactacccaaatttgggacaacatccaaaaaattatagttgaaaacaacccaatagagatatcgtccagtaaacttatctctagttactcaaaatataaagatatatttctgtttaatacgcatagtttttctagacaatgtgcttatgaattatgatctagaaaatcagatataatagctagtagtaactatttaaatacaccgatgatggaaacgaataagtgaatacaccgatgacggaataagtgaatcttgtaagtagggcaagcatggttatcaccgccatcattatgttcgaagcataatatttaatcatgtttttatttgcgaagttatttttactaatatagctattcaaactataagagactatagtattgatcaaagtgtgaattcgtcttttatatatttttttatcatctagggttcatgcatgctttacaaggcacggagttttaagcaagcacgcgtatacacacccacacgtttacatatctatatacatgtttgaagcgcgaataaatccagctaattttatttgaatgaaattttactaaacagaaaacgaatttgaatttatatttggctctaaaccaaaaaggtaagggtacacaattgaaattcattttaaaactaaaattaactgattaaattccgaatctaacttgtagaaaaagttggtgttgtcattaactaatgatttaatatgcttgcactcgttcatatcacaatgaattattttgtcgtaatagccctagtgcaggtaaattttcactatcataattaacaaaatagatatatatcaattgatttcatagttaatgagtaccaaaaaaaaatcgaatacatacatgtacattaattgatgctatacaacttaatatgggaagccaactacccatatatgaacaaatattaattatcttctaaatttcaatttcgactttaagaggggcaacgtagagtgataatcatatgagttgtcaacaaattaataaatggttcaaatcattaatcatgcatgccacgatatatctcgttatcgattgtggacaccaaatcgttacactagcgaatcggtatttattctattttattagggtgataataatacgtataaggaataaatatgttgtatatgcaccatacttgcgtcgtacttaattataagtgtaatgaaattataaatttcgacttgcaatggactatatatgcttgtgagaagaaaaaaacaaaaaaaaaggatactcaatatgatctggaacggtttaggctgtcctattcgtgacttaattagtgtccctttttaatttgattttttcttataaaaatgatctggaggaatggtgccaaatttggattaatacttatatgctcaaatcttgattaaactacaccaacagtgtcattttcaggctattattggaaacgtcagaacagttttacaaaatgccaatgattcacctgtttttactaggagtttttgtagattacatatgtttaatcaagttatttggataatcaaatatattgtcaatattgtaatttatgatttaaattactagtttcaagcaaggactacttttttttttgtcaaagagcgaggactacttttgtcaaataatactgttggcttttagctaaagttttacaatcatagcttaatacacatgtaaatgtattcataactagtggttaaaaactgctagcgaatttataattactcgttttgtcaccaaatatctttcattggatacatatatacacatcaattagaaaatgctaatgctagaatttgaacaaaaaggaaagaaatgggaaatagtagtacaagtaagagtgcgttacacttgtaactgattcattggccgaggcaactccacagtttcttactcttaccattttcactacatttgtttccctcttgggaacctttattttcttcttcttacatttattatcactcttttattattctttttgtttttgtccgtatattttagtttggttttttatagccttgcaaaaaacgacactggtatatctatactttttatctagatgactagaccaggtccgaataatccaagttttgtactactatagtataatattaaaactatgagattcctgcgtatctgtaatttaatttttataaattcattctaacgttataattatcaaagagagaattattttcctattttttcatggaaagtgatgaagatagtgtgctgcaatagtcggacccaccggagacgaagaagtgacaacaacgagtattgtgtatttcctattttaccctttccttttcgtttcgcgcgtcttcaccggcttaccggctacacctgtcctcctatatatcggtttcatcatttcattataaaattaatagcacaaataaaataaaacaagtcttattaaaatactaaaaattgttactgtatttaattagttgccgccgcgccggccgttacgattgcagcagcacgactgttttcagaactctttttttttattaacaatcaatcaaaattttttatttgttttagtattatatggagacaacaagcaataagttaaacagaaaaatcctaacgttcttatttttttactattaaataataattttgacatattacaaaattatgaattaacctaaaataaatagaattaattctctttttgtacgatgtagagagatgggaatattatatacccttttgaaataaagacgactcgaattagatttcaaattaaagctgaagaggtcctttttcgtcattttggagtttctttttgagacatttttcctcttttgattttcgctttttccgtccgcttgacttctgctgtttcagactctcaacaacggagagagccggagagattgaagaagaaaggagaaatatttgcgaacccccaagaatcgtttttgttgattgactctctc

SEQ ID NO: 2955 - DNA, 3000 bp, Unknown
  misc_feature (1)..( 3000): cDNA_ID_1818948_gDNA_ID_1620618_Annot_ID_46953 3000 nt of promoter + ATG
tagaagacttctatgtagttcgttgtatagccttattctgtgttatgcttaaagattttgttgggtccatacagtgctgctggaccgcatacaacagttaatggaaaagatgtggtgaattttgcctcagctaattatcttgggctcattggccacgagaagttgctggtaacgtgaagctactttgttttcaatacaatctctcttctgtttgaatagttttatttaagatttgtcttatgccaggaatcatgtacttctgcattagaaaaatatggggtcggttcttgtgggcctcgtggattctatggtacaattggtaagaagacaataattttctaaatagatactttggttcatccattggctcgcttggaaagggttcttactgtttgattacttctcttgactagatgtccaccttgactgcgaaaccagaatatccaaatttttgggtactcctgattcaatcctttactcttatggactttccacaatgttcagcacaattccttgtttctgtaagaaaggcgatgtcattgttgcgtaagtacacaatttcttataacatcgttctacttattagattacgttagtagaaatcccaggattacattgaacatctttgtttgaaacttttttatctcgatattaaactcattcttgtcttttctattttcttagtgatgagggtgttcactggggaatacaaaatggacttcagctttcaagaagtacaattgtgtacttcaagcacaatgacatggaatcccttcgaattacccttgagaaaatcatgacaaagtacaagcgctcaaagaacttgaggcgttatattgtagctgaagctgtatatcaagtacctggcagttttctttcttctcctgcttccatattttgaaaattctccctgaactgtgatgcttacccatttgcctttgggtatgttaaaatctacagaattcaggtcaaattgcgcctctggatgagattgtaaaactaaaagagaagtatcggtttcgtgttatattggatgaaagcaactcttttggtgtgcttggccgttctgggagaggtcttgcagagcatcatagtgtccctgtaagtatgattgacacacattttagtagtgttctcatttgccaaacctgatgctaaaaatttcacggcggtttatctttaaacagattgagaagatagatgttgtgactgctgcaatgggccatgcattagccacagaaggtggattttgcactgggaatgcccgcatcatcgattaccaggtaaacatcgatcatgctgattaactaattacaaacaaaattaaaaaactaccgataatagaaacttttctctgggacgctcaaatgcacagagacttagcagttcaggatatgtgttctctgcttctttaccaccataccttgcaagtgctgctatcaccgccattgatgtcattgatcaaaaccctgatatgttagttaagctgaagcaaaatgttgctctgttatggaaaggtttgatcttcaagttttaatctaatctagcaacaattagagtttgatttagtttgttatcttcctctaattgaaaaagaaatgctgggaacaacgcaggattgtcagatatcaaggggatgtcattaacaagcaaccgggaatcacctattgttttcttaaaattagagaaatctagcggttcagctaaagatgatttgcttctacttgagaaaatggctgaccgtgtaagttcattgtttctttgcaaaaccaaatctagaccctgtccccgtttcttgacatgactagatgcatgcaggctctgaaggaagactcattgttggttgtgagttctaaaagatcatttcttgataaatgccggttacctgtgggaatcaaactctacgtctcagcgggacattcggaatccgatcttcttaaagcgtcggagtcactgaagagacttgcttcagagcttctactcaagtcctgaaacaccgaaactcttttttcttcaagaacaacaacactgaagggaactctttgaacacatccgtgtgagatagtagacaacagaatccgcagagtcagtagcttgaagatgttcatagcagattcctaaactggttctccactttcagtgatgggcttgtggttgatctgaagctcaattgacgaaggaggattatcgaagacaatggcttcttgttcttacatttatttcatttgatcatctgagttctttttttttttttcctactcatacccttcaatgatcaagtagcttagtgttgttgccgaaattcaaaaactttcaatttatgggaaacaaaaaagttcatgtgctgacatcagcctcttaaggctttctgagtttcttgcggtaaaagaaagtgtttttgcctctctcaaatctcaatagtattgacacgtgtcagtataacactcgtgcataattgacacgtgtcagtataacactcgtgggcggtataatgtgaacgaaagagcgagggacaggtaatctctcttcctctgtttctaagtttgtataattagaactgcataacgaaaaacaaaaacaaaacagtgaccaaaaaaagaagaagaatcaatggttggggaaagagagaatatgaggtggagctttacctcgacgttaatggagttgagaatccaatggaacgattttgagagattttcggagcaatctcactctccttttatctttctccttcctctcatttcctctttgcagaggtaatttatcttttaattgtctctctgttttgttctgttttcttaacttcatgttcatcgttatcgttgttcgaatttgatttgtaattagggaatgtgaatttcttacaggaatttggcaaagggcattggctaaaaataataagacactcgttagagtgctcgtccctcgtgcccttacctgcctaattccaactatctggcaaaatcatgactttgatccaaggtatagtaaacaaaaatg

SEQ ID NO: 2956 - DNA, 3000 bp, Unknown
  misc_feature (1)..( 3000): cDNA_ID_1818934_gDNA_ID_1620618_Annot_ID_46957 3000 nt of promoter + ATG
tagaaaattagaacttgacattattgtccaaagtgggttaaataaatgaatagcattttattaagaaaacattgtatttaaaaacatattaaaaaaatctaatttaaaagtttttaaaaatatatgtcggctgtttgtgtgaatagcatgattatggaatatattttttgtcgaaaaagtagtatttgtcatctagttgtaaagatatatttctgatttttcaaacttttttagatctacattttttttttaataagatttatattcgttaaaaaagagatgataaataaatttattttgaagatgacaaagaaaaaaaaaaattgaagacaaattaacttttattatgtctattttgaagatttttattataaaaaaataaactattttgaagatttttattatgtctctgaccaatggcagagtagggcaaatgccatgggttcattacaaaattcaaaaaaaaaaaaaaaggaaaaaggcccacttttatattaaaaaaatatactaagaggttttaaaattttttttgaattttaccaaaggcccacaaaaaattgagacgggcctaaaataaataataacgtcctgtttagaaaattagaactcgacattattgtccaaagtgggtcaaataaatgaatagcattttattaagaaaacattgtatttaaaaacatgttaaaaaattctaatttaaaagtttttaaaagtatatgtcggctgttttttgaatagcatgattatggaatttatattttttgtcgaaaaagtagtatttgtcatctagttgtaaagatgtatttctgatttttcaaacttttttagatatatatttgttttttgtttctaataagatttatatttgttaaaaagagatgataagtaaatctattttgaagatgacaaaaaaaaacaaaaaacaaaaaaaaatctattttgaagacaaatttttatcatgggtagttaatcttgattttggttaatggagttttggatttttgggtgggagaagagtaaagaggtaaatgctattgaaagatttattaaaggttatttgtcaatgtccatatatacattttttgtacactagcctttagatatttcgagacctacattgaagttggtttagggaaagttgggtaaatctctagataaatttgatatgatcaaattgcgttgaacactagttttaagaaaactaaaattttcaatatggacttgcgatgttgaatcaatgaatctttgtctagaaaaagctgaaatctgtttgagtttggtgaatcaaaaagattactcgatcgagatgctaagatggttcctgaagagttgaaaattattagctttgatggagaaaaagaagttattggagtagttgggaggatcatcaaatcttttttggatggaaaaggcaaagtgaatgccggtttccgtgagaatgtgttgtatcttgtgaatgtctgcctgcgcattgtgtgtctagtcacttaccaaaaatttgagccttatgaagactttggcagtgcaacgactgttgttgcgtccaccatcacgtcgattataactgtgtggttgttgtacaacaagtttgagatggggatatacgacaagatagaagtatttgctgcttggtatttatttattttgtccaaccgctatgaagaaattgtgatgtcggatgacttcgttcatgtattgctgtttttttggattgttaaggtaatattaacatggtctatcttcttctactaactagtttagagatattaacattgttttgtttgttgtaggtgcataatgaagttgcattgctatggaggtttccaaaacttaactatgctaaaatcaattatattctttgtagatcgcatgaaaaaggttagatagaaatcgaatgattggtacaatcttaaataatgatatgaaatctaacttaattttggatctatcattagtagttagcgattgtaaacattcaacttgtttttttattattattatttaaatttagcattcaaatttttgattagaatttttaaaagttgttttaaatttttgattttgtttattattgggaattttaaaacctattttgtgttttttttttttgaaaattttatttgttggattctaaatttacataatgataaaaattctaaccggattttggatctaatattagtcgttagcgattccaaacattcaacttatattttctattattatgtaaatttaccattcaagtttttaattaggaatttttaaataattaaatgtccgtctttaataggctcctaatccatctttttatttatatatatatatatatatatatatatatatttttaagttaaatatcaatattttatgaataaaactgtattttctcagtaaatcgaattaatagaacaattaggagaagattaacgtattaggctccgtcttcttcttcttcttctcccttgtaacgttttctggtatgggccgctcacgatttctctctcaaaatatctttgcctttgtacttatctgatccataataatctctggataacgacgaattgacgattctgagactttatttttgtttggttttttgctagtttactaattcgttaagtgtttgatgataatgactcttgaaaaaagtttactttatcttcttctcttcttctgcttttggtagtcgtctagtaattaagattgatagctaagtaaagccaagatttctctggcttgtttttcaagaggaataacgtaagcgagcaaaaagctccacttattgtcgggaagcaagcttcgattctttaaattcctccaaacaaaaaaacacaacgtggaaacttttctataaacccttttcaaattctgtggattagaccagaagaaagaagaaaatttactataaacccttttcgattccactaattgttttcacaaaactctgttctgtactctgttttttgttaggtcattttttagcaaagaagaagaagagga

SEQ ID NO: 2957 - DNA, 3000 bp, Unknown
  misc_feature (1)..( 3000): cDNA_ID_3093431_gDNA_ID_1620618_Annot_ID_46964 3000 nt of promoter + ATG
gcctgagacagaactcattggaaaaactgataaaggacacagagtttcgtttgtcacgaagcctctgtttgataaagcgtgtcttcttgatggtgatgatctgaagaggaatcctggaattggggattttgttgaggttcagatagagaaatcaacgagggcatcgttgtttggggaagctctcgcgattagtaaaatgtccttgtttcacgatgttggtgtcgtcgatgctgttgttgcgtcttgtgcaagttaagttgaacttccgttttctttgtttcgaaagcctttatactttttcttctgtatactttcttcatagttaaaccaaataagttatttacagatgaattttattacttttttgaaaacacaaattgtaactgaaatggatagagaaacatttttgggcatacatgtattcctcccctggttcaacgacatgtttcttcgataaagttgacaaaaaaaaggtagagaaacagtgttgaaaatgtcagcgatgaacagaaagagagatcgtcgtcaatggcgatggttagtgatgatttgactatgacaagtcaataaacactatgctctatgcgatggtaattttatatatatctgttagaaagaaaaaaaaggttcatagctcgaggcatttattaaaaaaaaaaaaaaggtgtaacggcagaaagtagtataaattgaattatttcagtttattttgatggtaatataaatctataaattcaaacaatgttttgttaaatatgtttatacatatatgttaggcagaaagcattccaattaattagttgtggaccgaccttttaattaacatttgtactacctccgctttttatcagagacatatattcgattaattaatttggatattaagtctaaagtttaaagaagggaaagaaaaaaactccaatcacatgtcgtaggaatcacactccccaataataaagttggattagtatttctcaagaacaaagttggtattcacatatctaaatttgtaagatgaaatatacgagtacaaccagaacctaatataatatataggttttggattagtactgtatttctactgatatcgataatcatagtttaataatttagtgtcattggcaaataaaatatttaatacactgattatcataatttatgtgactgacatgtttattataataagatcatggattaatcagtgaacttatgttcatcattgtttccaagtctaaaagcagatctcgatatatatttatatttttcaatgcgcttgatgatatttaattcgacctatagtatcaatcttgggttttactttgtttttaatcatatgctttaccaataagcaatgtttgttcagggaagtggatcctattattgagatttaaacatattgaggcatgcacaagtataataattattcgttattggtgttaagtaactcattttatctgtcaatctataacgaaattatactcatttttttcttctataaatggataaaccaaaaatgaatagaaaataaattaataaataaaaattggttgggggtgagaagtagctatctaatatctaaaaatgagacgagacaaaacggcctaagcgtggcgcaatagccgctcccaatttctgtcccctcatttattcctcactattgttttgaaaattctgttttgttgcaatcttagaattaaatactattaacgtcgacttgaagctacaaattttggaaatttggatccgatgtttataactcatggatcaaataaatgaaagatgcatatgaatctgattttctaatgattttgaaatatgaataatcaaatatttatatatatacatctaataagtaggaaaataatttcataataataatcattgtctaaataatcagacctatataaaaatagaatattatcaagtaaatttatacaaaaatataccattaaaatactctgtatatagaaatatgtgaaactgtatttgatcactgtctatcgttagtcgttccaaaagatcctattgatttaggagtatttagtagtaaatacctttataatgatggacaacttaattaccgtgtgatacagtcaatgaataattaaataagagagcactaaaattaattatgtgtttctattaaaagagaatgttacaataataatcttatttaacaaaaaaaaaaaatattacaagagaatatcattttctattctaaaattagcttatgagaggaattagatatttaattccataaaaattgattttgtagctatatcaaatttcttataaagatggaatgggtaatcagaaaaatatcaatacattgatacatatgtcattatgctgttgaccaaaaaatgtcattatgcttattaagttgttgacatactaaaaattcaagattatactagtaattaactacttaagatgaatttaacgaaaataaaactattttagattttttagcttggtaattaagttgtttttagtgggtttttaagtttaagtatatatgcaatacatatttggattgtatatagtgagatacgggtaaaagtggattttatatcattaattcctctgtttctcccccattgaaaatgacatcaccatggctttaagctctacaaatacaaatatttattctctcactttctctgcctgcatggtttttgagaattgagaaaacccttttaaaattctctatcgatctcatcacaaattttgctatatccacaattcatgtgcttaggcatatagttattcccaagaaaccggtttaactgtttacgtatgcaacctccggcaagcgcaggacttttccggtcgccggaaaatctcccttggccttataattacatggattatttggtcgctggtttcttggttttgacggccggaatacttctccgtccatggctctggttacgtctacgaaactcgaaaacgaaagatggagatgaagaagaagataatgaggagaagaagaaggga

SEQ ID NO: 2958 - DNA, 3000 bp, Unknown
  misc_feature (1)..( 3000): cDNA_ID_1821441_gDNA_ID_1620618_Annot_ID_162157 3000 nt of promoter + ATG
gcaagagttttgtttaacaacgttcattataacttacctccttggtcaatcagtattcttccagactgtagaaatgcagtcttcaatactgcaaaggtaagtgtatatggttgaaactcagaattatggttcctcaaattctctgtgttttttctgattcttgtggatttctcttgtttaatttaaggttggagttcaaacatcccagatggaaatgttgcctacagacacaaagaatttccagtgggagagttatttggaagatctttcttctctagatgacagctccacattcaccactcacggactcttggagcagataaatgtcacgcgtgacacaagcgattatctttggtacatgacgaggtaaaagaaaaacccgtctgctaccttatacaatgtaaactttccctagcttcaaagtgattctcgacacgtgctaacaaacatgtggaattggtatgtagtgttgatatcggtgacagtgaatcattcttgcatggaggagagctaccaactctcattattcaatctacaggccatgccgtgcatatatttgtcaatggacagctttcaggtatgatacttccactagtttggcctgttaatttgttctattagagaatttctgatgcaaacttataatatatgaattgcaggttctgcctttggaacaaggcaaaacaggagatttacttatcagggaaagatcaatctgcattctggaactaacagaattgcgttgctgagtgttgctgttggattaccagttagtagtcttttctctcttccgtgtaaacgatgtttttcgtttttctcttatcctgacccctttcctctttttcgtttttgaagaatgtgggtggacactttgagtcatggaatactggaatcttgggtccggtggcattgcatgggttgagtcaagggaaaatggatttgtcatggcagaaatggacataccaggtgttttatctatcctattttctcgtgatttctctcttttgatcccttttttctgtattaagttgtttaactctgttttcatcaggtgggactgaaaggtgaagctatgaatcttgcatttccaaccaacactccctctattggatggatggatgcgtccttaactgtacaaaagcctcagcctttgacatggcacaaggtttgattgaatccaacacaactcaacaaagctttttttctaattaagaatctgaactaacgagtatattttgttttatttcagacttattttgatgcgcccgaaggaaatgagccgcttgctttggacatggaaggaatgggaaaaggtcagatttgggtgaacggtgagagcatcggaagatactggacagcatttgcgactggtgactgcagtcattgtagctacactggaacatataaaccgaacaaatgccaaaccggctgtggtcaacctacacaaaggtggtaccatgtgccgagagcttggttaaagccgagccaaaatctgttggtcatattcgaggagcttggtggaaacccatcaactgtctctttggtcaaaagatcagtatcaggagtttgtgctgaagtttctgaataccacccgaatatcaagaactggcaaatcgaaagctacggaaagggacagacatttcatagacccaaggttcatttgaaatgtagtccaggtcaagcaattgcatccatcaaatttgcaagctttggaactcctttaggaacctgcgggagttaccaacaaggagagtgtcacgcagctacctcatacgctatcttagagagggtaaaagatataatctttacacagctaaaactggaatcagactcttcttctttttttttctaaccacggtgtgttttgatatatgcagaagtgtgtagggaaagcgagatgcgcagtgacgatatccaacagcaatttcgggaaagacccgtgtccaaatgtgctgaaacggttgactgttgaagcagtttgtgccccagagacatctgtaagcacttggagaccttaaagacaaccattgagccctttgtctacaaaatgtataaccaaacaatacagagagagttgaagaaaagaaattgtaagctgtgtttaaaatatgtgtgtgtgtgtgttagtttgaacagagacatttgtgggttagagtagtttcagatagataagagagaagagtctgtagagttgtgatgagtctcgggcaattccgtggctcattaaaaacgttcaggccaccggtcaccaccgaccattttaaccggttatggagaccgggattggtgggtctgaatgaagtcagtttaaggtttggttttgatttgtctttgtaatcaactaaagagggttcaggtttaggagaaaggagatcctatggtgacccatttctttcaaacctattgtcgtttcactttctaatttagttctattttccctttttctttttatctaacaaaatatttatgtttcataaactattttttcttcgtaaattataaaagctttttctccgaagttaaattggagaaaatctttaatattaaaaaaatcgagagaaataccctagaatagctattttttttttgtcggcagaatagctatttttccaatatatattttacaataaagtaaaaaataactgaattattccccttaaactaaattatgaaacctttatgacttgaaaccaaattttgacttttaagaagcgataaaattatgctatacgaggttaattatgcaacattatcccaaaaagtttgtttcgaaaatacgaccatgataatctcaataaccgtttaatatctataactaggctataagaatcctatttctattcgaatattctttaaaatccaactttatctcttcttttgcaaaaaaaaaaaaaacttcaatttaagttctatataaaacgttgtcacccatacgtttaatcagaaaacagaaagaaacatactcaaaactttttaagcagcgacgatcatagatcaaat

SEQ ID NO: 2959 - DNA, 3000 bp, Unknown
  misc_feature (1)..( 3000): cDNA_ID_2993752_gDNA_ID_1620618_Annot_ID_162156 3000 nt of promoter + ATG
tcatacgagacacgtgcaccgaagctttttcccacgtgccaaagagtttcgtcttcgttcacacagaaccaagatgggtggtaacgaaggtaggaccctaaagcaccagcctacaacacatagatgaaatagtatatgcgtttacatggatttgatgaattgttgtgtttagtatataagtatattgtttagaattatcaaaaagtatactttataaaaagagtggtggtaacatatttagtttctgcaccaatataaaaagaaatatggtgatgtctaaagaaaaaagagagaaaacttagccaccaacaaaatattagaagaagatttcaccatgtgaatggaagggtaatgttttttttctttctttattttgaaatgaagggaaggaagttgttataaacaaattttcgaaaaggttaatgatttaaatctactataacctttttgatcctttagtttggaacaaaagaaagtttcagagttagcgatattttagtggaaactagttgttgattctccaactaaaattcaaccaccattagcataaaacatggttattttggcgaagtagtttactttgcaacatctatctgtattttactatataaaataatacttaacatatacaaataaatagaaattaacattagaaccaatagttatatagtttagctgtttaggtaaagcttagtaagagtggatgcaatcctttcccgttttctctccgcatttcacgccgtcgaagccttattagggtttaatacaaatccataatctctcgtttccttattattaaaacatcccatgtggacaccaggactaaaaatcttgacaatcagctttatttgatgactgaagtatcaaatttaaataaattaactagttaactagttatataatgagacttattttgaccacttaggtccactaatagacaaattaaattatcttatattggttattgtcccatcgtatgaaaatcaaggatggtgttttctaccagggaaatagttacatatatagtacatgatcaaacttgaataaactacacgataatgatcattatttgttgaaatcaaataactttaacaaacaaacaaaaaaactaaaatcaaataagaatattagtagcatagtactttcattataacctttatgaaattttagtaaatagtataagaatttctcaatatgcatcgattttgatttaataatgagtaaatgaaacgaatagaaacaacattttgatttgattaaacaaatagataaaaacaagactcataaattaaaatttggaagtttccgacaattagaaaagctgattgatatcgcatctgattgcaaatctgaccagaactcgaaaatattgaaaacatattttaggaataataaaagagatgatagcttaagtggaagttgaatgtcggaccgtacgtaccgggatagttctaatagacacttctcatttattctttttccttcaattatcccaactgttacacagttatattccataaatacccctagtcaaaatgtgaattcacgagtcaaacccataaatgcagactactgtcggtgtcggtgggtgaaactagcgtaaaatgatttagggtaaaactggaatttcactatatgcaacaaaagagcattcattcacatgtttatgtcttttgtgtgatttatatcttctttcttttgacagttacaaacttacagctaatcctttgattaaggaagcatctcttaattaatctcaagtgggctgataaatttgaactttcatcagatccaagaacccaaaattatatccaaccgatcttcaaagaaacttaccaaataaattgtaaaatagtagtatatgacatatccaccaaatctacaaagttcaaaggctactaaaaccaaattccaccgaagaagaccatataataactataggccaaacaaaactacaaaatcaatttctggaacaatgtgaatttaataagtatggtaaagtctgtacacatatctaaatgacaggtacactgtgattttggaagtggaagacacttgtacaatgtgaatccattttgacgactgtccacaagactcctcactaataaaccaaagtacttcacgtactctatctttttatatcagtttaaatgaccaaatcaaatttcaacatctactaatcactaactcaaacccataacaatattcagccataaacacataatatgttttaagttagtgactagactgacgcactaaatcaatcaaccaaacaaaaaaaagaaaacgaaactgaaataaaatatagcgtgattagctgctttaattcaatcaacgtgccacttttttcaccctaatatcataatcaactcttactttattttatttctttacatcttcccgtttttttatatttccgttatatgatataaaaacaataaataaaaatgcgtaaaaattggtgggaaagcgtcggtagctcacggccacgcagtgatgatgcgagtaagagacacttgtgaagtgcaataaaacccccttcttcttcctctctttctccttcgtcttcttcttcttcttcttccttccttctctctccttattaagaaagaccaacacagacacggaagaagtagcttggttcttctctttgtgaaggtgaatgcgggagatggggactggagattctgcttcgagactgattctctggttctgcttagggtttttgattctaggtgttggatttgtgcaatgtggagttacttatgaccggaaagcacttctcattaatggacagagacgaatcctcttctctggctccatacattaccctcgaagcactcctgatgtaagatttaacaaaagccctaaacttttctcttttttcttcttttgggtttaacaaaaagaccctatgtttctttcctttatgttctgttttatacaatttatcaaaaaggttttagctttattaattttaactgttgttcttgttgttag

SEQ ID NO: 2960 - DNA, 3000 bp, Unknown; identical to SEQ ID NO: 2957
  misc_feature (1)..( 3000): cDNA_ID_3093431_gDNA_ID_1620618_Annot_ID_162151 3000 nt of promoter + ATG

SEQ ID NO: 2961 - DNA, 3000 bp, Unknown
  misc_feature (1)..( 3000): cDNA_ID_2109164_gDNA_ID_1620618_Annot_ID_162145 3000 nt of promoter + ATG
aagttaaatatcaatattttatgaataaaactgtattttctcagtaaatcgaattaatagaacaattaggagaagattaacgtattaggctccgtcttcttcttcttcttctcccttgtaacgttttctggtatgggccgctcacgatttctctctcaaaatatctttgcctttgtacttatctgatccataataatctctggataacgacgaattgacgattctgagactttatttttgtttggttttttgctagtttactaattcgttaagtgtttgatgataatgactcttgaaaaaagtttactttatcttcttctcttcttctgcttttggtagtcgtctagtaattaagattgatagctaagtaaagccaagatttctctggcttgtttttcaagaggaataacgtaagcgagcaaaaagctccacttattgtcgggaagcaagcttcgattctttaaattcctccaaacaaaaaaacacaacgtggaaacttttctataaacccttttcaaattctgtggattagaccagaagaaagaagaaaatttactataaacccttttcgattccactaattgttttcacaaaactctgttctgtactctgttttttgttaggtcattttttagcaaagaagaagaagaggaatggcgatgctagttgatcctccaaatgggataagacaagaagggaaacattactacacgatgtggcaaacattattcgaaatcgacactaagtatgttccgattaagccgattggaagaggagcttatggtgtggtttgttcttcaatcaacagcgaaaccaatgagagagttgctattaagaagatccacaatgtgtttgagaatcgcatcgatgctttgagaacattgagagagcttaagcttttaaggcatgtgagacacgaaaacgttatctcccttaaggatgttatgctgcctactcacaggtacagcttcagagatgtttatttggtctatgagcttatggattctgatttgaatcagatcatcaaatcctctcagtctctctccgatgatcactgcaagtacttcttgtttcaggtacgttggttcgatacattttctgtttctcttgttaagctttggtttgatgattgaattgtatctttttgtcgacattgtagttgctaagaggattgaagtatcttcactcagcaaacatccttcatcgcgatttaaagccagggaatctcttagtgaatgctaattgtgatctaaagatttgtgatttcgggcttgcgagaacttatgaacagtttatgacagagtatgtggtcactcgttggtaccgagcacctgagcttcttctctgttgtgataactacggaacctccattgatgtttggtcggtaggatgcatattcgcagagattcttggaagaaaaccgatattcccgggaacagaatgtctcaaccaactaaagctaatcataaatgttgttggtagccaacaagactgggatctccagttcatagataaccagaaagctaggagatttataaagtctcttcctttctcaaagggtactcacttttctcatatttacccgcacgcaaatccgctggcgatagatttgttacagaggatgcttgtgtttgatccaaccaagagaatatcggtcagcgatgcgcttttacacccctacatggagggactgttggaaccggaatgtaacccgtcggaaaatgttccggtcagtagtttggagatagatgagaacatggaaggagatatgatcagggagatgatgtgggaagagatgcttcattacctcccccgagcttaaatcaatattttgtaaaatcatctctctaacacttgtttataactttagtttgtggtaacttgtattcgtcttccatgtttctttgttacgttgttttgtgcggaatgtcattgagatgtatgcgtcaaagtagactttcggttattgaaatttggtctggttatttgatttataccggatccggtttactcccctcgtatgagagaccttcggaactatggagaaggttttgactctctcttcagtgatatgatccgtcgcaaatcggaatctgccggcgagatggttccagtcgtctttgttcccttattgatagaataatcaaaaatccgagtcggagacgacgaagacccgagttccagctattaactatgcagataccatcaagagagcatagtttcattctatttctcttcatatctggtaaaaatcctcgtcgcacgaatttgccctctctcgaatttttgagcttttgaaattttatcttttgggaaatgctgcagcttttgtaattggtgctgcgtctgtacctgtacctgattctaattgctacgctctcgacaattcaagtcgtcttgtcgattttgtatcctctttctattttattaaagcttaggatcaattcttagtaaaaaagtttgctttttgttgcattggtttgatttcgtgtcttgtaaagctgcttcctttaacttggtttgatcagagcagctggatcggtcatccatttgaatatgatggcaaggttgtgtatatgtttctcattttttagtgttgagagttagttttaaggactttggggttgagttggtatgtgttttttgatgcaggaatttgatttggtggttagattttgcaaggatgtggaaacaagagggcaggcggtaaaatatttctatatcatcaaattcaaaagctttttgtttctactctagattccactaatgtgcgttttcttgcgtgcagggatatgttgattttggacgatttgacccgttaagctactttgtttctagttctgaaaatttcgatttcgtgcaagtaagagctttcacttctttgctttgctctttgggatcaggcatcagaaccaattgttgcatttggtagactagtattatgatattatcctcggaacatggattcatttgttagtatatataaatatagggtttacc

SEQ ID NO: 2962 - DNA, 3000 bp, Unknown; identical to SEQ ID NO: 2956
  misc_feature (1)..( 3000): cDNA_ID_1818934_gDNA_ID_1620618_Annot_ID_162143 3000 nt of promoter + ATG

SEQ ID NO: 2963 - DNA, 3000 bp, Unknown; identical to SEQ ID NO: 2954
  misc_feature (1)..( 3000): cDNA_ID_2150275_gDNA_ID_1620618_Annot_ID_162135 3000 nt of promoter + ATG

SEQ ID NO: 2964 - DNA, 3000 bp, Unknown; identical to SEQ ID NO: 2953
  misc_feature (1)..( 3000): cDNA_ID_1016101_gDNA_ID_1620618_Annot_ID_162133 3000 nt of promoter + ATG

SEQ ID NO: 2965 - DNA, 3000 bp, Unknown
  misc_feature (1)..( 3000): cDNA_ID_3070544_gDNA_ID_1620618_Annot_ID_162126 3000 nt of promoter + ATG
gaaagcattcataaataatagacatgcactctccagtttcttatgcgtgtcttcttgtttcaccaggccagagaaaaaaaaaatctagctttatgatatagtaaacaccaccgtttcccatatctatgaactgtcccaacttctaactgtggggccaaaagcaatctagtaacagagaattcaaaagttagttttgtcaagttcttgaaattgatcattagcccattagctctatatatatatataaaaagtcatagacgcaaaaagccatttcctggtgaaaagatgaaaagcttccatccatctttttatatgtcttttagcaaacaaaaatcaaagtcccacatagtgataggctgatagcatgttccatgtttcttgtctttaccattgcaaaaactactccacttacatagatagtattttgcccccaaaaaacaaaaacataaatagtataacgtaacccccttctctactaacttttggttagcctatagttaaagttcagaattattaaaattgctaaatttgtgtaacaagattatctagctgatttcttcattttgatatctacatctttttagtcttttgaagtagttaactcatctggattttatgtcttgcaggctctactgaagtggacatggttccaaaaccattcacaaagcacatctaagcaaagatatctaaatgtatttacttgtttttgtgttacgaatatgtaagaattatctaaatcaatcaatgtggtttcatatagtataaagtattaacaatcggacaaactatagttctccttgaattccatccatacacaaatctttacaaatcgatctaagtctaacaaacaagatcgataggccaaatatcaaaactcctgaaaaaacgattcagaacatgttttgattcacttttgcactcatctcgtcgttttggcgcgtagcctgatgagaatctccatgaacattgtaatttgaggaaatttgatacggtttcgcagaaaaatcaagagatcatcaaataaaagtaatagagtagaaaattgtgtatttacttacggataaatcaatactggatcgtttagttctcgtcagatacctcatatacacgcgtctgtgtttggggggaaactttttgcatgggatgtaatttgaatacaaacgggctaaaatcgacggtggtcataactattgtccccgaaaatgtagcgttcttattttgttttgtttttttaactttcgttgtcatataaatatcatagctttatttatggttttcgtttataatatttgcgttgatgaaaattaaaacaactactataactaaggagagtacatgcactcatgcatgcatgcaaacacggcatatcgtaaaattgtaaataagcaaattcatttatcgtgtgtttttaaaacaaacaaaaaatgttatttttataagataaaacactattttacaagatattataatatttttatttttaagtgataaagagtaacagaaacgatagattacctattacaatttttcttaatactaaatttgaaagtcaagatgagaggtccctattgagctataaactttttgtcaatttgattcatctcgagtattattcgttttgtgcaaaaaaataataaaaaaatacattacatatacctttctaaaagaaaagaagagctcaagaggggtatatatattctgtaatatgttagagcacatgccttgtataccgaaaaattgcgacccatatatgaaccatgacggataattggatttatacagtccatattaataattacaattcgaattcgtttaagaaaaagaaaagacaaactattatctgtttttttctgaaaaagagagacattattctgtaatattttaaagcacaagtctcgtatatattcctggcacaaaatagcgacccatagtcccatactaacaacaatgaagaactaaataaataaaaatttgaaaactaaaaaaccgtaaatgtctttcagttatttatagaaaatactgcgttcaaaatcgttgcaagtagaactagacaagaactaacgtttttttcaaaaaaaagcattaaacaaaagataattttacagtcaaagtgattaaagttgtggatttttttatacggtgcatgcataaccatttatttcaacttcgaacttcatctttcaactaaatggatgaaattacaattatataaaaaaaaaaatgtttagtttaaaattatgtagtataattaagtggattagatttgtacttaaaaatatgacaaaaatagtagaatatagccgatattttaaacttataaaaatttcaagtacgtacgttcgaataatccttatatccataatccactagctcaaatggtgtgtttttgtttgatattcctgcgagaatatactaatcagtatttggtcgttttaataatttgaatgtggattgtggaataatttcttctaactatattaattatctgaagaacaattatcttacgtacccgtgatctacacaaacggaatcttataaatatatatctttcgtcgctgagtggaggagaacaaaacttagcaaacttcaaacatttttttaaaaaccaaaattttacactaatggtttagtcgtggttcgagttaagaaaaaaaagaatctgtttagaacatggcccaataatagttcctatgaaaatatgctttttgattattctccaagcaataataagcccaattatatttaggcccagatctgctttttgattattctccaagcaaagtaaacttatacggtcgagattttattatcattttattttttgtccttttgaaaaataccgtttaaaccctaaaagctaactgccaccgtgggtttatggtcggcaaaacccagaaatcgaccatcattcaccgtcaatttcccaactttcatgaacctttagctctatttctcaatctctgaataagggtcaatcttttctttttatcaaaatcgatg

SEQ ID NO: 2966 - DNA, 3000 bp, Unknown; identical to SEQ ID NO: 2933
  misc_feature (1)..( 3000): cDNA_ID_2150231_gDNA_ID_1620618_Annot_ID_162102 3000 nt of promoter + ATG

SEQ ID NO: 2967 - DNA, 3000 bp, Unknown
  misc_feature (1)..( 3000): cDNA_ID_2993752_gDNA_ID_1620618_Annot_ID_46966 3000 nt of promoter + ATG
tctagcgttacacataggtcgatatagctagcacaagaatgaaaactaactttatttgtcttgggaacaagcgaaagatcgaaactccgacagacgtaatcttaattcgctgagaggcgtgtgagaattgcctttttccttgaatataaaatgcactcccataatgtaatcaaacaaaagatataaatagaataagaaaaataacaactcagcgtaacggagtccgattaacggagtgagaaatcatctggtttctcgagagttctaagccaatgataatcgaaggaaacgaacggtgttgtgtgtgtgtggttaagaaaagaacaaactcatacgagacacgtgcaccgaagctttttcccacgtgccaaagagtttcgtcttcgttcacacagaaccaagatgggtggtaacgaaggtaggaccctaaagcaccagcctacaacacatagatgaaatagtatatgcgtttacatggatttgatgaattgttgtgtttagtatataagtatattgtttagaattatcaaaaagtatactttataaaaagagtggtggtaacatatttagtttctgcaccaatataaaaagaaatatggtgatgtctaaagaaaaaagagagaaaacttagccaccaacaaaatattagaagaagatttcaccatgtgaatggaagggtaatgttttttttctttctttattttgaaatgaagggaaggaagttgttataaacaaattttcgaaaaggttaatgatttaaatctactataacctttttgatcctttagtttggaacaaaagaaagtttcagagttagcgatattttagtggaaactagttgttgattctccaactaaaattcaaccaccattagcataaaacatggttattttggcgaagtagtttactttgcaacatctatctgtattttactatataaaataatacttaacatatacaaataaatagaaattaacattagaaccaatagttatatagtttagctgtttaggtaaagcttagtaagagtggatgcaatcctttcccgttttctctccgcatttcacgccgtcgaagccttattagggtttaatacaaatccataatctctcgtttccttattattaaaacatcccatgtggacaccaggactaaaaatcttgacaatcagctttatttgatgactgaagtatcaaatttaaataaattaactagttaactagttatataatgagacttattttgaccacttaggtccactaatagacaaattaaattatcttatattggttattgtcccatcgtatgaaaatcaaggatggtgttttctaccagggaaatagttacatatatagtacatgatcaaacttgaataaactacacgataatgatcattatttgttgaaatcaaataactttaacaaacaaacaaaaaaactaaaatcaaataagaatattagtagcatagtactttcattataacctttatgaaattttagtaaatagtataagaatttctcaatatgcatcgattttgatttaataatgagtaaatgaaacgaatagaaacaacattttgatttgattaaacaaatagataaaaacaagactcataaattaaaatttggaagtttccgacaattagaaaagctgattgatatcgcatctgattgcaaatctgaccagaactcgaaaatattgaaaacatattttaggaataataaaagagatgatagcttaagtggaagttgaatgtcggaccgtacgtaccgggatagttctaatagacacttctcatttattctttttccttcaattatcccaactgttacacagttatattccataaatacccctagtcaaaatgtgaattcacgagtcaaacccataaatgcagactactgtcggtgtcggtgggtgaaactagcgtaaaatgatttagggtaaaactggaatttcactatatgcaacaaaagagcattcattcacatgtttatgtcttttgtgtgatttatatcttctttcttttgacagttacaaacttacagctaatcctttgattaaggaagcatctcttaattaatctcaagtgggctgataaatttgaactttcatcagatccaagaacccaaaattatatccaaccgatcttcaaagaaacttaccaaataaattgtaaaatagtagtatatgacatatccaccaaatctacaaagttcaaaggctactaaaaccaaattccaccgaagaagaccatataataactataggccaaacaaaactacaaaatcaatttctggaacaatgtgaatttaataagtatggtaaagtctgtacacatatctaaatgacaggtacactgtgattttggaagtggaagacacttgtacaatgtgaatccattttgacgactgtccacaagactcctcactaataaaccaaagtacttcacgtactctatctttttatatcagtttaaatgaccaaatcaaatttcaacatctactaatcactaactcaaacccataacaatattcagccataaacacataatatgttttaagttagtgactagactgacgcactaaatcaatcaaccaaacaaaaaaaagaaaacgaaactgaaataaaatatagcgtgattagctgctttaattcaatcaacgtgccacttttttcaccctaatatcataatcaactcttactttattttatttctttacatcttcccgtttttttatatttccgttatatgatataaaaacaataaataaaaatgcgtaaaaattggtgggaaagcgtcggtagctcacggccacgcagtgatgatgcgagtaagagacacttgtgaagtgcaataaaacccccttcttcttcctctctttctccttcgtcttcttcttcttcttcttccttccttctctctccttattaagaaagaccaacacagacacggaagaagtagcttggttcttctctttgtgaaggtgaatgcgggag

SEQ ID NO: 2968 - DNA, 3000 bp, Unknown; identical to SEQ ID NO: 2958
  misc_feature (1)..( 3000): cDNA_ID_1821441_gDNA_ID_1620618_Annot_ID_46967 3000 nt of promoter + ATG

SEQ ID NO: 2969 - DNA, 3000 bp, Unknown
  misc_feature (1)..( 3000): cDNA_ID_1818907_gDNA_ID_1620618_Annot_ID_46968 3000 nt of promoter + ATG
gaaacctttatgacttgaaaccaaattttgacttttaagaagcgataaaattatgctatacgaggttaattatgcaacattatcccaaaaagtttgtttcgaaaatacgaccatgataatctcaataaccgtttaatatctataactaggctataagaatcctatttctattcgaatattctttaaaatccaactttatctcttcttttgcaaaaaaaaaaaaaacttcaatttaagttctatataaaacgttgtcacccatacgtttaatcagaaaacagaaagaaacatactcaaaactttttaagcagcgacgatcatagatcaaatatgaggatgaacaaaattttacttgtttttgtgtttctaagcattgccactgtaatcaatagtggaacaacaagcaactttgtccgcacagctcaaccatcaactgagatgtctctcgaaacttttccatctccggctggtcataatgctccggaacaggttttgatttcttagttctactttttgattttctggttcttagatcataaatttgtgtttggtaatttagggtttaagtttctgaatttaaaagtatcaatatcagtaaggtctgcacatgggaataattagtaacgattaattatgttttacgtacagaggccacacgttgttttttctattattatttttgtcttttttgttgaagtccctgattgtatattttgtatcttaacaaaacaattaatccatcttgatttcttgtatctttggctaggttcatatcgtccaaggagattacaatggacgtggtataatcatatcgtgggtgacccccttaaacctagctggttcaaacgtggttacttattggaaggcagttgatggtgatgtgaaaccgaaaaagaagagaggtcatgcctctacctcgtcttaccgattttatgactatacttctggttttcttcatcacgccacaattaaaggactcgaggtttgtaatttgtataatttaacttgttatataagtaacaacatcactttcttgtttcaaaagtttttataaaagtttctttcttatatcttttcggcagtatgataccaaatacatctatgaggttggaactgatggatccgttagacaattttccttcactagtcctccaaaggttggacctgacgttccatacactttcggcattattggtaattaaattttcttttacctatcttttgaaactagatataactaatacttccaactcgatctaataattacattgtgttttgtaggtgatcttggacaaactttagcttctaacgagacattatatcattacatgtcaaaccctaaaggccaagctgttctcttccctggagacttatcttacgcagatgaccatccaaaccatgatcagagaaagtgggattcgtggggaagattcgtggagccttgtgctgcttaccaaaccttcatctatgctgccgggaatcacgaaattgattttgtcccaaacattgtaagttcacattataattctctcaatttattgctttttttctgatcagtagtttcaactttaataaccatatgaatcttaattagggggagcctcatgccttcaagccctacattcaccgttatcataacgcctacaaggcctcgaagagcatatctcctctttggtactctattagacgtgcatctgctcacatcatcgtcctctcctcttattctgcctacggtaattagtaaacacgtaacatctttaagattattgtttcttgttttttttttgaataacgtgttattcatatttcaggaaaatacacacctcaatacgtgtggctcgagcaagagttgaagaaggtgaacagagaagagactccatggcttattgtcatggttcactcgccgtggtacaacagtaataactaccattacatggaaggtgagagcatgagagcaatgtttgagtcgtggttcgttaacagcaaggttgatttggttttgtctggtcacgtccattcctatgagagatccgaacgtgtctccaatattaaatacaacatcaccaatggcttgagctatcctgtgaaagacccttctgctccaatctacatcactatcggagatggaggaaacattgaaggaatcgcaaataggtaaaaaagaaaaacattttatttgattgctttgttgtcatattgttgatatgatactaagatcttgttgtggctttgatctaattttgcagttttactgatccgcaaccgagctattcggcgtatagagaagctagttttggtcatgcagttttggagatttacaatagaactcacgcatactacacatggcataggaaccaagacaatgaacctgttgccgctgattcaattatgttgcataacagatatttctttccagtagaggaattagaatctggcaacactagggcctaaacttctttagtcgttggtttcatttagaactttatttttttttgttttctttttagattacgtattttgttttctgcttggatttttgctgttcttttatttatttacttttagactttaataaagtttgtgtttgatttttccaactctcaaaatatctcggatcagcttaaacaatttttgtgaagtactatcatactatcattaacacttttggattcagtaattaatttatgttcgatacataatctccagacattatatatctaatgggttatagccttataggcttttagcatagttgggcttgggcttttgacccaactaggatttagtgatctgcaccgtaagagcaaagcctttttttttttttttttttcgccataagagcaaagctatatacagtatcggagattaaaattttcttactattagttaaactgactcttaaagcaaaagctctagtgatctgcacacaacgcgttgttttagtttcaaatagggaaacatcacgctgttttgttcgaattcgttttgtcgccgtcggta

SEQ ID NO: 2970 - DNA, 3000 bp, Unknown
  misc_feature (1)..( 3000): cDNA_ID_1819102_gDNA_ID_1620619_Annot_ID_46971 3000 nt of promoter + ATG
ctagaacgttccggtctaggccaagagacgtacgtacccgaaggtcttcaaactttgccactacaacagaatttggctgtatcacgtatagagacggaggaagttattattggtgcggtcgataatctgtttcgcaacacgggaataagccctagtgatataggtatattggtggtgaattcaagcacttttaatccaacaccttcgctatcaagtatcttagtgaataagtttaaacttagggataatataaagagcttgaatcttggtgggatggggtgtagcgctggagtcatcgctatcgatgcggctaagagcttgttacaagttcatagaaacacttatgctcttgtggtgagcacggagaacatcactcaaaacttgtacatgggtaacaacaaatcaatgttggttacaaactgtttgttccgtataggtggggccgcgattttgctttctaaccggtctatagatcgtaaacgcgcaaaatacgagcttgttcacaccgtgcgggtccataccggagcagatgaccgatcctatgaatgtgcaactcaagaagaggatgaagatggcatagttggggtttccttgtcaaagaatctaccaatggtagctgcaagaaccctaaagatcaatatcgcaactttgggtccgcttgttcttcccataagcgagaagtttcacttctttgtgaggttcgttaaaaagaagtttctcaaccccaagctaaagcattacattccggatttcaagctcgcattcgagcatttctgtatccatgcgggtggtagagcgctaattgatgagatggagaagaatcttcatctaactccactagacgttgaggcttcaagaatgacattacacaggtttggtaatacctcttcgagctccatttggtacgagttggcttacacagaagccaaaggaaggatgacgaaaggagataggatttggcagattgcgttggggtcaggttttaagtgtaatagttcagtttgggtggctcttcgtaacgtcaagccttctactaataatccttgggaacagtgtctacacaaatatccagttgagatcgatatagatttaaaagagtgagtgattctatttatcgttattaagttatgatacgaattaagaagatagagacgtatagactggttttatatatcgactatcgtactttaatttggtcggtccaaatatgtacaactaatctatccgttctctatgtattgttctcttttaagatttcttgttttttttttctttggttgttatgatgcttaattcctctcgtcaactgtttaagaataagatttgatgcgtggtagtggacttgttttcacacttcgtatatatatgaccttgtttacttttctacaaagaagttttatcacacatatttagacagggaaaacaagaggaatatatataaatgtaaaacttgccttcgtgtagaagagaaaatgattttcttaatttgatccgtaaaaatgaaggcaagtaaactggagtgcttgtacttgtagcatttaaacaaactcgagtgtgcaataattccacaagcatgttactttaaagatgggaagatgatatttagcagatcgatcttgcgcgtgagatgacgtaactgttctcggtaagatttgtctttacatgaaacagcttgagaagcccatatctaaatatctctttaatcgtgtgccaatcaattttcttatgtttggtttgtctatatagatatatgaccattgtattaatcatcacaaacagaacagttggaagtagatatattaattcatacccaaatctttcaacaaatttttaagtccaacaaaatgtcaatatcacaagttgcaattgatacctaggatttttcattaatcaatataaaaaccaaaaacaatctgtaaaccctacagcctaaatattgtatttattatcaaaacctatataaaaccctcaagtcataaaaccttaattaatattattaaataaatataaatagatttgaatcaagatcacgtcatgtttgtttgattttatttcgcttcatatcattgaagaaaatcataaaaccacatgagatgaatatcttcgacaacgaatacaatcagcgtaatatacggcttggatgatatgactatagatctttcagtatctatttaaagaaaaaatgacgaaccaaaataaacttcattcgtttgttaattaagagattattattttttcttagataaacgaaagtcggtggatagaaaaatattaaatgctcaaattattatggttggtttagtcttctgaattcgtagaaaattgagatgagctaagcaaaaatgttctttatcctcgtgagctgctccaagaagtggttgatgatgtaatggacaaactcgtttcgtggatcttatcattctaggctatggaccaatatggtgcagtcgacacgttcggggctttgtctgcattttgtggtctcgttattctgagttgtgatcatcattaataagtgagttgtaatgcattacaaaatcggtttgtagttattcatcctttccaaatcaaaagtgacatattgacaattttgaggcaagctttttgtttttataataatactaattagattacataatcttcaatttatattatttttaaaattagaaaagagcatttttaaagcaaaaattacattgaatcataaagaaatattggtttaatttatagagatgaacatgttgataattgaaacaaatttatttaattattttttgtatgcactcaactctgtttggcttcaatcatataagtataaaatataattaaaatgtttttattaaaatattagatttcatgattcttgttttagtatataaaaaaaattgatatctccatatcgctagtgaatagtgcagtatctctttacgcgctatttcaagaccaaaccttttctctcttctagagtgaaactgtggaagcaactctcacagagcagca

SEQ ID NO: 2971 - DNA, 3000 bp, Unknown
  misc_feature (1)..( 3000): cDNA_ID_2993353_gDNA_ID_1620619_Annot_ID_46973 3000 nt of promoter + ATG
tgaactcattcaaattgatgttattgtgaaagaatgtgactggaaaaacagactcgaaaatttgatctttaccactttcacagtcagaagtgacactccattgtcagccagttcatcttcatacaaaactacctgaaggagtagagaataagtacatcaaagggcccagaaaaatgtgtgtttgagtttgtatcgataaggtgaccaacctcatcatagaagagaataggttctttaagtgagagagcagccaaatcaatctgatcttcacagttctcccactgaagagtagcttccccctttggattagcttttgcctcaacctgcttcacattaaaaaagcatacagcaatgagcatgaaagtcacacttgattgattatcgtgtgacagacagaaaaagagtgaaaatgagagcaaggcgaaccgtttctttgtctttctcaactacttcacttccacagtatggcgttgtaaacgtgtaatcataatctagtatcacctgctgagacggcttgctgcaagtagatcagagtggtatcagatacaactatcaagcaaagcttccctattgaaaagaataatatcttttgtgatatatttttcagtcaaatcctgaaacttacctcctgaatttccattgtgctgcagcaggaacttcaacaggtggaagcccttcctgcttccaaccagctagtgcgtcaaacgcattaaaatgaatcttagtgttgctacctaagtgtttaaggactaatgcattctcgccaaaaaccatttcaggtaagtgagatgtcttaagctttttttcccacctgtgttacaatcaaacatcacattcgtgaatctcagaagatgctatttacatatttgagataaacagagagctataccaggaaatgtgatgagcagagatcggaacaactaaaatcagtaaccacaaaaactaaaccaaagcaaatacgattttgattttttcacagaatagatcatacactccaccaaaaactaggaaaaactcgaaatcaaggacacaattctgatttccttcgatacgttccactaatacggtgtacacgagctcaaaaacccaaactacactactcagttcatcaaattaacgacgagcacaaatacaaaaccgtaaacacaaatatcacctacaagtaatcacagacaccaacaaattcatcatatatgatcgtatcttatgaggtgagagagatagagattaagtactcttcgacagcgagagaagtgagaatcgtgccgcggagggtttcgatctcccagtcatggatgcgtaaacctcgacgtccgtcgggaagaagctcagccccggaagacttcagaacatctttatcgaccaccgtctccatctgaatcgccggctaatattggcactaccttttctcctccgacgatgtcacttgtgtgaccaaccggactatccaaccaagacatttgacttttgatgggccggcctagtttcattttagtttgaaaaaagaaggtcaatttgattttggtccttaatgggctttaagtttataacgtaggcctttttcataataatgtaatatagctagaatttcatgcttttggaacacactataaaaaaggtcaatattcaatgtttcttttttcattattagtagatttggctaaataaacctctagaggacctagaccaggtttgaaacctgacatggtggaacaccactagcccacttgttctctcaagctcaataatatccatataaatcatcaaaagatgaatcaatcacaaaaattcacaactaatttgcacgatacacctcatgaacaaaatattcgtcgtcattgccactattaacgattcaaagtggtaaaaaaatcaggaagcagtgaaaggtgaaacctcatgaatctctagactctaatgcataaacatatttcattatatatcgtagtagaatactgagacacattgacatatataagtatcaaacagaaattgtataatggtatctttattttattaacacatgtgtgcgtcaatgtgaatcagatagaattagacacactatctttttaatatttaaagttggagccgttttggtcaaaactaatttatgtgcactactcatttatttataggttttttaaaaacacaaaaattgtgaaaaagcttctaagccaggtggcgggttttggtgcaaagtctttgatatgttcggagttgctgcttcgtagagaaaaaacttttctgataacatcggagtaaaaggaaagtaagtcggagtttaatcatcttaagatttgattgaatggctacgctcactgaaatagcaacccttgaggagaagtgagttttttcttttcaccttctatttctatgtgtatatcttatctactcttttgaaattaagacagaaaagttagagatgtgttcgtaggattgggtttttgtctgaaagactgaaactttgtaaataccttttcttaaaattgatgagtttggaggaacggtttcagtaaattaggttgtgtttcgattctgttgtttttgtcggtgttcttcgtgagaatttgtctgaatttctgcatcttcctttgattgaggattgttttttgattctgttctatagcttttgctcttaaggaatcaaagaaggcaagtttttttgtcaagtcatggctttttttctgtttcggggtgcttattaatttgtttaattctgggttatttagttataatgtgtgctaagtgattcctctactagtattcaagttaatggatttgattcatctttggttttaggtatatcgaattgtgcaagatgcatggaatcctacccaacactgccattttatctgctttctttgaggtttgattactttttccttgtccagaagatctgtttagcttaatcttagtgttagtctgagtataaactacgattgaacctgatcaactgaattttaggcggaggttaaaaagtcaaggaatcaaagatgcatt

SEQ ID NO: 2972 - DNA, 3000 bp, Unknown
  misc_feature (1)..( 3000): cDNA_ID_3052345_gDNA_ID_1620619_Annot_ID_46977 3000 nt of promoter + ATG
tgagccgctcggatccttcgtatacagaggcgttgcagttcctgcgcaagctcagcgcacagcgattaaaacctcatgttaaacgggaacctgggatacatgattgattaaccatggttaggttaaccgaagatgaaccaaaggtcattggttttggctaattgacgctatagtttttttcatttcttgtgtgtacataacaagaaccacgcttaggctcttttgtttcattttacacattgtttcatctgtattactggattacacaattggaagtaaatataaagattctcaatttcatttgccagtgttcttaaactcgtgatgaataacgaacgatgatgattttaataacaagaaaaagaattaaaaaaataatcacgtgacttgtggaagcaagcaaggcaacgcgttacaaaagcacgtgacgtagcgtattggtggcaatttctcattttttcctcagaatacttactttagagcactaatccaattatcatacgacgcgtgtcccacgtttacttccttctctcatataacaacaaacaacccactccgaattttctggtattattactaatttgccattacgtcgtactgtagtgttttcttaaatttgacgtaagaatgaatgaatgttggaagagtaaaagaaaatgttaataatgtccaacattaatataaactggtttcattttcacatttaccttaagtgatacactgagatcttacatttattaaattttcttcgaacaacaaactatattaattcatagatgatagatcgaactcatatttcatggaatgcttttgcaattttaaaatgaaaaaataaaaagagcatgattaagggtattttggtcaatgtctaagagagatagctgtttccaagacttgttctccaagctggtagtgcaagatctcgttaagtataaaaagggaagctgaggaacacaattttgatacttttgagatacaacgtagaagagaagctctaaggttttcaagttctgctcaacaccactgcttactaattaaggtatccaatgattaatgtgttcatctattttaatcattagttaatcttcttaaccatcatacttccttcaagcaagctctaattattaatgtgttcatctattatgtggttaatgattagtgtgattactacattaaaggcttgcttggtatagtttccattataatccactaaaagagggaaaaagaagaagaaaatggattgaattaaaagtttgttattattttttgggtaaaaaaagggaagcttgtttagcacatttactcagttactcgtccaccaaaatcttttctatgttttattttgggtataatcttgttttcttttcacacaatcacacatcgatttcgggtaacctaagttataatatgtcattgttttgctttctgcacacacttatatatatcagcatatcgctaatcatgcacaaattatacatcacgatttctacccaacaatgacacactcattggaaaaatcccatacgtatgcaaatgtgcatatcttgataagaataatcacattttattgattaaaaatatttcgttgaatagaatgatataggcagatagtttcttcctaagtgtttttttctttggtgtgtctcgttttttgtttgttgcttaatctacatttatactcaacccattagccgcccctatataataacaaacacatatttgcatgaattttaattgtgtgatgccccgttgcttttaatcttgaaactgttagaaattaaagagaatatctagcgagagataacaaaaatatatggctatatgctgcatttttaaatatataaaacaagtcaacacaattaaatacgagacttatcgtgtaagaacttaaataacacacattttcaaataccatttcgggtagggccatatacattttaatcgtcacaattcacatcgtcgtatcgattatcacacgtttgagaagatcagaaaaatacttatactattaactctgtgtgtagattcatgtctaatatagagaaatactcaaatacaaataactaatgagataaggagttgatgactcatcacataatcataactatatattgtctaactccagtgcatggaaaactaaaacagtgcgtaacattttttagccattacattatatatagtttagtgagtaaatacatttttatcaattatatatgtaaatgcaacaatatttcgaagttttttttgtagttctttcataaacaaacaaaaaaattgtagttctttaacaacgaaaaaacagtactttgtagtgtcaatccttagaaagattgtgtgtgtttattttccttcaaagagggatattgtgaatacgttacatattggtgacgcacacaaaaacaaaaacagaaatgtatagaatacgtttaatatcaatttgacacgcacacaaaaacaaaaacagtagattgtgaaaaaagatgatttgttttgtaagtattggcgtaggccaaaaggcggcttaagtagagagtaaacgtttgcttcccgcgttatacaaagccctaattctcatcatcatcatgcgtgcaagctattttccatttcctttaacgattctcattcttactctcttcaagcttcttctttctttccccaatatcttttctcttttatattcattatttttctccctttttctctcccaaatcttttttttttctttttcccggaaaattctctctgttgttgttgttgttgttgtctctctcctgataagctcgaccaagtttatctctttctcgctaatcatttctctttaaacttctctcatcgttgaaccattttgttttagtacataaagattcttcttcattctttttgtacgcgtttctatgttacaaacgcatttctatcataaaagttattattacttgagctcaatcttcattggtttattcatatattcagatcaatcgagttcggtactgcgacgttcta

SEQ ID NO: 2973 - DNA, 3000 bp, Unknown
  misc_feature (1)..( 3000): cDNA_ID_1819079_gDNA_ID_1620619_Annot_ID_46980 3000 nt of promoter + ATG
tatgaataagttagttaggatgactttcagtttcagttcaaatatagatacatgtcacatgaaatttatctaacaacaaaaatcaattaatctttttaccctaattgattcctgcgccatagaaacatctctttaaagtgttataatgttaactgtctggtacggaagcagaggtgtggttcaacgccatcctttacttttgtccaaaatccacaaagaatgattctaaaattagcaatcaacattacagagcaacaacaactaatctcacgttgttcttgtcctaatcctcgccatcatcaatgcgtgttcggaagaggtagtcttcgccttcaagttcatcttgatatagggatattgatggatcattacatttctcatcttctttctcatcattacatctctttccctgaccaaacatgtcgagttttcaatactctcagaatatcatcactagttaaaatatatgagaaggttcactttcagaaaatatggaggcttaaatcgttcacagactgcaacctctatagaaatgcctaactttgaatatagcaggatcagatttcagatcttaagattcatttttcatacatgtggttgtgattctctccattcagctattagtattccataaaccaagatcaatttgttttggcaataagcaatacttgttactaagaacttgtggggatttgctgaagagctactataaggtaattgaaacagagaacaaatgttaatccttaagcaaagattctagaaacattgctgacctttcttaagatatagaagaaataatggaagccatcgccaaaagtgttgtactccatggaccaagtaaacttaggatccttaaacagaggacgcctgaaatgcggctgcattgacaaaagaagagtttttttttagagctattaattgagaaaatgcaagaacatgagatcagatattttgtttgaagacctggccaaaagtaatggaaatgaaaatgccatctggtttcaaaacccggtgaactccatcaagggttgccatgactttgctaacagtttctggacggggattccaaggatcaccagcatccacaaacagtacatcctacaacacgagattaattacaaaaagggacaaatcatgagctatctctccttttcaagaaaatatatactttagaacctcactgaaaaatctgaagtcctaaacaaacaatggatcgaaagaaagttgtagctcagttacagattttaccatggtccctttctcaataaccacatcaaaagactcgctgtcaaatgggaggtctagcatgtcagcttgcaccacttttatttctgaatatatcaaagtatcacatcaaatattgaacacgtcgagtgtaagatctaactttaaaccagcagaaactaataaacttctcagtataattaaatatagactattgtcagtgtctagttttaaagaatcagaattcagaaatcattgttaactctagttcttcttcattacattcatgcctatagaactactcaaacaaattataacttaagcaatacctttgtacccttttggtagcagccgactctgcatcttctctaccgccacggaagataaatcaatgcaggtaatatcaacaatcccatccttatacaactcttcacacaactgagagttcccacatcccaattccaataccttcattacaacaacaaggaaaactcaaaaatcaattttttttttgcaatcatcaagagattaataacaaaagagagatagagagagggaatgtacggaagaagagggtttgatgttggatatgatgagatgctggaaatgagagtaatccttgaaccattcatagtgttcttcagaagagaatctctcgtccctgcattcttccaagacattcagaaacacaggaaagagagagggagactacttgtagctgaatgcaattcatgattaccagtagtgaggatcgaggtaggttaaagcagaaggaggaccaacggaatttggattctccatagctggacttgctcgattctcctccttatcagctcagccaataaaccctaaaccccttttcactaatcacactagttaactaactcttatggaattggtaacagttgacttgatcttggcataaactagcttaagagttaagggggcttgttttgttataacatatgggcctataaaagcagccgcatttcttaagcccatgtgattttcttacatctacaagtctctgttttttttttttattcacgtcttaacggattacttttgtccaaatcatttaagatcagcagacttattgcctgtgacgattatcaattcattctatatttttccttgttttgtacgacacttaacctatccaatgatttgcacacacaaaaaaaaaaaaaccctatccaatgactacattttctatgtatgtatgttattgtcaatgaaaaatatgccattctcaaaaatgaatattcttgtttttattacaatttttattaatatccatgatacatgtgtagttgacaaggtgacaactcagaatcttatattcacaccaatcacacatcattaaagaaaagagtttaaccataaatttgcgacttcaagagactttcactttcgcgacccaatttttttttttttgtggcgtaggtacgctcttttagtaggatgtctcttcccattattttctcaccaaatatgaaatcaaatcccataaaaaaaataagacataaaaaattacacatgtccaattccaagtggttcgttgcattttacactaattcccaaatacatttccttgtcaattatccaaaaacatattaattcaatttttttttttttttttgacatctctattttttttttttattataaatgtggaagaggctctgagataactcgtggaccaaaatcgtccattgaagtgaacagtcagcatcgttttgcttgcttgtgcgtttctctcgaactctctccatg

SEQ ID NO: 2974 - DNA, 3000 bp, Unknown
  misc_feature (1)..( 3000): cDNA_ID_2049393_gDNA_ID_1620619_Annot_ID_162200 3000 nt of promoter + ATG
tattcatttttgagaatggcatatttttcattgacaataacatacatacatagaaaatgtagtcattggatagggtttttttttttttgtgtgtgcaaatcattggataggttaagtgtcgtacaaaacaaggaaaaatatagaatgaattgataatcgtcacaggcaataagtctgctgatcttaaatgatttggacaaaagtaatccgttaagacgtgaataaaaaaaaaaaacagagacttgtagatgtaagaaaatcacatgggcttaagaaatgcggctgcttttataggcccatatgttataacaaaacaagcccccttaactcttaagctagtttatgccaagatcaagtcaactgttaccaattccataagagttagttaactagtgtgattagtgaaaaggggtttagggtttattggctgagctgataaggaggagaatcgagcaagtccagctatggagaatccaaattccgttggtcctccttctgctttaacctacctcgatcctcactactggtaatcatgaattgcattcagctacaagtagtctccctctctctttcctgtgtttctgaatgtcttggaagaatgcagggacgagagattctcttctgaagaacactatgaatggttcaaggattactctcatttccagcatctcatcatatccaacatcaaaccctcttcttccgtacattccctctctctatctctcttttgttattaatctcttgatgattgcaaaaaaaaaattgatttttgagttttccttgttgttgtaatgaaggtattggaattgggatgtgggaactctcagttgtgtgaagagttgtataaggatgggattgttgatattacctgcattgatttatcttccgtggcggtagagaagatgcagagtcggctgctaccaaaagggtacaaaggtattgcttaagttataatttgtttgagtagttctataggcatgaatgtaatgaagaagaactagagttaacaatgatttctgaattctgattctttaaaactagacactgacaatagtctatatttaattatactgagaagtttattagtttctgctggtttaaagttagatcttacactcgacgtgttcaatatttgatgtgatactttgatatattcagaaataaaagtggtgcaagctgacatgctagacctcccatttgacagcgagtcttttgatgtggttattgagaaagggaccatggtaaaatctgtaactgagctacaactttctttcgatccattgtttgtttaggacttcagatttttcagtgaggttctaaagtatatattttcttgaaaaggagagatagctcatgatttgtccctttttgtaattaatctcgtgttgtaggatgtactgtttgtggatgctggtgatccttggaatccccgtccagaaactgttagcaaagtcatggcaacccttgatggagttcaccgggttttgaaaccagatggcattttcatttccattacttttggccaggtcttcaaacaaaatatctgatctcatgttcttgcattttctcaattaatagctctaaaaaaaaactcttcttttgtcaatgcagccgcatttcaggcgtcctctgtttaaggatcctaagtttacttggtccatggagtacaacacttttggcgatggcttccattatttcttctatatcttaagaaaggtcagcaatgtttctagaatctttgcttaaggattaacatttgttctctgtttcaattaccttatagtagctcttcagcaaatccccacaagttcttagtaacaagtattgcttattgccaaaacaaattgatcttggtttatggaatactaatagctgaatggagagaatcacaaccacatgtatgaaaaatgaatcttaagatctgaaatctgatcctgctatattcaaagttaggcatttctatagaggttgcagtctgtgaacgatttaagcctccatattttctgaaagtgaaccttctcatatattttaactagtgatgatattctgagagtattgaaaactcgacatgtttggtcagggaaagagatgtaatgatgagaaagaagatgagaaatgtaatgatccatcaatatccctatatcaagatgaacttgaaggcgaagactacctcttccgaacacgcattgatgatggcgaggattaggacaagaacaacgtgagattagttgttgttgctctgtaatgttgattgctaattttagaatcattctttgtggattttggacaaaagtaaaggatggcgttgaaccacacctctgcttccgtaccagacagttaacattataacactttaaagagatgtttctatggcgcaggaatcaattagggtaaaaagattaattgatttttgttgttagataaatttcatgtgacatgtatctatatttgaactgaaactgaaagtcatcctaactaacttattcatagtattttacatttttactatctttctttttttgttgccaacagattcaattttagtttgactactactactagtaatatccaaaaaaaaacgaatcttcaaatcaaactctaattggtgattagagtggaaagaaaagaggaattgaatttacgtatgtacaaaaaagaagaaaatatccatcaatgcgcttagtattaaaaaaaactttcacaattatggcaaaaaaaacactttcacattcggaccaaaacgacgacgtaacataaatgtatcgttttgcataaaagcagtaaaagtgagagagagagagagacagataggaatctttgagcgattcgtcttcctcctctatcgccctctactcttcaccggaactgtgatctcaccggaatatccctcctttatttatcctctactcatccgttttactctctccctccgtcgatcttctctttctcttgatcgcctccgtccattctttatcatttcttaattcagaattgtgatcg

SEQ ID NO: 2975 - DNA, 3000 bp, Unknown; identical to SEQ ID NO: 2973
  misc_feature (1)..( 3000): cDNA_ID_3093197_gDNA_ID_1620619_Annot_ID_162198 3000 nt of promoter + ATG

SEQ ID NO: 2976 - DNA, 3000 bp, Unknown; identical to SEQ ID NO: 2972
  misc_feature (1)..( 3000): cDNA_ID_3052345_gDNA_ID_1620619_Annot_ID_162195 3000 nt of promoter + ATG

SEQ ID NO: 2977 - DNA, 3000 bp, Unknown; identical to SEQ ID NO: 2970
  misc_feature (1)..( 3000): cDNA_ID_2049420_gDNA_ID_1620619_Annot_ID_162187 3000 nt of promoter + ATG

SEQ ID NO: 2978 - DNA, 3000 bp, Unknown
  misc_feature (1)..( 3000): cDNA_ID_3082954_gDNA_ID_1620619_Annot_ID_162183 3000 nt of promoter + ATG
ccactgttacaagcccatttccctgcaatgatcctcctagcagccaccttcaaccacaacaccacaattagagtatgagacctgaatttaactattttatgctttagaagcagagaaagatcttaacttgtagattaacatctgaatcaacaagagctgggcacttcccaccaagttcgagaaccactggagtaagatttctcgcagccgcagccattataatgcgagcaactcttgctccacctaaagaaatactttaaactatttaaaataatgttttcctgagatcctaatcaacatttcaaagattcttgaaagaaaaggagagaggacaaaccagtgaaaaagatcttgtcccatttttgatccagtagtgccgttgtttcagggactcctccctcgataactctgattgttgtattgtccaagtattcactaaacaactttgctaaaagagaagatgctgctggagcaatttcagaaggttttagcacaaccgcattaccagctgcaatagctccaatgactggctcgacagacaatactaaggaaaaaaacaaagcaccatgaagacatataaactttaatagtttagaaattgagacaaaattgtcaataaataaaattgagcttacagaaagggaaattccaggctgaaataaccaaaacaactccaagcggttctgagactatttgtgcagacgagggaaatgttgtcacagaagttttgacctgaaaggtccaagcatagaaaaagcaagtggttttagaaaggacacatatcaatgaagcagcaaagcttgaacggtctagttaccgtttctggagccatccagttctttaactctttgattgcaagcatacaggatgattttgtattcgaaatctaaaaaacgagaaaaataccaaagagattcaacagtggataagtggaatgcagtgaagaaacgggacattgaaattatataaaaaacctcagctagaaaagcttcaagctcaggcttagaaagatcttgatacaaagcttcggtgatgcatttctccttctcatcaatcatcctagcaatgttttgaagctgagaaattctccactcgtagctcttcgttctgccagagttgaagttgcttctgagctcatctacaagcaaagctgcttcttttccactaaagtctgatgcttgctcctttaccacagcagatagtgttgcataacaagtactgattcaagacaccaaaaccgcaatgtgagagactttaagactaaaaatcatggataagactaaaaaaacatggataagtatcaactgttctcacgattatttattcataccactgtacttaaacttaaaacccactatactaaatagaaaggtaatcatcaaaaaatcagtatgtaaaaaccacttttgtgaataaaatatgtaaaatgggtgaataaagaaatgtgcttacaatttcaaccgataagggatacaagcattgctgcaatatccaccaccaccacgacgagatatccgaaaaggtgaagttgcaacatttaatctgcaacaaaagaggccattcattaaaatggtactaattagatctaatcatatcatattgaatgaccaaatcattcacagaagcatccattgctccaattaacattctagaccaaattcaacttaaaggtaactcttttatacaggaaaccgagaaaccgaaaacgcaattcacataaaaaggaaggcttgtttggagaagcagaatcgaacaagtcaatctcaaaccctgatgagcaggtttttcaagttacctggcaggagaaaaacccttggcaaaacaaagggtttgaatatgattaatctctagaagcttcgtcatgacttgggttcagttaaaaatctcaaattggagacattattggtgtttatatatttgagagagagagccagagaggagacgttgaattgaatgaagggtgtggtcggaagagaagacgtgtagaagagacgagacaagtaaatttaagcattggccccatttacagccacaagtccgctacaacaaattatttccaagaaactctgagataacgtcgtgatgaaacggctcatgctgctgttgtgattcgtgaattagaggtttatcttttgggtttttgaatgttacttaattggacggtcgatttttcaaactgggtgtgaaatgtgaatgggtcattcataatgggcttttgttttaatgtgaagccattcacacactctttgtccttcttttctattattcataactgtcactctttgttcttcgaaatagtaaagagcaaatcgattctttgttgatctgggccgtaaaatttccatggttgtgggaagtattctcgcagctgatctgggccgtcaatgctacagtttcatgtcagagagaggtcaagaatcaacacgtggccaaccatgattttaaaccaaagcaaacacacgattagaccccacattgtttgttcaccaacccccgtggaccctcctttagccgacgtgtccacgtcaatagtggtttttcttcctttcaaagtacacaaattccattctttctcattttactttttggattacgttgttgttataaactggtaaaatgaattatgaatgcaaataaatttcatttaagttttgttggcttctaatatttttttcacctaaaattctaataaactacacagccatgagccatcgtatgaaaagaagaagaaaaaaaatgtctttttctagaaggatctttcaacgactaaaaaagattttaagcttttgactaattttgtcaataatatacacaaatttacactcaattatagccatcaaatgtgtgctatgcagaaacaccaattatttcatcacacatacgcatacgttacgtttccaactttctctatatatatatatagtaatacacacacataaacagcaaaagcgtgaaagcagcagatcaagataagaaagaagaaagaatcatcaaaaaatg

SEQ ID NO: 2979 - DNA, 3000 bp, Unknown
  misc_feature (1)..( 3000): cDNA_ID_3070582_gDNA_ID_1620619_Annot_ID_162182 3000 nt of promoter + ATG
ggagatgcttgagttctgtaaagaaaagggtttgagttcgattatcgaagttgtgaagatggattatgttaacactgcgtttgagagactcgagaagaacgatgtgcgttataggttcgtcgttgatgtcgaaggaagcaatctcgacgcttgatatcatgaaactcgaggctttttatacatactcgaatactcgatttaaacactcttatgtttgtttgtgagctttttcattcgtgtgtcactatttttcatgagaaagtggtaaaagatataatgatattggatttctaatcatgaatcatatgatatatgtgttaaaatatttgcccttatgtcgggtttgagtcttactatatgaaacacaattcttcggactaaaaacagtgactgaaagcgaaatccaactacaaagtacgacttgcatattatattttattcgttaatatttgtaagctgtggtataagaaacttgatgcgagtgtttggtccttgaatcttttacaatagtatgcatcgttgacgatttcatgtttatcaaagtgagtggtaggttaaggaagactaatttagatgtacgaccgttgattataattttttcatgtataaatgttgatacacaattggtggtgcaaattgaaattacaaatgtgtgcaacttagtcaaatgcttagttggtagataaagagatgtctcttggtgctatgtcagaacctctattggaccagacaagagagcatggcgtggatatttatatttgaagtcgataattcgttacccttttgggctttatatacgattccctcttctttacaataagtggttggatgattgtttaatatttctaaaatttcagattagaaaaaaaaaaaaaaaagagaattcaaaaacaatttaaagaataaaacactatacatctaccagctatgaggagtccataactaagatatagagtaatatgttggatctgtgtcaaaacaaatattttttctcagatcattctttaagtacaatctgaccatcattcttgacgtatataatatgtgcagagttcttgggattcactaacgttgtcatcatggcatattcatgaaatatgtcgacagattaaatccgcttaagatcatattttatagctatagtcaaatatttaagatccattgtctacaataaaagatgacattatcttttatggggtatcagatcggccataggcacattattagctatcagcctccgaccaaaaaaaccaaggcattgaatggatgtatataactatataactttacagcttttggtttatagatgagacgtttacactggggtaaggatgaagtgaaaacgaaaaaaaaaaacattagacctaaaaaaaaacaagaaagagaatgaatatactttatagattgtataaacgacatcaacccgtgatcgttacgtctaggaccagccagatgaatatactttatagattgtattttttacttacgtccaaaaaatcttatcttatgtgttttagaaattgactaggtttaatccccatcatatccataggccccttttataatgcacatgtgagattcttaatgatcaccatttaaactttctccgcgtttacacaaattacgtatcttaaataactaacactcaactaaagcctttgatgaatattattattatgctacttatacacgacaagaaattgtcctaactacctacttgttgcgaatgaagcaagcaaatatgtattaagataatttatgtttatgcctaattattatcttaatcaacaaactataatttacaaaattgttttgtgtgactgttgctctctcggacaacactcgtttatttcgcatcaattattctcattcttatgtgactcactcaaaaccaaataagatggaccacttcgagccttgtttctgttatatattcgtccacaggctacactgaaagcgatgcggtcatagcccattctctcgtcgctttcatgtttgttctccaaacctttttttttctccttgattgtgctactgctttggcttctttcaattcttagatatttttaattttattttcagctataacttcatttaatatggctaaatagttttcttggtttagagtctttagactaaggaataatttcatgaccatatttttaacttttcgattttcgaaagattcagtttaggcctaactcagtttgccaacttgtgtagtgtgtgaacaatttacacaaaaatcaaactctgcaaggtcatttttccaaaattttgattattaaaaaaataaaaaaaaagatgaggataactgacatgtcagttttgtggtgtcccttgttttgtctttgattaatgtatggttcatttcatacgagaccctctgttttggcaaacctataacgggttttctcttataagttctaagatgagaaagtactacattgagatataattactcaattacatactgtacttagtcgtaataatagtcggtgattatccttttaaactttctatggaccgaaatgttccagaaaaaaaatgcaatagtttagacttttaactttattttattagcttttcttcatgtaaaccaaaaataacccaaaagcaagcggtaataattattctgtcccccatgaattgcttttactttagtgaatgaagtagattttaaatgcgaaaatatggctgctgctgctcatttacagttttacactaatgaataaatatgatcaagaatcattgattctacaccttgtcccatgtcaagtctagtcaaaagcttattttatcaactccggctctttaagattctctctctctctctctccttcaccatctcagagattgctccactatctcatagatttggtgaccagaacaacttatctcttgagtggttcaacctctatctctctctctttctgccatgaaaatgcaaagccaaatgtaatagttagagagggagaaaccaagaactgaaagaccatg

SEQ ID NO: 2980 - DNA, 3000 bp, Unknown
  misc_feature (1)..( 3000): cDNA_ID_3070589_gDNA_ID_1620619_Annot_ID_162179 3000 nt of promoter + ATG
tagacaaagttatcataatcgatcaagacgttaaaaagaaaacactaaaaaacgaaaaaaagaaaaagaaagctagttagggttttgattcatgggctcattcaaaagcccattgattctccttacgaacagcttcttcttcctcaggtgtaaaatcattctcaatgttgaaagttgaacgaatctcctctggagtcttgcctttgatcatgtccgcaacagtttggcatgtgagatcaagcaagctttttatgttgaggtaattcgcagcaaggatgagttcaaagatggtggattgttcgagatccatgaacttctcgtcccagttgttgagatcctcttcagagataggattagcctcgtcgacgtggtgtttcttgcagtactcgatcactttcacaagaatcttgctttccacgtttgcaagagggattccatcagcaacgcaatcgtcttcaaccatatgcgctatggtctgcgattggattgctaccgcttcttccacctcaaacgactgaccatcggagctcatcaacacgatcatcttcgaagacattgtgtgttccttgtggaggaggtttttcactgtgaagcaaatttgatgaaagatttaagaatttagagagcgaacaaattgtgttaaggtgatgaagttgtgaaaccctatgcgtctttgtatttataagccctagctagagtcggtgacaacaacatattataattcaacgcgtggtacactacggacaaatattttatttatatatataataattttaaattttataattttatatttagtaataaagttatataattttatattaatcttgtaattaaaaaaattagtgatgataaaataataaaataaatattttacctgtgttatatcaatccaaacccgtctcgatgtatttcctatcaatccaaacccgttctgctatacttcccgtctcatgatattttaattttttatgtttaaatattaataatgtttcataaaggtaaaatatatcactaatattctttaaaaataataattgtttttgactttaatgtgatgacattctttgtaaattcttactttactaacacaaaagtactttaaaaagtacttcaaaaattttaatatatataatgttattttttggtaaaaattattataaataaatatttaatttaatcataatttgggattgatatacttgtgtttttaactaactattttttattttaataacctaaatttaggcatttgttaatattttttgaatctgcaatatcaacttaatacatgtacaatttatttttgccaaaaaagagcaaaattatttagtacaattgaaacgaaaaatgttgattgagaaataattagggtttcaaattttattacgcaattatttttttaatgaaaatattaaagcatatattgtaatataagatttgattcattttattaactgaaaataaatgatgtaaaacgaaaaatcagggtgattaatgctaattggaaagatttaaatgttttttttttttttaatttcataaattttagtaacataatagattttatatttatatttaaaaataagtttagtaaaataataaatgtcaatggcatgccatagtaaataagtgctaagtgaagatttatttgttaaagtggctgcaaaaatgtatatatagatagttattgtttctaaaaaaaaaagcaattaaaaaaataacgaaatacttattttccttaactgaaagaaataagtaattttatgttgctgggcctttatatgagttttattatgctgttgtaactttaccatggttgggttaaaatgaaagaatgaaaaaaaaaaaaaaaaagtaaattaattgtcgactcatttttcataaaaggtaatttcagttgagtaaaccaaaataaaccaaaagatatacgaagattcaacagtacacccatccacgcgcggctgcgttgaatactatacggggggtgtcaacaggtcgacctaccaaaaacaatgcatctaagcagttgcaaagacacactaagcaaatctttcacgtgcaataaattatacttacgtcacagccatcagtatatcctttcaaatattcctcctcacaattgatgtatttacatgtgtgtaagttgacacaaacaaatcacttgccctgaaaactaaaactctcgagttttttcaaaaagaaagtccaattcaatttaaatttgaagtcttcaatttgttttcaaatactaaaaagtgcggctctccctctagtgtatggcctcgtttactagtagtgcggggaccttttaatcttttattactacttgttgcattcaagcatgaagcatggacagacactcccttagaaagaaaaacaaaattatgaaatttcctgcttcattttgaaatttctgcggaaacttatgatttggatatattataaacatagtaactcctctacattaaaaaaaaacattacaagtcttcttttcatttgggacataaatgttaaaatcttttatagatactgtatttaagtcaatgatctgattatctgacagacatcgtgagactcctcatgccatcaaaataaggcttcttcaagatctctatttgcattgtcaaaaatcttcaaagctgtaaataattttcgagtaatcttttgttctcggtcagagagatatgtaataaataaagtttacttttcctcaaagttgtacatttttttttattttttgttggtttggcaatttttccggtaaactatgcaaattctattcgccgaaacattttgcagatcactaaaccaaactgaatcacacgcgcgagccaaatgcgcgtgagatttcatcaccttcgtcaaaatactatcacatcacaccaaacccctgagccgactataaaaccttttagatctctccctcgtgttataactccgccaccaacaatatttttctctactcaattcactcacactccaaaagcggtagcaatg

SEQ ID NO: 2981 - DNA, 3000 bp, Unknown
  misc_feature (1)..( 3000): cDNA_ID_3070593_gDNA_ID_1620619_Annot_ID_162177 3000 nt of promoter + ATG
attcgccagttccctgtctgaatcaggagaggttaaagtggaaggaaaggttaaagacggagtcccgcatttgacaaaggttggatcttttgaggtcgatgtaactcttgaaggtagtatcatactgtgcaggcaggtggatcaacctggtatgatcgggactgtcggaagcatccttggagagtctaatgtcaatgttaacttcatgagcgttgggagaattgcaccgaggaagcaagcgattatggcgattggagtagatgacataccaagcaaagagacactgaagaagattggggaaattccagcggttgaggagttcgttttcctcaagctctagtttggtgtgttgttgattcttgaatcttaaatctcaccggtgaagatttgatgttgtttgttggtttaggcaataatgttattttggctttcatacagttttggtaacgttgagagtagtgtctctttgatgtttcaactttatggtttctattacttgagtgcttctttcttctctgaatatttatttcctgaatattagtgaccacaaattggtttataacccaattgaacgaaccgatgtaactatcgtagagaatctgttaattaagccaatccaatttttcaaaattggtttggtttggttcagattaggttcggtttgctctaagagatgcagttgtttgtgaaacgccaccgttttggaaaactgtgtagctcgaaaagatacgaacttaatgagtggagagaaaacacgtgtcctcagcttgaacagataattctgcgactcttgagaaaggaagacgaaggaaggagaatagtagaagaagaagaaagggagagtcttgtgatatctacgtagaaggaagatggccttatctcaagtgtctgcgtctctcgccttttctcttcccagtactctttctttctctcttcgctacccttcttcttcctctagttgtacaattgtctctataatgtatgtatctgactagtttcggatttcatgtttccagattctggtgccctaaagctagccacaatcacaaacccaacttctacatgtcgggttcatgttccgcaacttgctggaatccgatccaccttcgcttctggttctcctctctgtacgtcttccttgcccctgagaaaattcttcaattctctacattttgaagtttagtttgaaattgggctcaaattttgatatttctgattactgaattgttcatatatagtttggttatctgaaatatggggcaacaatatttatcataaagttttctaattttgctttctgcattgtctttgttagctgagtaaatccatggaaaaattgaaactttgtttctttcgtttttgtatgttgtgtgtgtccgtttcagtgccattgaagttgagtatgacccgtagaggaggaaacagagcagcatcagtttccataagaagtgagcaaagtacagaaggaagcagtggtttggatatatggcttggtcgtggcgccatggttggttttgcagttgccattactgttgagatttccactggaaaaggacttcttgaggtaatcaaacatcataactgatattgttgcttatataaaagttgaaagtttgagaaatgtaagagaagtagaataacttaagatttgatttgtcttcttatttcagaattttggagtagcaagtccattgcctacggttgctttagctgttacagcattggttggtgttctagctgcggttttcatcttccaatcttcttctaaaaactgatcgacaagaatcttgttttgtgatgctgccgaggatcattttcttgtattaagaatcttgtattatatatcactgtaacttctacatccatcagtggagaatcttacattcttagttttttttggcaacatacatgatctatacatgtcttttggccaaatcttatttttatatttttaatacatgatctataacatgtattaagtttgaaaacataacaaaatttttgtaacaaaaataaccaaaatattatttgaaaaagaaatatccaaagttttaatagtaataatacaaaaatagaagtttgaaaacattttttaataaataaaaaagtgttaaaaatttatcacaacgctaacaaacaaattcacctaaccgtttacttttagaatcagaaataaacaacaaaaataaactttcagaaagttgcagtttcacatatgttacaaacatcatcagattctttgaaacaaaacagtaaccaagaagtttcttatgcatagctttgttcaaaatcaatactttggagttagtcaattaaattcatatgcaaatctctgaccttttgcttttgtaagctaaatgcattgaaaaaagggagaggctctggatcagtgtgctcatggtgggccggcccatcactatgggctgtctaaaacaaaaacaattttggaaggcaaaaggtataataaccccgtccctgtatgttgggctaggcctgtccagtatccaccaccactaactcaattcccccattattacaaatttacaatctctccaccaattggccaacaatggagtatatattaactataaagcaaatcataaagcttctatagtaacatcaagctatgaatatttttatacgttctgcaagaaacgtgacatcaacattttgtgattaaaccgattcttaatttgtccctttctatcatcaagttaaaaacgtgacatcaacactttgattaagagaatcaagaaacgtgacgtcaatattttgatgaagcttgtgaaatgtggacagctattttatcctcgatgatattcagattgttttaataaaaatcatttcagctatttttagtcaatatagacggttttgccaaactcaaaagtcaaaagtcaaaggtcaaaggagtccattatataaaccatagcttaatcatttgattactaaacactagtataaaaaattgaacccgttaaccggcgacccgaaacaatg

SEQ ID NO: 2982 - DNA, 3000 bp, Unknown
  misc_feature (1)..( 3000): cDNA_ID_3093183_gDNA_ID_1620619_Annot_ID_162212 3000 nt of promoter + ATG
tgtcagcaaaaacgacatcgtttaagctcgacctgttcgtctcgatgtttacgctttgattagttactatttttctgcaattctgtttcttctctgtacatcaccaacaacatttaaattccaatggcgcattttaaatgtcaataataaatcgagatccgtaatttcgaagctacaagcaaaccttcttgtgcttctctaatcattgcgttttccttttaaagagtttctcaaagttttcccttttttttgggcataaaattgtttccttttcctcctatcagtgtgtctgaaaaaaattcaatgtctttatgttctgttcttttctgatctctctgaatctctctctatcgcgacagccatggccgaagacccttctttcctccccaaggtacctttcgttctgtgttctgtgagtggtgttgatctgattagctgatttgttctctagtttcaatcttagctcttagttatttttttgagttatttcatattcttatactctaaatctataaaacttgattctttcagcattataaaataaaaagattctgagattttcttgattttatatagacgaatctgtggtacccatttgacttaaacaaacaaacaagctaattaacacgaggacatataaatgtattgttttttttttttaatgcaggatggttttgtcttgaagcttcctaaaaagtcatcacttgtattgagaatggtcgttctcctctttgtaatggtctgtgctgtgtacatttgctccatttgtcttaagcaaataggagttagtccaaactatggtttcttgaacgttgaagtgtttgagaggccttgtcctgagcctaacatcgaaccgtgggacattccttttgtgcattaccctaaaccaaagacatataacaggtaaagagagatacaaaaagtttgagcctttatcatgttttgagtctaaaagcttgtattgattagtgcttttgtgggttttgaatgttttagggatgaatgttcttgccacccggttaggtactttgcgattctatcgatgcagagatctggtagtggctggtttgagactttgttaaacaatcatactaacataagctccaacggggagatattttctgtgaaagataggagggctaatgtttccaccattttcgagactcttgacaaagtctataatctagactggttgagtagtgcctctaagaacgagtgcacttccgctgttggcttcaagtggatgcttaatcaggtaaagtgattgttattcacggacactgtgacatatctttagtctttcttactcatatgttttcgactcgtctctgtttccatttgagtgcttgaacaaagagattgctatattccatccttatctgttggtcactgttgcttataactaactacttgtgaatttaaagtgataagatcttgttctgttttctagataagagcagcaacgttttcgttttacaaaagatgtgtgttgagaataggacaatttctcaataatgtgtttgcttttgctatatactttgtaaagttgataaacacgttgcagggattggtcttagagaataggacttcttttcttccctcagtgctcttcacttataagggagtttccgagtcaatgtcatttgaaactaacctgttctatttaggtagcttctttctggttgttgatgttcaaaaaagttgcctgaataaaagtttaggttgaaatagtctgtgatttgatgttggaggaacggaagatagctgatgttcccttcttatttgatccataaacctcggttctatgtagcagtaattgaactgataaatgatcacagttattttatctgatgatgaattattaacattgcagggtctaatgaaacatcatgaagaaatagtagaatacttcaaaacccgaggcgtctctgcgattttcctattcagaaaaaacctattgcgccgcatgatatcagtactcgcaaactcttatgacagagatgctaagctactaaacgggactcacaagtctcacacccattcggccaaagaagctgagatattagcaggttacaaaccaatgatcaacacaacacttttaataaatgagctgagacagattcaagaaatgactttgaaagctttgacttacttcaataccactcgacatatccttgtctactacgaagatgttgtcaagaacctcacggtaattattacatatttttttattgaactagttccagttactgattgtttattatcttatatgtgtttttgaatgaagcagagactagacgatgtacaggagtttctaaaggtaccaaaacgtaagttaaagagtaggcaagtgaagattcatggaggttcattgtcaaaacatgtacagaattgggaagaggtcatgaccacacttaaaggaaccaatttcgaaaatttcttacaccaagaattttaatttttttttgtatatatcagaccaaacaaacccttgtaggaaagttttgtttcacttgccttttttcttttttgctgtttgctgtagggtttggcattaattctcttaaatatgaagaagatttaaacaaaatttcgttgaaaattgtttcttcccctgaagagattttttatctaaatttcttaaaagcagaagaatcacaaaattatagtgaaaccgaaagaaaccagagcgatttagtttgatttattttgttcaattcaacatcaataacaccaaaccggtaaaaaccggaaggctaattcgagattgattgatttaaaccggacaaaaccactcaagccgcgtgaccgagtttccaacacattgcagattccagtcccaaaaagaaaagagagttaaaaatgcaaaaacggtgaaggggaagagaagcgaaattgggggattgggaatagcaacgttttgcaaatggtctcttctttgtagctgcaattgcaaagaacactgagagagagagagagtgtgtgtgtgacctttgagag

SEQ ID NO: 2983 - DNA, 3000 bp, Unknown
  misc_feature (1)..( 3000): cDNA_ID_1819067_gDNA_ID_1620619_Annot_ID_46984 3000 nt of promoter + ATG
taaaagtcaatatttgctctagaccctccaattttccgtaaaaatctccataaaagtctctgtccctccttgccaaccaaaaactacaaacacacatcatccttcgactatcttattcatagctatcaccacccaaaaaagaaatcaccctaatcaaaaaaaaaaaggcaaggagagattttatcattattctattttcatattttttgaaaaaactcaagcaattgacttttgtgataaagatttgaagaaagagatgaggaacgaaacgggtggtaccatggtcgttgatctccaaaccgatccatataacaacattcacagtcgccataatctgagctacgaccttagcgagggtcccaaacctaggcctaaatttggtaatatctcgaaaactgaccacgacgagatattccctcccgacgatcccatcattatcaacagcaacgtgactcaccagcggtttagcagcgtctcggcctcgaccatgagcagcggtccggccagcggagaaggttctccttgcgtaatgtcgccttgggcccgcgtgtcgcctccttggggtgcagatttcaacgaagacaatgtcctcgagaccaacggtctcattggatctattgttagaaaagaagggcatatatactcgctagccgcttctggtgaccttctctacacgggctcggattcgaagaacattagggtttggaagaatttgaaggaacacgctgggtttaaatccagtagtgggctaatcaaggccattgtgatattcggagaccgaatctttaccggccatcaagacgggaagatccggatttggaaggtttcgaagagaaaaccaggaaaacataagcgggttggaacattgccaacatttaaatcaatggtcaagagctccgtcaaccctaagcatttcatggaggtacgccgcaacagaaactctgtgaagacgaagcataacgacgcagtgtctagtcttagcttggacgtggagcttggattgttgtactcgagttcttgggacacgacaatcaaagtgtggagaatcgcggattcaaaatgtttggaatcgatacatgcacacgatgacgcgataaactctgtaatgtccggttttgatgacttggtgttcacgggatccgcagatggtactgttaaagtgtggaaacgtgagttgcaaggcaaaggaacaaaacatacgttagctcaagttttgctcaagcaagaaaatgcggtcacggcgttggccgtaaaatcacaatcttccatcgtatattgcggttcttcggacgggctagtgaactattgggagcgttcaaagcggtcattcacaggcggaatactcaaaggccacaaatccgcagtgctttgtctaggtatagcggggaacttgctgttgagtggttccgccgacaagaacatatgcgtatggaggcgggacccgtctgacaagtcccatcagtgtctctctgttttgacgggacacatggggccggtcaagtgcctagccgtggaggaggaacgggcttgtcatcagggagcaaaagcctcagtggccgagggagaccggaagtggattatatacagcggaagtttggacaagtcggtgaaagtgtggcgcgtgtcggagagaatggccacgtggaaggagatggacgagccagcagcatcttcagagcggaagagctcttcgtctccgcatgaaggaagtggcgcgtggagttcacgcaatgtggaaaaataagagtggaggagcatagtgtgattatttacgagagtgtcacgtcgtcacgagagccatattcacgccgggaaagagacagaggattgatttcatttttatgactaagtcaacggagaggtttgtgccacgctagctggtgtgagaatcaaagtcgggttaatggttttcacgtaatgagttttttggttatttttttctttaaaaaaaatgtttgaaacgaaattgaattatttatttattttccataaatttgtaagataacaagaacaaagaccgaatcaaacatatatatttgttttctttagtggtctatgtcgtggttgcaactttataacttggaattttggatgagtcgttttcctcttcattagaattagtctttctatattattataatataggatgttgatattttttaattgattttccaacctggaaatatccacccaaagttgttagaaattactaatctttgtgaatttactgttaccatttaaacctaatctatctttatgagcaaaaaaaaaaaagtcttattcaatcacttaaccgaaaacatttccacaaccgggatcatcatatatgtctctgcgcctctctttgataaatacttaaatagggtcaacacctccggttttctattaaccgtgtaattcgggttatgcgaacattattgcaggaccgaagatatatttacgaaattgccctctctctttgactccatcaacgcctttcgcaacgcatcgttttcaactcccctaacccgcgttgacggcaagaattttcccggaaaataactcatttttccttttgattgcagagaaaataaaaaacaaagagaaagtcttcccctttttttgtcaagtcctcgtcttttactagtgtatacgatccaacccatctttctgtctttcttctttttgtttacttcttctgcaaattcccttttcccggaaaatttatttgctgatttttcttccttccatcgccactttcctggaaaaaaaaactaaatttcgtctctttctttaagctaaaggagctttctgtgatcaattttttctatatttctgtagttgcgttcttatttcacgcgctttgtgatttgattatttaagccactaatggcttaggatctgtatattatcacttcatgaattctcgttttctcggataagttgttaagtttctaaattagggaattttaggaattagggcttttttgggtttgtatgtgtgcttgattgggtaagaag

SEQ ID NO: 2984 - DNA, 3000 bp, Unknown
  misc_feature (1)..( 3000): cDNA_ID_1819055_gDNA_ID_1620619_Annot_ID_46988 3000 nt of promoter + ATG
actttgcgattctatcgatgcagagatctggtagtggctggtttgagactttgttaaacaatcatactaacataagctccaacggggagatattttctgtgaaagataggagggctaatgtttccaccattttcgagactcttgacaaagtctataatctagactggttgagtagtgcctctaagaacgagtgcacttccgctgttggcttcaagtggatgcttaatcaggtaaagtgattgttattcacggacactgtgacatatctttagtctttcttactcatatgttttcgactcgtctctgtttccatttgagtgcttgaacaaagagattgctatattccatccttatctgttggtcactgttgcttataactaactacttgtgaatttaaagtgataagatcttgttctgttttctagataagagcagcaacgttttcgttttacaaaagatgtgtgttgagaataggacaatttctcaataatgtgtttgcttttgctatatactttgtaaagttgataaacacgttgcagggattggtcttagagaataggacttcttttcttccctcagtgctcttcacttataagggagtttccgagtcaatgtcatttgaaactaacctgttctatttaggtagcttctttctggttgttgatgttcaaaaaagttgcctgaataaaagtttaggttgaaatagtctgtgatttgatgttggaggaacggaagatagctgatgttcccttcttatttgatccataaacctcggttctatgtagcagtaattgaactgataaatgatcacagttattttatctgatgatgaattattaacattgcagggtctaatgaaacatcatgaagaaatagtagaatacttcaaaacccgaggcgtctctgcgattttcctattcagaaaaaacctattgcgccgcatgatatcagtactcgcaaactcttatgacagagatgctaagctactaaacgggactcacaagtctcacacccattcggccaaagaagctgagatattagcaggttacaaaccaatgatcaacacaacacttttaataaatgagctgagacagattcaagaaatgactttgaaagctttgacttacttcaataccactcgacatatccttgtctactacgaagatgttgtcaagaacctcacggtaattattacatatttttttattgaactagttccagttactgattgtttattatcttatatgtgtttttgaatgaagcagagactagacgatgtacaggagtttctaaaggtaccaaaacgtaagttaaagagtaggcaagtgaagattcatggaggttcattgtcaaaacatgtacagaattgggaagaggtcatgaccacacttaaaggaaccaatttcgaaaatttcttacaccaagaattttaatttttttttgtatatatcagaccaaacaaacccttgtaggaaagttttgtttcacttgccttttttcttttttgctgtttgctgtagggtttggcattaattctcttaaatatgaagaagatttaaacaaaatttcgttgaaaattgtttcttcccctgaagagattttttatctaaatttcttaaaagcagaagaatcacaaaattatagtgaaaccgaaagaaaccagagcgatttagtttgatttattttgttcaattcaacatcaataacaccaaaccggtaaaaaccggaaggctaattcgagattgattgatttaaaccggacaaaaccactcaagccgcgtgaccgagtttccaacacattgcagattccagtcccaaaaagaaaagagagttaaaaatgcaaaaacggtgaaggggaagagaagcgaaattgggggattgggaatagcaacgttttgcaaatggtctcttctttgtagctgcaattgcaaagaacactgagagagagagagagtgtgtgtgtgacctttgagagatggaggaaaaacgacgcgattctgctggaaccctagcttttgctggtagctctggagattctccggcatctgagccgatgccggcgccacggcgacgcggcggaggtttgaaaaggaaagcgaatgctcttgggggttctaatttcttctcttctgcgccgtcgaagaggatgttgacgcgtgagaaggcgatgcttgcttctttttctccggtacataatgggcctttaactagagctcgtcaggcgccgagtattatgccctcggcggcggatggggttaagtcggaggttttgaatgtagcggtgggtgcggatggagagaagcccaaggaggaggaagagaggaataaggcgatccgtgagtgggaggctttggaggctaagatcgaagctgattttgaagcaattagatctcgtgacagtaatgttcatgtggtgcctaatcattgcggttcgttcgttcttcttcttcttcctgtttttggttgagactaaatgcaaaatattgatttcgttttacatttgttactgttttgctttgcaaattttgaaactttatgtggagagactttccaaagtaggcaaagtaaagaactttaggtagtctaggatttatgtatcacttcgtctggaaacaaggagagatttggaattgggtttggttctagaaatcatcatatggcggatcaaagtagaatgtgcatgctcattttatctagtagaatctcattggaaaaaacttaggctatgaactgatgctcctagtccttttcttgtggtaatatgatatctaagttagattttgagttgttggtattgttgatttttcacaacttctcaccctcgcatttatgataaaaaggagttgtttttaatttgggttcctgtacttcaaattctttgaaggttggttttcatgggaaaaaattcacccgcttgaggaacgttcattgccctctttcttcaatggcaagttggagggtcgcacttctgaggtatatagggaaatacggaattggatc

SEQ ID NO: 2985 - DNA, 3000 bp, Unknown
  misc_feature (1)..( 3000): cDNA_ID_1819223_gDNA_ID_1620620_Annot_ID_46991 3000 nt of promoter + ATG
agaagcaaaatatcaccgatttgaagatttgtccttaatatagcaagagatggattcatctcacaacaagacaaaactgaggtaaccgaccaaatcaggaaagataagaactttaacacgcaaactattatttctaacactaatctcgaaacatcgaagctaattccaatgtacagaaaaatccgcaagcctctaacctcgggtgaaggaaaattcggcgttgaacactacacaacatgtggaatgaccaagacggaagaacttaaccgcaatgtacaaagtcacgtgaatcaatcaataccaatgagacgaagaaaatgatgcaaggagagagagatagagagacgaattatctgcttcgtgtgagcaatttaagaaagccgtgtacagagaaacgtagaaggagggaaacaaaaaaacagagtaaatgtttcgtgcggggaaattaggctcagtggcattgaatgcttaattgagagggatcaacatctcaatatcacgcgcgcgagtgtaagcataggtttacgaaactcgctttttgatggatacacgtggatgtgcagtgtgtccacgtagacgaaggacgctgacctcatggcgtaacgacttgtctacgtgtcacttcccttgacatgtcaaaattttagccgtatgcgtttaataacattatattggatcatgttcaattcatctatgcaaacatttttttagccgtatgagtttccgtatgcgtgaacggtgaaccagattgtgacaagatttgcggaaccttagaactaaaaggatgcatttgggtctacctaagcaaaagactgagtttgtgggttaagcggcattattacgtttcgttccttttccttcgattagaaaaatattaatgtaactcgtgtttcgtgaaacgagtcttttgagggtcaacgtactaagttgcttctaacccaaagaacaaacagttgtagtattagtatagtgtaattgtgtccttgtatgtagttagcacatgtgattctaaaaaacttgtgacaagaagtacctaaatatgttgttgattcaagccaaataaagcgtcttttgagctttgtttttcatagatgacaatttgatctaaaatgcttagagagttagagggaaccttttgcctacgtgttttagaacaaagaacataagtgtggagcccttgttcacattttcttagtttaaatattgaagatcttattctgttctcaagctctcatatctgtggtaactttcggcccattgtcgatcgagaaaataaataaaaaaactatacaaaatatggaagaaggaaatgtcagtaacatgttgcaaatgatcatactctttaataactttttcttttgagcaaacactcactctataatatctataagtgtaaatgatgacaaaaaagggtctataaagtataaaaaatttccttcacatgcacatgcccaacttcaagttttgtgtatgatgtttctttaactttttattagtggttatttcccaacttgtgtttgtttggaagcaattatttcaaaattatataaattcttaactgaatgtttgtcgctaatgttataaaaaaggtagtataaaatatgaaattagtctcgtttgcttggttgtaaactacatctatgtttattcatgtgtatattatataatgtacatctagctaacagacaatagtcatgagtctatatgtatataggagagtcgagcctttataatgaaagaaatagatatctacgttcttttacatttgacaagaatcaccagatatacataaatcggaaataaattaattagtgttaaaaggcaactatatagtattaaaatgctcattatttttagtacgtagttggaaaaatgtatgtgttccagtttacttgatttcattttttcatcgttatcgttaggacaaaatcttgtctccaaatcttgttttattttttcccacaaaataccaaaaaatatcgtttagttttaaagttaaatcttgtttaaaccgcgcgatcatgtgtatcgtgacaatatatagttatatactagtatatgttttgtaaggttccaataatttagggtggcaagaattgaattttaataatcctaatggacagccaggtatgttggtcgtcgaatctcgaatcgactgaaccatcatatatagaagatttgataaatataactgagaaaataaatgcaatacaaaaatgaaccaccctaaacgtataatttacaagatagaggtcaatgatatgattagagagcctaattaaataagggacaggtattggaagttgaccaagtaaaaataagtatattaaaagtcaaataaaacatatattccaacatcaacatcagcatccagtgagaaacgttccttctgaaatgtttttatttgcaaaaaagaaagataaattgtcgaaagtgtttagggtttatgtttgggtgtttacagcaaacaacggtcccacgtataaacgtgactggtttgcgcgtttgaactgatgtcatgactgaccacaaatagatattcgccacgtgtattattacagataagtcatgacggccatgttgtgggtccctctgtagctgtttattattcattcaccactttgttgctgtttaatttggcgctgcgccgagccgacaaccaaaagatttttctctttttctgttgtcttaatgatgtcataccaaataatcccagcattgtagatttgtactaatatttttttcttagttcgacccattttattaccctaaaatatagacacaaaattgtgaatgttgttaatatgttcttttgtagtaaagacaatcaagtactctgtttttcttcttttcttttttgacataaggatatacatttttcagctttaaccaattggttggttcagatttctaaatttaagtgaataaatgaccaaaacgcttttaaaaaaataaaaatcaaaacgaatttcatttggttcttttgatattataaccatg

SEQ ID NO: 2986 - DNA, 3000 bp, Unknown
  misc_feature (1)..( 3000): cDNA_ID_1974423_gDNA_ID_1620620_Annot_ID_46992 3000 nt of promoter + ATG
ttcacaattttgtgtctatattttagggtaataaaatgggtcgaactaagaaaaaaatattagtacaaatctacaatgctgggattatttggtatgacatcattaagacaacagaaaaagagaaaaatcttttggttgtcggctcggcgcagcgccaaattaaacagcaacaaagtggtgaatgaataataaacagctacagagggacccacaacatggccgtcatgacttatctgtaataatacacgtggcgaatatctatttgtggtcagtcatgacatcagttcaaacgcgcaaaccagtcacgtttatacgtgggaccgttgtttgctgtaaacacccaaacataaaccctaaacactttcgacaatttatctttcttttttgcaaataaaaacatttcagaaggaacgtttctcactggatgctgatgttgatgttggaatatatgttttatttgacttttaatatacttatttttacttggtcaacttccaatacctgtcccttatttaattaggctctctaatcatatcattgacctctatcttgtaaattatacgtttagggtggttcatttttgtattgcatttattttctcagttatatttatcaaatcttctatatatgatggttcagtcgattcgagattcgacgaccaacatacctggctgtccattaggattattaaaattcaattcttgccaccctaaattattggaaccttacaaaacatatactagtatataactatatattgtcacgatacacatgatcgcgcggtttaaacaagatttaactttaaaactaaacgatattttttggtattttgtgggaaaaaataaaacaagatttggagacaagattttgtcctaacgataacgatgaaaaaatgaaatcaagtaaactggaacacatacatttttccaactacgtactaaaaataatgagcattttaatactatatagttgccttttaacactaattaatttatttccgatttatgtatatctggtgattcttgtcaaatgtaaaagaacgtagatatctatttctttcattataaaggctcgactctcctatatacatatagactcatgactattgtctgttagctagatgtacattatataatatacacatgaataaacatagatgtagtttacaaccaagcaaacgagactaatttcatattttatactaccttttttataacattagcgacaaacattcagttaagaatttatataattttgaaataattgcttccaaacaaacacaagttgggaaataaccactaataaaaagttaaagaaacatcatacacaaaacttgaagttgggcatgtgcatgtgaaggaaattttttatactttatagacccttttttgtcatcatttacacttatagatattatagagtgagtgtttgctcaaaagaaaaagttattaaagagtatgatcatttgcaacatgttactgacatttccttcttccatattttgtatagtttttttatttattttctcgatcgacaatgggccgaaagttaccacagatatgagagcttgagaacagaataagatcttcaatatttaaactaagaaaatgtgaacaagggctccacacttatgttctttgttctaaaacacgtaggcaaaaggttccctctaactctctaagcattttagatcaaattgtcatctatgaaaaacaaagctcaaaagacgctttatttggcttgaatcaacaacatatttaggtacttcttgtcacaagttttttagaatcacatgtgctaactacatacaaggacacaattacactatactaatactacaactgtttgttctttgggttagaagcaacttagtacgttgaccctcaaaagactcgtttcacgaaacacgagttacattaatatttttctaatcgaaggaaaaggaacgaaacgtaataatgccgcttaacccacaaactcagtcttttgcttaggtagacccaaatgcatccttttagttctaaggttccgcaaatcttgtcacaatctggttcaccgttcacgcatacggaaactcatacggctaaaaaaatgtttgcatagatgaattgaacatgatccaatataatgttattaaacgcatacggctaaaattttgacatgtcaagggaagtgacacgtagacaagtcgttacgccatgaggtcagcgtccttcgtctacgtggacacactgcacatccacgtgtatccatcaaaaagcgagtttcgtaaacctatgcttacactcgcgcgcgtgatattgagatgttgatccctctcaattaagcattcaatgccactgagcctaatttccccgcacgaaacatttactctgtttttttgtttccctccttctacgtttctctgtacacggctttcttaaattgctcacacgaagcagataattcgtctctctatctctctctccttgcatcattttcttcgtctcattggtattgattgattcacgtgactttgtacattgcggttaagttcttccgtcttggtcattccacatgttgtgtagtgttcaacgccgaattttccttcacccgaggttagaggcttgcggatttttctgtacattggaattagcttcgatgtttcgagattagtgttagaaataatagtttgcgtgttaaagttcttatctttcctgatttggtcggttacctcagttttgtcttgttgtgagatgaatccatctcttgctatattaaggacaaatcttcaaatcggtgatattttgcttcttttttttctcggccacagattaaaatcgtcaaattatctgatttttgatgccctgaagctttagcttgcatctgtagtcatttgtcaaagataattgaacagaggctttctatattcgtcgtcaagggtttaggagattctgggttttggcgtgattttgaggggaaagattgaaactttccccgtgaatggtaagacagtgagag

SEQ ID NO: 2987 - DNA, 3000 bp, Unknown
  misc_feature (1)..( 3000): cDNA_ID_1378208_gDNA_ID_1620620_Annot_ID_46993 3000 nt of promoter + ATG
ttcatctcccaaaaagctcctagatgatggcttgtcctgtttgattaggctggtgatggtttactcaaagaacagactcttgaatgttatggaaaaaagaacggggaaatggttttcaacttttcgtactattatcaatgactcatagcttcttacctgaaatccctttacctgaatatttttccacttaagtttttttattgttttgttttctacgctctcaattttactctgcctgtctgtacctcttgcaggaatggtctaaacaaggatggtaagtatgcatttgcggagatgatgaccgaagacgtagagacttgtagagatgaacgatgctaccggctatggatcaacagcctcgggattgacagttatgtcaataatgtatttgaagatgttagaaatgggtaatctttattttgagcttatagtaaatcaagcaattagtagaaaattttcctgcagttgatgacgttgcatttggaaaatactgaaaacgctctttggtcctgatgccttttgtttgttccatttactattttatgcagatggattcttcttgaggttcttgacaaggtctctcccagttcagtcaactggaagcatgcttccaaaccaccgattaagatgccgtttagaaaagtagagaactgcaatcaagtcataaagatcgggaaacagctaaaattctcacttgtaaatgtagctggaaatgacatagttcaagggaataagaagctcattcttggtaatcattacccgagagctcatgtttctcttagcttgatacaaaaacatgatcgccttgccttacaaactggagatttatatggttgtgtatctcaggtctcttatggcagttgatgagattccatatgctccaacttctcaagagtctcagatctcggacactaggtaaagagatgactgatgcagatatcctcagctgggccaacaggaaagtaagaacaatgggacgaaaattgcaaatcgagagtttcaaggttcctttctttacaactacttcaaacacttaccacaatagtattatataaagtatgtccacctatcaccttctagtgaatcaaattaaaattctccaggacaagagtctatcgagtgggttattcttcctcaaccttctatgggcggttgaaccaagagttgtgaactggaatcttgtcaccaagggtgaaacaggttttcactactctttttactaaggtatagttacttactccgtttacctgaatcaaagcttatttgattattatatggttattgaaacgtacagatgatgagaagaggttgaatgctacatacatagttagtgtcgcaagaaagctcggttgttcggttttcttgttacctgaagatatcgtggaggtaagaactgagagactataatgtatcatcatccgaaatagcaattgctcagatgagatgtgttttggtatgttgtgacaggtgaatcagaagatgatcctaattttaacggcaagtataatgtactggagtcttcagagacattcacgggagagttcagattcgtcgtcaactcagagcaccacaacgacgtgcaccagcacagcctcgtcccctgccccatctgtcacagaagaggaggaagtctcctcattgagcggtgaagtcacgagcttggccgttggtgatgcggtttctgaaatcaccacggtctcagaggaagcatccatcgaatagagagagcgagatcacatatatactgatatacatctcttgctatagcaaagtagctgttataatagtgacttctctgtaatcttttgtttttttgtttcatcaactaaaattaccaaaaataataacaatgttacaaacactcaatcacatcgagaaaagtaaagtaaaattgtgaaaatttgtttagtacttaaaaagttaggaggaggaaaaagtgtacatcttattttgaaaacagacactacgcaaacaaccatggatcagacgacgatgatccacaacagtcaaggcaaacaagagatagatagctcaacagacgatgaagatagagaagatggaacgagacatgcagacaaaagaggacttgaaaaccgtggcgttgggcacctctaagatcaactacatggatcctaggatcacggtcgcatggtgcaaacgtcatgaagcacccattgaaaaggtagttaattatatacaaaacttgaatattgatctaccatgaaacaaagagagtcctctaataaagttttttttttgtaatggctggttcgttaatgtagatattcaacaagtcacttctggagaaatttgcgtgggcaatggacgtagaacctcacttcacattctaatatgcattgcactgcagcagctgatgagagtttctctataaaacagagcaaagcaggctacattttttttcttccaagtagataaattctttttgtttgtatctttatttgagatcatgtcttctttttttttcgtatatacaattgttcattgtttgcttgaattcaaatttagtctgttttataaaaaatgaaaccataatctttactattttaaaccataaaaaaaaagtcaattgtaaatacaaaacaccaaaggccaattaagatttattccaactggaaggatagagcaaaaaaaaaagaataatctggcgcaaaaatgacttacacaaatcaataagttttccaaattttgtttctttagcagaaaatcaaaaatgttattttggtcacaaatgtaaaaattggtataaacaaggttttaacaaaaaaagaaaaatatatatatacaaaggcaaaattacccctgagaaaatctggggccttgacacgacgatcctccatcatcctcttcctcgaggaacttcaattccaatctgtgagatctctgcacaacatcttgtctattttcaatcgaaacctctgtgagatcgcttttgatttttgtaattctcgtcgcaggatatctctctcattgggatcagac

SEQ ID NO: 2988 - DNA, 3000 bp, Unknown
  misc_feature (1)..( 3000): cDNA_ID_2781818_gDNA_ID_1620620_Annot_ID_46997 3000 nt of promoter + ATG
tagtgtatagttagtttggatcttcactaaatatgttcgttgtttctacttttgtaggaaaccttttgacttcacaagaatggcagtgacagaagcagaaaatcctcttcttggtgaaatcacttgtggcaccttactacagaagttgcaggtagatttcgcaacatacacacttatccttttaatatatggttccacaaactcaatgtacaaacttgttacaggaaatctgggatgaggttggggagagtgatgaagaacgagacaaactgcttctacagattgaggaagagtgtctgaatgtttacaaaaagaaagttgagctagccgcaaaatctcgtgcagagcttcttcagactttgtcagatgccactgttgaactttccaatctcacaactgctctcggggaaaaaagctatatcgacattgtaagtaatctcacgtcttacaagtggtaaagagatgagatggttacagtgtagtgtgattcaatgtctttgtttccattgcagcctgataagacttcaggaacgatcaaagaacaactttctgcaatagcacctgcgcttgaacaactttggcaacagaaagaggaaagggtccgggcattttctgatgtacaatcacagattcagaagatatgtgaggagatcgctggcggattgaacaatggacctcatgtggttgatgagactgacttgtctctaaagagattagatgacttccagaggaaactccaagagctccagaaagagaaggtaaaatattagttgggatatggttatgtgtggcctatgttcaaaccagaactaaaactgctttgtgtttgagcagagtgataggttacagaaggtgctcgagtttgtgagcacggtgcatgatctatgtgccgtccttcgtttagatttcttaagcactgtcaccgaagttcatccgagcttagatgaggcaaatggtgttcaaaccaagagcattagcaatgaaacacttgcaaggttggctaagactgtcttgactcttaaagaagataaaatgcaaagacttaagaaggttagtcaaaatcatggtctttgtgatctctgacatgagcttggtcagtttaggctgcacatatgttgaaatcctttctgattaattgcgctgaaagtttgtaacttttctctgcaccattcttgtttgtggatttcattaatgtatcttggttttatgcagcttcaagaactagctactcagctaactgatctatggaatctgatggatacttctgatgaggaaagggagctttttgaccatgttacctctaacatttcagcttcagttcatgaagtgactgcctctggtgctctcgcacttgatcttatcgaacaggtatcgtaaatttgtaatgtatcaatcaatgtgtatgataagtactgcttttaaaaatcttctgtgaactcttgaaggctgaggtggaagtggataggcttgatcaactgaaatctagcagaatgaaggaaattgcattcaaaaagcaatcagagcttgaggagatatatgctcgtgctcacatagaaataaaaccagaggttgttcgtgagaggatcatgtcgttgattgatgctgggaatactgaacctactgagttactggctgacatggatagccagatcgcaaaggccaaggaggaagcctttagtagaaaagaaattttagaccgtgtagagaaatggatgtcagcttgtgaggaagagagctggctcgaagattacaatcgagtatgctaacattggctatgttaataaacacattacttattaagcatagagttcaattgatgattcttttgggtttttgttctggaaaaacaggatcagaacaggtatagtgcaagccgaggtgcgcatttgaatctcaagagagctgagaaagctcggattctggtcagcaagattactggtaagaacttccaaaagtctctcttagttattactacacatagaattaaactgagactgaagaatatatcatactttgtttgtgcaagctatggttgacacgttgattgctaaaacccgggcatgggaagaggagaacagtatgtcctttgagtacgatggagttcctttactcgccatgctagatgaatacactatgcttaggcaagaacgagaagatgagaagcggaggctgaaagtaagttgtttcatcctgtgttaaaccgattgttgaaactaacttcttttaaaataatcttgccttttcattaacaggaacagaagaagcagcaagaacagccacacacagatcaagaatccgcctttgggtctaaaccaagccctgcaagacccgttagtgccaagaaaccggtgggaacacgagtcaatggaggagggctcaacgaaactcctatgaggcgtttgtctatgaactcaaaccagaacggaagcaagtccaagagagacagtctgaacaagatagcttcaccttcgaacattgtagccaacacaaaagatgatgctgcatctccagtctctcgtgctgacccagtgatggcttcaccgtgacaatatcaaaagaaagagagttataatgcttacttacacttttgttagttgctaatagtgctgtttaagaaacaaacacttagaaacaaagacaatgagagtagaatgttacttagatgtttctgtttctgtattcattcactcaaatttgtttggtacttgttagcatgactaatgtgaagtgaccggtttagtgaatgaaagtcaaggttctaattggaattacgaaataatatttgggcaaaattgtaatatactgaaagatcttttgggcatgatttaaaagtttaaaaagtttccaagaaggtttgggattttagaggtcctttctgcgacgtcgtttctagtttgcaatcagaagcgcgttaaatacaggaaaatttcttgagctgttttgtcttaacaaatcaatcggagaaaaagctacggagctcgagagaagagagaatctatg

SEQ ID NO: 2989 - DNA, 3000 bp, Unknown
  misc_feature (1)..( 3000): cDNA_ID_1819200_gDNA_ID_1620620_Annot_ID_47000 3000 nt of promoter + ATG
gatcccaattgatttcttcttcatcttcttttatgaacctggctttcgcatcttcttagctctgggccattcctccggtgattttggtgagcaaaatggttgatttagttgtcacgctgagtcacaaatgtcagcttttttggtttctggcttcatgattcacttccatttctgttttagtattttaaagtttgatcttgtccatttttataacatcacagtagcatctttatgtagtcacacgaacatagagtaagaagaatggttcttgtacaacattttggaagcttgatttgagtgatatctagacaagaaactcacagaaaaaaatatatatgttgtggaggaaagaatttagtaggttaactaataactatagtgcttgtggtgtagcaatttcttattttatcactgaaaccgagataagtcgtatttcagaacatgatttgctacgatggcgtttgtcttctctgttgggtgaaatgagtcccaaaatacatatttgcttgcatccgaacatgtgaatgggttcattttatcacacaagtagctcatctcatagtatcccgttccgcaacacgcacttcttacgttttcgaaacctgcaatgcacataggaatattatcataagaattcttgatttaagagcatttggtacatattgaaacttagccctatgtctttgcagggttgcaatggttgggaaaatatttttgttagaactttgtactaaccgaatgcttcaggatggtatatgatttctgaaacaaggtcatatggatttgaaaacaccagctggattccgttcagatctctgttcaactggaagactttctcttccatcttgatgttgaaatctctagccacaatgttgtattcttcaatacatttgcttccataaaagagctgagttgttctttccaggggtaagcatccaaaaggagagagtcccgacaaagacatcttccgagctccgagtctgtatatatctgtcacgaaatctgctgctattcctatcaggaaatattggtactcgttcactgagtacttccgtaacttgcggggaagaagatagtaattctccaggaaatcgttggttccgatactaatcaggtaaagtgattcactaataatctcattagctttctcttcacccaagtagcttcttagcctggtttggtattctttgtagtattccacttccttccatagcggcattacagactttagaaatcgatgacaattcagagaaagcatgtcagaaatctaagtccagtacagtagaatatatatatgttgtaagatatataactatgcttgacttactaacacggcagaggttgcattgtctaagccggttccagctgaagcgaaacagacaccagtggcaaagtctgcaatgttgtatgctggatctaggtaggcagggactgcgttcttgagtcccaaaccttcagaaatgaagtctggtgcaatccggccatttgaaaatctcccagtcgctttgccgtcaaagtaatcccggccatatggctggaaattgctcttcagaacagtagaaatctggttgttgttgcctgaatcaacagttgagtcaccaaatacgataagtgcgggaaattttgcacacgtttcaggtatcttcaccaagagctgagctgctagcaacaagaacgcaagaactctgtttcgctgcatgctttttacacaagttttttcaattttttgcttctgcaaaacaagaacctcacgattaattgggaagaacaattggagcaagcatttaagatggagaaagataggtatcttctatcaaacctgactaaaacagatttagctcgtgtagttaataccttggcctgttgttagatgatgcttattaaatactccttagtctgatatgtctctgtttatttttggccacagagagttagttgaggtgagtaatgagctgaaaatgattgagagtttcaataatagttgtgcagcagagagccgtatttatagctactaaaaaagagagaaagacagaatattttaaaatagaaggattcgtaccattgcaagcttcagatgtatatgtaacgcatcttcctttttaccggattcacgctcaaaactcaactctctgttcttgtatcacttactgtttttattgcttactgagtctagagtcttgaatgtaaagattatttgcactttgggtgaactgtgtcgcacgttttggggctttttagttcaaccatagttttggttgttgcaacgacaataacaagtaacggcaagaaagtgtctctcatgcgtcaaatgtgacatttccgataaagtaactttgttttttgagtctcaactaaagatttataaatttattgacaagtggttcataacataggtttgcgttttgaattaactagaggctattagcaattaagtggtcatttatcgtttgttgaattatagattaagtagttgaacattaatttccaaattctcccatccaaatgacgtcaaatctacacaacctctatattaatccagcaattttaattaaacacaagaatgaaactaaaaaagccaaaccacttagcaacagtaacatactgctgcttgttctgtttggtaggactgtaccaatcaggcccaggagataaatggacttcgtctgtcccaaagatatacaagtacctttggttctttctagaggcttctcaaattagctttcaaaatctcccatttgctataatgacaataataccctcacaggctcgccgaatcaaagcgatcattttagcctcagcccgctcgtgcagcggtaaggctatttacgtaaattactaaaaaccccgaaagagagaattgtgaattctactatccatccaccaagcactctgtgtgcctctgcaaattaacaatttcctcagaacaattacatttcgattcgattcgattctcttatcttcttgatctctgtttgttcatctgtggtggatctccagatg

SEQ ID NO: 2990 - DNA, 3000 bp, Unknown
  misc_feature (1)..( 3000): cDNA_ID_1819181_gDNA_ID_1620620_Annot_ID_47005 3000 nt of promoter + ATG
cgcgtggaggctccttgcggaagcttctctgtcggaggaaaggtttaaggaggttactgctctcgcctttgaagccataggttgtagtaaccaagaggaggatcttgaaggaaccatagttcatcagcaaaactctagtggcaatgttaaccagaaaagcaacagaacccatggaggtccgatcacaaatgggacggccgccgagtgccttgtccttcagtgaacaatatggtgacttggtggtttgtatgtataattaaaagcctaaataagcaaactctctttgtagttgcatttgaagcttcttggtttatgtatgatggttgtgggcattttgtgcctagacttctggttctttgttttttgttatgagttggtgtttatgaattatatatgttcttcactaatatgattattatttgtatagatttgattattcaaaggatatgtcttaagaaggggttcaggttcagccaactaattacttgtaaccaagtctttctaccatcaacaaccatgttaagattcagacacttagtttttacagctcgagactcgagagagagtaataatactgattattgtcttggctataaccaccacaagctctggttatgaagtcgtcctctatagactataattcactaactcgatgctagttcatgtttaagtaatattttgtttagttgactagatggattttatctttgctcgccattagctcaatgagctacgtatatgttaagagtcacactttcaataattaatagctttttaccgttaccataccaacaaactttagataattgggttaataacacctttaagccgaaatagtagtatcataggatccgataccaaacgaacaagacaaaaaatcaaccaaagggttctttaaccttcgtgaccataataacttagtttctaaagagaatggtcacgataaaaaaacaagtctgcaaatcctaatgccgattactccttaaccattcatatcacacacaagccctaaacctggacgaagtgtcaggccgtagcaccaccaccgctgccaccagtctgatggagcatcgcatcgatctcatcaccatcctccatgtcaagctgtagtgtcaagaattattagtatcagaaactataaacttcaaaaggtaagaaataaagcatgtagaatgaatgttatacctcatcgggagtttgctcagcacgaagacgacgcccatcaaacaagaaagcaatggagttcatgtccacagattgccggtcacagtaagcattcatcagcttcttgagctgagtgcttctcttgatcctaaagaaaacctcgtttccatcctataaaacaaacatatagaaggaacaataaacgttagagaccgcatatgaaacaataactaaatcacatggctctcttttggtagtaacctgaaagagtcgaaaaattaaacacatatcaacaaacattcagtttaaggcttcgtctatgagaatttgaagcacaaacatcagccaaactaattgaaaacttagtacagagactacaacttcatcagaagatatataacaacttagtacagagacagcatcgttcacagtctttagaacattcaacaactaagtaaacttatcccttccaaaactataaaaccctcaaacaacaacaggaaccaaaagctcaataacaacttacacctaaacaagacttatataatttcagaaatttgataaacaattagcaaaaacaagcaaacgtgtaaacataaagcaggatactttaaacctgtaaaacaaaagaggaagaagaccattaagactgagctagtagtacgaaaccctaaaattaaaccaaattggagaatgaaaaaccctaatcgcagctacacgaaatcagaaacccaaacattcacaagaacacacaaggatgagaaggagaaagagagatacctgtcccttgactttgagattgatgtgagctcctccgtctcctggcttcttgtcttcctcctggtttgcagacatcgtgaaaggttctccgtccggttacaaaaacacgaaatttgagagaacgatgagagattcacacaatcaaagaatgatgctgagagatgaatataaaaagactgactctgaaaatctctctaattggccgtggcttttgtacttggacgcatcggattcctctctatcataaatcgtagggcatctatccaacggttcatattctctctaggttctcttttaatccaacggctgctagttatgttcaaatctgtcgtttcgttataatgggcttatatttttattgggccacatctaacccactagacaatttcatttggttaaatattttaggttgcagttcctgatctcacgtgacgtgagtcctcctatccaccactctccatgatttcatcatctgttgaagacttgacaatttgacatagaagaaataaataaattgttaaatctataaatcatgtcactttgtgtattaacaaaatgattagttgaaggagataaagtctgtcacacactcttcacaaaagaaagaaatgatgatgaattaacgaaatatgcgcaatgcaacatataaagaacctaggtcttgactcttgtttaagaaacaataaaagtcaaggtttttgttaggtttctgttataaccaaaatcaactatgaaaacattcatatgttagaaaaacatcaaaattatagagagttcctttaactgaagattatggtaaagtaaaactttttgctataaatagagctttaaaattatacagttttagttaaatctattatttcagctattcttccgtgttattagttatcccacaacccccacttggcacttgtttacacctaaatcgtataaatactgtagaccagctccgtcccaaacgcaacaaaaactttccttcgtctccataactatcaaacgacactcatctatgcgtttaatgctctgtttctgaagatacactcgagaataaccatg

SEQ ID NO: 2991 - DNA, 3000 bp, Unknown
  misc_feature (1)..( 3000): cDNA_ID_3091999_gDNA_ID_1620620_Annot_ID_162258 3000 nt of promoter + ATG
atttatttggcagtctctacgactacgatcgtacgtccctccttccatcaccgtttgttttatttattgtttcttttctttttttactttaaacaaccatttatcatgttttaagacctcgacatgtaattcgaattagtattgcattaagatttaaagagttacggcggtggatcggtggtagtcagtgcaagtaacggatcataattgcggttgaccaagcctctttcactggcctctttgtaaccatgaaagctgagatgctattggtacaccactaagtcccaaattcccaataatcgtgcgtcagtaaacatcaatttcgagaggacaagtatcaaaatgcgatatctgctgttacaaatattcaactcagttacaaagcccttaacaatgtattgatttctaattttctataaagtaactttgtgaatacacctaagtttatcaatgaagaataaaattgtttaaaataatcgacaaaataacattatacatgaattttacaacaagtgtttgagcatagtagctaagttgttttcttggggtactctcttggtccgaaaatggtggaaccaaccctcacattggtgcttcccatctcaatctgcagaaacatagtcaaagatcatcttccacatatatgtggttcctcggatgaaagaaagaacacattcaaatgattttcgatattgagttgattgcattttcgatattagaagagagacaaagatattaccgctagctcgaagtcaccagacatgcccatggacagttcaaattgatcctcagccattccaagtgccttgcatacatcagctctacagtttgaaagtgtctgtcccggtttatggggaaaagaataaaccttggtaagtaaaacttgtaggaataacccgagaacacgtaaaacaagtatccaatcaagtagtagaataccctgaagttctctggggtagacgtataatcaggcatcccaatagtcattaatccggagaataccagatttggacagtgatgtttcacatgtcttgctagctctacaacgctagaaggttcgattccagatttagctgcatccataatcaatcagtcagccaactgaagaggctggacaaggaaatcagcatagaggtaaaatactcacaaacttctccgcttgtgttcacttggaccaaaacctttagtggatgtctcccaagatttgaaacagctcgatctagatgatttgctacctgtgaaatcaatcccaagtgattgtataaccaaaataacctcctagtaaagtgaattgtgcaagttaaacgccacaacaacctctaatcgctagttataataccttttctccatccacaccatgaaccattgccaaatttgggactccagctgcaaacattggattaaacgactttcactttcactaaacccctaattcaatattaaagatggggataaaagtcagactcaatagcgttttggctttgttgctctgtaaatgccccacgaaatgccactctatatcttccggaagctgtatatcaatcaaacaaagtgaaggagaagctccattagcatcatcaaaagcacaaaatatatcacattcccagaaaatggagagacacatagtagttagtgattgaaggataaacattcggattttgaaatgaaatcgattatctagtgaagataacaaggattggagagaggaacctgtggagctttatcgatgatttcttgaacgtaattctcgccgaagcaacggtgacctgcgtcgtagatttggcggataagtgagacgggtttagtcttggagactggaaggaccctgacccgctcggcatctcttcctacttgctccgccgccttacgagctctaagaatcacagagcggagagcacttgcgacggttgcctccaccgcaggagctgccatcgccaatcgccactaacgcctgtcgtcaatttgggcttcttcgggagtaatgtttttgtcacgtaaattagtttatggcctttaattggataattcacggtccacacgttcaatactaattgcgattatttatctcttcacttttaatcaaaatttccaaggcagagacacatgtaagggttgatgtatatagtcatcaattcacgagattattggaatctttattgcataaacaatatcaaaattgtgtttttatatataccctttcaaaacgttatgggattcaaaattacacccacacccaccacttattgattggacataacatcattcaatgtaaaattacacccacctcttattcatgttttaattttcacttctgtatatatttttcgaatttcatgtattctgtttgtacttttttgggtcttatgttaagcccatttgtgggtttgtaaaagtctttgacaatatccaataaatcagtgaaaaaaaaaagaaaaaaaaaattattatcactgtaaacttcaaatcaattcaacttgtgctttacatgggtcttcgctggaccaatatgttttgtgggcctttcaagcccaacaatagttatctaccctagctcaaaaagagttatcttattctcattctctctctctctgccgcagctatcaatttactggagaagagatggtgggatcagaggttttggaggaatgtggagaaaaaataagcaagaaagagtcaaagaagcgagccgctaaactggagaagttgctccgtaaacaggaacgagaagaagccacatcatcatctctttctctggaggaggaggatgaatcgtgttccagcaactacggtgacgtgactactaacgagttgcagtcggctgttgagggaaaagagctcactgatgtgagcaacttggttgaagagattgtggggtcagaggtttcgatcagaggtcgactgcacaagaatcgcttagtcggtaccaaattgtttgtgatcttgagggaaagtggattcacggttcaatgcgtggtggaggagaccagagttggtgcaaac

SEQ ID NO: 2992 - DNA, 3000 bp, Unknown
  misc_feature (1)..( 3000): cDNA_ID_2167214_gDNA_ID_1620620_Annot_ID_162255 3000 nt of promoter + ATG
gtcccaaatttggcaatggttcatggtgtggatggagaaaaggtattataactagcgattagaggttgttgtggcgtttaacttgcacaattcactttactaggaggttattttggttatacaatcacttgggattgatttcacaggtagcaaatcatctagatcgagctgtttcaaatcttgggagacatccactaaaggttttggtccaagtgaacacaagcggagaagtttgtgagtattttacctctatgctgatttccttgtccagcctcttcagttggctgactgattgattatggatgcagctaaatctggaatcgaaccttctagcgttgtagagctagcaagacatgtgaaacatcactgtccaaatctggtattctccggattaatgactattgggatgcctgattatacgtctaccccagagaacttcagggtattctactacttgattggatacttgttttacgtgttctcgggttattcctacaagttttacttaccaaggtttattcttttccccataaaccgggacagacactttcaaactgtagagctgatgtatgcaaggcacttggaatggctgaggatcaatttgaactgtccatgggcatgtctggtgacttcgagctagcggtaatatctttgtctctcttctaatatcgaaaatgcaatcaactcaatatcgaaaatcatttgaatgtgttctttctttcatccgaggaaccacatatatgtggaagatgatctttgactatgtttctgcagattgagatgggaagcaccaatgtgagggttggttccaccattttcggaccaagagagtaccccaagaaaacaacttagctactatgctcaaacacttgttgtaaaattcatgtataatgttattttgtcgattattttaaacaattttattcttcattgataaacttaggtgtattcacaaagttactttatagaaaattagaaatcaatacattgttaagggctttgtaactgagttgaatatttgtaacagcagatatcgcattttgatacttgtcctctcgaaattgatgtttactgacgcacgattattgggaatttgggacttagtggtgtaccaatagcatctcagctttcatggttacaaagaggccagtgaaagaggcttggtcaaccgcaattatgatccgttacttgcactgactaccaccgatccaccgccgtaactctttaaatcttaatgcaatactaattcgaattacatgtcgaggtcttaaaacatgataaatggttgtttaaagtaaaaaaagaaaagaaacaataaataaaacaaacggtgatggaaggagggacgtacgatcgtagtcgtagagactgccaaataaataatggaccactattatgtggttcaagaactatatccttttcttagattccgaatcttaacttgtgtttcttgccttgtttggttttttttttgtttattttgtagttttgtctcataaaataacgaacaaaaagcaatggtctaaatatttctcaatatatgtatttaaaaattatatcatagtttcgcaaaaaaacgaccgaacgaacgatggtagtcatttgcccaaattgagcctcgtagtagttgctacgaccacacccccgtcccatgaataaacacgaccatgtaaatattatctataaagacaacataaatttacaaattaatgttgaacagaaaaagtcaaaaagaaaatttcgttaatataataataatattctatgataatataaaacgtggcataacacatgacttcacatgacatcataagaagacatatgccacatgaactcttcatcgcctccatccttttagtctcgtttacatgcagcaaactacgatctacgattatatacaatgaaattcaaattcataatcaattggcattaaacatacgtatatcataattcataaggttaactaggtttagcaaatgttattctctttggataaacgtttagcaattgtttatctcaaatttaattgaaaatacttgtaagacacagttacaattagttctcaatttccaatctacacaagatttaaatctttctttagttcattctgatctatttttctctcaaagaaaatgtagtgctccaacttttctcccaagactaataaaaattttcttaattgcatgcaaaaatattttttccaactttaatcttatcaaacttagatctcattttatcttccgaataagatttttgttttggtcctttgcctaatcaaactaactaattagattagaagaaaaatacaattagacaaaataatatcgatgaaaaaataaaatccacaagaaaggacctaagaaatttcacgtccgaatcacaaccacagaaaaaaagagagaaatattagtatataattaaaattttgtcgtctgtcttctctggttcactcatctcctatctatttaaagcccattcgatatcctaaaacactgtatcatcaaaaaacacctcaaagaattattcattcaggcatcttctcaaatttttgtttgtgaaaaaaacccacatcaaaagatctctcatttattcgtttcgtttctgctgttttgagtgtcgggttcgttttagctgtaatctttttttccggcgttcgatttgaaaaaatccggggaacaggtgatcggaatcacggctatacacgggatatcacggggtgttagctcacatgtccatattgtccgacagaagggttgtttaatcgaaactaatcctttgccgcacggaggacgtggagctctgccgtctgaaggcggcagcccttccgatctcctctttctcgccggtggcggttccagctttaacttcttttcctttaggttttaggagttagggtttgttagtgttttttccttcttctttttttggtgctcttgaatcgcttttttcttgggggaagttttttcttttgctcttcgaaatttgtcttttttgagaatg

SEQ ID NO: 2993 - DNA, 3000 bp, Unknown
  misc_feature (1)..( 3000): cDNA_ID_1023229_gDNA_ID_1620620_Annot_ID_162250 3000 nt of promoter + ATG
cctcgttcaattatagcatggagatagagaaaacagacacagaagcaggatttcccctgcaaatgccatgtccagcaacttatgggagatcttgttcatctaatgaataaccaaaccacaaaagaaaactatgactcgaagactcgagaagatgttaatggaaacatagaaccgtaacaaaatttatgaaaaccagctgacttcttcttaagcatcagactctttcttttcttcttggttctctcctccctgggtaacaccaacctcagctggtcttataactcggtcatacagcgtgtatccagactgcacatattgacacccatcattactaattggtatttaagactatacaatatgaaataaagagacaaagaattgagcaagctttatatatttaccttcaagacatgagcaactgtgccttctggcttagaagcatcagggacttggaacactgcgttatgtctgtttggatcaaatggctcgtttataggatcatacttctccataccaaatttcttaaatacctgcagcggcacacatgtttaaccggtctcatctgcattgcttacttaaggtcttataattacatttctcgatatttacctcagcaagctgtttctcagtcatctccactccttctaaaagggtctttaatagtggagctgctccagcagaatcttctgaggtgtcaagctttgagaagctttctttgacaaccgaagaagctcttccaagattatccgccacatccaataggctctttgcaaaattctgcatacatatatagtgaatatatatatttcagaaaactattatatgaaacaaaagctgcaaaccaagttcttaaagactaacctgtacggcatactttttggtgttttcagcatcacgtcttgttctgtccatgacattctccatctcagcataagtgcgaagaactttgtctttcaactgcttaatctcttcttccttctcagacagtagctcttccttctcagctacgagcttcaccaaatcatcggctgacaattcatcatcatcactctcagaatctgattcagaagatgaagatgcagctcctttagcacctttccgctttctttttgcagaatctgtcacagaatctttagattcagagtcaagacctggttggtttgcctcagctgtaggtttctcttcacttgtctttgaggcctcagtgtgggtcttcttctcatctgattcaggcgaggtagaggaagaaaaattgaacctttgcagtgcaaacgaatccatcatagacatctgagctggaacaagctgcccccaaaaaaaaaagtaaaatgggttaaactcagtgaaatgatacagagcaaaaacctatagagaatctaaaccattcttctattgtttattcatatatctgaagattcaaacataagagatcaaggaaacagtatcagaagatagcaatcatttctagaaactcaaatgagggaaagccttaaaccctaacaaaaccctgaattgcaatttcggcatgaatagtgattaatttgagtgaaaatcgaaccttatgcgagaaatcgtgagctagggagtgaaaccggctcgagaaaacaggagtctgattcctcgccggaagagtgacggcggatagagatgagcgtatgcccgcgttgcgggttactcgcgacaaaattctcaaaaccaacatctggagatccaccacagatgaacaaacagagatcaagaagataagagaatcgaatcgaatcgaaatgtaattgttctgaggaaattgttaatttgcagaggcacacagagtgcttggtggatggatagtagaattcacaattctctctttcggggtttttagtaatttacgtaaatagccttaccgctgcacgagcgggctgaggctaaaatgatcgctttgattcggcgagcctgtgagggtattattgtcattatagcaaatgggagattttgaaagctaatttgagaagcctctagaaagaaccaaaggtacttgtatatctttgggacagacgaagtccatttatctcctgggcctgattggtacagtcctaccaaacagaacaagcagcagtatgttactgttgctaagtggtttggcttttttagtttcattcttgtgtttaattaaaattgctggattaatatagaggttgtgtagatttgacgtcatttggatgggagaatttggaaattaatgttcaactacttaatctataattcaacaaacgataaatgaccacttaattgctaatagcctctagttaattcaaaacgcaaacctatgttatgaaccacttgtcaataaatttataaatctttagttgagactcaaaaaacaaagttactttatcggaaatgtcacatttgacgcatgagagacactttcttgccgttacttgttattgtcgttgcaacaaccaaaactatggttgaactaaaaagccccaaaacgtgcgacacagttcacccaaagtgcaaataatctttacattcaagactctagactcagtaagcaataaaaacagtaagtgatacaagaacagagagttgagttttgagcgtgaatccggtaaaaaggaagatgcgttacatatacatctgaagcttgcaatggtacgaatccttctattttaaaatattctgtctttctctcttttttagtagctataaatacggctctctgctgcacaactattattgaaactctcaatcattttcagctcattactcacctcaactaactctctgtggccaaaaataaacagagacatatcagactaaggagtatttaataagcatcatctaacaacaggccaaggtattaactacacgagctaaatctgttttagtcaggtttgatagaagatacctatctttctccatcttaaatgcttgctccaattgttcttcccaattaatcgtgaggttcttgttttgcagaagcaaaaaattgaaaaaacttgtgtaaaaagc

SEQ ID NO: 2994 - DNA, 3000 bp, Unknown
  misc_feature (1)..( 3000): cDNA_ID_1450493_gDNA_ID_1620620_Annot_ID_162247 3000 nt of promoter + ATG
atttgttcttggatctgtagatacaaaaccttttaatgtttgaaaaatgtgttaaccttgatcttgaaagctcttttgaaaccgcttgcgaagaagccaccaaaaggcgccataatggatgcgaatagaccgagagaaaaagcatgccattggacaggcagggtcgagatccctttccatggagactgttaagcaaagttcacaacggagctcagtttcaaaacaagacaacatcatcggctggttttcacgagaggacagttaattgcttacaaatggagtaatccaagagggaaatgggtaatactctggcctgaagagagggcctggatcacaatgaagccaaccagttgaaaaatcctgcaaaagatatgcaacacaaggatgaagtaaaggccgagacaaaatattgtgatggagatatcactttttgttaccttccttggacatgtaagccattggaactggcctaagacattagcaaactgttgtacgaagcagataataatctatcagtcttgagaccaaaagaaagagttacgaacgaatgaataaatgatagaagaaggttattacaataaatgcagagattatagttgcaactgatgctccgatgaaaccttcccatgttttctttggagacaacttgatgagcggagttttcccgaaatagaaaccgaagaagtaagctgctacatcgttcatagcaatcagtgctgctggtagaagaaacctgcatatttaaaagaaattagcactcgggaaaactattatgcttcagtggatatatataagagtccattgtaccagaagatcccttcaaaaatattggcgacggtgaaagaagattgagtaaagacaacgataaggatcatatgtgtccaagcgtattgcccaaactgatacttatacatcttattcttcaatgtaaggataaaccatatgagacctgaatccaacttaagctgttaataaatcaagaaagagagtattgtttttgtgaagaaaaaagaaacagacaaacctgcgatgtacaagaagtagcaaataaccatctggtacttgataagaccactcacaagcttgtatatgaatctatctgaagaaaccgtgttgactagctgctgttgaatgatgcgtccatagacaaacaacatagccgtgaagaagaagtgccaattcaagagccagaaaccgggtaagcgacgttcttcatgagctcttctgcgaagaaagaagagctctttggccatgaatatctgtataaccacaaccatagcccaaatgtagagatgacccatgtagattataaacacaactccaccgagcatccagagagatgagcatgtccttatccacattgatctgtacttgttcttatcaccaagtaacaaattgcttactctgcttacattgcttctgttcacctcagctaaattctgatcaatattgaaaaagacaatcaaattttggattcaaccggaaaagagagtatgacattgtatagatacctcgcttgatcgcctgcggtgtcgaatgcgagctgttggagagctaggagtataattgtaatcccttggtgaattaggaatgttgggataatggttatctctctggttattagtattcattcgagacgttggtgtagtagggtaactagtatcccttagctttctaatccgtggagaatttggactgagatctttctccattgccattgagatccctaggaaatgctctcagttcctggattgagttcttgaaattcagttaatcatgatgatctgggtttctttatacatccgaggaaatgaatttggggttgatctataatttcaaaatgtcaaccataactcgagcttatacacgtcttaatgaaacacacacattgatatctgatgagagattacttgtgtaacaagcatataatagaggatttagatttgaatgtgtaagcctagaaatctaaatgattcatcaaagcaaaacgtgatgattcacatacaaaggataaatttcataagtgaacattgcaacaaaatgggatcatgacaagtagaaaaaagagaatgaacttacattaacgaaaacgtggtgggatgatggtgattgaaaatgcgaaaccctaattaatgaaaagaaacgtgaagaaagaaactcaaaaggtgagggaagaaggaggaggaggaaggtggtggatgagcacttagcggtgaggtttcatcaaatcatcggaagagagaaccaataaactattcatgtcgctgcttcatgtttaaacccggaatgagtgacacgtgttgtcttgatctgtttgggctgggtcagatatttaagcccattaaggaaagccttttaactattcagacatgagcatgaggagtcaacgaggtctgtgagatcagtggtcaaatcagtaaataacgcgaaaagacagggtctctcacctttttgctgttgttttttcctcattaattattgagttccgtaaaatgggtcccacttttcccatttcccaacctccataaccaaagttggagatttctctgtttcctatgctctctctctctcttactctcacagtgactattcgtcgcttcagatctaaaagagaggaagataaaccatttggattcaatatcgattaaggtaagaaagccatcttctacttgttggattcgattagtttcatttcagctcattgcctctttacttcttcaatgttgatttcttgctttggctttggttttatcaccaatgctgtttgatttctttgaagttcctttcgagcttttcttgagcttagtttcacattcttagcttcactaagttctttgatgtgtttttgttcccaagttcaaaatgttgtttctgattcaatttggttttctaaaaaagattgcaactttggtttcttttagtgtatagttagtttggatcttcactaaatatgttcgttgtttctacttttgtaggaaaccttttgacttcacaagaatg

SEQ ID NO: 2995 - DNA, 3000 bp, Unknown; identical to SEQ ID NO: 2988
  misc_feature (1)..( 3000): cDNA_ID_2781818_gDNA_ID_1620620_Annot_ID_162246 3000 nt of promoter + ATG

SEQ ID NO: 2996 - DNA, 3000 bp, Unknown
  misc_feature (1)..( 3000): cDNA_ID_1017855_gDNA_ID_1620620_Annot_ID_162242 3000 nt of promoter + ATG
gcaattagtagaaaattttcctgcagttgatgacgttgcatttggaaaatactgaaaacgctctttggtcctgatgccttttgtttgttccatttactattttatgcagatggattcttcttgaggttcttgacaaggtctctcccagttcagtcaactggaagcatgcttccaaaccaccgattaagatgccgtttagaaaagtagagaactgcaatcaagtcataaagatcgggaaacagctaaaattctcacttgtaaatgtagctggaaatgacatagttcaagggaataagaagctcattcttggtaatcattacccgagagctcatgtttctcttagcttgatacaaaaacatgatcgccttgccttacaaactggagatttatatggttgtgtatctcaggtctcttatggcagttgatgagattccatatgctccaacttctcaagagtctcagatctcggacactaggtaaagagatgactgatgcagatatcctcagctgggccaacaggaaagtaagaacaatgggacgaaaattgcaaatcgagagtttcaaggttcctttctttacaactacttcaaacacttaccacaatagtattatataaagtatgtccacctatcaccttctagtgaatcaaattaaaattctccaggacaagagtctatcgagtgggttattcttcctcaaccttctatgggcggttgaaccaagagttgtgaactggaatcttgtcaccaagggtgaaacaggttttcactactctttttactaaggtatagttacttactccgtttacctgaatcaaagcttatttgattattatatggttattgaaacgtacagatgatgagaagaggttgaatgctacatacatagttagtgtcgcaagaaagctcggttgttcggttttcttgttacctgaagatatcgtggaggtaagaactgagagactataatgtatcatcatccgaaatagcaattgctcagatgagatgtgttttggtatgttgtgacaggtgaatcagaagatgatcctaattttaacggcaagtataatgtactggagtcttcagagacattcacgggagagttcagattcgtcgtcaactcagagcaccacaacgacgtgcaccagcacagcctcgtcccctgccccatctgtcacagaagaggaggaagtctcctcattgagcggtgaagtcacgagcttggccgttggtgatgcggtttctgaaatcaccacggtctcagaggaagcatccatcgaatagagagagcgagatcacatatatactgatatacatctcttgctatagcaaagtagctgttataatagtgacttctctgtaatcttttgtttttttgtttcatcaactaaaattaccaaaaataataacaatgttacaaacactcaatcacatcgagaaaagtaaagtaaaattgtgaaaatttgtttagtacttaaaaagttaggaggaggaaaaagtgtacatcttattttgaaaacagacactacgcaaacaaccatggatcagacgacgatgatccacaacagtcaaggcaaacaagagatagatagctcaacagacgatgaagatagagaagatggaacgagacatgcagacaaaagaggacttgaaaaccgtggcgttgggcacctctaagatcaactacatggatcctaggatcacggtcgcatggtgcaaacgtcatgaagcacccattgaaaaggtagttaattatatacaaaacttgaatattgatctaccatgaaacaaagagagtcctctaataaagttttttttttgtaatggctggttcgttaatgtagatattcaacaagtcacttctggagaaatttgcgtgggcaatggacgtagaacctcacttcacattctaatatgcattgcactgcagcagctgatgagagtttctctataaaacagagcaaagcaggctacattttttttcttccaagtagataaattctttttgtttgtatctttatttgagatcatgtcttctttttttttcgtatatacaattgttcattgtttgcttgaattcaaatttagtctgttttataaaaaatgaaaccataatctttactattttaaaccataaaaaaaaagtcaattgtaaatacaaaacaccaaaggccaattaagatttattccaactggaaggatagagcaaaaaaaaaagaataatctggcgcaaaaatgacttacacaaatcaataagttttccaaattttgtttctttagcagaaaatcaaaaatgttattttggtcacaaatgtaaaaattggtataaacaaggttttaacaaaaaaagaaaaatatatatatacaaaggcaaaattacccctgagaaaatctggggccttgacacgacgatcctccatcatcctcttcctcgaggaacttcaattccaatctgtgagatctctgcacaacatcttgtctattttcaatcgaaacctctgtgagatcgcttttgatttttgtaattctcgtcgcaggatatctctctcattgggatcagacatggcttttgttgtaacatccctgatattcgctgtcgtaggcatcattgcttcgatatgcactagaatctgcttcaacaaaggcccctccaccaatctgtatgtcaattttcattcctttttgcttcttctccctttgatttagtcatctttttgctgtctttgatccattgcttcgtcaaagttaataaagtgttcttcggtatcaattgagatcattatttatctctctgagcttagaaactattattggttgatgactttatatttgctcattgacttttgctaatttgtttttgaatttgttccttcctgtgatgggtttttttcaatgtaagcaactagtaccgtcacagttctaactcttgtgctggaaaaagtgttgatctttttccctttttttatcattgacttcttatgtacttgtttgtcttgtttct

SEQ ID NO: 2997 - DNA, 3000 bp, Unknown; identical to SEQ ID NO: 2986
  misc_feature (1)..( 3000): cDNA_ID_1974423_gDNA_ID_1620620_Annot_ID_162239 3000 nt of promoter + ATG

SEQ ID NO: 2998 - DNA, 3000 bp, Unknown
  misc_feature (1)..( 3000): cDNA_ID_1819223_gDNA_ID_1620620_Annot_ID_162237 3000 nt of promoter + ATG
ttatattggatcatgttcaattcatctatgcaaacatttttttagccgtatgagtttccgtatgcgtgaacggtgaaccagattgtgacaagatttgcggaaccttagaactaaaaggatgcatttgggtctacctaagcaaaagactgagtttgtgggttaagcggcattattacgtttcgttccttttccttcgattagaaaaatattaatgtaactcgtgtttcgtgaaacgagtcttttgagggtcaacgtactaagttgcttctaacccaaagaacaaacagttgtagtattagtatagtgtaattgtgtccttgtatgtagttagcacatgtgattctaaaaaacttgtgacaagaagtacctaaatatgttgttgattcaagccaaataaagcgtcttttgagctttgtttttcatagatgacaatttgatctaaaatgcttagagagttagagggaaccttttgcctacgtgttttagaacaaagaacataagtgtggagcccttgttcacattttcttagtttaaatattgaagatcttattctgttctcaagctctcatatctgtggtaactttcggcccattgtcgatcgagaaaataaataaaaaaactatacaaaatatggaagaaggaaatgtcagtaacatgttgcaaatgatcatactctttaataactttttcttttgagcaaacactcactctataatatctataagtgtaaatgatgacaaaaaagggtctataaagtataaaaaatttccttcacatgcacatgcccaacttcaagttttgtgtatgatgtttctttaactttttattagtggttatttcccaacttgtgtttgtttggaagcaattatttcaaaattatataaattcttaactgaatgtttgtcgctaatgttataaaaaaggtagtataaaatatgaaattagtctcgtttgcttggttgtaaactacatctatgtttattcatgtgtatattatataatgtacatctagctaacagacaatagtcatgagtctatatgtatataggagagtcgagcctttataatgaaagaaatagatatctacgttcttttacatttgacaagaatcaccagatatacataaatcggaaataaattaattagtgttaaaaggcaactatatagtattaaaatgctcattatttttagtacgtagttggaaaaatgtatgtgttccagtttacttgatttcattttttcatcgttatcgttaggacaaaatcttgtctccaaatcttgttttattttttcccacaaaataccaaaaaatatcgtttagttttaaagttaaatcttgtttaaaccgcgcgatcatgtgtatcgtgacaatatatagttatatactagtatatgttttgtaaggttccaataatttagggtggcaagaattgaattttaataatcctaatggacagccaggtatgttggtcgtcgaatctcgaatcgactgaaccatcatatatagaagatttgataaatataactgagaaaataaatgcaatacaaaaatgaaccaccctaaacgtataatttacaagatagaggtcaatgatatgattagagagcctaattaaataagggacaggtattggaagttgaccaagtaaaaataagtatattaaaagtcaaataaaacatatattccaacatcaacatcagcatccagtgagaaacgttccttctgaaatgtttttatttgcaaaaaagaaagataaattgtcgaaagtgtttagggtttatgtttgggtgtttacagcaaacaacggtcccacgtataaacgtgactggtttgcgcgtttgaactgatgtcatgactgaccacaaatagatattcgccacgtgtattattacagataagtcatgacggccatgttgtgggtccctctgtagctgtttattattcattcaccactttgttgctgtttaatttggcgctgcgccgagccgacaaccaaaagatttttctctttttctgttgtcttaatgatgtcataccaaataatcccagcattgtagatttgtactaatatttttttcttagttcgacccattttattaccctaaaatatagacacaaaattgtgaatgttgttaatatgttcttttgtagtaaagacaatcaagtactctgtttttcttcttttcttttttgacataaggatatacatttttcagctttaaccaattggttggttcagatttctaaatttaagtgaataaatgaccaaaacgcttttaaaaaaataaaaatcaaaacgaatttcatttggttcttttgatattataaccatgaatgccaatgcatgcaaaggtacaacttcatgtcttcatcatttcagtgaggggccccaattgttagccatattaatgatcttcttacaagtactttaaagtttttgttgtacgtagtggtacagtaaaaatatagtaattgtttcaagcataaagcaaaaagttaacgataccataaacattagtttttgttataaaagttcttgttatacgtacgtggttgtattgatgatcgacttatataatcacaaagggttaactatttttgatatgggaattatcaaagcccggtgaaattaagagtccgaggaacaaagaggtcaacaacaacatcagctgaagccgacccgaccaaaatctcggctcctcctccacaaaatcaaaatacgtgattacgcgtaattttggtagactgcaatattaaataaaaaacttgtaagaaagaaactaatcatcagactttttttgataatctatacttaatttaaattaatcaacgatcgtataaatgagaatcccacaaaccaaatagccagaactaataacaagactctttctctctccacctctctttctctcttaaatttcgttctgtctccggcgaagtcgccggcgggaagctaaaaggcaggttagaacgaattcccggcagacaatccaacaatg

SEQ ID NO: 2999 - DNA, 271 bp, Unknown
  misc_feature (1)..( 271): cDNA_ID_1010729_gDNA_ID_1620620_Annot_ID_162234 3000 nt of promoter + ATG
gaattccagtgaaattcccagaagaacagaaatctaactgaaaccgcaagaacttactgtaagcccaattctgttaatgataatgttaaatgggctataaaatgagccccgtcatcagccgctgaagtgaaacgcatcgtttagtatcgtcgtcttctggggaaaatatctttttttttaaacactatcaattcgactggaaaaaggatatttccagattaggtagagagagagcaaaagtactttcattcagacttcagtttaagctatg

SEQ ID NO: 3000 - DNA, 3000 bp, Unknown; identical to SEQ ID NO: 2992
  misc_feature (1)..( 3000): cDNA_ID_1819177_gDNA_ID_1620620_Annot_ID_47007 3000 nt of promoter + ATG

SEQ ID NO: 3001 - DNA, 3000 bp, Unknown
  misc_feature (1)..( 3000): cDNA_ID_1819170_gDNA_ID_1620620_Annot_ID_47009 3000 nt of promoter + ATG
aatattattattatattaacgaaattttctttttgactttttctgttcaacattaatttgtaaatttatgttgtctttatagataatatttacatggtcgtgtttattcatgggacgggggtgtggtcgtagcaactactacgaggctcaatttgggcaaatgactaccatcgttcgttcggtcgtttttttgcgaaactatgatataatttttaaatacatatattgagaaatatttagaccattgctttttgttcgttattttatgagacaaaactacaaaataaacaaaaaaaaaaccaaacaaggcaagaaacacaagttaagattcggaatctaagaaaaggatatagttcttgaaccacataatagtggtccattatttatttggcagtctctacgactacgatcgtacgtccctccttccatcaccgtttgttttatttattgtttcttttctttttttactttaaacaaccatttatcatgttttaagacctcgacatgtaattcgaattagtattgcattaagatttaaagagttacggcggtggatcggtggtagtcagtgcaagtaacggatcataattgcggttgaccaagcctctttcactggcctctttgtaaccatgaaagctgagatgctattggtacaccactaagtcccaaattcccaataatcgtgcgtcagtaaacatcaatttcgagaggacaagtatcaaaatgcgatatctgctgttacaaatattcaactcagttacaaagcccttaacaatgtattgatttctaattttctataaagtaactttgtgaatacacctaagtttatcaatgaagaataaaattgtttaaaataatcgacaaaataacattatacatgaattttacaacaagtgtttgagcatagtagctaagttgttttcttggggtactctcttggtccgaaaatggtggaaccaaccctcacattggtgcttcccatctcaatctgcagaaacatagtcaaagatcatcttccacatatatgtggttcctcggatgaaagaaagaacacattcaaatgattttcgatattgagttgattgcattttcgatattagaagagagacaaagatattaccgctagctcgaagtcaccagacatgcccatggacagttcaaattgatcctcagccattccaagtgccttgcatacatcagctctacagtttgaaagtgtctgtcccggtttatggggaaaagaataaaccttggtaagtaaaacttgtaggaataacccgagaacacgtaaaacaagtatccaatcaagtagtagaataccctgaagttctctggggtagacgtataatcaggcatcccaatagtcattaatccggagaataccagatttggacagtgatgtttcacatgtcttgctagctctacaacgctagaaggttcgattccagatttagctgcatccataatcaatcagtcagccaactgaagaggctggacaaggaaatcagcatagaggtaaaatactcacaaacttctccgcttgtgttcacttggaccaaaacctttagtggatgtctcccaagatttgaaacagctcgatctagatgatttgctacctgtgaaatcaatcccaagtgattgtataaccaaaataacctcctagtaaagtgaattgtgcaagttaaacgccacaacaacctctaatcgctagttataataccttttctccatccacaccatgaaccattgccaaatttgggactccagctgcaaacattggattaaacgactttcactttcactaaacccctaattcaatattaaagatggggataaaagtcagactcaatagcgttttggctttgttgctctgtaaatgccccacgaaatgccactctatatcttccggaagctgtatatcaatcaaacaaagtgaaggagaagctccattagcatcatcaaaagcacaaaatatatcacattcccagaaaatggagagacacatagtagttagtgattgaaggataaacattcggattttgaaatgaaatcgattatctagtgaagataacaaggattggagagaggaacctgtggagctttatcgatgatttcttgaacgtaattctcgccgaagcaacggtgacctgcgtcgtagatttggcggataagtgagacgggtttagtcttggagactggaaggaccctgacccgctcggcatctcttcctacttgctccgccgccttacgagctctaagaatcacagagcggagagcacttgcgacggttgcctccaccgcaggagctgccatcgccaatcgccactaacgcctgtcgtcaatttgggcttcttcgggagtaatgtttttgtcacgtaaattagtttatggcctttaattggataattcacggtccacacgttcaatactaattgcgattatttatctcttcacttttaatcaaaatttccaaggcagagacacatgtaagggttgatgtatatagtcatcaattcacgagattattggaatctttattgcataaacaatatcaaaattgtgtttttatatataccctttcaaaacgttatgggattcaaaattacacccacacccaccacttattgattggacataacatcattcaatgtaaaattacacccacctcttattcatgttttaattttcacttctgtatatatttttcgaatttcatgtattctgtttgtacttttttgggtcttatgttaagcccatttgtgggtttgtaaaagtctttgacaatatccaataaatcagtgaaaaaaaaaagaaaaaaaaaattattatcactgtaaacttcaaatcaattcaacttgtgctttacatgggtcttcgctggaccaatatgttttgtgggcctttcaagcccaacaatagttatctaccctagctcaaaaagagttatcttattctcattctctctctctctgccgcagctatcaatttactggagaagag

SEQ ID NO: 3002 - DNA, 3000 bp, Unknown
  misc_feature (1)..( 3000): cDNA_ID_1819160_gDNA_ID_1620620_Annot_ID_47012 3000 nt of promoter + ATG
ctaaatcggttgacaagtcggaattttccggtacaccggcgtttatggccccagaagttgctcgtggtgaagaacagaggtttccggctgatgtgtgggctttgggatgtacgatgatcgagatgatgactggatcaagcccttggccggagttaaacgacgtcgttgctgcaatgtataagattggattttcaggcgagtcgccggcgattcccgcgtggatatcggataaagctaaagactttctgaagaattgtttaaaggaagatcaaaaacagagatggactgtggaagaattacttaaacatccatttcttgatgacgacgaagaatctcagacaagtgattgtttgaagaacaagacttcttctccaagcactgtgttggatcaacgattttgggattcatgcgaaagctccaaaagtcacttagtttcgattgatcatgaagacccttttgctgaatactcggaatctttggattcaccggctgatcggatcgagaaactcgccggagatgagttttcaagcttacttgattgggatacggaagacgatggcggatggattcaagtgagaggcgagaaacataaagaaaccgagaaacgcgacggcgacgaagacgtgatttgcgttgaagcaacgtcatcgtcgcaaacgattgaagaagttgaagattggatttcgaatcaagacagcttgttctcggaatattcctctgacgacatcattaataatttctactctaatgttgctattcaaggaaatttaattgcatttcattattgtactgatgaaggtgaaaatgtatccataaagaatatgtttcgtactaataacaaacatttgtttttcaaattgcaagctcatgttaaattcactaaccaagtctgatgaaacaatgtccatgtgttcaaacttcaaaataaaagaatctatgtacattagtacattacctaaatatttccaatgcaacatatgcgttaggttatgtgctaacgatcactattgtatggactctagaagacaattcaaattgcatatttcaaagttggaaacacaagtctttgtgttcttgttagaggttacgtcaatctataagataagattgactatagacgaagtcaaaactgtactttgtccaagatttatttacacacgaagtcatgtcaatacaattttgtgtgtgtttacctaaaccgcataagaccccgttatgttaacgcagacgactctctgggagtacataatcatagtcgtaaattaattactaagcaccaaaatacatatttgaacaagtaaataaaatgatatctaataactttagtcaactttcaccgtctgaaatctaaaaacacacatacaccgacactgataatttcgtcggtcttgagagttgatagttctactctatagacatgattattggagcagaacattcctactttgacaccgatacctaacaaaacaaattagtttatatcaataccgtacaatttattaggtaccgtttgtagaaatttgttgaaacattaattatatttttcttcccgtacttatccaaatacaacaatttaagaataccacttaatagaatgatatcctttggtcgacaatagctctaaatcactttcacttagtataaatgtattatgtatagtacaattttttttgattattttatatttaagtatttgtcttcttttaaatcattaaaacattgatatgaactgttgtaagctaatactattacaaaataaaataaaaccattgtttcttaccatcattctcattgccactatctttaatatttcataaaagcataacatataataaagtttacctacaaaatgaaaactgatcacaggtagaaataagttcgttgtgacttaaaagttgatgctgatgattgatgagtcagtgatgacgtcctggtgacattcatcaaacgcataacataccaaagttacttgtcatctctttttgtctatcttttagttttagtatgggtttgtgaattggtgatagtagtaagtggtgaatgcccaaatttgaccacttcatcgcataataaacttatataaaacaatctgataaaaatattcacaattactgcaatcaaattctatgatgaaaatggttattaagtttacctgcagaaacacatgctatgatgttctccaattcaaaataaatcaattcaaccgatccaaaaacctacataaatgttttgaatttatgtatgatgtaaatgtaatagtgtcttgttaaaactagagcatgttactaaatcattatatagaaatgagtcagatagaagaagtattaaaaagagttgacttgagaaaaaggatgggaacttgggaagagttattgttggcaaacacactcaataatagcaaatatcatataaaccttttatttttgtccttttctgttttgctcatctttcatgccttgcattagatggctggagttggtgtattacatataaaccgtaagcccttatatccattctccaatatttaatttcatctcaaattcaaactggtactgaaaatttattatttctgttgttatttctctaagagacttatctatatatatatctcctatgcatgatatactatatagaactttcaatatttttttttttttgatcaaagattattttcttttctttaacttgtgttttattaatcactttctatccgttgtaaatcatatatattaagagcatgagtctaaaatactcacttttggtgactagtaactttgctgtaccttcattttttttaaaaagagctacaagactctgtaagagtgaaacgaagcccaatcccattatctgttatgaaaagttcataaaagcccaattaatatacaaattcactacacgaggagaaacgacgtcgttagtggagtggtaagtgttgacaaagtgacgagtgacgacgaccttttgaattaacaatcgaagcagtgactgagtttgatatca

SEQ ID NO: 3003 - DNA, 3000 bp, Unknown
  misc_feature (1)..( 3000): cDNA_ID_1819156_gDNA_ID_1620620_Annot_ID_47013 3000 nt of promoter + ATG
cgtctgaataggagcttaagtacatggagatatccgctataatccatgtatcatttgctatacggtgacaatatcggagaacttttacttttcgggtcggaatgaccggggtaattaatgtcagaaactccatatcaatgatctacatgtccacaaatgaaagctattattaaagataaaatgaatataattgaaataaaaaaggaaaaaattaatatattaatcgaaaaaacgttttataccatcctaacatcgtcgttgcttgattcgattgacacatttccaacgagtgatgggaaaatagtcacccaacgcatctaaaaaaggtatagatagaaaagaaaaataaattaaaccctaattctactatacatgtaacaagaaattaatatgattcattctagttagttattcttgaaggaatatatagacttacagggtttttaagttttgtcaaaagccatgaagcatcaacgtggattacttcagaagctcttgacgcctcatggacaaaccttgggacgttttttgcgtaccaaggaaagaatcgagagtagtattcgttcagagtcagcatctcttcacgttgtgatctcctccacaaaggagactcgagcgttgctaaagcaataatttcgttgactatacatgccaagaccacccataagttaagcaagtacgaggacacgttcgggaattgatttctccaaaaatccaataacattgtgaaggcattgagtgtctcattgtcagaccgcgaaacagcattctcgaactgcagctcattggcctcagacaaaatttcggtttggttgatgtttccatcttcagatgtcaaagttttttgagatgccatggtctacctgtaattcgtgttacaaacgtttagtaaggaattaaaggttttggataacatagatctagttacctttttttaattttactaaagaacatatttgatatgacaaagtagatcttatcctgatataatttcaaataccctcatttcaaatgcacacatatttttatttcccttaaaggggttggagattttatcaaagcctttttttaaaaatatacatttcaaaaattgcaatataaaaataaaaattatcaaaagataaatgagatgattgaaaagttgtatatattttactaacctgtatcaaatatttgcgatgcaagaactggtgtcttaggtgaagcaaactacaagggatctgattggggaggatgcaagtatgaaattttattttctaaatctagtgcaaagaggaaaaatttctttattatccaaagaattattttttcaattaaatctttttcattacataataaagaaaaaagctgtatattctatttcgtcatagtcattcgtatttatagaaaatataaaccgcgtgacaattcttatgtcaaagttgtgtatttgtttctatgataatactatgatcatttcatcattattttggtataaataaattgtatctaattttttttcaaactttgttaatttcataaataatagaataagtgcgaccagaaaacataaatgaatcaagtaattggataaaactataaaaattttatagaaaatataaaacgcgtgacaattctcatgtcaaagttgcatatttgtttctatggtagtattcttatgatcatttcttcattattttggtaaacaaattgtatctaaaagatagttaaaaatttattaatttcataaataataaaataaatgcgatcagaagacatgaataaattaagtaattgaataaaaattggaaaatagtgttgacagtttttgtttgtgagtcttattcaacgcataaaatatacaataaagaaagttaggaacttatttattttagatcctttttttaggtaattttaaaacttcaaagtaaattatgactcaaataattatttatcaagtaaaaggttattggtaaacattttgttataaaactttagagcatctttatccatatagtttttcaaatagtaaagaaattcactatcaactttttcccaactgtaaaagattcatgtacaggaccatcaattaatggagattctttcagttcttcactgtttcaatctttaactaatcgtcgtgatgaatacaaaatagatacattcagaaaagcaaacacaaatgacggaaacaaattgaaaacaaatacatttaaaagttgcatatttcgttgattgttgattaacattgcttgtcttatcgtactaactacaagtttacaacatcggagtggtttttaattgcttaagatctctaaaacgatttcaataatggtagactgatcttcatttcgatttcatgataacaccgaatgttaggctttatatcctctaaatatcgacatgcattgtgaattgagaccgtaccccgactaatcttgtgacttaatggtcataatggtcgtacaccaattattcacaccggttaacagtaaccggaaccacaatatggaattgaaaagcaattcaactcaaattccagatctttttcttttgtcaaaattgtacaactttctgtttatacattgtgccaaaaataaaataaaaaacaacgaattatagtttgacacgtgtaaatcagaagacaagtcttatgaactttgccatattccggtgacttgctccaaagtctcatatgcgtttaccgatcttctcgattctccaattccaaaccctaacattttgattagtccttctgggtttccacagccttgaggtttgatttttttattttcgatctttcttgattcatttttgttttcggtagcgagaaaatatctgaatcggaaaaaacatatgaatctgagttttgttctttggtttgaaagttcttcaaatataatttagctgacaaactatagatgaggatgaaaaaatccttcctttttgatttttaatcattttgctgatcaattgttccgacctgtgttcttcaaaaaaaacagagattcggaaccaatg

SEQ ID NO: 3004 - DNA, 3000 bp, Unknown
  misc_feature (1)..( 3000): cDNA_ID_2999628_gDNA_ID_1620620_Annot_ID_47014 3000 nt of
tgccatcagtaattgattcccccatatgaggcacaactgcttccacggtatctccttcagtaacaataacaagaaagcgtgtgagaaaaccctacaaatccaatcaaagctacagtagtagcagattgcaaaaccataattaagagatacacgtttcataagaatctgcatccgaatggaatcaaaactatgagctcctggatttcttctaagcaatcataggttcccagatatggcaaacctaataccacaacaaaaagagagaaagagctcaggttgaacatacataccagtttcagctgaaaaaggcctgacccatctttgcagggttgaagaaactaaactcgccgacctcgagatgcccgagttccctgctagtgggatacaaacaaaataagagcacaaaaatcttaagaaactaaaactaacccaaaagtcacatataaataagttgtaagaagtacctggcaaagcaaggttatgaaagctatgagcatgatttccacgatgcagatatgcctgttcagattctcaaataaaactttattagattgttcatcgaaaataagcagatacatagaaatctgatgataagatacataaccatatactaccaactcgattgggaacaaaaacaaaacgtacccctgtttctgaacctgatagcaagctaggggaagatgcagcaacacgagaagactgcagtgattttgcgaataactgataaaaatatatagagataaagttgtcacatttcgatagagccgatcaagttgtaccaaatgagataaaatcgagcactaaccgaaggagaagagccattactggcagctctccttataacagcacgcatcatcattggttccgaatctctgttttttttgaagaacacaggtcggaacaattgatcagcaaaatgattaaaaatcaaaaaggaaggattttttcatcctcatctatagtttgtcagctaaattatatttgaagaactttcaaaccaaagaacaaaactcagattcatatgttttttccgattcagatattttctcgctaccgaaaacaaaaatgaatcaagaaagatcgaaaataaaaaaatcaaacctcaaggctgtggaaacccagaaggactaatcaaaatgttagggtttggaattggagaatcgagaagatcggtaaacgcatatgagactttggagcaagtcaccggaatatggcaaagttcataagacttgtcttctgatttacacgtgtcaaactataattcgttgttttttattttatttttggcacaatgtataaacagaaagttgtacaattttgacaaaagaaaaagatctggaatttgagttgaattgcttttcaattccatattgtggttccggttactgttaaccggtgtgaataattggtgtacgaccattatgaccattaagtcacaagattagtcggggtacggtctcaattcacaatgcatgtcgatatttagaggatataaagcctaacattcggtgttatcatgaaatcgaaatgaagatcagtctaccattattgaaatcgttttagagatcttaagcaattaaaaaccactccgatgttgtaaacttgtagttagtacgataagacaagcaatgttaatcaacaatcaacgaaatatgcaacttttaaatgtatttgttttcaatttgtttccgtcatttgtgtttgcttttctgaatgtatctattttgtattcatcacgacgattagttaaagattgaaacagtgaagaactgaaagaatctccattaattgatggtcctgtacatgaatcttttacagttgggaaaaagttgatagtgaatttctttactatttgaaaaactatatggataaagatgctctaaagttttataacaaaatgtttaccaataaccttttacttgataaataattatttgagtcataatttactttgaagttttaaaattacctaaaaaaaggatctaaaataaataagttcctaactttctttattgtatattttatgcgttgaataagactcacaaacaaaaactgtcaacactattttccaatttttattcaattacttaatttattcatgtcttctgatcgcatttattttattatttatgaaattaataaatttttaactatcttttagatacaatttgtttaccaaaataatgaagaaatgatcataagaatactaccatagaaacaaatatgcaactttgacatgagaattgtcacgcgttttatattttctataaaatttttatagttttatccaattacttgattcatttatgttttctggtcgcacttattctattatttatgaaattaacaaagtttgaaaaaaaattagatacaatttatttataccaaaataatgatgaaatgatcatagtattatcatagaaacaaatacacaactttgacataagaattgtcacgcggtttatattttctataaatacgaatgactatgacgaaatagaatatacagcttttttctttattatgtaatgaaaaagatttaattgaaaaaataattctttggataataaagaaatttttcctctttgcactagatttagaaaataaaatttcatacttgcatcctccccaatcagatcccttgtagtttgcttcacctaagacaccagttcttgcatcgcaaatatttgatacaggttagtaaaatatatacaacttttcaatcatctcatttatcttttgataatttttatttttatattgcaatttttgaaatgtatatttttaaaaaaaggctttgataaaatctccaacccctttaagggaaataaaaatatgtgtgcatttgaaatgagggtatttgaaattatatcaggataagatctactttgtcatatcaaatatgttctttagtaaaattaaaaaaaggtaactagatctatgttatccaaaacctttaattccttactaaacgtttgtaacacgaattacaggtagacc

SEQ ID NO: 3005 - DNA, 3000 bp, Unknown
  misc_feature (1)..( 3000): cDNA_ID_2167230_gDNA_ID_1620620_Annot_ID_47015 3000 nt of promoter + ATG
ttgataatttttatttttatattgcaatttttgaaatgtatatttttaaaaaaaggctttgataaaatctccaacccctttaagggaaataaaaatatgtgtgcatttgaaatgagggtatttgaaattatatcaggataagatctactttgtcatatcaaatatgttctttagtaaaattaaaaaaaggtaactagatctatgttatccaaaacctttaattccttactaaacgtttgtaacacgaattacaggtagaccatggcatctcaaaaaactttgacatctgaagatggaaacatcaaccaaaccgaaattttgtctgaggccaatgagctgcagttcgagaatgctgtttcgcggtctgacaatgagacactcaatgccttcacaatgttattggatttttggagaaatcaattcccgaacgtgtcctcgtacttgcttaacttatgggtggtcttggcatgtatagtcaacgaaattattgctttagcaacgctcgagtctcctttgtggaggagatcacaacgtgaagagatgctgactctgaacgaatactactctcgattctttccttggtacgcaaaaaacgtcccaaggtttgtccatgaggcgtcaagagcttctgaagtaatccacgttgatgcttcatggcttttgacaaaacttaaaaaccctgtaagtctatatattccttcaagaataactaactagaatgaatcatattaatttcttgttacatgtatagtagaattagggtttaatttatttttcttttctatctataccttttttagatgcgttgggtgactattttcccatcactcgttggaaatgtgtcaatcgaatcaagcaacgacgatgttaggatggtataaaacgttttttcgattaatatattaattttttccttttttatttcaattatattcattttatctttaataatagctttcatttgtggacatgtagatcattgatatggagtttctgacattaattaccccggtcattccgacccgaaaagtaaaagttctccgatattgtcaccgtatagcaaatgatacatggattatagcggatatctccatgtacttaagctcctattcagacgatttacgacctgagtttctcagatttccttctggatttattattaaacatgtagcaaggatattcagaggtacacttttttccgttttacaatactatatatagtatcgttttagcctattactactttttttttttttttgttatcacattaagtactgtttgaaaacatttgatatatataaaatatctaatttgatgttagagagaagactaagttcaatcggttaaacgtatgtacgtaggtaactatgttggaacactgggtttacaaggaggatgcaattctaaaccggttgaggccttacctctcttctggtttaggatttggtgccaagaaatggctcgtcgctctacaacgatactgctccaaaactacttatgttccatcaatgactatggggaaccaacttctctctagtagtaaaagattttctgttttatttttgattagttcagattaaccgttttcttatactgacataaccaccatggtatactcatgcagtaactaattccgccggtaagaacaacttgctccaagcatcaaaacgtttggttcacatattttgctccggtacgtgtggggtaatcgggaaccgagggaggtggctcggtgcgggtcgaaggtttgacgtcagagtttccagtctagagagtcgggacatgataaggcacccttatggtattattagcgctagcggtttgactaaaatacatgctaaaccggaaatactatttcctttaatctacggtgtaaagaaactagagatacataaccacttacgattatctggaaatgatttaaaacaagtccttcggatcacaagagacgacattacttcgaggaatgacgtctccctattcagtttccgggtacgtagataagattatttcttatgaaaaaacaaaaacgatcgagttatacatattgttcactaacgtaaaatataattaacacgttaatgaatgcagctgaataattctacggaggtgtttttgcttcaagaagcatacaatgaggcatcatcgtcgatggtgatccactccatacttgacgtgtcatctcttgcgaagattataaacggtgaccgttcctactcctttacctatccgtgtggattcaccataatgccgggccaaaactccggcgatgaagacgctggatgtgttgtgtctgttggatttctgacgattgcaactgaagagattgtagcgaatacactggtgagtgatgtggagagaggaatttatctgctactattacaaatttcgagaatgtcttagcgggaaatcagtaactccgttaaaagctttcatgcgtttggcattttttaatatgttgtttggaattttcaaactttttagtcgtattatatcaagttctatgtatccacatacaaacttattctacaccttttaatatattggcattaattatctctaccaaagaagacaaattcacatgcatttacacaaacttgctaaagatagataaaaaaaaatgatttacgtagataaagcaaaaaaaaaaaaaaacttgagatttatatatctaatgagttggctttatacgaaagtaagccaaatatactcaaggggactttttgtgttgtctccagagaaacaaactctggcatgtctctctcttctctaatctaaatatcgtatatcctctgtttttatttataggttctgcgtatattaccagagttaaatctttgttccttttaccttcttgctccttgtcatttgtcagagaggagaggtaacaaagaccgagtatggaagaactcagggggtgaatatcattttgttggttccaaatctttttttaagaccccccctgacgttctaccaatcacccgggacgcagagggggca

SEQ ID NO: 3006 - DNA, 3000 bp, Unknown
  misc_feature (1)..( 3000): cDNA_ID_1819140_gDNA_ID_1620620_Annot_ID_47018 3000 nt of promoter + ATG
acattcgaataattggcttttcgtcgaaagatgagaatattttcttttgcagaaagtaattttatattcacaaactaaaatgagtaatttataactacagcctaaaccagaataaaatttagaactacacttattttggtaatacgaagttttgattgggttatgagtctggcacaagccaagtaggatttctcctctgaaacattaaaataattattctatgtatttgttttttcttatatccactaccatcatgacatgaaaatgaataactgttattcaatcaaactgttttattcaagtcaacgaagagaaacaaaaggtagctaggctcctcttcagctatgaaggacaaggcaggctaaaagtctcaagcattatgccaagagacaaacaccctaaacaaaacaaagtataagaagatggcttctcattttgactcttctaagtcctcaatgacagcgtgaaaggacacaattttagggtcttgaaaagctctctggtcttatggctcatctgtaaggctcaaaccaatcggttgtgtagagtacaacaaacaaaataattgaatagtatgttggtttgtcatctgcgtgaagagagatgtgtttaggatggtggctgccatgtcccgggcctaaatgatgatccagatcctgatggctctgttgtcctgcatcatcatcaacatcaacattaacattagtttaatttaaagcataccaaacacaatacataacttatgttcatagagaacagtttcagcatagtagcagtctgtaactatcagaaagaacgagtcatgtttcgtatccgtgagctagaatctgaactttaggattaacaatgtcaagttggctagacttactttggttcgggtggttctgcagaaactatctcgggttcatgttccttggccctgtaaagcaatgtgagaacatgtggttatgttagtcttctgaaagatgttgtgctttgcatccaggaaaaaatagaatgtaagaagatttaacacatatatgattagtgcggagatattatgaatcatgatgactcaccttgatttatctgcttcttcactagcttcctctggttcaccaccttaaagcattaacaaaaaaaggaaataaacttaactgtcagtcttacttccacgactttatggtcgaaccataatctcttttaaggttataagaaatctagcaactgtagtaacctcagcccttgaatcaacaaatgacttaaacgatatataatggtgcatgagaacaattttgttgcccttttaagctaccgcaatcataatggttatatggggaacattcaaaagatgtttctttcacaaaactattataatcatcagccaatggacaccatttcatgggtcaaacaccacaaaaatataaacgcatatccatcataatctctatcaaatttacacaagggattcctaagaagttagtcatcagcatctatggtgactcaattaatctattggcagagaaaatgtaataccttttgaatctggtggaaattggcgaacaaagcttgtcaaatctggaccatcaactttacctttacacaaggagaccgaacattaagctaccaattcataaatgaaacaaattttctgggctctaatgttaattaccaatggtgattttgcgtccggtgcctactctggctttcttctcctcctcttccttcttgagaacttgacaaggaaataaaggcaaaagaaaaacgataaatgttttgccttgaacttgagcgacatattaaatggaaaatttgcatacggatttcttgacttgctaacacagaaacagaaataattcttgactttgttcattcacaacttcgaagttcataaaatcaagtcctcaaagtcataaactgtttgcagtaaggatcaatgacacaaggaaataataattttaagacgtttaaaaggatataagtttagaaaatgtatttataagctgaaacacctacgagcaacattaagctttacacgctcacgccttgcttcaagttcaatcatttcctgaaccaataacaaacaccaatatcaaaggccaagcatagccagtctgtatgcaatgaaaaacttccatggtaagaacactatgctgaccacaaataattctggttaaaaaggagtttatcttacctcaggagtaggagccctttttcgctgcccattcagccaacaaatccattcaactacaacattgatcaaacaaaaatgtaactagattcgtgtatacatgccatatatcttatagatgtgcttatttcagatctgacatcactcaagtaaatgaatatatggtcgtatataacaacccattttatgttttaaagaagagttaccaggaatagaggttgggtcctcctctcgtctaaacttgacccatcttttctccttcactggatagtagaaagaagcacatcagaatatattactctacaaatggattctacaagagtcttaatattcgttttgatcatctaaataacctctgttagtttcattttacatgatcacacttagctgaatcttttcatgtatgaaaagaagcagacaatgttctttaaaacaatacgatattaatttttctaaatccatttgcttcactgcaactcgcgatatgcaaagacagctgattcatcaaatcgtacggagaaaaccaaagaaattcagcaacttgacaaatttaagagatacataaatttcacgcaataaccaaattccaacataaatcaaacaaaaaaaaagattttttaaggaaataagaggttggaagaacaatactcgccgaatccgtcaatctcctccattctggaaaagtacttgttaccagtcttgtctactccgataaaactcttgctactgaacaatcccgcaaatctcgcccatagcctcgacatagcttctcccgccgatttcttcttcgtatgatccaaaaactcaaacacaacacacccagaagaatg

SEQ ID NO: 3007 - DNA, 3000 bp, Unknown
  misc_feature (1)..( 3000): cDNA_ID_1809003_gDNA_ID_1620620_Annot_ID_162276 3000 nt of promoter + ATG
acattctgactctgacgtaagaggtaaaaagttaaaaataatactcgacacttacttggaatttaaaactgagttggttttgaagaaatttttttctaattcttttgcagaagaagaaaagactctttattagtctctgtctctatggacacagatctgatcagcaatctccccgatgatgttcttggcaaaatcctgtctttagttccgacaaagcttgctgctgcaacgtcggttctgtccaagaggtggaggaatctgcttccgcttgtagatagccttgattttgacgaaacgatgcttttctatcccgacaacaaagacggagaggacgaagcatctagttacgagagtggtcaacgtcgacgtcatagcttctctcatttcgtggacaaaacgcttgctctgttaagcaatgctcctcttaccgagaaattctctcttaaatgctatcacgaagatgatggagctcgtatcaaccgttggattcgcaccgcgctagaacgtggctgcttggagctaaacttagaggcagccaattatctacctatagattctcagtatttcactagcaacacactggttaaactcaccatttccgatggattttatcctggaggccatcttcttccttttgggggtgtgtttttccctgcgctcaaaacacttactctcgtttcagtttgttttacaagtgttgagatgattaacttcttcatccatggatgccctgcgcttgaggaattattcctatgcgtttggatgcaatacatgtcaagtccaaacgtaaagcgagttaccatcactagtgattttgatgacgatatccaacgtcctagcatggtgctgaagacaccgagtcttgtgtaccttgactactccagttatgtcgctggaaactattatgttgttttggattcgctagtcgaagctagactggatcttcgattatatgagccaatcatctatgatgaggatggtttgtggaatgcagaagtttttggcaatattacgaatctgattgaggcgatcagaaccattaagatccttcacttgtctcctagttctctcgaggtcagcttcttctcttgagtcttcacatgatgcaggagagagccagtctagtgctagctagcaaggtctttaacttatttatatatggcttacacatatcaggtgttttactattgttgtgatttgccggtgttggaagatctcgttaatttatctatcgaaagtgacaaggaaaaaggctgggaagtaatgccaaggctgctcaacaagtccccaaatctacaaactttagtcgtcaaggtattatcatcttttcaagaaaacacacataaattctgttccttcttgtcattatacatgtcaaatggtggtgtggtttcagggtcttgtgcacagagttacatattgttgtggagacgcgtgcgcttgcatccgtatgaaggacagggagatagtatcctgtttgtcgaggtgtcgagtgaaggtgcttaagattttagggtacggaggaagttttagagagctgaaacaaatgaggcattttttggggaagttgaaatgtctcgaaactgtgaaagttggcgttaaagagggcagcaaaaagagtaactacttggtagctaatgtaatggctctccccagagtttcatcaaaatgcaagattcaattcatatgatttctccctctttctctctcgtggttatgcatttgtttaaagtttagaaatttgtttttgcaaaagcatatatgcattcttctcaaaattttcgtttaagagtttcttacactatctaacacaagaaaacagagttatgcacacaaaaaaggattttactatgtcaaacctttttaaaaagatgatttagaaaaacagtaattatgatagttccagctgcttctaacaatgagaataatgatgaagaaatgttaaaaaaagcaatttttttcttaaggctgaaaaggttttgctgaaatggtttcgggcttcgataaggctggccctaaaacgttttttttcttcattgttgtttttttctttttctttcttcgatctaaagctctcttcttcttcttcaaacggagctctcttcttcttcttcaacctttgttcttcgatctctgtcttttttttttttatctcttcttcgattgtaagaaaaggtatgatttgtctctctatacatttcatctttcttattttgacactttgatcgattctctattttttggaatctgattcatatgtttggggtttaatagtttcagctcaaagaaatctgggttaaagtgtgtttgaaattgtggatcgattcatagattctcgataccaataggtacttgtgaatttctaagtttttgggtttttatctttccccttgttgtatatgatgtgttagaattcataagctgcagattctatctttttggttggatatgtctctgtttgaagttatatatttatagttttgaattcataggatgtggtgatacgtttgtaatctcgtgccatatctttggtttgtcaaagagagtgtgttttaatgtcaatttctgggtaaccaagtttgagcttattccttttgattctgcccggctctctgattttttaaggtgagattcctaagcatgtcaattacttttttttttttttttttaacattctcaattttcttgagttggtgacgttttcgagattttgttgattagtgcaagacgacaagtgatgaaaagatagagacaaagaaaggcttcaagtttgttgataactgctgtctaaagagttcgttcccttgagagattctgactctgacataagaggtaaaaaagttcaaatactcaacacttacttggaatttaaaagaacactgatttgttgatattataaggtataaaaatatttcgtcttctcaaaatccaattcttcatcatattataagttcccccaaccggaagagaaattcaaagatcagaaaacggtgaaagatg

SEQ ID NO: 3008 - DNA, 3000 bp, Unknown
  misc_feature (1)..( 3000): cDNA_ID_1819116_gDNA_ID_1620620_Annot_ID_162275 3000 nt of promoter + ATG
acagctctccacgttccgttcccagcttgaagagttcgctcgtaaacacaaggtcgttatttgttgattcttttttatattttgttgttgttgtgtttgctgttgttttgtcatcgtcttgatttcgtaataagaacatgtagtttaataacattttcctgaatttgataaaattgtggtgaaaagaggcataattttttctttggttgcagaatgacattcgtaagaatcctgccttcagggctcagttccatgaaatgtgtgctaacattggtgtggatcctcttgcttctaacaagggtttctgggctgagctccttggtattggtgacttctactatgaacttggtatgtttgctctctctttctagtgccactgaagaagatgcttctgatttttggttagctatgagtcttaagggatataaaatctcttgtgtacttttttctcttgttttgaattggacatgccctctgtgatattagaaagcagggatgtaacaattttcgtgaattcattaaataggagttcagattattgaagtttgcatgcttacaagatcacataatggaggtttgatcagcttgcaagagctctgcaaccatcttcgtcagagaaggaagaaagaccgtgaagctgtgactgaagatgattgtcttcgagctattagcaagctaaaggtttctatctaacttgtgtttttcttttttctttcagatttttaatcaatgggaaaattttgaactgttcttgctggtatcttgggattttctcctcaggtattgggtagcggatttgaggttatcactattggcaagaaaaagcttgtccgttcagtacccacagagctgaacaaagaccataaccagattttggagttggctcaggttataatcatatgagatacatatttccacaaaagaaaacaactattacatgtgttacattatatcttagtagttctacctgaagtaactcaaggatttctgttgctttccgcacagggccaaggctttgtgattgtggaagaggtacaaagacgcctctcatggacatctggtcgcgttatagatgctctcgaaactttgttagaggtatgcatttgcaattcattgcttcaattggattatgtgcttcaatacttctattatactgatagatgcaatgcaacctatgcgagtcctgaaaccttgcaattctattattcattttcaggagggccttgccatgatcgacaatggccataaagacggaaagtgtcggtactggtttccctgtgtttcttcggtttactcatccatcggatctgatacttaaatggtacatgctcagttgttttgcttgttttatacagtattaaatacagtcacactcgttacatataaattacgaagaaatcttttcagtatattactgaaattttcttgtacatgtatcactctgtaaaaaaaatatttatgcttggttgttggagatttcggtttcttctatccagtcagagtttggctcactccatgacctaggtctcaccccaagctggaaataaaacaccatctccaatgcctcaaagaccttactctcatccagaacattgttccatgctccactcacgatgcagtaattgttgttatacggtgctcgatgatgttccgcatgctgtctccgtgaaacaagtaaccccatgtcctgcaacgcgaccacgagaggtggaagcttgctcttggttccatgtgcccaagcatggaattgctggctaaacaatatgcaaaatgcaaatgtgcacacaaagccgtgaaacacagggtcgttaaatgcaaggtctagtggaagaactgtgaaggttatgacttgagccagagcgtgtagattgttggcaaattgccgtctggtgattgtccaaggccacttgtggtgaccctgaaatgcttcgatttgggttcctactacaggtgttgactcatcaccgtagttatcaatggcccagtggtagacaccggaacctagatcagctaagatgtaccctgcataaccggctaaagctggttcgaggcagagatgagaatcaaaccctccaatgacagatttagctaaagagacaaacaaagtggtgcagcccgctgcaacccataaccggtgagtccatgtcgatttcaaagttgggtcattggacagaggagggctggcaaggcgttgctcaaccacaagcttctcacggttagggcgaggcttggtcgattgcagagattggtcgttggacagaggaagattcacagtgcgttgctctaccagaagcttctcacgattaggctgaggcttggtggtagtaacagagcaggtgacacgtacacggagaagcgagggacggtggctttttgggatgttggtgataggtcgtagagggtacttggttggaagtgatacagccattgagagtgattgcaggtgaaagttgtcaaatgttctcgttttctcgacggcataaccacatgatagaggacgagattacgctcaagttatgttgtggtgtacgttagtgttgcgtggggctattctgatcactagcacattaccaagttggttggttataccaactgtcaaacttataaaatagttttcaaatttggattcttagtttctaaaagttacaaattaaaacccaacatttcaaaaatgttctattagacccacctacccaaaaaataatttttgttcggtttctcaatcagttattctggtttagtttgaaattcgattagattggtatatttggattgtgtttgtcttattttaatagatgcgaaattcgaatatgttagaacgtttgaccaacaaaaatggttatactaaattaaattaatttgaatgtatcattacatcaatctggaggatagacgaaataaattataaataaacacgttaagaaaaccagtcatggacgatcgaaaaatcgagacttgcgaattcaacacggaagcgagacagtaaccgacttaacaatg

SEQ ID NO: 3009 - DNA, 3000 bp, Unknown
  misc_feature (1)..( 3000): cDNA_ID_3091991_gDNA_ID_1620620_Annot_ID_162274 3000 nt of promoter + ATG
gctggtagtttccatagccgcccccagcataaccaccgtagtaggcgttagggtcctgaggaggaggtgcatatccgtatgcttcatatccttgaggaggatacccatagtatcctccaccaccaccatactgggcttgatcaggttgagtctgtgaaattcgtggatcaacaagtcatcagatcacataacgtatatgaaagcgtagtaagcttggtgcattgtctaacagatacaaacctgtttgttggaaggactgcgaccccatgaaagacgaatgctttgtcccccaagttgtgttccgttcaacacagaaagtgcttgctcagcacatgccctgaagcatacagacagattaaatatgtgaaaaaacattctcaaaataagtaaagatgaagttcgtctccaagttcacatttacctattggcgtattgaacaaatccgcaacgttttcctgcgggtattttcacatgaactagttcaccaaattgaccaaaaactgacttcaaatcatcttctgttacactttgatccacagctccaacaaaaatctggaatagagaacataacgcttcaatttcaacaatatatcccacagagaaaaaggcttaggcaacgtcaaagaaaaaaaaggcttagggaaaccaaaacaagttacgcactgttgtgttagttggatcactttctcctgaatttccttgagtgttctgatatgaagctgcaataaaacagtcaagagaaggtaaggaaaaaaacctcaaacatctatttatttaattaagctgacagtgcaaggacacagacactaacacaaacgcacacacacgacaatagcagtagcagaacttatccaaatcaagacccaaaattatcaacatataaagcaaatgccatacataggttacagctcgaagataaaggtaaagtgattctgaagttagttgctaattaatacaaaaaagcacattaaagatatactaggggaagtgcctgcaagatccaacttcgagaaattagagaatcggacctaaattctctagggtatcacaagtaacctaaattccttccaaggtctgacagtcttaccattgtaatcaacttttccgaaagacgaaatgtaacactaaaaaaggttgcaagtataaatttagaggcacaacgtaactgaaagaaggaaaaaaattgcagcactaactactggaaaaagatgaattgagaggtatgaaaaagatatcaaaacactctttaaggattcaaactggacaaaataaagcgaagagtaatgaactatgtaacatgaaaagaaataaaagatagggctaaaaattaaaaggaaagacttatgcttgataagtaagaaactggaaaataatttgcaaatggagtaaaagctttgtaattaacttcttctgaaaacataaccaactgacctaaatgaggccacgcaaggtggaatcattttcagctgaaatcagttccaggcccccgaaagagagcctcttgttctcctgcttaaagacaacatgagtttttttcttataagttttaggatgttttgcgatattaaattctttgaagagctgaaaggcaagaagcgggagaaaagggtagacagattctccagtaatcagaaagatagcagtaaaggagtaccccaaagaaaagacaatcaactaacatagacagtgtaagacaaagtgagtcatatcatcactcaacttattcataagtgatcagatatcaggctccttaatatcaaaacatacctggttgcattgtaagaggcttcttgttggcagcaggaccagtacgcataggccttgatgagcagtattgaccattcatttcagtcatggcacgaatctgctcactttcatccgcaaacctgacaaatccataacccttggaccgtccagtagtcctatcattcacaactttagctcccttgacagaggaatacacagctttaaacgtttcagtaagcatgtggtcggtaacatcaggtgccaagtctccaacaaaaactgtgtgctcaggcccttcagcctggcgtctctctccagctccaagctgagcccagttcaacctgaaggcctgctcactgctcggcatcggagcaccattgtaagtctgtaaattcctctcagctgtagcatggttcacaaactcaataaagccataaccttctgaatatccgttctgtttattgcgaataactttagctgctgtagcctgcaaccacaaaggatgaaactttcaatacttgtagaagaaaaacgagagactaaaaacagaaatcaacaggattttcaaaattacctcgccagtaagaccaaagacgttcatgagatagttctcatccatccatggctgcaagtcaccgatccacagggaccggatctcaccagctgatcctggattctgagatccaccaccaccatactgctgctgctgtggttgaccagaagacggtgcagactgctgattccatcctgcaggcggctgaccttgttgttgctgctggtgctgcatcatccacgactgctgctgctggaggtaagcttgttggtcggaaggaatctgccctggccctgttgcagcaccgttggaagctggaggtggctgctgcatcatgacgacgataacctagcaaaaggtacgactgtcgtagatgcaattaaagggttgagctcgaggacgtaagggcaaaagagagagagagagaaagattcgctgtcgctgtttcttttttatagtcaaaagttggttctaatatggcccaatataaaagtttgagctcggcccattataagagcactcgaacaacccggttaagtaagtctagggttgaccaaaaaaatcgatacgaaccggtcgggattggtttgggattgagatgcctgatttcgaactctcagcgtcgccgatatgttttgtcctgttaaaccctaaaactaaaaccccgcgaagagagaagagttctctgtagtgttcttttg

SEQ ID NO: 3010 - DNA, 3000 bp, Unknown
  misc_feature (1)..( 3000): cDNA_ID_1455881_gDNA_ID_1620620_Annot_ID_162273 3000 nt of promoter + ATG
cgaccaataatgcatagacatctttacaataataaataaactatagaaacgtgacacaagaatcgagacatttgaccaaaactgggtaagcaacgcatgaacgtttccagttctctagctgtcaactcaactggacaaaccactacaactcaaaaatcaaacttcaattggtatacattgcaaggacttcaaaactaatatttgacaaggaaaattttaaaggacagtgcaaaacaataagacatcctgtcactagctataatcattaagctagatatttaaactaataacttttttgtgaaggttcggctttttttccaacaacacaaacgaaaataacaataagaaaaatcaacgtaccacataaatcttgagggaatccagaagctttatgtgaaaacacatctctgcttcttcgaccgaatcaatagggttagaacaaagctctgaaatccaaatatctgaaacaatcccaagatattctttttcagcatcttcctgatctgtcatatgagcatccatattatcctcagccaaaaagatatctttatcagaacctaccccaccaatgacaatatcaacagcctcttcttccaaaacatccttctccgatcgcttaatgcgtttttttcttcctactaatccactatccaactctgcttctctcttcaatgacagcttttgagttccactagaaccgtccagagacttcagtacaatcaataacacctgggaatctggaaaaaaactgctcacttcacccatgacgttccgctcaagagaaatctgaatttgctcaaccgagcatctatgagatgaacaaaggttccaagcagtaagaaacgaatccaacagcctcagcgtctccaagagaaatctcaaggtcccatgtttcacaagaaaatcagaatgtagcatccctttagtgatcagtgaccggctaaatggtcgggggcatatgcatttcatgatagtctgaacatctgagccaccagaaggaggtgtagcacgttgatctggattgagaaagtcaaaagaacatgaagttcttactgacgataccaaatttgctgccaaggaaatagaagaaaacctgcaatgacttcagttactagaatgacaaaacagcagaaattggacggtagacgcagtaaaataaagatagatacactttcgtactctgaagaagactaaccaggatggtgatgaaaaatcttccacattgtatggaaactcgtccaagaaatctgaagctaacgacggtctacccctaacaatggctagaagcaaatccctgtgataaccaatttctgctgctctcaaccccttcatgagcattagtagtctgtcagaattgcctctcaactttctctttgcatctggcatcaatccattagaggggtctgtgcaaactttaacaagaacatcatgggccaactcattcacaatcccagcatcctctcttgctgaaatgctggctagatgctttagcgtcacaattccaaaaagaacactccttagaccaggagaaattaatgattcttcaacaaggatcttatcctttaacgtagacaagacagaagccacagtgtcatcatcatctttcccaaggcctggcaggactttcgagtacatttccttcttatttaacactgagcttaacaatccaggcttcccaacttcaaggaatgatattgcaaatccaacaaatgccttccttgttgagtgtttcttaaccttttcagtcccttgcgtattatactctgctagttttgcaaaacccttaaaatcaaacttcttagctatctctgatgccattcctggaccacgtctaacaatcgaagctaacaatgaaagtgcagcagactgttgttttccctctttgctgttcaattctttgtaaatatcatccaatttttcttcaacaagtaacctaccaaactggtcaatagctcttccaatatcagttgatctatcttttccctctggatgactcaaaatcgtctggataagcgagaatatataggacaatccttgtttttcatgtcgaagcttccatgcctcaagaagctcagcaaagtttggtgagctctggaaataaagacgcaacaaatcgccaccggtttctcccttcagtaacttaacaaattcttttgcagcatcagagcatagcttaatctcatgtaagcaaatattatgcaacaattctctaagcttagcttcgtgggatggtctgaaagccatcactggaatttttcctacctcaacatctctattccctccgtccaccaccattcctgatatatcaaacaaagtattcaatcagatagtaagaaactacttctccaccagtccacactgttcaagagaattaaaagctactcaaagacaaaaactttcaaggcaattacaaataagtgatacaagtcttcattcaaaggtaaagccagacaaatttcagctaaaattttattaattgactcaaaaattccaacaattaattccaaaaaattctaatggttagttttttttttgttggaaaaaaccaaacagatattgctaaaagagtctgcacatgtcaagctattatcgtaccttgatcttccaagtctgatgatattgattccgccatcaaaagaacactacagagaactcttctctcttcgcggggttttagttttagggtttaacaggacaaaacatatcggcgacgctgagagttcgaaatcaggcatctcaatcccaaaccaatcccgaccggttcgtatcgatttttttggtcaaccctagacttacttaaccgggttgttcgagtgctcttataatgggccgagctcaaacttttatattgggccatattagaaccaacttttgactataaaaaagaaacagcgacagcgaatctttctctctctctctcttttgcccttacgtcctcgagctcaaccctttaattgcatctacgacagtcgtaccttttgctaggttatcgtcgtcatg

SEQ ID NO: 3011 - DNA, 3000 bp, Unknown
  misc_feature (1)..( 3000): cDNA_ID_3091995_gDNA_ID_1620620_Annot_ID_162270 3000 nt of promoter + ATG
tacatgaaaagattcagctaagtgtgatcatgtaaaatgaaactaacagaggttatttagatgatcaaaacgaatattaagactcttgtagaatccatttgtagagtaatatattctgatgtgcttctttctactatccagtgaaggagaaaagatgggtcaagtttagacgagaggaggacccaacctctattcctggtaactcttctttaaaacataaaatgggttgttatatacgaccatatattcatttacttgagtgatgtcagatctgaaataagcacatctataagatatatggcatgtatacacgaatctagttacatttttgtttgatcaatgttgtagttgaatggatttgttggctgaatgggcagcgaaaaagggctcctactcctgaggtaagataaactcctttttaaccagaattatttgtggtcagcatagtgttcttaccatggaagtttttcattgcatacagactggctatgcttggcctttgatattggtgtttgttattggttcaggaaatgattgaacttgaagcaaggcgtgagcgtgtaaagcttaatgttgctcgtaggtgtttcagcttataaatacattttctaaacttatatccttttaaacgtcttaaaattattatttccttgtgtcattgatccttactgcaaacagtttatgactttgaggacttgattttatgaacttcgaagttgtgaatgaacaaagtcaagaattatttctgtttctgtgttagcaagtcaagaaatccgtatgcaaattttccatttaatatgtcgctcaagttcaaggcaaaacatttatcgtttttcttttgcctttatttccttgtcaagttctcaagaaggaagaggaggagaagaaagccagagtaggcaccggacgcaaaatcaccattggtaattaacattagagcccagaaaatttgtttcatttatgaattggtagcttaatgttcggtctccttgtgtaaaggtaaagttgatggtccagatttgacaagctttgttcgccaatttccaccagattcaaaaggtattacattttctctgccaatagattaattgagtcaccatagatgctgatgactaacttcttaggaatcccttgtgtaaatttgatagagattatgatggatatgcgtttatatttttgtggtgtttgacccatgaaatggtgtccattggctgatgattataatagttttgtgaaagaaacatcttttgaatgttccccatataaccattatgattgcggtagcttaaaagggcaacaaaattgttctcatgcaccattatatatcgtttaagtcatttgttgattcaagggctgaggttactacagttgctagatttcttataaccttaaaagagattatggttcgaccataaagtcgtggaagtaagactgacagttaagtttatttcctttttttgttaatgctttaaggtggtgaaccagaggaagctagtgaagaagcagataaatcaaggtgagtcatcatgattcataatatctccgcactaatcatatatgtgttaaatcttcttacattctattttttcctggatgcaaagcacaacatctttcagaagactaacataaccacatgttctcacattgctttacagggccaaggaacatgaacccgagatagtttctgcagaaccacccgaaccaaagtaagtctagccaacttgacattgttaatcctaaagttcagattctagctcacggatacgaaacatgactcgttctttctgatagttacagactgctactatgctgaaactgttctctatgaacataagttatgtattgtgtttggtatgctttaaattaaactaatgttaatgttgatgttgatgatgatgcaggacaacagagccatcaggatctggatcatcatttaggcccgggacatggcagccaccatcctaaacacatctctcttcacgcagatgacaaaccaacatactattcaattattttgtttgttgtactctacacaaccgattggtttgagccttacagatgagccataagaccagagagcttttcaagaccctaaaattgtgtcctttcacgctgtcattgaggacttagaagagtcaaaatgagaagccatcttcttatactttgttttgtttagggtgtttgtctcttggcataatgcttgagacttttagcctgccttgtccttcatagctgaagaggagcctagctaccttttgtttctcttcgttgacttgaataaaacagtttgattgaataacagttattcattttcatgtcatgatggtagtggatataagaaaaaacaaatacatagaataattattttaatgtttcagaggagaaatcctacttggcttgtgccagactcataacccaatcaaaacttcgtattaccaaaataagtgtagttctaaattttattctggtttaggctgtagttataaattactcattttagtttgtgaatataaaattactttctgcaaaagaaaatattctcatctttcgacgaaaagccaattattcgaatgttctcacgttggtctgtagctgtaaactttatagtttatataataaggtgttctactgttcttatataatttgcaagaacaaataatattaaatgcaaataaaaaatagtcaacggtccaaagtggatcataagccgtccgttcggtcgtctgaacttcatccaacggttaaaagaaatatacctgacgtggccttgggccattgtatattagtagtgagtgtgcccttggaaggttctgtaaaatgttttattcgcctctatcagaagcttgacgaaatctcttctccgtctctctctctctttccctcgtccattccacgatcttcttccaatctcaaatctcccattttctagtgtttcattttgatccttcttccttcctctggagatttctcaaatctcttcaactattttgatttgccgcc

SEQ ID NO: 3012 - DNA, 3000 bp, Unknown; identical to SEQ ID NO: 3004
  misc_feature (1)..( 3000): cDNA_ID_2167230_gDNA_ID_1620620_Annot_ID_162265 3000 nt of promoter + ATG

SEQ ID NO: 3013 - DNA, 3000 bp, Unknown; identical to SEQ ID NO: 3003
  misc_feature (1)..( 3000): cDNA_ID_2167226_gDNA_ID_1620620_Annot_ID_162264 3000 nt of promoter + ATG

SEQ ID NO: 3014 - DNA, 3000 bp, Unknown; identical to SEQ ID NO: 3002
  misc_feature (1)..( 3000): cDNA_ID_1819160_gDNA_ID_1620620_Annot_ID_162263 3000 nt of promoter + ATG

SEQ ID NO: 3015 - DNA, 3000 bp, Unknown
  misc_feature (1)..( 3000): cDNA_ID_3070615_gDNA_ID_1620620_Annot_ID_162279 3000 nt of promoter + ATG
attgacatgcttaggaatctcaccttaaaaaatcagagagccgggcagaatcaaaaggaataagctcaaacttggttacccagaaattgacattaaaacacactctctttgacaaaccaaagatatggcacgagattacaaacgtatcaccacatcctatgaattcaaaactataaatatataacttcaaacagagacatatccaaccaaaaagatagaatctgcagcttatgaattctaacacatcatatacaacaaggggaaagataaaaacccaaaaacttagaaattcacaagtacctattggtatcgagaatctatgaatcgatccacaatttcaaacacactttaacccagatttctttgagctgaaactattaaaccccaaacatatgaatcagattccaaaaaatagagaatcgatcaaagtgtcaaaataagaaagatgaaatgtatagagagacaaatcataccttttcttacaatcgaagaagagataaaaaaaaaaaagacagagatcgaagaacaaaggttgaagaagaagaagagagctccgtttgaagaagaagaagagagctttagatcgaagaaagaaaaagaaaaaaacaacaatgaagaaaaaaaacgttttagggccagccttatcgaagcccgaaaccatttcagcaaaaccttttcagccttaagaaaaaaattgctttttttaacatttcttcatcattattctcattgttagaagcagctggaactatcataattactgtttttctaaatcatctttttaaaaaggtttgacatagtaaaatccttttttgtgtgcataactctgttttcttgtgttagatagtgtaagaaactcttaaacgaaaattttgagaagaatgcatatatgcttttgcaaaaacaaatttctaaactttaaacaaatgcataaccacgagagagaaagagggagaaatcatatgaattgaatcttgcattttgatgaaactctggggagagccattacattagctaccaagtagttactctttttgctgccctctttaacgccaactttcacagtttcgagacatttcaacttccccaaaaaatgcctcatttgtttcagctctctaaaacttcctccgtaccctaaaatcttaagcaccttcactcgacacctcgacaaacaggatactatctccctgtccttcatacggatgcaagcgcacgcgtctccacaacaatatgtaactctgtgcacaagaccctgaaaccacaccaccatttgacatgtataatgacaagaaggaacagaatttatgtgtgttttcttgaaaagatgataataccttgacgactaaagtttgtagatttggggacttgttgagcagccttggcattacttcccagcctttttccttgtcactttcgatagataaattaacgagatcttccaacaccggcaaatcacaacaatagtaaaacacctgatatgtgtaagccatatataaataagttaaagaccttgctagctagcactagactggctctctcctgcatcatgtgaagactcaagagaagaagctgacctcgagagaactaggagacaagtgaaggatcttaatggttctgatcgcctcaatcagattcgtaatattgccaaaaacttctgcattccacaaaccatcctcatcatagatgattggctcatataatcgaagatccagtctagcttcgactagcgaatccaaaacaacataatagtttccagcgacataactggagtagtcaaggtacacaagactcggtgtcttcagcaccatgctaggacgttggatatcgtcatcaaaatcactagtgatggtaactcgctttacgtttggacttgacatgtattgcatccaaacgcataggaataattcctcaagcgcagggcatccatggatgaagaagttaatcatctcaacacttgtaaaacaaactgaaacgagagtaagtgttttgagcgcagggaaaaacacacccccaaaaggaagaagatggcctccaggataaaatccatcggaaatggtgagtttaaccagtgtgttgctagtgaaatactgagaatctataggtagataattggctgcctctaagtttagctccaagcagccacgttctagcgcggtgcgaatccaacggttgatacgagctccatcatcttcgtgatagcatttaagagagaatttctcggtaagaggagcattgcttaacagagcaagcgttttgtccacgaaatgagagaagctatgacgtcgacgttgaccactctcgtaactagatgcttcgtcctctccgtctttgttgtcgggatagaaaagcatcgtttcgtcaaaatcaaggctatctacaagcggaagcagattcctccacctcttggacagaaccgacgttgcagcagcaagctttgtcggaactaaagacaggattttgccaagaacatcatcggggagattgctgatcagatctgtgtccatagagacagagactaataaagagtcttttcttcttctgcaaaagaattagaaaaaaatttcttcaaaaccaactcagttttaaattccaagtaagtgtcgagtattatttttaactttttacctcttacgtcagagtcagaatgtctcaagggaaactccttagacagcagttatcaacaaacttgaagcctttgtctgtcttttcatcacttgtcgtcttgcactaatcaactaaatctcgaaaacgtcaccaactcaagaaaattgagaatgtttaaaaaaaaacagtaattgacatgtttaggaatctcaccttaaaaaatcagagatccgggcagaatcaaaaggaataagctcaaacttggttacccaggccagcaatgagagcaagagattgacataaaaacacacccgacaacaacaaaaaataacaattggtttaaaatcgatctagagtctgctccaagaaatcttaccgaattgaagaaagagaagg

SEQ ID NO: 3016 - DNA, 3000 bp, Unknown
  misc_feature (1)..( 3000): cDNA_ID_1819136_gDNA_ID_1620620_Annot_ID_47019 3000 nt of promoter + ATG
gttgctcgtaggtgtttcagcttataaatacattttctaaacttatatccttttaaacgtcttaaaattattatttccttgtgtcattgatccttactgcaaacagtttatgactttgaggacttgattttatgaacttcgaagttgtgaatgaacaaagtcaagaattatttctgtttctgtgttagcaagtcaagaaatccgtatgcaaattttccatttaatatgtcgctcaagttcaaggcaaaacatttatcgtttttcttttgcctttatttccttgtcaagttctcaagaaggaagaggaggagaagaaagccagagtaggcaccggacgcaaaatcaccattggtaattaacattagagcccagaaaatttgtttcatttatgaattggtagcttaatgttcggtctccttgtgtaaaggtaaagttgatggtccagatttgacaagctttgttcgccaatttccaccagattcaaaaggtattacattttctctgccaatagattaattgagtcaccatagatgctgatgactaacttcttaggaatcccttgtgtaaatttgatagagattatgatggatatgcgtttatatttttgtggtgtttgacccatgaaatggtgtccattggctgatgattataatagttttgtgaaagaaacatcttttgaatgttccccatataaccattatgattgcggtagcttaaaagggcaacaaaattgttctcatgcaccattatatatcgtttaagtcatttgttgattcaagggctgaggttactacagttgctagatttcttataaccttaaaagagattatggttcgaccataaagtcgtggaagtaagactgacagttaagtttatttcctttttttgttaatgctttaaggtggtgaaccagaggaagctagtgaagaagcagataaatcaaggtgagtcatcatgattcataatatctccgcactaatcatatatgtgttaaatcttcttacattctattttttcctggatgcaaagcacaacatctttcagaagactaacataaccacatgttctcacattgctttacagggccaaggaacatgaacccgagatagtttctgcagaaccacccgaaccaaagtaagtctagccaacttgacattgttaatcctaaagttcagattctagctcacggatacgaaacatgactcgttctttctgatagttacagactgctactatgctgaaactgttctctatgaacataagttatgtattgtgtttggtatgctttaaattaaactaatgttaatgttgatgttgatgatgatgcaggacaacagagccatcaggatctggatcatcatttaggcccgggacatggcagccaccatcctaaacacatctctcttcacgcagatgacaaaccaacatactattcaattattttgtttgttgtactctacacaaccgattggtttgagccttacagatgagccataagaccagagagcttttcaagaccctaaaattgtgtcctttcacgctgtcattgaggacttagaagagtcaaaatgagaagccatcttcttatactttgttttgtttagggtgtttgtctcttggcataatgcttgagacttttagcctgccttgtccttcatagctgaagaggagcctagctaccttttgtttctcttcgttgacttgaataaaacagtttgattgaataacagttattcattttcatgtcatgatggtagtggatataagaaaaaacaaatacatagaataattattttaatgtttcagaggagaaatcctacttggcttgtgccagactcataacccaatcaaaacttcgtattaccaaaataagtgtagttctaaattttattctggtttaggctgtagttataaattactcattttagtttgtgaatataaaattactttctgcaaaagaaaatattctcatctttcgacgaaaagccaattattcgaatgttctcacgttggtctgtagctgtaaactttatagtttatataataaggtgttctactgttcttatataatttgcaagaacaaataatattaaatgcaaataaaaaatagtcaacggtccaaagtggatcataagccgtccgttcggtcgtctgaacttcatccaacggttaaaagaaatatacctgacgtggccttgggccattgtatattagtagtgagtgtgcccttggaaggttctgtaaaatgttttattcgcctctatcagaagcttgacgaaatctcttctccgtctctctctctctttccctcgtccattccacgatcttcttccaatctcaaatctcccattttctagtgtttcattttgatccttcttccttcctctggagatttctcaaatctcttcaactattttgatttgccgccatgtatcgacgcgccacttccggcgtgcgttctgcctccgcaaggctttcttcttccctctccaggatcgcctctagcgagacagcttcggtttcggctccatctgcgtcgtcgcttcgcaatcagacgaaccgatctaagagtttctcctcggctctccgctcctttcgagtttgctctgcttccacgcggtggagccatggtgggagctggggatcgcctgctagccttcgcgctcaagctaggaattccactccggttatggagaaatttgaacggaaatacgcaaccatgggtatgtctgtttgctttctctgacgttctaagaatgattgctcttaacttgtgtgacaagaatctgtgtttaccgcatatctgcttagatcgatttttcgctttaaaatgatgatctactgattctgatatgttctgattcaaagtaaaactagctagatgaacatttgatttgctcttgcattttggtttatgatttgtagatttagtctactaaatttcttttttgtatattctaaaaggacaagcaaattcatgtgttatgtgtcaattgaatt

SEQ ID NO: 3017 - DNA, 3000 bp, Unknown
  misc_feature (1)..( 3000): cDNA_ID_1819132_gDNA_ID_1620620_Annot_ID_47020 3000 nt of promoter + ATG
atgcttgtggatctctgtttcatagggagtctcgcttccatcaaatgttacaacagccaataatgaggtcggatcagccacagaaacattaccttctgagcctcgtttatgtgctgcaaataaatccacaaatgtttccactcaaggaaggggctttaatcataagaggtaaattgctttaagaaatcgccagatgataattgtgaaaatctcttaacttccgaaaacaggattacttagaatttttctgaaaaatgaagtaaatatgttaacagaaccctgatttccatctcaatatttgcattctgtgacaaattttctttttccatgtcaatcttagcaatctagtatagtttagcataccaatgtctaaactttgcctagataaatttcttccttctctctgattcttgtatgcttttgttgacaggcaggctggagctcagattttgaagcgtagtgtacaaattccagaggtttatcaacaggataatgttagtcttgtagaaagatagttcatttgtttgattcggttattacttagcagctgcttacttgttagtttcctattgcagattgatatccaaagctcaagttctagctgtgagttcattttccacggatatttttttatctttgttatagctatcgtattcttgtttctgcttctttttgatagtgaaatgttatctaacatacttatccctcaactttcattcatgtgaaattacaaacatccagtggatagcatgtccgaacgagttaaacctatagaagaagataacttgatgccggaacctcttagtaatggttttcacaatgctgctgcaaaaccctcttcaactgacaatttattgtcagaaagtacacctgttgatgacaccttggaattgtgtcggggtagagtggcggcatcttcaactgcatcagtacctatccaggccgtcaaaaagcctaaggtaaactcctaagtacagtttagattgattttctggtcctaaagatttgttaatctattcattctctcacatttcaaacgagtgtgttcattatagtcgttgttatattgtcaaatcagcctgagtgttcattttactttatctattactcaattaccacgttttcaattctaaaacttctaccacatacaggagttcaagctgaatccagaggctaagattttttctccgtcttatacaaaacggctttcaccgtctcctgtcggtatgcctcatgttggaaatattgcttacataccaagcaacactcccatgctaccagttcctgaagctatttacccagaagttgtaaacaacccttatgtgccgcaagcacttccaccttctaagtttgtaccatatggtaatgtgaccgctggacatgctgtcggtggatttcaatttcctcaacacgtaagtattatcttactctcttcgagcatgttatgtcaaagggcttttatcaactagtaattgagaatagactgttcctctcaccactaagcgcctgaatggttaacaaccataaatgttagtattgaacaccagattaaaagatcattctgaattgatatggctttgtctgtactgttaaaatgcttccatatactttctgccaccaacttttgtttgttttgccatggatgaatcattcttccacttgcaacccattttcctgcagatgattgggccaactgttaacagagcacagcctcagagatacaccgctcagtaccattctgttcaagctgcaccaatgcttgtaaatccaagtcctcaggttatatttcatggaggtccccaaaactcacttttgttgaaagcgcggttttaagaaaaatttatctgtattgagatgtattggtgttattgtttctaaagactctttttactgtcctccaggtgatggttgcaagatcggggcagcttgtctatgtccaatcagtttctcaggttagaacttgatgtatatagcttcttgatgaacctttaatgatgttagtttaatcgaatgtatgtcctgtattgctgagtgaaataagaaatattattacgcagtcattggtttaagtttggtcgaaaatctcctcttattcatatcgttatagtcatttttagtaatagtctttcttatttttccaggatctggttcaaggaacaccgcctctctcacctatgctctcctgccctctacctaccgcacaacatgtccaatacctgaagcatcaaggtaaatacctgagtctaccttgatttgcctttttggaccaaaccaaaagattgtgccttaactagaatgaaccattatgtgatgcaggtgtagtagcagctggccagccgctaccgctatgtgtctccctaccattcacgactggtggaccgcaaccttatggcattcccacccaattcccagctatgcagcagcctcctttccccacgaatcagccaatgacagttgcagttcctaatggtttctacacaaagtttccataaacaaagtctcattgtttttggtttcatacctttattctttgcctctccaacctaataagggttaaaaaggtcctagttttggttcctagttttttcctattcttcggttttgtgtaagtatgttgcgagtgttaagctctgttttggcttattatattggggtttttttgcattggtttatcggagttgaatttgggtgaaaaatgttgtagaatatgaaaacattatatgattgattctttggaaaaagtatcgttgatcacatattggtgatctcaataaattgcagttcataaatgttggaagttaaattacgtctgaaacagagcgagactaatcacgtaacatattacacaagagagattagagagatacaaatgagagatcataaacgttaagtcggttatgtttcggtttgagctaattagaagttcatataatccgccgtccgctaatattcctcgattagaatctccggcgatcagaaatctcgcggtgaattttgatg

SEQ ID NO: 3018 - DNA, 3000 bp, Unknown
  misc_feature (1)..( 3000): cDNA_ID_1819128_gDNA_ID_1620620_Annot_ID_47021 3000 nt of promoter + ATG
cctgtggatcggtgacttgcagccatggatggatgagaactatctcatgaacgtctttggtcttactggcgaggtaattttgaaaatcctgttgatttctgtttttagtctctcgtttttcttctacaagtattgaaagtttcatcctttgtggttgcaggctacagcagctaaagttattcgcaataaacagaacggatattcagaaggttatggctttattgagtttgtgaaccatgctacagctgagaggaatttacagacttacaatggtgctccgatgccgagcagtgagcaggccttcaggttgaactgggctcagcttggagctggagagagacgccaggctgaagggcctgagcacacagtttttgttggagacttggcacctgatgttaccgaccacatgcttactgaaacgtttaaagctgtgtattcctctgtcaagggagctaaagttgtgaatgataggactactggacggtccaagggttatggatttgtcaggtttgcggatgaaagtgagcagattcgtgccatgactgaaatgaatggtcaatactgctcatcaaggcctatgcgtactggtcctgctgccaacaagaagcctcttacaatgcaaccaggtatgttttgatattaaggagcctgatatctgatcacttatgaataagttgagtgatgatatgactcactttgtcttacactgtctatgttagttgattgtcttttctttggggtactcctttactgctatctttctgattactggagaatctgtctacccttttctcccgcttcttgcctttcagctcttcaaagaatttaatatcgcaaaacatcctaaaacttataagaaaaaaactcatgttgtctttaagcaggagaacaagaggctctctttcgggggcctggaactgatttcagctgaaaatgattccaccttgcgtggcctcatttaggtcagttggttatgttttcagaagaagttaattacaaagcttttactccatttgcaaattattttccagtttcttacttatcaagcataagtctttccttttaatttttagccctatcttttatttcttttcatgttacatagttcattactcttcgctttattttgtccagtttgaatccttaaagagtgttttgatatctttttcatacctctcaattcatctttttccagtagttagtgctgcaatttttttccttctttcagttacgttgtgcctctaaatttatacttgcaaccttttttagtgttacatttcgtctttcggaaaagttgattacaatggtaagactgtcagaccttggaaggaatttaggttacttgtgataccctagagaatttaggtccgattctctaatttctcgaagttggatcttgcaggcacttcccctagtatatctttaatgtgcttttttgtattaattagcaactaacttcagaatcactttacctttatcttcgagctgtaacctatgtatggcatttgctttatatgttgataattttgggtcttgatttggataagttctgctactgctattgtcgtgtgtgtgcgtttgtgttagtgtctgtgtccttgcactgtcagcttaattaaataaatagatgtttgaggtttttttccttaccttctcttgactgttttattgcagcttcatatcagaacactcaaggaaattcaggagaaagtgatccaactaacacaacagtgcgtaacttgttttggtttccctaagccttttttttctttgacgttgcctaagcctttttctctgtgggatatattgttgaaattgaagcgttatgttctctattccagatttttgttggagctgtggatcaaagtgtaacagaagatgatttgaagtcagtttttggtcaatttggtgaactagttcatgtgaaaatacccgcaggaaaacgttgcggatttgttcaatacgccaataggtaaatgtgaacttggagacgaacttcatctttacttattttgagaatgttttttcacatatttaatctgtctgtatgcttcagggcatgtgctgagcaagcactttctgtgttgaacggaacacaacttgggggacaaagcattcgtctttcatggggtcgcagtccttccaacaaacaggtttgtatctgttagacaatgcaccaagcttactacgctttcatatacgttatgtgatctgatgacttgttgatccacgaatttcacagactcaacctgatcaagcccagtatggtggtggtggaggatactatgggtatcctcctcaaggatatgaagcatacggatatgcacctcctcctcaggaccctaacgcctactacggtggttatgctgggggcggctatggaaactaccagcagcctggtggataccagcagcaacagcaggtaacattctttggtttttatctgaatatcttcgaatgaaaagtatctatgttttctgtttttttgcgagataactgattcttcttcactctgtttgtttatccgaatttgcagtgaagcatgatgtgtaagtcgtgatcgagctgaagttgtagaaagctgtaaccgtttgacaatggtgaatgaattattgaagtggatgtgtattagctcttcttgtctcagattctctcttcaactcttttttttttcttttggattatttttctttcgcgtggctattgttgagtgtccttgcaagtcataacaaaaagcttaaacccaagtgttttttgtcatgactaatatgaccattatgttttcttgctgtaccatttcttcttgtatcacctatgacttccaattattcagtagtaccctcataatttttcaataatactcgttttgtgatcctattatagttgattcgttttcaatatatagtagaattgtgatgagttatttattcacctttggttaaaagaaaacagtaaacttaaataagattttatttaatggggtagcatgaaatcaacatg

SEQ ID NO: 3019 - DNA, 3000 bp, Unknown; identical to SEQ ID NO: 3010
  misc_feature (1)..( 3000): cDNA_ID_1819124_gDNA_ID_1620620_Annot_ID_47022 3000 nt of promoter + ATG

SEQ ID NO: 3020 - DNA, 3000 bp, Unknown
  misc_feature (1)..( 3000): cDNA_ID_1819120_gDNA_ID_1620620_Annot_ID_47023 3000 nt of promoter + ATG
ctgaagcatacagacagattaaatatgtgaaaaaacattctcaaaataagtaaagatgaagttcgtctccaagttcacatttacctattggcgtattgaacaaatccgcaacgttttcctgcgggtattttcacatgaactagttcaccaaattgaccaaaaactgacttcaaatcatcttctgttacactttgatccacagctccaacaaaaatctggaatagagaacataacgcttcaatttcaacaatatatcccacagagaaaaaggcttaggcaacgtcaaagaaaaaaaaggcttagggaaaccaaaacaagttacgcactgttgtgttagttggatcactttctcctgaatttccttgagtgttctgatatgaagctgcaataaaacagtcaagagaaggtaaggaaaaaaacctcaaacatctatttatttaattaagctgacagtgcaaggacacagacactaacacaaacgcacacacacgacaatagcagtagcagaacttatccaaatcaagacccaaaattatcaacatataaagcaaatgccatacataggttacagctcgaagataaaggtaaagtgattctgaagttagttgctaattaatacaaaaaagcacattaaagatatactaggggaagtgcctgcaagatccaacttcgagaaattagagaatcggacctaaattctctagggtatcacaagtaacctaaattccttccaaggtctgacagtcttaccattgtaatcaacttttccgaaagacgaaatgtaacactaaaaaaggttgcaagtataaatttagaggcacaacgtaactgaaagaaggaaaaaaattgcagcactaactactggaaaaagatgaattgagaggtatgaaaaagatatcaaaacactctttaaggattcaaactggacaaaataaagcgaagagtaatgaactatgtaacatgaaaagaaataaaagatagggctaaaaattaaaaggaaagacttatgcttgataagtaagaaactggaaaataatttgcaaatggagtaaaagctttgtaattaacttcttctgaaaacataaccaactgacctaaatgaggccacgcaaggtggaatcattttcagctgaaatcagttccaggcccccgaaagagagcctcttgttctcctgcttaaagacaacatgagtttttttcttataagttttaggatgttttgcgatattaaattctttgaagagctgaaaggcaagaagcgggagaaaagggtagacagattctccagtaatcagaaagatagcagtaaaggagtaccccaaagaaaagacaatcaactaacatagacagtgtaagacaaagtgagtcatatcatcactcaacttattcataagtgatcagatatcaggctccttaatatcaaaacatacctggttgcattgtaagaggcttcttgttggcagcaggaccagtacgcataggccttgatgagcagtattgaccattcatttcagtcatggcacgaatctgctcactttcatccgcaaacctgacaaatccataacccttggaccgtccagtagtcctatcattcacaactttagctcccttgacagaggaatacacagctttaaacgtttcagtaagcatgtggtcggtaacatcaggtgccaagtctccaacaaaaactgtgtgctcaggcccttcagcctggcgtctctctccagctccaagctgagcccagttcaacctgaaggcctgctcactgctcggcatcggagcaccattgtaagtctgtaaattcctctcagctgtagcatggttcacaaactcaataaagccataaccttctgaatatccgttctgtttattgcgaataactttagctgctgtagcctgcaaccacaaaggatgaaactttcaatacttgtagaagaaaaacgagagactaaaaacagaaatcaacaggattttcaaaattacctcgccagtaagaccaaagacgttcatgagatagttctcatccatccatggctgcaagtcaccgatccacagggaccggatctcaccagctgatcctggattctgagatccaccaccaccatactgctgctgctgtggttgaccagaagacggtgcagactgctgattccatcctgcaggcggctgaccttgttgttgctgctggtgctgcatcatccacgactgctgctgctggaggtaagcttgttggtcggaaggaatctgccctggccctgttgcagcaccgttggaagctggaggtggctgctgcatcatgacgacgataacctagcaaaaggtacgactgtcgtagatgcaattaaagggttgagctcgaggacgtaagggcaaaagagagagagagagaaagattcgctgtcgctgtttcttttttatagtcaaaagttggttctaatatggcccaatataaaagtttgagctcggcccattataagagcactcgaacaacccggttaagtaagtctagggttgaccaaaaaaatcgatacgaaccggtcgggattggtttgggattgagatgcctgatttcgaactctcagcgtcgccgatatgttttgtcctgttaaaccctaaaactaaaaccccgcgaagagagaagagttctctgtagtgttcttttgatggcggaatcaatatcatcagacttggaagatcaaggtacgataatagcttgacatgtgcagactcttttagcaatatctgtttggttttttccaacaaaaaaaaaactaaccattagaattttttggaattaattgttggaatttttgagtcaattaataaaattttagctgaaatttgtctggctttacctttgaatgaagacttgtatcacttatttgtaattgccttgaaagtttttgtctttgagtagcttttaattctcttgaacagtgtggactggtggagaagtagtttcttactatctgattgaatactttgtttgatatatcagga

SEQ ID NO: 3021 - DNA, 3000 bp, Unknown; identical to SEQ ID NO: 3008
  misc_feature (1)..( 3000): cDNA_ID_1819116_gDNA_ID_1620620_Annot_ID_47024 3000 nt of promoter + ATG

SEQ ID NO: 3022 - DNA, 3000 bp, Unknown
  misc_feature (1)..( 3000): cDNA_ID_1809003_gDNA_ID_1620620_Annot_ID_47026 3000 nt of promoter + ATG
cgaagatgatggagctcgtatcaaccgttggattcgcaccgcgctagaacgtggctgcttggagctaaacttagaggcagccaattatctacctatagattctcagtatttcactagcaacacactggttaaactcaccatttccgatggattttatcctggaggccatcttcttccttttgggggtgtgtttttccctgcgctcaaaacacttactctcgtttcagtttgttttacaagtgttgagatgattaacttcttcatccatggatgccctgcgcttgaggaattattcctatgcgtttggatgcaatacatgtcaagtccaaacgtaaagcgagttaccatcactagtgattttgatgacgatatccaacgtcctagcatggtgctgaagacaccgagtcttgtgtaccttgactactccagttatgtcgctggaaactattatgttgttttggattcgctagtcgaagctagactggatcttcgattatatgagccaatcatctatgatgaggatggtttgtggaatgcagaagtttttggcaatattacgaatctgattgaggcgatcagaaccattaagatccttcacttgtctcctagttctctcgaggtcagcttcttctcttgagtcttcacatgatgcaggagagagccagtctagtgctagctagcaaggtctttaacttatttatatatggcttacacatatcaggtgttttactattgttgtgatttgccggtgttggaagatctcgttaatttatctatcgaaagtgacaaggaaaaaggctgggaagtaatgccaaggctgctcaacaagtccccaaatctacaaactttagtcgtcaaggtattatcatcttttcaagaaaacacacataaattctgttccttcttgtcattatacatgtcaaatggtggtgtggtttcagggtcttgtgcacagagttacatattgttgtggagacgcgtgcgcttgcatccgtatgaaggacagggagatagtatcctgtttgtcgaggtgtcgagtgaaggtgcttaagattttagggtacggaggaagttttagagagctgaaacaaatgaggcattttttggggaagttgaaatgtctcgaaactgtgaaagttggcgttaaagagggcagcaaaaagagtaactacttggtagctaatgtaatggctctccccagagtttcatcaaaatgcaagattcaattcatatgatttctccctctttctctctcgtggttatgcatttgtttaaagtttagaaatttgtttttgcaaaagcatatatgcattcttctcaaaattttcgtttaagagtttcttacactatctaacacaagaaaacagagttatgcacacaaaaaaggattttactatgtcaaacctttttaaaaagatgatttagaaaaacagtaattatgatagttccagctgcttctaacaatgagaataatgatgaagaaatgttaaaaaaagcaatttttttcttaaggctgaaaaggttttgctgaaatggtttcgggcttcgataaggctggccctaaaacgttttttttcttcattgttgtttttttctttttctttcttcgatctaaagctctcttcttcttcttcaaacggagctctcttcttcttcttcaacctttgttcttcgatctctgtcttttttttttttatctcttcttcgattgtaagaaaaggtatgatttgtctctctatacatttcatctttcttattttgacactttgatcgattctctattttttggaatctgattcatatgtttggggtttaatagtttcagctcaaagaaatctgggttaaagtgtgtttgaaattgtggatcgattcatagattctcgataccaataggtacttgtgaatttctaagtttttgggtttttatctttccccttgttgtatatgatgtgttagaattcataagctgcagattctatctttttggttggatatgtctctgtttgaagttatatatttatagttttgaattcataggatgtggtgatacgtttgtaatctcgtgccatatctttggtttgtcaaagagagtgtgttttaatgtcaatttctgggtaaccaagtttgagcttattccttttgattctgcccggctctctgattttttaaggtgagattcctaagcatgtcaattacttttttttttttttttttaacattctcaattttcttgagttggtgacgttttcgagattttgttgattagtgcaagacgacaagtgatgaaaagatagagacaaagaaaggcttcaagtttgttgataactgctgtctaaagagttcgttcccttgagagattctgactctgacataagaggtaaaaaagttcaaatactcaacacttacttggaatttaaaagaacactgatttgttgatattataaggtataaaaatatttcgtcttctcaaaatccaattcttcatcatattataagttcccccaaccggaagagaaattcaaagatcagaaaacggtgaaagatgcgacgacgaccaggaattggaggattacaaaaggccgcagctgctagggtattgatcctaaacccaatttcattgttttctctcgaatcagatttgattgaatttgggcttttaattctctatacatcaaaaacaggatcagtaccggttactaggagaaaatgtagccaagttacggactgatatgatgaaagaacagctctccacgttccgttcccagcttgaagagttcgctcgtaaacacaaggtcgttatttgttgattcttttttatattttgttgttgttgtgtttgctgttgttttgtcatcgtcttgatttcgtaataagaacatgtagtttaataacattttcctgaatttgataaaattgtggtgaaaagaggcataattttttctttggttgcagaatgacattcgtaagaatcctgccttcagggctcagttccatgaaatg

SEQ ID NO: 3023 - DNA, 3000 bp, Unknown
  misc_feature (1)..( 3000): cDNA_ID_1823127_gDNA_ID_1620621_Annot_ID_47029 3000 nt of promoter + ATG
ctgaagaagctcttgtaatcggtttagcaacacgaggagtagcagcagagacggttcgagccgtggttaccacccttggaacagacggtttctgggcggcgcgtaggttaaggtccagtgaagacgcgcttctcattatcattgttagttcttgtggggaatatttcagtggaggaagagaagagagatgaaaagatatttagactgcaaaaatatcatggagtttccggttcttgtcaagccccacactattagtcaatattatcaaattgaccccaaagttttatcatttttggttacacccttgcatcattacatgttcattcaaaacgttatcgtaatacaagaatagtaagttaatctctaactttagatacgagaacgaaactaaaagctagttagcaaataaaacattttgaaagtatttgcattatcaggccaaaaacataagtagccttttctgtaaattctacgactatcttaactagatatcatttttggggattgttcccttatttatatatatcaaatcttatcggaaaacaattgttataggcttcaggaccaccataatcgaatacccctaaagaaaatatttcaatttgattggctacggaaagacgtaagtaactggatcaaagaatttgattctgtcccacaaataagttactttttgcattcttgaacttatttccacggtcatgagtcatgaccaaaccaagacatttggatttggatatatcgaataattttgctagaattgatgagaaatgactgacaagctttgatagtatatttaatgactaattgctgatgattttttacaatgacctaacaataacggaataactatggaagttttattattcaagataaaaccagttaataagtgttcacgatacaaaaaatcgattttcatcatcagtagtataaatgtggtataactaaaaaaataaagaaattgaccataaggtgatccaaatttcctaatttcatttataaaagggcaataaatatacactaaaaatgatatggaacttgaaaaaagcaattaaactgtgtttttctgctttctttatatagtataaaaatatttttttaatgaatcatatgtacaagccttcttcctcccaaacatcaacaaggaaatgcaccatctcctgtaccaatatcatcatcaatttaaaaaaaactttcctagcaacaatgatatatactagattcaaatcctgatatgaaaatgttctaagggggataaagaatcttctgctgtaagttaattaaaattaagagttatgattagcagaaaacaactaattaaccaaatcaaatcaccttaagaggtattggttgaggaaaaagcttgtttgtgctcaataagctatcatacgtcgagttccagctgaaatcatatgaattcaaagtttcattttaacattgacgaattcagtagaccaatcctatataaacataaaaatagttcgttcaatattcgtaactgtttgtggttgtcaccttattgcaggttctggaactagacattgttgtctggttaagcattcacgccattgttgtctcgtgtggttccacaaaataagtccttttatggaaggaaatgaataagtagtagtgtatcttttagtgtatagaataactgaatgagtaataaatactgcttgcttcataacataagtttttggcatccaaaacaacctaggccttagaagttagaacattcaaaagttaccatggtttacaaattcggtagagttgcttgtgctgcattggggatcaaaaggcgggtttgaagattgggactgaatcgttatattgtggtccatatcacacgtacttgtgctccagaagtcatctgatgaagcactatctttcttcactatctttccttggattttgagtccctttgatggctcatcgacttccacaactaaacgcctttctctgttgcagcatccgaaacagtttatgctctgaaagattgaacattatgtcaatcatttgttactatggtctaatatgtttgatctacttggaaagaaatcaatttggttctccgggtcgctcacattgatgagagttttgcaatttgatcgtagagattccattagccaaaaagggagagtttggaagtaagctgccgggaattggaagaaagagcaacaacgcttcttactaaattgtgttcgtaattttagcaagaatgaataacaagaacacatagctagctaatacatgacaggacaaaagcacaatgaacatgaaagagaattaaggaaactcaaaaaagattagcaaggaagtgtagtaatatgcctcatatgacaagcaaacatatgcatttaagcacaaaaggaatccatatgttataacttacaagcaagtaaggcatattatgccgcataattacatattttaccttgatttagtacaaagtctgtctctgaactgaagcacatatatacatccacatgatttaatagaatcttgaaaagaattcaaaagaaagaaaacaaaagtttaaacaccttccaacaaagggtattgttaaaaacactcgatcattattacgttgattttatatttcttctcttcttcacgttatttacagtttttttttcatgtaaaaatgatcttttcgtttgattcctatcgtaattgtaagtaaacaaaataaattttagtattattttaagatgagacttatatagatatgaatctatgtgaattattaaatttaatgataataaataaccaaaaactttaataaaataaactgttacatattgtaaaaaaaaagatttttataaatgtttatattcaaagagagaatctttattgagtacaaaaggaggaatatatgtgatagatctaattacataatctactttacataaatagaagaagatatcgtggagtgattgatatgtgattgatctagtcagatatcatgattgatccttaacaacttatatagtagttatg

SEQ ID NO: 3024 - DNA, 44 bp, Unknown
  misc_feature (1)..( 44): cDNA_ID_3092820_gDNA_ID_1620621_Annot_ID_162325 3000 nt of promoter + ATG
ttctccacgaccggcttaaagagtacaacttaaatttgtcaatg

SEQ ID NO: 3025 - DNA, 3000 bp, Unknown
  misc_feature (1)..( 3000): cDNA_ID_3070637_gDNA_ID_1620621_Annot_ID_162299 3000 nt of promoter + ATG
attgccgtgaagctatctcctcgttaatgtttgcagcctctggattttccgagttgcctgagctgcgtgaattgaggcaaatgtttcacgaaaaatacacagattcacttgcattgtttgtcaaccaggaggtaaagagtttttctagtgtattcatttatttgtaagactcatcttgaaatcttatacggttaagttaaccacctgcttgtttcttgtacagcttgttgagaatatgtcatccaagcccttttctatggagaagaaagtgaagttaatggaagatgttgcattggagttctctattcgttgggattctaaagatttcgagaagaggattgtgagacagaatagtatttcagtaatggtatgacaatgactcatttgttttagggaacaactaaactgaaatatttggatagtgattgaattctgatttctttcttggacgtgaacaggagaccccaaaaagcaccaacgacaagtataagcctgtagacagaaacatggccttgccaaaaagagaagagtttgaaggttctgaaaatggggttagcttgaacagaaaaacggctgaggcatcagaaagaagagatcctttgtttcaatctgataaagaaagttatcagaatggtctcagaggaaatcagcgtgggctaacatataaagaaaggtcagagaatgttcttcacgcctctagatcggaaagcaaagacaataaggccgaaaggaaagagttttatctgcattctaagcaaaaccctgctagagaaaaacatcagcctatttttaacgaaggtgacactatagtgatgaaggtcaactatgggaatctcggtcaagggaatggacatcgacctggtgtagttgatgcgcataagaaaaccgagtttgttgcctcagaaaggaaagagttttattcgcaatctaagcaagaaccttctagagaaagacatcaacctatttttaatgatggtgacactattgtaatgaaggtcaagcatgagaaccacgttcaagggaatggacataaaaatggtgtagttgatctgcataagaaaatagaggttaatgcttcagagaaacttaagtctagcagcagcaaaagagctgacaagttagttatcggctttaaacaagagagtttctttcaagggtacaaacatgagaaaaatgaagagcatgcacatcagaaagtggaagatagtacctcaagacctccgaagccaaatagcaagtcaaagagagcggaatctatcaatccaggttcgagacatcataatgatcgggagagtaaagaaaatgcagttcttgtgggaaagagcaccgaagaagatccatctggtgataatgttaagggtggagaatacgaatatgatcatgcaaatccagcaaggaaagttgaggagcgagaaacagagagaatgaaatcacccttctacaaatcccttccacctccgtatgttaaaaaatctattgctaaagcaaggcatgaaaaagctgaagctttagataatccaaaggctcgttttgatggtgaagaaggaaatcatccagacaatggtaaaaatgtttatggggcagagagacgaaatggagcaggtcatcatgaagtgaatgacatagacaatgcatctctgaaacggcaaactaacagaagaaagcacattgtagaatcgggaggtgatgatcacataagtagccgaagaagggaaaactcaaggaaaggccttcaagtcttaattgacgaggatgagaaagacagtgaggagaagatgatggataaacttctgatgcattacagtaaaaaaccttcaagctatgaaaaggacaatgtgcaagaagaatccaaaagcagacgtacccatcttaaaaaaggtgaatctgatgaagagatgatgattcatcagccggctcggtcacggtctctacccgctgaacagttggccgggccatctgaacctgcaaaaacatttgcccgtgcagcctcgtttcagccagaacgttccagtgaagctaagcacgttcaccccaagttaccaaactatgacgatttggctgccagatttgcagagctaaaaggaaggtaaatatatgaacagttgatgcctagaaagatagaattaatgagattaaatagcctgttacacattttcttacttcttgatatagtacttgtccgatattgccccatgtatgtggtgcttgttataatagttgaaattggaagagtgacgcattgttacggagtacggaccccaagagttgttgatcatctccttgtttttggatcatcttatgtaaccatttgaaaacaaggatctgtttagaaaaagggaaagtggttaccacacagtttattactagcgagttatttgatgttaccatgatttttgcattaggtcctgaccagcactaacttacaagctagtagctaccatatacaagatataaatttacttctaaattaccatgaagtgtttaagttgatcttactgagaatattttgagtttttttttttaaatctgaacatgataataaacaaaaactattaaagggaaaagtcaacgagaaccctttttaaacgaaaaaaaaaaggtcaacgtgaactgcagagtgagcttagatgttcccaaattcgttcataaaccctaaattcaattttcccgatttatccccagcaattgtgtgatatcttctcaattctcatctttatcttcctccttacacagtaaaaaaaatacgttgtctgattactacttacactttttctcaaatctatcgctacgattccttctctcataaagcctcccaaaatcaatcatagacaatctcattaacagttttgtgttgatctctaactccatcgtcttaggagtaattaagtgaaagaacccaaattcgtttgtcatagaaaccacaatttcgagggatccacgcactttcacagtttgctacactttcaaaacaagccctggtctttgaaattggtgaaaatg

SEQ ID NO: 3026 - DNA, 3000 bp, Unknown
  misc_feature (1)..( 3000): cDNA_ID_1808734_gDNA_ID_1620621_Annot_ID_47030 3000 nt of promoter + ATG
attaatgagataatttaaactcaccgacgcggtttcgtcttttcttcaagtgaaaaagtgaaaaccgatgttaaggatcatgcattcaaaagagatgtatagaaatataccggatatgttgtatccatagttcacgtagattcataactactatataagttgttaaggatcaatcatgatatctgactagatcaatcacatatcaatcactccacgatatcttcttctatttatgtaaagtagattatgtaattagatctatcacatatattcctccttttgtactcaataaagattctctctttgaatataaacatttataaaaatctttttttttacaatatgtaacagtttattttattaaagtttttggttatttattatcattaaatttaataattcacatagattcatatctatataagtctcatcttaaaataatactaaaatttattttgtttacttacaattacgataggaatcaaacgaaaagatcatttttacatgaaaaaaaaactgtaaataacgtgaagaagagaagaaatataaaatcaacgtaataatgatcgagtgtttttaacaataccctttgttggaaggtgtttaaacttttgttttctttcttttgaattcttttcaagattctattaaatcatgtggatgtatatatgtgcttcagttcagagacagactttgtactaaatcaaggtaaaatatgtaattatgcggcataatatgccttacttgcttgtaagttataacatatggattccttttgtgcttaaatgcatatgtttgcttgtcatatgaggcatattactacacttccttgctaatcttttttgagtttccttaattctctttcatgttcattgtgcttttgtcctgtcatgtattagctagctatgtgttcttgttattcattcttgctaaaattacgaacacaatttagtaagaagcgttgttgctctttcttccaattcccggcagcttacttccaaactctccctttttggctaatggaatctctacgatcaaattgcaaaactctcatcaatgtgagcgacccggagaaccaaattgatttctttccaagtagatcaaacatattagaccatagtaacaaatgattgacataatgttcaatctttcagagcataaactgtttcggatgctgcaacagagaaaggcgtttagttgtggaagtcgatgagccatcaaagggactcaaaatccaaggaaagatagtgaagaaagatagtgcttcatcagatgacttctggagcacaagtacgtgtgatatggaccacaatataacgattcagtcccaatcttcaaacccgccttttgatccccaatgcagcacaagcaactctaccgaatttgtaaaccatggtaacttttgaatgttctaacttctaaggcctaggttgttttggatgccaaaaacttatgttatgaagcaagcagtatttattactcattcagttattctatacactaaaagatacactactacttattcatttccttccataaaaggacttattttgtggaaccacacgagacaacaatggcgtgaatgcttaaccagacaacaatgtctagttccagaacctgcaataaggtgacaaccacaaacagttacgaatattgaacgaactatttttatgtttatataggattggtctactgaattcgtcaatgttaaaatgaaactttgaattcatatgatttcagctggaactcgacgtatgatagcttattgagcacaaacaagctttttcctcaaccaatacctcttaaggtgatttgatttggttaattagttgttttctgctaatcataactcttaattttaattaacttacagcagaagattctttatcccccttagaacattttcatatcaggatttgaatctagtatatatcattgttgctaggaaagttttttttaaattgatgatgatattggtacaggagatggtgcatttccttgttgatgtttgggaggaagaaggcttgtacatatgattcattaaaaaaatatttttatactatataaagaaagcagaaaaacacagtttaattgcttttttcaagttccatatcatttttagtgtatatttattgcccttttataaatgaaattaggaaatttggatcaccttatggtcaatttctttatttttttagttataccacatttatactactgatgatgaaaatcgattttttgtatcgtgaacacttattaactggttttatcttgaataataaaacttccatagttattccgttattgttaggtcattgtaaaaaatcatcagcaattagtcattaaatatactatcaaagcttgtcagtcatttctcatcaattctagcaaaattattcgatatatccaaatccaaatgtcttggtttggtcatgactcatgaccgtggaaataagttcaagaatgcaaaaagtaacttatttgtgggacagaatcaaattctttgatccagttacttacgtctttccgtagccaatcaaattgaaatattttctttaggggtattcgattatggtggtcctgaagcctataacaattgttttccgataagatttgatatatataaataagggaacaatccccaaaaatgatatctagttaagatagtcgtagaatttacagaaaaggctacttatgtttttggcctgataatgcaaatactttcaaaatgttttatttgctaactagcttttagtttcgttctcgtatctaaagttagagattaacttactattcttgtattacgataacgttttgaatgaacatgtaatgatgcaagggtgtaaccaaaaatgataaaactttggggtcaatttgataatattgactaatagtgtggggcttgacaagaaccggaaactccatgatatttttgcagtctaaatatcttttcatctctcttctcttcctccactgaaatattccccacaagaactaaca

SEQ ID NO: 3027 - DNA, 3000 bp, Unknown
  misc_feature (1)..( 3000): cDNA_ID_1819263_gDNA_ID_1620621_Annot_ID_47031 3000 nt of promoter + ATG
atgaaaacattattaggatatatcagttttatgaaaaaaggttttccaattgttaatcccaataataaatcatttaaaaaaatttagaaagaaaatgctgagttagaaacaaaaggaaaaggaagcacaaatggagtaaaaatgtatgaaaataaaaagataagataatgaaattttgggattagatagagatgatggagggagaaagttttgagaagcagcaagaaaggaaaggtgtcactgttgtacttggtacctctatcttaccctaatcgctggaccaacttgtctcttaataaaagtggtttttgtgtctaatctgactttgcttactctctaatcactctatctctctcagtgctaatcaagataatcataccttttttagctgttaccacttttctagtaaaggaaattgtagttacttcaattatataaatttcaatagaaaacccatcaaacttaactagttgggaacatgcatggtaggatacttattttgtctaatgctttgtattttacttatattttacggtttattacatatggatacaatattttataattcaaatcaatgatggatagtattaatatttataacaagttcatatacacattcatgtacagttatggtgttatcacacaaccgaactgagtagtttattgacttgtaatagtgtcgctactttacctttttccaaaaataatgcatgtgtgaggagttgtcgacgatgatgaaaaaatgacttatgatattcttacgaaataaatctcactaaaatttgaggtttttttttttttttttgtcgtaaaatttgaggtattaacccaacatatttggatgatgcaaataaaaactttgaaagtaacaacgttaaatagcataagacattcgttttttcactaagcaaaacagtcgtgttgtacaatttaaggtaacaaaaccgtaaaaactgaaacacatatcaagagattatttgacattttcgaactgtgttacgttcttgactccagtattcacatctagacgagacgttactgtttattgtaaccaataatgtatatatgtttggtattcttatataagtttcttattgtttttttgcattgccaaagtgttttatgtgtctcagtgatcaacatcataatttgtatcaaagtcactgatatctttcttctcaaatctagtactgcataatataattttttcttagtaaatgtgctacaattttataattgttaaacttagcgtcactcatgagtcatgaaagctgatgaccaaaatcatacaggatataatatatgttgggaagaaaagagatctggagcaacacctactaagttcgctgattagttttctaatagttacttttaagtattactaataaactattacttcctctgtagtcaacgaaataagtgtagttaactttcatttgatttcttaaaatataaactttcattatttgatttaattcttttggcctaccacaagcttttgggtgtgtacatgtgggtgcatgtatttaaatatgtaacacttgtttttttatattcataaaatgggaaatgctgtacttgcttattaattactcactatttacatattccaactttgaaatattgttgattggtgaaaaaggtacttcataataatttaactaaattgtaccatcatatattcgtctaagaaaaactcaatcttttatcattgttgatttcacacacaattccaaatttgacacgagttatataacatgatacccatattcaacaaaccactagactctatatttatctttagttttaaaaatttgtcctcaatattaaaattaaggggttggttatatatatcaagaaaaataaaaagattccatgaggtggctttaatagttctgattaaaggtgttaattaattaacaagatgaataaaaggttccatttaagagtaaagtatatgataacagtgtgggggatgatattggttcaccttaataaagcgattgcaataattttatgtataactaacgaaaagtttataccgtttgattaagaaaatgagaaggtcatgtccctctctctctctctttctcttgtatttaaatcaaaagcaatctctaaccatatccaaaatcccccctaattccgggttttctttttataacaagtattaatttggacttggttcccacttatgtttcttctttttttttgccaaccacttatgtctcttttttataatcctaaacttttcatatgttttttgaaatgtcccatctagattcagttagtggattttactcaacttgtaatacgattctactacataagatgagtgaaagagttaacatgcgcttatttttaaggttgaaaatcgcaatgtacactctctagaattatagtataaaaataaaaaaaaatctaattcagatttttgattgttacaggctaacagcaaaattaatatggatttaaaagattaatactggaaaataataataattaaaagagttttaattaaaacttccccccccccccccctcaatcccacgattaattaaaaaaggaaaccaccgaataaccgtaattactataatgacgtggcacttagatttcgaatagccgctgtaataaatattaaaaacgttttgtcattttcctttttctcttctcaaagaaaaaaataatcactctctctttttttttttttaattcacagacagaatcaaaacttgtgtagaccgagaatccatctctcacaaaccccaaaccaaaaaaaaatcaaaaaaaaaaatcaagaacaaatcgaaatctcaactctgtgaaaacctcgtccttgttcttcttctgcttctcccattccttcgatttttgcttcaatggatgtttgatttgctctctgactgcgtttggtgagcaacaagtccgtcttagtgtttatgttttgttttcttgcctgatttttcttctttcttctctatttggttgctgtctcaaatg

SEQ ID NO: 3028 - DNA, 3000 bp, Unknown
  misc_feature (1)..( 3000): cDNA_ID_1823138_gDNA_ID_1620621_Annot_ID_47033 3000 nt of promoter + ATG
atagatcatttttgcttgagaattgaagttttcattttgaaacaactctacttaagtatcttattaatgaatacgtaagaacttacaacttcaatgtttcaaaatagatttaaatatataaggaatagataatgtttttgtataattcagataagttctcgaaggaatatatatatatcaagatgtatttgaaaaaaaaaattattaaaaagtcccacatatatgtatatatatatatatagatatactgaaaatcattgagacaaaaaacattcaaaatcagtagagcttataggttataagtaaaatgacttatattattataaagaaaaagacttatagaacaaggtgagaacgtagttacatgtagtatatatatagacaatggacatacaaataaatgtgtaaatattgtgtaatgtacttataaatattggaagatgcatgtttgaggaagttgcacttaaggtttagggacgttcgtagtgagactgagacctcttgcgctgtcactgtttaggccacgacgaatcagtctgatccgttactattgccttgctgtttactaatattctttattatttataattatttaattgtttttttttaatcgtttaatgctttcacagttttattttaattataatatggaatacacttggcgattcgccaactaattcctgaataatttataattgaagatttgaatgggcgtagatgattgcgggtcattaataccaagttaactcccaactacatttttttacatttgaacaatcaatatcaattattttaaattaaactatataagcatacccctccaaataagaacctatttatgatttattgtataaaaacacaacaatatctttaagaaacagttttttttttttttgttgtcaaagtagaacatgtagttttgtactctttgttgcatataataataaaccataatatagtttgagggaagagctgaaagctaaagatgaaatgtagtttagattagtaatgatctttaagaaatagttaatgtttgaaggaaagagctgaatcttataagaaattagcatatatcatttctagattcttattctataatctatattgtatttttgtgacaaaataaaataaaacactaccagtacaatatacttgaataccggtatctatatgtataaaacacggaaaaacaagacgtaaagtggtttagcacatttgtgttaataacgttggccgttgaaaaagtttcgatctctcctaagaagatttacacataaaagtcaaaccaaacccacacgtcggtcgtgaaaaagcagtaatttggtccatttcatcaaccaggggtacttttgggatttgagtattatctccgggaaagaaagtacacgggggatacgtccaagtgccagctggcatccgtacttcgtcttcccaaaataccttaacaatcaaacacctctttctttcacacttccccacgttcctttttttttattaatatattttctccttaatctctattttcaagtgccctaatctttatagtatttgtaatctgattatttttttcgccaattaacgtgggaaagtaagttttgttttggtttataacggggaaatgtaaggttaggtattattatgttgacaaaaatttaaaggtaggaactattttccttttcttacggcaaaggtggaagaaactaaagaattagaggaagcagttctgtattgaatcatcaaccgtcaaagtagacacaataccaaaccaaatatattttcacgtttgcttatccatctttgaattccacctgaatcaaaaagaaagaaagaagagttctctaaatttcgacatttcatgataagataaacacaaatttaagaaaaaaaatagttggatgcttcaattggtattcctctaacgggcccttcatttaaagcacactagataacagagtaatagttttccttttccacatgtttcatttattaccatctatataaattatattttcaggtggaaaataaatccactatctctctaccctattttagattcaactaatggcttttactagtaatgataactcaatcggtcattttggttgcacaatatctaacaccaaccaacccatattctgatttcattagacactagataacaatttttgtttagttttcaaccattacccatatttaagaatacaagaaaaatattaactaatcttaaattaatttgtttgccttaataaattattatgcacatatttgtatgatctcaacattttatgcaatctgcaatattgatcaatttagtagatcggtcgtcttcgtctttttttctttgaaaagtcaaaagtcaaaagggtttggaaaatttaagaacatgtttggttgaaaagagaaaagactcaagtggtcggatctgtccaaaagttttgtgacggtcacaagagggaaagataaaaaggaaacggatttgaaggaaacggctcagagagatttaagacactcgcagcatctctctacttctctctctctctgtttcaacccctcttgtcgtctatctccatcaaaaagaccaaaatcaaacatcattgaatgttagacagagaggcaaaaactaatcaaagtgtttctaatccctgaaaataagcccacttcttctattttcctcatttcagtttctgggttttaatcgatctccccctttctcacccttccgtctgaattccggtctgcaatcgtcggaaagttttggactttacaccaacgccaaagcgagttcttgtttctctgtttgcttctctaggaccaatcagtttccatttacagatgcgtactattcacctgtcagagctctgagatttgtctttttgcatctctctgaatatttctcttttctcagatccattgacctcatccacatacataaagtttaggtatttttaaaagggttcaattctggggtttaccggaatttcatcatctttgaagaccatg

SEQ ID NO: 3029 - DNA, 3000 bp, Unknown
  misc_feature (1)..( 3000): cDNA_ID_1819259_gDNA_ID_1620621_Annot_ID_47035 3000 nt of promoter + ATG
tataacgagttaacatgttgccagtttgaatcaagaagcttggatgatgaatgaatggatcggtttgtggtacaattcttaaaattgtagtagaggagacagagaaaaaacatgataagactttggtatttacaacttgacggagacaagacagtaagccaaatctgtcacaaaaacactcaaactcttttctcagtgttttgagtttaaagagagacttattcacttcccctttcgtaacacttatttgtctcccaaccaaacagtttctgtcctttcccttgtcctcccacgtgcatctttatatctcatgacttttcgtttctagatcttgaataatgtcttagtggattaggtttgttgtcggtaaattaggtgaccgtttttttcttatatttggaagatcgcgggatgaagcagatactgagtttcagggcatacacacctaatttgaaaatcattgttagtccaatttcactttaatcttgtttacaaaaaaattgatctgaaaatgttgatgggataagtaaaaatgtaagttttgctagtagtcatgatataataatagcaaaaccagatcaattttgagcaaaaggaagaaacaaaaaacagatcgatcccacgagcaagactaagtgtaaagtggttcccacaagagccatatggatatggtccttcaacttttaaagcccattacttcagtggtcgacccgacattacgccacgagtagtcacgcacgcacgactccgttcacgtgacattcacgttgatatttccccctctactctcttctgcttggttgatctaaaaaacatgaagagaccaacctaatttcatattaatatatgatatagacttcatactcaacagtcactttcgtaatccaaatccatatcttacgaaattagttcttaataaaggttgtggattaagttataatattgtgttaagagttaagacacagcatataaccttgtaccaacagtgctttattcttaaatggaaacaaaacatatgtcaatgtcaagcatacagctaaaatatcattatctaatattaagagtaaaacaagataattaaaaattgaaacaacaccatatttttatagctttacttatcgtatttttctagtcttcatggtaattgtgttgctttattttgtttataaatgaatttggttcgaccagatagtctaatatcagtttttaaacactggttttaataaaatcatatgtcggcaattcaacctgttacgttgtatgattgtatcctagtcaaataggggaggaggtactagtcgtttcaattagtttacgtaatcaatccaaagaaactataagctataaagatcctcaatttgttggttacaataaaaacaacagttgtcaaaatttatgtttataaaaagtaataactatgttccttcccatatagagcaaagtacctcaggataggcaaaccgtacttaatagcccttattcataatttgatccaactcttccccacaaaattgcaactgatgaagtcaatacttgtatagtgagtcaagctataaatgtctagtgatagttttgtctcttaaaaggttaacaaaagttatgacaagctgaaaaatcagagtttgctaggagtattacttacagttatcagtttaagtatcacatttatagtattgtatacaatgattcttaaattccaccttttccgtgcgaaaccaaattttctattggaaacatagaatgtaaacaaaaatatgggacgttgtccgttccaacattaaccaaacttgtctattactaatattcgtgttggtttgatgttggatgtctaaattcgttgaatcatgtgtctcttgacgaaatatgcatcttcttatttcttagtatagatgcactttatcattcttttagtacatgcttaatttttttttttaaaatatgttgattgtcatattgccaaaagtatgaattaaagacgcacatctaacacaagttagcagccgtaaatccttccataaatttattttgcaagttttgctcattatataatgagcggaatttatgatataatcgtttgtaataatgttatgttttgatcaaaatttgaaattaaaagtaggtgagaacttgttatacagtgtagataaggtggatcttgaatataaaaataaaatttataagatgtatttaaagcagaaaagcataaaactttagataaaataatgtaaaaatgtgttagcatcaatgttgggatattggccgacccgaacttaatcaatgtcggaagccattacttctctcccaaaagacctttttccttcggagaactaggaacttcctcactacctttcgcttaacgtgaaagccataaatttcatatattcataaaaatcagaaaatctaaaactgtttagtatcacctgtttttggtatagactattggttttgtgttacttcctaaactatatgatttcgtacttcattggatcttatagagatgaatattcgtaaaaagataagttatctggtgaaacgttacttcagtcatgttgggtctagatttacatactactatgaaacattttaagataataattatcctagccaactatatgttctatattatgggccaagaagatatagaactaaaagttcagaatttaacgatataaattactagtatattctaatacttgaatgattactgttttagttgtttagaataaatagtagcgtgttggttaagataccatctatccacatctatatttgtgtgggttacataaaatgtacataatattatatacatatatatgtatatttttgataaagccatatattactccttgacctctgcccccatttccttttactataaataggaatactcatgatcctctaattcagcaatcaacaccaacgaacacaaccttttccaaagccaataataaaagaacaaaagcttttagtttcatcaaagacgaagctgccttagaaatg

SEQ ID NO: 3030 - DNA, 3000 bp, Unknown
  misc_feature (1)..( 3000): cDNA_ID_1819255_gDNA_ID_1620621_Annot_ID_47036 3000 nt of promoter + ATG
ttttatgcttttctgctttaaatacatcttataaattttatttttatattcaagatccaccttatctacactgtataacaagttctcacctacttttaatttcaaattttgatcaaaacataacattattacaaacgattatatcataaattccgctcattatataatgagcaaaacttgcaaaataaatttatggaaggatttacggctgctaacttgtgttagatgtgcgtctttaattcatacttttggcaatatgacaatcaacatattttaaaaaaaaaaattaagcatgtactaaaagaatgataaagtgcatctatactaagaaataagaagatgcatatttcgtcaagagacacatgattcaacgaatttagacatccaacatcaaaccaacacgaatattagtaatagacaagtttggttaatgttggaacggacaacgtcccatatttttgtttacattctatgtttccaatagaaaatttggtttcgcacggaaaaggtggaatttaagaatcattgtatacaatactataaatgtgatacttaaactgataactgtaagtaatactcctagcaaactctgatttttcagcttgtcataacttttgttaaccttttaagagacaaaactatcactagacatttatagcttgactcactatacaagtattgacttcatcagttgcaattttgtggggaagagttggatcaaattatgaataagggctattaagtacggtttgcctatcctgaggtactttgctctatatgggaaggaacatagttattactttttataaacataaattttgacaactgttgtttttattgtaaccaacaaattgaggatctttatagcttatagtttctttggattgattacgtaaactaattgaaacgactagtacctcctcccctatttgactaggatacaatcatacaacgtaacaggttgaattgccgacatatgattttattaaaaccagtgtttaaaaactgatattagactatctggtcgaaccaaattcatttataaacaaaataaagcaacacaattaccatgaagactagaaaaatacgataagtaaagctataaaaatatggtgttgtttcaatttttaattatcttgttttactcttaatattagataatgatattttagctgtatgcttgacattgacatatgttttgtttccatttaagaataaagcactgttggtacaaggttatatgctgtgtcttaactcttaacacaatattataacttaatccacaacctttattaagaactaatttcgtaagatatggatttggattacgaaagtgactgttgagtatgaagtctatatcatatattaatatgaaattaggttggtctcttcatgttttttagatcaaccaagcagaagagagtagagggggaaatatcaacgtgaatgtcacgtgaacggagtcgtgcgtgcgtgactactcgtggcgtaatgtcgggtcgaccactgaagtaatgggctttaaaagttgaaggaccatatccatatggctcttgtgggaaccactttacacttagtcttgctcgtgggatcgatctgttttttgtttcttccttttgctcaaaattgatctggttttgctattattatatcatgactactagcaaaacttacatttttacttatcccatcaacattttcagatcaatttttttgtaaacaagattaaagtgaaattggactaacaatgattttcaaattaggtgtgtatgccctgaaactcagtatctgcttcatcccgcgatcttccaaatataagaaaaaaacggtcacctaatttaccgacaacaaacctaatccactaagacattattcaagatctagaaacgaaaagtcatgagatataaagatgcacgtgggaggacaagggaaaggacagaaactgtttggttgggagacaaataagtgttacgaaaggggaagtgaataagtctctctttaaactcaaaacactgagaaaagagtttgagtgtttttgtgacagatttggcttactgtcttgtctccgtcaagttgtaaataccaaagtcttatcatgttttttctctgtctcctctactacaattttaagaattgtaccacaaaccgatccattcattcatcatccaagcttcttgattcaaactggcaacatgttaactcgttatagatgatagtttggtgagttctataaaattgcgattaaagttatttctcttacaatttttcttggaacattttatatatgtataacttgtacatgaacgtagctcaaaagctaagaaaaaggtagcgccataatcattatgatgaataaaataaaccccagtttctctgaaagtgttggtttttaccacaccatattctagaagttaatttattggggttctaccacaccatatgcaccatgtgattcatgttattgttctaattctaaaactttcactgcgattttaattataatggttcactaatcactatgaaaacattagatgaaaattactaacacgtgattcttccagaaatcccgaatctctcagttacacaaaaagtaatatttttgtcatgacccagctttttccaatgccgtacataagcatggggacaggcaactaaaaaagctacaccaatcaaggccttagttcataatcgaacaatcacgtttagcccaaactttaaatgggcttaaaataatgtgggccttgacccacaaatagaaaaacacgtgacattccctctttgataatgattgcaaaaaaacagaggtgtgtttactcaaacgtttcccgtgtcctctacggtcagtatcattctttcggtgacgctaatttctccggtggttggaggagaacaaagtctcaaagagacggcgaacgaagacgaagacgaggagcgtggagagagtagacggcgaacgaagacgaagacgaggagcgtggagagagtctacctctctcgacg

SEQ ID NO: 3031 - DNA, 3000 bp, Unknown
  misc_feature (1)..( 3000): cDNA_ID_1026104_gDNA_ID_1620621_Annot_ID_47037 3000 nt of promoter + ATG
aactactgcattttccttaacaccactctcaattcagctttgacgcagacaatttgtggcaatatgaaggttggtttcactttattagtatctcctgtacaaaagaaaaatgtgaaactaatctgccaaggagagactttgaacattatatcatcgttgcaggatctattcacggttggactaggctggatgctctttggaggactcccattcgacctggtaattttcttcaacattcctattattccattgaacctaaaatcggcatctacgtttgctacatctcactacctttcttttttggttcatttacacagatgaatgtgattggacagctttttggtttcttcgggtcaggtttatatgcatattataagatcatcgggaggtaacaagtccaaaacaaagaaaagccaaagaaaacatgagtggcctagtgatgataaaggctcattagtttaaggaaaagttgttgactagtagtgttcaagtggagatagagtgttgagcttttggttttggaggtgactttagagtagtattaataatgaaaggcctaattttttgaacttgcgtcttgttcttcttcagttttcaacaaggcgaaagattagactatggacaaaactgattttctatttttttgagatctactgactctaatttatacaactgcttcttttcattgtatatatgtagtattattatacacacttgagaaaaggatgactgtaattatacaactgcttcttttaaagcgttcaatgatgatttggtactaggcattcttgcaaagagctcggtgaaagcaaaaataattacttcaacggttaaaattgcaagtactagaaaagaaaaaaagagcacacccagtgggactcgaacccacaatcgcttgattagaagtcaagcgccttatccattaggccatgggtgcttgttgctacatccttctgagttgttttatatatcatataattgtatttgtaatcgtgttccataccttcttcaaaagcaaaacattctctcgccggtaaaaaagcagagatcccttaaccatgatttccttcaaagtatattccccttcctcatcctcttcccatgctcatggtatcaatcttccactctgacccaactcaagctctgatttctcctactccgtcgccaaaaatcttggaagtagatgtcttagcccgggaaaatcaaattttctcaataatcaatctatggacgttccaccacgccgctctttggctgcgtctctctcgcctctccggctaatcgatggactccctcgtcggaggagtttcaattataatcagatgcctgaagagcccatcaaactcactgttctcaagcttgatggatcttcctttggtacccattactcatctcctacttgcttttaccattaaattttatatgttaactaagaatgtttgctcaaaagaactaaaagttattgctttacaacgaattctagttttttctgtgttgtttcgtttgaggttgtccagagaaatttgactggtttctgaatttgtgatttagtacaattccctttaagcgtaatttggatttgtaggtattcaagtgttgaagacagcgacagtaggggagctcaagatggcagtagaagctgcgttttctcacttgcccatctcaggccctggcaagatctcatggtaccatctctgattctttgacttgagttattcttataatgattccgattttgtgtctatattaggataagtaactgctaaatgattcttgatgatcctatttttaccctgtgattataaaggccgcatgtttggggacaattctgcttatcttatgaagataaaagattgattaatgagtctgagtacctcactgaatttggcattaaagacggcgatcaggttacccttttactctttctttatcacttgaatacatcaaagagtctatgcttatgatattatttcatctttacatgtgatgtcgtagaacgatgcatttgggtagctagagtctctaacctggattatgtagattgttatagtccagtttagttttgacaacatagtgctttgttttgatgctctataatgtgttttatctgccatcattcagcttcggttcatccgccatatctcaaactactgcatgttaatggtgaagcataagagcaagacaccccgtgtttcttctttcaaacaactcaaactgtaagaacttttggtgttaaaatgtttttagcatttcattatccggaatctccatagtaatacatgtttttggaccaatcaggttctcaaccacaccggaaacccggaaaaagaacgtaataagggaagttgaagaagacggtgttgttgactccatccctcggagccaaccaagctttctagcaactgtattgggaggtttgctctcttacaagtcgacgccaagtcaacgaggtactaaatacagaaacgtgactgcaagtagagtttttaacaaactcattgcaaggtttcgtttcaagtgtaattccgagaaggatgtgtggaacagaaaaaaactcatatccgaaacctaaaaaaaagcactccttttctatcatttgattcttgtagagattttgatttcctaatcttggtgtttatatacaaacttggatgttgtgtgtgtgcaaaatgaataaggcattgtgtatttacgtttgtagtggatataattgcaaccttaccgtcttagccattttaaccttatctggtacagcgttcgcgtttgcgtttgcgtttgcgtttgtgtttgcgtttgtggccaaaacgcaatcatttactttttaattgattttccgctccattgattttaatctgacgaccacagcctttagcttatttgtgtggcgaagagaagagataacattcctaagcaaatctcttctctctcccattcgtctccaaagagattacagttttgagcatttctcatctctcgaagctcttctctgtgtgtgtggcg

SEQ ID NO: 3032 - DNA, 3000 bp, Unknown
  misc_feature (1)..( 3000): cDNA_ID_1819251_gDNA_ID_1620621_Annot_ID_47038 3000 nt of promoter + ATG
agttttgacaacatagtgctttgttttgatgctctataatgtgttttatctgccatcattcagcttcggttcatccgccatatctcaaactactgcatgttaatggtgaagcataagagcaagacaccccgtgtttcttctttcaaacaactcaaactgtaagaacttttggtgttaaaatgtttttagcatttcattatccggaatctccatagtaatacatgtttttggaccaatcaggttctcaaccacaccggaaacccggaaaaagaacgtaataagggaagttgaagaagacggtgttgttgactccatccctcggagccaaccaagctttctagcaactgtattgggaggtttgctctcttacaagtcgacgccaagtcaacgaggtactaaatacagaaacgtgactgcaagtagagtttttaacaaactcattgcaaggtttcgtttcaagtgtaattccgagaaggatgtgtggaacagaaaaaaactcatatccgaaacctaaaaaaaagcactccttttctatcatttgattcttgtagagattttgatttcctaatcttggtgtttatatacaaacttggatgttgtgtgtgtgcaaaatgaataaggcattgtgtatttacgtttgtagtggatataattgcaaccttaccgtcttagccattttaaccttatctggtacagcgttcgcgtttgcgtttgcgtttgcgtttgtgtttgcgtttgtggccaaaacgcaatcatttactttttaattgattttccgctccattgattttaatctgacgaccacagcctttagcttatttgtgtggcgaagagaagagataacattcctaagcaaatctcttctctctcccattcgtctccaaagagattacagttttgagcatttctcatctctcgaagctcttctctgtgtgtgtggcgatggctgctaattcgataatggcttcctccaaacccctaatctccctgtcatccaaccaacaaccaaaccgagtccaaattcccaaattcgccaaacttccccaaattcccaaatccctcacttcctccaccgatctccgtagcaaagcactatcactctcctccgccaccgccaaatccttagctttaatcgccgctttcgctcctccgtcgatggcggaggcgatggagaaagcacagctcttcgatttcaatctcacgcttccgatcatcgttgttgagtttctcttcttgatgttcgctctcgacaaggtctattactctccgcttggtaacttcatggatcaaagagacgcttccatcaaagagaagctcgcgagtgttaaggacacttcgactgaagtaaaggagctcgatgagcaagccgccgccgtgatgagagcagctagggctgagatcgccgccgcgcttaacaagatgaagaaggagactcaggtataaaagaaacaacaatgcactcagagtgaagaaattggtaaatggattgtgtattttttttgcaggttgaagtcgaggagaagctagcggagggaaggaagaaggtggaggaagagctaaaagaagctttggcgagcttggagagtcagaaagaagaaaccattaaagctttggattctcagattgctgctcttagtgaagacattgtcaagaaggttcttccttcttaaattatatttttgttaactgtgtaattctctgtctctctatctcaaaacttatttacaagaaattactgtaaatctcttcttcttcttcttctctgtttcttggattgttcgtcgttcaaagaagaacaatttttattttgtaagtttataaataattagctctcttctgtcattttagatgattaaagtacaagtatgtatatcgaggaattagttgttacggataaaatcttcatgcgagtcttatcgtcactagatttatgtctatttgaatcgattgaacaaaaacgcaaatggcaggagttgcttgtgtaaagagtagagagaaattgagttttcagagccaaacactccagctttgtccgaaagtgttcatagaaagttaagttgactcttccataacgagctcaggtccaacaacgaagcccaaacctcagttactctatcttattattgggccctaaaacgaaatgggccctaaagctaacgcgggtcggtgtttgattaaaacaaatgacggggcctccacgccttgttccttcttcttcttcttctcacgctcacggttctctttctcttctctgtctttttcagcttctgaagttacttgtttcagttcccgatgatcaattcttagtttttttggcttgttttcttcgtctctctttcatcaggcctttggagttttgtgttaccattttcgctcgcgtcattactggtgttagggttttcttcaaaagcttcttaatccgtcgaaattgctcttttctctccctcattgtcggttactttctttgacccttctcttatgcttcgtaagctgtgatttttttctctggtttcattgcaactctagttcaatttcagtttgatttcttcgcttaaatattttgttctatgagatctgagagttgtctttattgttggcttatttcaatcaaaacattggctggttaactttgattgactcatgattgattctatctagcattaattggttttctttgtatttggttactgttacttgttcttctacttctccacgattctacttctccacgatactgtctctgtcccttgttcgtatcgctaacttattcccatagtgggcacgtctctggtttctgacttttctcttcaattccatgtattgcgttttaccatgatgtttagtttcggaatcatttcttgctttctctatctgcttgtaagaatagttaacaagtgagaggaaagtcctttttgttgcttaaatagtttgatttctgttgttgagtttatgcgatatcccaactggtgaaactgtgtttattggttcagacagagataa

SEQ ID NO: 3033 - DNA, 3000 bp, Unknown
  misc_feature (1)..( 3000): cDNA_ID_3092812_gDNA_ID_1620621_Annot_ID_162322 3000 nt of promoter + ATG
tctcctgaagtagattttgtgatacctgaaacgcattagcttttttgtaaagctcatcttgaataacggatatatcatgcatagctagctccaacaatggtttctctttctgcaactcctctcgtaaatcctccagcaattctttttggaccgatatttcccgctcaagcgcaaaatttttagcctcaacaactctgagctttactctctcactttcaacttcagtgtgcgcatccctcaagctttgcatatatgacaacacacttttcctctgttcctcgagttcctccaattgtttttccaatagtagctctttttcttccatttgctccctggaaaataccaaagcttcccgagaagaaataagctcgaatcttacatcagtcagaagctttttcactttcatgaagtcctccatggtttcattggcttctcctaaacgtttcacggtttcctctttaagcttattcacttcatcctgggctatcagccactcttctgtctgtttcttcaagttggcttctgtttctctaagcttttcttgttcaagtttcttcgtagccttagaaatctctaattcttcttccttctcctcaagagctctctgaagtgcatatatttcaccttcttgtctcttgacaacttcgttggctttgcttaagagttgtgacttgctttcaaattcagaaatagccatagaaacctccttgcttctgtttgcaatctcttgacgcatcttctctagctcttcctctttcaaagtcaaggacgattgcaaagcagcacgttcctcgtctctttcccttagcttatgctttaactcttctatctccctggcttgagaagctaactccacatttgcccgcttcagctcctcttgtagactctcatgcttcaacgaagcttcagagattgttttctcacgtttttctaactcctcctttgcccggttaagtttatttttgtcagagagaagcttcctctcagcatcgtgcaggtcctcttcccttttcaacaaggccactagcgcagcctcaaggtcagactcaagcacgccaaggtttgaataggggagatcatcatcgtcaggataaaccgagtgttgattggtttgtctctccaatctgtgtgtccgagcaaataatttatcgaaaagaacatttgcagactcagctgagccattgtcgttgatgttgggtcttgtattgtgcaagactgattgaacactcagtaaaagatgtctctttctccttgtaatgctcgggaatgcgacaagactcttctgcttatggtttactactcttgtcaaacaatactgcataagaaaaaatcatatggccgacatcaaaatcaaaatcaaaagtttgattattttggacagacactaatcaatatggatgcaagcaaacttattcaaattaaaggaacagtattgaaatttgcaatctttttaagccagaacaaggaacaatcagaacaaggccagcaaaagtcaaaaattcaagtttgataaagttaagagtaagtaaagtgttgtgaatcagcagcgatatataaatgaaaatataggggataatatagagaaaggtaaggaaacaaacatcgcagggagagggagaggagaaggaagcaagattcaagcgaatggcctgagagaaacccatcctgagagcataattatgcaatcgccatggagcttaaagacggaacaaaacccaaatccactggatcaaatttaacaagtgggcgttttggagaagaatgcttacgagaacaaatccaaggaagaagaagaagaatctagctagggaatggatattgttacaaaattcttttaccaaaaaaaaggatacaaaataataaatagaggctcgcgttggcttgcgagttgtggtcgccagtaaactcgaaagtcctttttgcccttattcataagatgcatgtcggcattgtccaaatacacggccaagggatctatttgtaaaaataatggactcttcttaattacgtacgtggtaacggttttctagtatgacaattctctttctttcgcgtagtcggctagtcgcgtggttagaaatgcttacacactaaagagtatgttatattaaactggaatataaatttaagaaactgaataaaagtcatcaggcccatgacattggcccaatagacccaatgaaaaaccaatccatcagctagttttcttaacatatcaacccaacgaggttgtatcttgttacatttgcaagtgaacttttttatcattaaaaaatgtaacaatggtatttttggtttagtgttcctaaaatatttgtttcccacataagattttatctacaccaaatagtccaattgtataatataatccatcttcacaaaagcattttaaaggatatcctaccttctaaattccggcgaaaaatatcttaaatctgaaaaagtgatttatcgtgaatagtgtaatgttagcaaaatcttaaacttcaaaaaatcgtaaaacataaagaattaagtgtgacggattaattaagatatcgaaaccaacacagtaatcctcatctatgacttggaaaaactcataagtggcaagtggagttcgagtttggtcattattgtgaaacaccaaacctaatccacttacaaattcattaaaaactacaaatttgtgtggtagtttttttttttttttgggaaatttatgtggtagttaattagttaacaaacaattatatataaatacaaattttgtttggagttaggtccgcttcagcctgcttaagcgattctaagcttagtcgtataatcgtattagcaaaagctcgaacagtttacttctttaccctggaaagtcttatcatcatcagttcgtgtcgtttgactttttaaactttgcaaggaagggttttgtggtggtttgggagaattaggcaattgttggtgatccgatttttctgggtttggttgggttccttttttattttttaataaaaaaaaaaa

SEQ ID NO: 3034 - DNA, 3000 bp, Unknown
  misc_feature (1)..( 3000): cDNA_ID_3070630_gDNA_ID_1620621_Annot_ID_162319 3000 nt of promoter + ATG
ttcaacatagaagagtgtgaaacagattcatggattgaacataagccgttgattcaagatcaagccgcgtttcactccatagacatagaaggtgtctcacaacttcagaaggttcgttcaaaccttaaggattttgataaagttgatgcaacaatgaatcaaatgctgtcatcaattggatttgttgttgatgaattacactctagttgtggaagtgctaccgtccatgtccagaagaagcctagtaagtctctcaaatcctggaagttcaaatttaaaaccagctcacaagaccaaggggatcatgaatcacttccaatagggttacatatcagattcaagtcctggaaatttaagttcgtgaatagaaatttacaaatgatgagagaacatggatatacaacacactttcagctaatgtctgataagagagaacatcaagagatgttcattgtggccaggattgttgatgtgagatgtttgcttagcatgatacttgggataacagagagtgatgcaggtcatggagaacaatttgtgtatgaccggattacaatggtaaagaggctgctgttgcaaaccagtttagtcattcaagaagtgatgagaaacaaaaagatcaagtttaccaaacggtggtggttcaagtataaatttggggaagagggtttcacgagactgaattctttcaatttgcgtatgacttatcattttgcggtttggcattgttggaagagcaagaccatggtgcatgttgaaatgagtggtgatcactggtcttggatggtcttagtcatgaaatctacaacatctagctttttgtcacttctctatgatcgaagaatgggagatccaagcagacatgaaacgggtcgggagattgtgtcacttcagggtcaaattcacactggttctcctatgattcagtgcataaagatgagcttcagcattctccttcttcagggtctgtttcagagtttgacaatgaagatgctcacatatatgcacttgtttggtagcaaaagttgtgtttcaactttgggagtgaggaaattaggcaaagattggtggtttaaatacaagacagatgcaagggctacagatttactgacaaatccgtagaaagagtaactacgaattagacaacagaggatgatgaagttgtcacaagcttggcgattcaaggtttaggacttggtaaaaggaaagctatgattcatgttgatttatgtggaagaggctacatggagttactctataaactggcaaatatgtttccatgaaccttgaggtcaaggttctctgaagaggggagatttgttataggaaaactgaagtcaagctatagcgttcaggggtcaagctggcgagctggaaatgtgaagtcagggatgttaagcaaagcacgtgttgtgagctggcgatctggaaatgtgaagtcagggatgttaagcaaagcacgtgttgtgagctggcgagctggcaatgcaaatggacgttaacggcgatcgttattaacgtggttaacgtttactttctttacctttttgtataagagcaacatgttatgctcatgctttcattatcgaataatctggttgtaatctctctctagagacttctagatttccctcatcgttttaccggagctctcgtcgagtctcttgtaggtgagaagttgatatcgcgtctctttacgaacgttgtatcaagtgtgttaatcggagtactctattttcatctctctgttctattgatttcaaactctgtttattcatttctggtttacgttaacaataatcctgcaacttggcgccttcattgattcgcgagctggtcgctccgacggcgcagctcgctcttcgtcctttaattgctatatccttctttcgctgcttcttctcgatcacgtaacatgtccgtgagacctaagatggtgagagaagcagagttgcatgctcagaaagacaaagaaaagaattgatcgacaccaagaacacagctgacacaacaatttacagcatagagaagagtcttggtgaatacagagagaagatcccaagtgaaatcgccaaggagattgaagatgctgtggcagatctaaggagcgcttcctctggggatgatctcaacgagatcaaggccaagattgaggcggcaaacaaagctgtttctaagattggggagcacatgtctggtggttctggtggaggctctgcaccaggaggaggatctgagggaggcagtgatcaagctccagaggcagagtacgaggaagtgaaaaagtgaggagatttggtaaattcttgccacttgggttttaagagatgaggtttagatcatggtgggttctatgtccaaggaacttttgccttttagaacaacgagcagtggatatgtttctggaataagcttttgtcagggaactaaacttaatgtttctctgctaaaaaacctttgttatgtaatgtgatggttaaagagaagaagttttcaaaattttgtcactttatactttatagtttattttcattggattggatattatctttctttaagcttataagttttcaaagaagcggtcacaaaactagcccgagaagaagctaccacaaaactagcgatgtaagaaccaacgacgacacagctggctagctcattgtttggttcttattctttggaacccaccaccacgccaaaacttatacggaacaactacaaccactacagtggttccgaagtttttatcacttgacttgtttgtagcactcaccggagagacccgctaaaggagccagaggtttcaataatctcattgtgaaacgtgcggataactttcgttggggaatttgtaatttacgcaattaccctctaatttattttaatttttatgaaataattagggctgatttaatcgagatcccatttcttttgttggcttacttctctcgaatttacgcaggaagatcattagcagagaattctcatctgattcagtcc

SEQ ID NO: 3035 - DNA, 3000 bp, Unknown
  misc_feature (1)..( 3000): cDNA_ID_2132751_gDNA_ID_1620621_Annot_ID_162318 3000 nt of promoter + ATG
ttatttaataagctttattgaaataatgaactttcctaaagaataaaattaattttgtaaacaattaataaataatctgtgttgctatgaatgaattacagcttggacgcggatgaagatcgtatatggctggtagatgttaagatttattattaaggaggagcaagaagagtgaaggcactgcgtcatttgctgtttttactgtgctattttctatgataattatgtttgatagaagaatttgatatttttttatttatttcttgtcaataaaccttaaacatattaactgaaaattctacgattttttaattaatcatagtttatttgctttctacattgttatattaataagattatatatatatatataaatgaattcaaattaaatatttttcctttttcttttgtcattgtagattttattaaaaacatgttggtggaattacataaaattagaatatttttttatttgtttatttcattaatattgttgacaaaaatagttaattaagtaattttataagtttctatcttaaattaatgtcagattcagcagttaccatttgaattctaaattattcaacgagattccacaaaaaatcacaaaaacaaatagtgagattcagcggttaccatttacacaaattgttgaattcattaaagttagagtcaccgtgtttagtacttggttcattaattatatagttctatagaggatcatgaaagttatgtataatctaatgcatatatgtaattagtgaaaacaccaaaaaaaacagaaaatatggtttagagggattgacatggcataaaaagcaatgttggatcgctgaattattttttcttggttcggtaggactcggtccaatgttggatttgcgaatcgctgaaataaagagttttggttcggtgggacttggtattggttgggctaattcagcgtgaataaaaaggcccaaacgtatttaaatattgggccgggtctgtgggaaaaaggcccaaacgtaaaccgaatcgtagattgaaatgaccggtctagtttcagtcttgttcgcgagcgtcgagagaaatcgagaggaaaccctaatttggcgagtggaggagcaagatgatgaggaacattggatctgcgtgtgcgaaggtaataggaaatatcggaattgattctcatgtttcaacggaggttttgttgcgtctcttatcttcctcaaaatatcctcaggaaccttccatatcgtaaaaacaacacaatgtaattagtgaaacaacaactagaaatagaatcatgtacatttatgaatcttaaagaaacagaacgtaccgcaaaagctgaccggagagttctatcgtcgaaacccaataaaaggtctctaacactcgagtaggctccaagacatggatcgtttaaacacttccccacattaaagattgcgtaaaccctaagtttctcgtttctatcgatgattaataagaaacgttgatctgtgttgcgatggatgaattacagcttggacgcggagggagatcgtatacggctggtagatgtgaagattcatcactgatgaggagcaagaagagtgaaggcactgcgtcatttgctgtttttactgtgctaatggctggctttgcgggacatttttggtacagaggaaaaggttaatttttcgtttacaaaattagaagatcacggttgctgtttgtatcttcttcctctcacaatcctttgttttatatatacacatatatgccagctactctagaacgcttagccctctccagagctattgatgaaaagagtaaaaagattcgtcttcttaaacgagaagtggaggcgatcgaactaaaggtaagaacactcttcgtttactagcccattagtaattctcctttgaaactgtacattttagcttttgggtaacacaaatctttgacgatgaagacaaattttggaaaacaaaatgtaattcgtttctcttcgtctcaggttcgctgaatatgtgatgagatcaaggagatcaagatcagtttgaagtcagaatatatatatatctttgttatctcgttgtgtacaattaattctctataaccaagtatggttttaagttttgttacttaaaaaagtgataataattatcattacgtgttggctgctccacatcttacatgcttgtgaatggttaaaaaaaatgatcactttgtactgaacctcgctttactgtcatctggctccaaagggtttctcattctcaatcttaagccctctaactttcttcccattgataacgacaaggccatcctcggggatgttgggatcccattattgcacagacaacaggtgacaacaagagcacatagaactcgaattcgaactacaattaggtaacaagtgagttagcaaagatacagatcataacccaatattcgaattacaagcttttggtgatcaattctgttggtgcaggaattagcacctccgacaataccaatttaaaccaaggaataacgtgaataaaatcgagaattcgattgaaccggggaatcccggctagcccgttaatgggcctaagtcatgagctcgtcagaagatttgggtcgacaatcgagatcgccataggcggcttctcaggtcgtgtaaagggaaaacttccatttaaggaggatctcatgaagaatggaagtaatgaagatttagacctaggataattagaagtttatcatattttgatacgttcaacccattgtataaatagggggggtcaaagtccccaaggatcatctttaaccgaatacaagagactacaattatagagcaaaccccagctttttattcaagcaactttgttctctccctttgattatttgtgagctaagagaggagtgaatttgtctaaatcccttagtacaaattcattgtttgattacagaatcaacaattggcgcgccaggtaggggggaatataaacaaattttctctaccctcctttaatcaaagcaagc

SEQ ID NO: 3036 - DNA, 3000 bp, Unknown; identical to SEQ ID NO: 3032
  misc_feature (1)..( 3000): cDNA_ID_1819251_gDNA_ID_1620621_Annot_ID_162314 3000 nt of promoter + ATG

SEQ ID NO: 3037 - DNA, 3000 bp, Unknown; identical to SEQ ID NO: 3031
  misc_feature (1)..( 3000): cDNA_ID_1026104_gDNA_ID_1620621_Annot_ID_162312 3000 nt of promoter + ATG

SEQ ID NO: 3038 - DNA, 3000 bp, Unknown; identical to SEQ ID NO: 3030
  misc_feature (1)..( 3000): cDNA_ID_3092804_gDNA_ID_1620621_Annot_ID_162311 3000 nt of promoter + ATG

SEQ ID NO: 3039 - DNA, 3000 bp, Unknown
  misc_feature (1)..( 3000): cDNA_ID_2150159_gDNA_ID_1620621_Annot_ID_162303 3000 nt of promoter + ATG
atacacattcatgtacagttatggtgttatcacacaaccgaactgagtagtttattgacttgtaatagtgtcgctactttacctttttccaaaaataatgcatgtgtgaggagttgtcgacgatgatgaaaaaatgacttatgatattcttacgaaataaatctcactaaaatttgaggtttttttttttttttttgtcgtaaaatttgaggtattaacccaacatatttggatgatgcaaataaaaactttgaaagtaacaacgttaaatagcataagacattcgttttttcactaagcaaaacagtcgtgttgtacaatttaaggtaacaaaaccgtaaaaactgaaacacatatcaagagattatttgacattttcgaactgtgttacgttcttgactccagtattcacatctagacgagacgttactgtttattgtaaccaataatgtatatatgtttggtattcttatataagtttcttattgtttttttgcattgccaaagtgttttatgtgtctcagtgatcaacatcataatttgtatcaaagtcactgatatctttcttctcaaatctagtactgcataatataattttttcttagtaaatgtgctacaattttataattgttaaacttagcgtcactcatgagtcatgaaagctgatgaccaaaatcatacaggatataatatatgttgggaagaaaagagatctggagcaacacctactaagttcgctgattagttttctaatagttacttttaagtattactaataaactattacttcctctgtagtcaacgaaataagtgtagttaactttcatttgatttcttaaaatataaactttcattatttgatttaattcttttggcctaccacaagcttttgggtgtgtacatgtgggtgcatgtatttaaatatgtaacacttgtttttttatattcataaaatgggaaatgctgtacttgcttattaattactcactatttacatattccaactttgaaatattgttgattggtgaaaaaggtacttcataataatttaactaaattgtaccatcatatattcgtctaagaaaaactcaatcttttatcattgttgatttcacacacaattccaaatttgacacgagttatataacatgatacccatattcaacaaaccactagactctatatttatctttagttttaaaaatttgtcctcaatattaaaattaaggggttggttatatatatcaagaaaaataaaaagattccatgaggtggctttaatagttctgattaaaggtgttaattaattaacaagatgaataaaaggttccatttaagagtaaagtatatgataacagtgtgggggatgatattggttcaccttaataaagcgattgcaataattttatgtataactaacgaaaagtttataccgtttgattaagaaaatgagaaggtcatgtccctctctctctctctttctcttgtatttaaatcaaaagcaatctctaaccatatccaaaatcccccctaattccgggttttctttttataacaagtattaatttggacttggttcccacttatgtttcttctttttttttgccaaccacttatgtctcttttttataatcctaaacttttcatatgttttttgaaatgtcccatctagattcagttagtggattttactcaacttgtaatacgattctactacataagatgagtgaaagagttaacatgcgcttatttttaaggttgaaaatcgcaatgtacactctctagaattatagtataaaaataaaaaaaaatctaattcagatttttgattgttacaggctaacagcaaaattaatatggatttaaaagattaatactggaaaataataataattaaaagagttttaattaaaacttccccccccccccccctcaatcccacgattaattaaaaaaggaaaccaccgaataaccgtaattactataatgacgtggcacttagatttcgaatagccgctgtaataaatattaaaaacgttttgtcattttcctttttctcttctcaaagaaaaaaataatcactctctctttttttttttttaattcacagacagaatcaaaacttgtgtagaccgagaatccatctctcacaaaccccaaaccaaaaaaaaatcaaaaaaaaaaatcaagaacaaatcgaaatctcaactctgtgaaaacctcgtccttgttcttcttctgcttctcccattccttcgatttttgcttcaatggatgtttgatttgctctctgactgcgtttggtgagcaacaagtccgtcttagtgtttatgttttgttttcttgcctgatttttcttctttcttctctatttggttgctgtctcaaatggcggatgttcttatgaatctgtggaacttatctacttgtctgttttcatttcatggttttgagtgtcggtagatcgaaactacaactgtcacttaccgattcactagtgagctcactaccactagatttagttttttgtctgcattagatttgcttccactcccaggtttgatttgcgtttctccgatttgtttacttagatcgattcagtaatcacaagttaggttttttctttctgttttttttttttcctgtgtggatatttgctctcgttgatcctgtggtgtaggcagaaaatgttgattagatgatttgaaaaaacctgacttatagggattatcttcggatccatatacaccattatgagtagactatgtatatgtattggataaacaagtgcttctatgttcaacactataaaaatgtagcttcaatattcgtcactgacaatgctgattgatgtatagctcatttcagaaacactagaaaaagctctgatttaagtgaatgctattttaggtatactctacaatacggttttattagtggtgtgctaattccttttctgtctcttctatattttgttgatttgtagtttactatactatg

SEQ ID NO: 3040 - DNA, 3000 bp, Unknown; identical to SEQ ID NO: 3026
  misc_feature (1)..( 3000): cDNA_ID_1808734_gDNA_ID_1620621_Annot_ID_162302 3000 nt of promoter + ATG

SEQ ID NO: 3041 - DNA, 3000 bp, Unknown
  misc_feature (1)..( 3000): cDNA_ID_1819247_gDNA_ID_1620621_Annot_ID_47039 3000 nt of promoter + ATG
tcgaatattgggttatgatctgtatctttgctaactcacttgttacctaattgtagttcgaattcgagttctatgtgctcttgttgtcacctgttgtctgtgcaataatgggatcccaacatccccgaggatggccttgtcgttatcaatgggaagaaagttagagggcttaagattgagaatgagaaaccctttggagccagatgacagtaaagcgaggttcagtacaaagtgatcattttttttaaccattcacaagcatgtaagatgtggagcagccaacacgtaatgataattattatcacttttttaagtaacaaaacttaaaaccatacttggttatagagaattaattgtacacaacgagataacaaagatatatatatattctgacttcaaactgatcttgatctccttgatctcatcacatattcagcgaacctgagacgaagagaaacgaattacattttgttttccaaaatttgtcttcatcgtcaaagatttgtgttacccaaaagctaaaatgtacagtttcaaaggagaattactaatgggctagtaaacgaagagtgttcttacctttagttcgatcgcctccacttctcgtttaagaagacgaatctttttactcttttcatcaatagctctggagagggctaagcgttctagagtagctggcatatatgtgtatatataaaacaaaggattgtgagaggaagaagatacaaacagcaaccgtgatcttctaattttgtaaacgaaaaattaaccttttcctctgtaccaaaaatgtcccgcaaagccagccattagcacagtaaaaacagcaaatgacgcagtgccttcactcttcttgctcctcatcagtgatgaatcttcacatctaccagccgtatacgatctccctccgcgtccaagctgtaattcatccatcgcaacacagatcaacgtttcttattaatcatcgatagaaacgagaaacttagggtttacgcaatctttaatgtggggaagtgtttaaacgatccatgtcttggagcctactcgagtgttagagaccttttattgggtttcgacgatagaactctccggtcagcttttgcggtacgttctgtttctttaagattcataaatgtacatgattctatttctagttgttgtttcactaattacattgtgttgtttttacgatatggaaggttcctgaggatattttgaggaagataagagacgcaacaaaacctccgttgaaacatgagaatcaattccgatatttcctattaccttcgcacacgcagatccaatgttcctcatcatcttgctcctccactcgccaaattagggtttcctctcgatttctctcgacgctcgcgaacaagactgaaactagaccggtcatttcaatctacgattcggtttacgtttgggcctttttcccacagacccggcccaatatttaaatacgtttgggcctttttattcacgctgaattagcccaaccaataccaagtcccaccgaaccaaaactctttatttcagcgattcgcaaatccaacattggaccgagtcctaccgaaccaagaaaaaataattcagcgatccaacattgctttttatgccatgtcaatccctctaaaccatattttctgttttttttggtgttttcactaattacatatatgcattagattatacataactttcatgatcctctatagaactatataattaatgaaccaagtactaaacacggtgactctaactttaatgaattcaacaatttgtgtaaatggtaaccgctgaatctcactatttgtttttgtgattttttgtggaatctcgttgaataatttagaattcaaatggtaactgctgaatctgacattaatttaagatagaaacttataaaattacttaattaactatttttgtcaacaatattaatgaaataaacaaataaaaaaatattctaattttatgtaattccaccaacatgtttttaataaaatctacaatgacaaaagaaaaaggaaaaatatttaatttgaattcatttatatatatatatataatcttattaatataacaatgtagaaagcaaataaactatgattaattaaaaaatcgtagaattttcagttaatatgtttaaggtttattgacaagaaataaataaaaaaatatcaaattcttctatcaaacataattatcatagaaaatagcacagtaaaaacagcaaatgacgcagtgccttcactcttcttgctcctccttaataataaatcttaacatctaccagccatatacgatcttcatccgcgtccaagctgtaattcattcatagcaacacagattatttattaattgtttacaaaattaattttattctttaggaaagttcattatttcaataaagcttattaaataattcgaagaacattcaattattttgatactcaccaaacaaaaattagagcaataaaataataataataaaaaatagagaaacgatttggtttttaaaatttgaaaaactaaaagtaaaatgatatgaaaaaaattaaaaatgtgtacctcatatcaattttcgtaagaatgatataaatattttgcacaaaacagagaaaaagaaaagaacaatagtataaacgtatgggcttgggccggtcacctagcaaagttattgaatgggttcgttcagtagtacaaaaataataaaaattcccaatcgatcgaaatattattaaaagagggaaggagcaaaaaagccctaattttcggctggaggagcaagacgatgatgacgatgatgatatgaaggaacctcggatccgtgtgcgcgaaggtgagccgaagacatgaatcatatgaatgtttcctggtcttgttctttccagtgattgatttatttttgatggatgtttacagtttggccgcggaacgagatcctatagcactaagaggtctggccaatctaaagatagaactttctccaccatg

SEQ ID NO: 3042 - DNA, 3000 bp, Unknown
  misc_feature (1)..( 3000): cDNA_ID_2993630_gDNA_ID_1620621_Annot_ID_47042 3000 nt of promoter + ATG
caacaattggcgcgccaggtaggggggaatataaacaaattttctctaccctcctttaatcaaagcaagcatggttcaaatcgtcatcgaccccatcattcctccagtcaacgatgatgggacggaatcaagtctcctccacggaggagatccaccatctaccgtcgaagtagcggccaaaacgaccgtgaatcaaccaacacacggggagacccctatcgactcaccatctttctcattggaggacatcaaagccatcctcacaaccgtgacgaaagatctctctgaatcagtcatggagactaatcgccgactcgacgagctgccaaaaggaaggcggctggggtcagaccgcgccaaagccgtccaagacgaggtcgagcggctcctaaaagccggcctgattaaagaagtacaatatccagaatggctggccaacccagtcgtggtcaaaaagaagaatggtaagtggagagtctgcgtggattacaccgacctaaacagggcttgccctaaagacagttatccactgccacacatagatcgcctagtcgaggcaacgtctggaaatcagcttttatctttcatggatgccttctcggggtacaatcaacgaaaaacctatcttctataccagtaaagccctgaatgacgccgagaccagatatccgaccttagaaaagctggcgttggcggtgataacggcagctcggaaactccgaccttatttccaatcacattccatagtgttcactgatcagccactacgcacagtgctccacagcccaaaccagtctagacgaattgcgaaatgggcaatcgaactgagtgaatacgacgtggaatatcgctctcgcccgagcctcaaatctcaggtcctagcggacttcatgactgaactatccccggatgtgattgacgttatcccggacgaaaactggatactctactcggacggctcctcatcattacaaggctccagcctcggaattctacttcagtcaccaaccagagaaatccttgaacagtcacttcggctccagtttaaggcatcgaataacgaagcagaatacgaagcacttctcgcaggacttcgactcgctaaggggctcggagccaaacagatcaaagctttcagtgactctcaactcgtagtcagtcggttcagcggggaattcgaagctaagaacgaaagaatgcgggctcatctttcaatggtccacgtccaaggacttcccagaatggcattgtagattggttccgatcttcagaaagagatcagcgatcttcagatcgcattggttgctgtaaaagagcacgggaagagggagtgcaacaggttgcggaatgaccgagctgctaaagtcgcccgtactacaaagaaagcccaagctcgtcttgatagagtgaaggcttatctcaaggagcaagaggacctcgtcgggccaaaggtggatgctgagaatcaagccagaggcgctgaggagatagtgggcatccttatgcagagaggtgcgaagattgcggcatctgaactcagcggccttaaggagttaaccaaaagggcgaccgacgaagttaatgccttgaacgttatcgagctcggggacgatgatctgaacatgtccccagatcagctcggtttttcgaggcaaacctcccaagttgctccagtggcggaccagcacggctcaaatgtcgacctcgttagcggaagtgatattcgacgtgtaagcgttgaagaaacgaaccagacgacctgaataggtcgtctttgtaatctattttgaaatattgatcgtggacccaattttcggggcgatctcaaaactcttatttaaccgtgaacccactttcggggcggtttttaatttttacttctacgtcagggtcgacctcgcgtcgtatgagcgtccgttctcggggaggaaaaggatgtggacggagtttcctggtagattttttttaaatagatagggtaaagatatgtcgatcccgattagattctcatagctttttcttttgttgcagatcgatacaggcctagtccggattttcccgtcgagttcgaaggagttttagaggcgatcttccgagctcgtcgtcgtacctggaaagacgtcacgaggtcgcgcgtcaacaggataatggggaaggtcaggaaatccttcattagcttttaaacatgccacctcccccagctcccatcgaagaggaaagacagcctttagacggagaggcggctgcgtcaaatcctcccgttagtgctggcccttccggtggcgaactggtttgaagtttggatccttattgagcttatgacaggttacctccggggcgattcctgtcatatccttcgtagaccaagcaaaagatgacgacctcgatttcaggaaggcgatcagctcttcctttatctctccttctagctcgcttccgataccgaccgtccgagatggatccgactcgtcgatgttgacctggataattgttataggaaaactgaagtcaagctatagcgttcaggggttaatctggcgagctggaaatatgaagtcagggatgtttagcaaagcacgtgttgtgagctggcgagctggatatgtgaagtcagggatgttaagcaaagcacgtgttgtgagctggcgagctggcaatgcaaatggacgttaacggcgatcgttattaacgtggttaacgtttactttctttacctttttgtataagagcaacatgttatgctcatgctttcattatcgaataatctggttgtaatctctctctagagacttctagatttccctcatcgttttaccggagctctcgtcgagtctcttgtaggtgagaagttgatatcgcgtctctttacgaacgttgtatcaagtgtgttaatcggagtactctattttcatctctctgttctattgatttcaaactctgtttattcatttctggtttacgttaacactggtatcagagccaagcgtttcctcggaatca

SEQ ID NO: 3043 - DNA, 3000 bp, Unknown
  misc_feature (1)..( 3000): cDNA_ID_1819239_gDNA_ID_1620621_Annot_ID_47043 3000 nt of promoter + ATG
agctgaagcgggcaaatgtggagttagcttctcaagccagggagatagaagagttaaagcataagctaagggaaagagacgaggaacgtgctgctttgcaatcgtccttgactttgaaagaggaagagctagagaagatgcgtcaagagattgcaaacagaagcaaggaggtttctatggctatttctgaatttgaaagcaagtcacaactcttaagcaaagccaacgaagttgtcaagagacaagaaggtgaaatatatgcacttcagagagctcttgaggagaaggaagaagaattagagatttctaaggctacgaagaaacttgaacaagaaaagcttagagaaacagaagccaacttgaagaaacagacagaagagtggctgatagcccaggatgaagtgaataagcttaaagaggaaaccgtgaaacgtttaggagaagccaatgaaaccatggaggacttcatgaaagtgaaaaagcttctgactgatgtaagattcgagcttatttcttctcgggaagctttggtattttccagggagcaaatggaagaaaaagagctactattggaaaaacaattggaggaactcgaggaacagaggaaaagtgtgttgtcatatatgcaaagcttgagggatgcgcacactgaagttgaaagtgagagagtaaagctcagagttgttgaggctaaaaattttgcgcttgagcgggaaatatcggtccaaaaagaattgctggaggatttacgagaggagttgcagaaagagaaaccattgttggagctagctatgcatgatatatccgttattcaagatgagctttacaaaaaagctaatgcgtttcaggtatcacaaaatctacttcaggagaaagagtcaagtttggtggaggccaaactagagattcagcatctgaagtccgaacaggcttctctagaactattactgcaagaaaaggatgaagaactcgctgaagctcgaaataaattgggagaagtgaaccaggaggtaacagagctaaaggcacttatgatcagtagagaagatcagcttatggaggcaactgagatgctgaaggagaaagatgtccaccttcacagaatagaaggtgagttgggcagttccaagctgaaagtcactgaagctgaaatggtggtggaaagaattgcagaattgacgaacagactgcttatgtcaaccaccaacggtcaaaatcagaatgcaatgaggattaacaatgagataagcattgactcaatgcagcaaccactagagaaacctcatgatgattacggaatggagaacaaacggctggtgatggagttaagcttcaccagagaaaatctacggatgaaagaaatggaagttctagcggtgcagagggctttgacatttaaagacgaagagatcaacgtggtcatgggaagattagaagccaaggagcaggaactcaagaaattgaaagaagaaacgatcaatgacagtgaagatttgaaagtgctatatgccttggcacaagagagagtcggggaaaaaacaatgggtgatctggccatagagatgcttcagcttgaggcagctaaccttgaagttgaagctgcgaccagtgcattacagaagcttgcaaaaatgagcacggaactgttaactcaagctgacatgagcattgaggccgacacaactcacactgtaatgccagagagagggtattcagaaggaagtaatgagtgtcttggtgaggtaaaaacagaagttgtcaggctctggtccttgacagagaaactcctggagaacgcaggaatcgttgctggtacatctacatgcatggaaggtgtaattttataaagctttgattaactttataagcctaatctgtatgattcttttgtggatatgtagaattactggcggttaaatatgtttacttgtcactgtgagcaagtctattggagagtcttaatcaagaactctttgcattttataataataaatattaaataatttaaagtttagagtttttattgaatctttacaattttttattgtccaatggtggtggagactttaagaggatttcttcaaaaaaaataaagattttaaaataaaatattataaagttttttatttgacaaaacttaataattattagaaataataaaattgtaaacatgcatcatgacataaaagcaaaaaaatatatagaaatgaaaatttgaaaaaggataatatttaagcttgattcggaccaaaattttgccatatatatactctgatactcaatcaaatcatatttcaatcgttcatgctaagtacaaaagtcgggttttgatacttaataattactacaaatattaaaattgtatacatacatcatgatataaaagcaaaaagaaaatatacaaatcaaaaaacttaaataacgactagatttaagcattattaaaacaatgcataatcctttttttatatagttttttctcagccagtcacaaagcaacacaactaaagtctttaacaaatgttaaaactctaagcttaggatcaatccttagcctaatatcttgttttcatttatttttattacattggaggtggtctaagtgatctcaaaactaagtgatttttaatgatttgtatttgtttattacgtagataaaattcagccgagagtggctgccaccacaaggttcttgccaagggtaatctctcgtttaggtgtcgttgatagaaaaaggtttgcgacgtaccctgggacttatgcctacaacagcatgtatacacagatagtaggccgttagagtgtaactgataggatcacccctactagcatcgccaaataccaaccttgcccctaaatttccttctctatttttttgagtaacttttttataaattttcaaactcgctcccgcttctgagtctttttccgtacgaaagagagagagatacgtctatgcgattctagggtttttccggcgaaatttctcagccaaagatg

SEQ ID NO: 3044 - DNA, 3000 bp, Unknown; identical to SEQ ID NO: 3033
  misc_feature (1)..( 3000): cDNA_ID_1819231_gDNA_ID_1620621_Annot_ID_47045 3000 nt of promoter + ATG

SEQ ID NO: 3045 - DNA, 44 bp, Unknown; identical to SEQ ID NO: 3024
  misc_feature (1)..( 44): cDNA_ID_3092820_gDNA_ID_1620621_Annot_ID_47047 3000 nt of promoter + ATG

SEQ ID NO: 3046 - DNA, 3000 bp, Unknown
  misc_feature (1)..( 3000): cDNA_ID_1819336_gDNA_ID_1620622_Annot_ID_47050 3000 nt of promoter + ATG
cttcagaagttggtgtggatatacgagagaggaagtcacataaacaaagaacatgaagattcaaagagttgtatgaacatatcagacaaagcaagcctgttcacttttccactatgtatgtaatttatagaacatgatgtcaacaaagattcacacacttcgcaaagcaatgagcttttacattgctctataaataagtatactttttcatatacgtgagttggaaacataagctttttaagccacatgaaaatgctcaggaaaacacaaggtttacaatcagatgaggagataaaaagtcgtggcaacgcgcagaatcgggatggattccttaagagacagatgcacttaaatgcaagatggtagagtaggtccgtggcagagaaaggccactgcaatgtatatgatcaccagtagtagtagtattaagaggaccctgcaagagacaaaaagggttaggaattaggaactatgttcgattcttaaaaaattctcacttgacattacaaatgtggaacttggggtgattaaagtactttttgctatagttaaatgtgttcttaggccaaaaactagttttagtatacagtcttgcaatcataatactgaaaattgtttactaaggttttaggaaacatacgtgagcttgcagtttctccaccagacgttgcttctaaaacgacgagcttgctttctgaaccggaatgtattcccctgcatattggcggttttatcgacaagaagctccaaacgttcacctctatctaggactttgtcaatgttttctatcatgacaccccgcacctatccaaaaccaaaaagaaaaaccaggatgtattgtcaaacagtgaagccaagactcagaaccatgtctctaaacaacttcacaatccgactgaacttgtaagacaaactcatcaaacctgattcatttcacccttaatacgattaatcctatcggcattaggatcattagagtaatagtcaatctgctgactgagaactctagagaattcctcattcattgcataagctagtgctgtatgaacagccctgccataagtccgtacgaatctctggtgaatatcctccaaaaaggcaaaaggaattctccctgacataaaaaagttttgacttttgagttagaaagacattcacatctctctaatgcacagcttctcggatataattgtgttgatgttatgtccaaaaaaatcaaattcattcacatcacaatataagaccaaaggtctcgaattcaataacagagcgatcgttcagagcaaaaaaggattagacttttgaattccactgtcaccaaagttggaaacttcctcaaaattagccatagaagtaaaagaaaggggaggacgtacttccggcggtttcttcggccatacagagaacggtgaggccatcggtgcgtttaacgtggaagacgtaacgatcctgagagtaggagacgttgctgtcgttgtctccagggaccttctcgaggatctgtttggcgatggtgctcgcattcgtagaggtggcggtgaactcagaaagaaccaccgtgccacgagccacgagggcgtacagaatcgccatctccgtcgtcgatccccctgccgaatcaacaaaactcgtgtaaggtcaacgaagaagaaggttttcccgcggaaaccgagccagccagacgaatcgctggatcaatcaatcagagagagagagagagagagagagaaccaattggcttctttttctctctgcatataattgaatctctttctctctctctcctcttggagtttagctggagctggagaccttttcgcctccgctgattacaaatatttaatttcggatagctacgttgatttatttttaaaatactgtattattataaggatcaaaatgaaattttgtcaaaatatcacgggcaaaactaagttagttctttttgttttgtcggaactaatttagttctaataagtaaaaaatataaatatgaaaagaaaacaatttgcttcagtttcgaaaatattgtaccgtgaattgttttataaggattattaatggttaacgctaaattagtttgatatcaaacttataagaaatacaaagaaaacaaacaaattctatcagtttcaaacaaatagagaaatctgagcaaaaagatcgaataattgtaatttatccgtggaagaagatgtgattttaaagtgtaaatttttacgaatatgaaggataaaatgtagggatgtgttcaaatcatcattaaatcagtttttttttttttagtgtggtagtgacgtaccaaacaaaaccaaaaagcggtctatttccttctggtttgaaacgatttgggtcaaaattgggtttcgagtttgaataagatatgagtgaataatatactaactttagccaaagacaaaaaaaaaaaaggaaaattaaaggcagaaaaatgaaaatgacatccaatgagctgagcctaaaccaaacatagccagagataagccttacaaaatgtacaacagatataaaatcccaattcccaactctaaaccaagacgtggttcacgacccaaaccgaatctcacgggaaaaagtgggacatatacacatatatacacggtaagcttcgcgcctccgtcaaatcacgtgttgtttcttctcggcttttccgttaaagtaaacgtcacaacaccgccgttaatcaccgtggtctgtgggaattcaacccagaggcagagaagaccctgagagacgccatctggtccttcttttgcctccatctgtgtcctctctctctctcctcgatctcacgacgatcttcataaaccctacgctctgcttactcttccatcatcttttgctcagatttcgtaatttgtggtttctcgatcgggatattagtactcgatcgtgtctccgattgattctgatcggaatatcaaattcggattccggagagctggagatagagagagacttaggtaaagtttggtggagatg

SEQ ID NO: 3047 - DNA, 3000 bp, Unknown
  misc_feature (1)..( 3000): cDNA_ID_1012056_gDNA_ID_1620622_Annot_ID_47051 3000 nt of promoter + ATG
ttgaccaatgcacggcttaagtgtatactgtaatatctcataccagacctagcagcagcttctagttcaagaaaggatgcaactacgacacttcttgccaattctatatcagataatagctttgttatccactcctcaagagagcaccttctctgcaacaagatcaaagctatcacttatgaaacaaatagtttgcacgaataattgtaacattattgttgggacatgctttccgtatattaatccacctgaagtctaccactaatctgcataattcgtacttaatcttggttggacaagatttggagaaaggggaaataatagcactaaatagaaatatattgaaagtaacagcagttacacaagtgacctcattcagttagcctcaagaaaaaatgcatacctcttctaacactgctctgcttttcatacgcaacagccctttggggggagctgatgggaaaccttttctaggaaatgttcttttaagctgtaaggaaaacatgagtgtgcatatgctgtcaatcacattgcatttaaaacatgaagaaaaaatgaagagttagatcggcctatattcagggagaacaaaatcttacatccgttaatagctttagaaaatcattaaatcgtctcaacactcctcgcattgtggtaataccttcaggggattgcacacttacctgaaccctgtaaaactgttcatctaaaatgttatatatgtaagcaagttcaactatattggaataacgtatgacatgcacagcaataaaactcttcagcagcaaaaaaacaaaaaaaggcacactccgctagataattaagttagtccaggaacacaaatatatcactgttgatgttgaattttattgatccgcagacgttcaagatatggttgacataaccagttcagctaatttgctacaagtcgataaacattgaaatgctcttgcaagagataaacactgaagaattcaattaccacaacaggatctgaatttcttgattttggaaggacaatccacgagggtattgtaacgcaataactccatccagttcgagggtcatgaggccaaacagtatctctaccattctgcagaaataaacataaatatctcaaaatctccaacttgtacatatatggaattcaatcgagtagaatgatactttatagtctggagctatccaaagctgcataaataaagatttagctacccctgatgttaaacaaaagataaactaacaattcaatagagggcaacaacagaattcaccaattgtaggaaatgacttctaatgccttatgtggtgagtctaccattggacttgctggtaactacactagctatccccatagcttgggactaataacaaagacatccacatttatctcaagtcccattagaataaagcaggcaactgaagaattctagcacggcacttccaaaaggtaacgtggtaaagtccaataaagttcgaatttttggcaacaaaagaactcacccatttgcgcggtggaggactccaatccattcctaatggaagcggcgatgttccgtcatgcctgtgcttgggcggactccgtctctgcatcatctccaccaaactttacctaagtctctctctatctccagctctccggaatccgaatttgatattccgatcagaatcaatcggagacacgatcgagtactaatatcccgatcgagaaaccacaaattacgaaatctgagcaaaagatgatggaagagtaagcagagcgtagggtttatgaagatcgtcgtgagatcgaggagagagagagaggacacagatggaggcaaaagaaggaccagatggcgtctctcagggtcttctctgcctctgggttgaattcccacagaccacggtgattaacggcggtgttgtgacgtttactttaacggaaaagccgagaagaaacaacacgtgatttgacggaggcgcgaagcttaccgtgtatatatgtgtatatgtcccactttttcccgtgagattcggtttgggtcgtgaaccacgtcttggtttagagttgggaattgggattttatatctgttgtacattttgtaaggcttatctctggctatgtttggtttaggctcagctcattggatgtcattttcatttttctgcctttaattttccttttttttttttgtctttggctaaagttagtatattattcactcatatcttattcaaactcgaaacccaattttgacccaaatcgtttcaaaccagaaggaaatagaccgctttttggttttgtttggtacgtcactaccacactaaaaaaaaaaaaactgatttaatgatgatttgaacacatccctacattttatccttcatattcgtaaaaatttacactttaaaatcacatcttcttccacggataaattacaattattcgatctttttgctcagatttctctatttgtttgaaactgatagaatttgtttgttttctttgtatttcttataagtttgatatcaaactaatttagcgttaaccattaataatccttataaaacaattcacggtacaatattttcgaaactgaagcaaattgttttcttttcatatttatattttttacttattagaactaaattagttccgacaaaacaaaaagaactaacttagttttgcccgtgatattttgacaaaatttcattttgatccttataataatacagtattttaaaaataaatcaacgtagctatccgaaattaaatatttgtaatcagcggaggcgaaaaggtctccagctccagctaaactccaagaggagagagagagaaagagattcaattatatgcagagagaaaaagaagccaattggttctctctctctctctctctctctctgattgattgatccagcgattcgtctggctggctcggtttccgcgggaaaaccttcttcttcgttgaccttacacgagttttgttgattcggcagggggatcgacgacggag

SEQ ID NO: 3048 - DNA, 3000 bp, Unknown
  misc_feature (1)..( 3000): cDNA_ID_1819332_gDNA_ID_1620622_Annot_ID_47052 3000 nt of promoter + ATG
tttgaaactgatagaatttgtttgttttctttgtatttcttataagtttgatatcaaactaatttagcgttaaccattaataatccttataaaacaattcacggtacaatattttcgaaactgaagcaaattgttttcttttcatatttatattttttacttattagaactaaattagttccgacaaaacaaaaagaactaacttagttttgcccgtgatattttgacaaaatttcattttgatccttataataatacagtattttaaaaataaatcaacgtagctatccgaaattaaatatttgtaatcagcggaggcgaaaaggtctccagctccagctaaactccaagaggagagagagagaaagagattcaattatatgcagagagaaaaagaagccaattggttctctctctctctctctctctctctgattgattgatccagcgattcgtctggctggctcggtttccgcgggaaaaccttcttcttcgttgaccttacacgagttttgttgattcggcagggggatcgacgacggagatggcgattctgtacgccctcgtggctcgtggcacggtggttctttctgagttcaccgccacctctacgaatgcgagcaccatcgccaaacagatcctcgagaaggtccctggagacaacgacagcaacgtctcctactctcaggatcgttacgtcttccacgttaaacgcaccgatggcctcaccgttctctgtatggccgaagaaaccgccggaagtacgtcctcccctttcttttacttctatggctaattttgaggaagtttccaactttggtgacagtggaattcaaaagtctaatccttttttgctctgaacgatcgctctgttattgaattcgagacctttggtcttatattgtgatgtgaatgaatttgatttttttggacataacatcaacacaattatatccgagaagctgtgcattagagagatgtgaatgtctttctaactcaaaagtcaaaacttttttatgtcagggagaattccttttgcctttttggaggatattcaccagagattcgtacggacttatggcagggctgttcatacagcactagcttatgcaatgaatgaggaattctctagagttctcagtcagcagattgactattactctaatgatcctaatgccgataggattaatcgtattaagggtgaaatgaatcaggtttgatgagtttgtcttacaagttcagtcggattgtgaagttgtttagagacatggttctgagtcttggcttcactgtttgacaatacatcctggtttttctttttggttttggataggtgcggggtgtcatgatagaaaacattgacaaagtcctagatagaggtgaacgtttggagcttcttgtcgataaaaccgccaatatgcaggggaatacattccggttcagaaagcaagctcgtcgttttagaagcaacgtctggtggagaaactgcaagctcacgtatgtttcctaaaaccttagtaaacaattttcagtattatgattgcaagactgtatactaaaactagtttttggcctaagaacacatttaactatagcaaaaagtactttaatcaccccaagttccacatttgtaatgtcaagtgagaattttttaagaatcgaacatagttcctaattcctaaccctttttgtctcttgcagggtcctcttaatactactactactggtgatcatatacattgcagtggcctttctctgccacggacctactctaccatcttgcatttaagtgcatctgtctcttaaggaatccatcccgattctgcgcgttgccacgactttttatctcctcatctgattgtaaaccttgtgttttcctgagcattttcatgtggcttaaaaagcttatgtttccaactcacgtatatgaaaaagtatacttatttatagagcaatgtaaaagctcattgctttgcgaagtgtgtgaatctttgttgacatcatgttctataaattacatacatagtggaaaagtgaacaggcttgctttgtctgatatgttcatacaactctttgaatcttcatgttctttgtttatgtgacttcctctctcgtatatccacaccaacttctgaagtcggcagttgaatgatcttgtacgtcgttgaccctacaaattcttgtcattttacaattgaagccatttgttgatcataaatcgaatgtaaatattagaaaagaaagataggagaacaagatacaacaagtgtcataaattgtcgtccgaaaataaaatatgggtatcatctctagttaaggccagacgcacctcattcaccaacttgacatcttgtcatgccacctaataatagctaaataaattatagtaggtggatttaaccttttatttatataatagcagcatttcaaatataaaattttgtttttatcaacaccatgtttactaactaaaaggatggaatttatatccatatatgatcaaaatactaaaatgtttggttgaaccaaaaaaaataaaaagcgtcgactttacggtttaaatatcgttacagaaaaagaagaaaagaaaagacggctacatcacgcttactaaaaattctacagtccaattaaagtcataacaaaattaatactatatatttattaaaaaaaacatgattatttactttccttacaaaaaaaaacaaaagtgtaaatatttcctggtctaacgctttccctctgcgtgccccgttccttccctcgcggttactcttccgttttatgtttttttttctgagatggtcaattttcccgtcgtctctgaattttccctttttctcttcttcactccaccgccttccccgaatcacttcctctgcctgatctaattcaatctccttcctagctcaaagaagtcaatttacacgagcagatctctgcactcaaaactcctggatcttcatttctgggcttcaatttagagtttttttatattaa

SEQ ID NO: 3049 - DNA, 3000 bp, Unknown
  misc_feature (1)..( 3000): cDNA_ID_3070660_gDNA_ID_1620622_Annot_ID_162361 3000 nt of promoter + ATG
atctgaatgtttacgatcttaccccaatgaatgtttatggttactggctcggaattgggatctatcactctggtctcgaaggtaaatcgttttttttccttctcgattctgggtttgattgttgttctaagattgcggagaaagatgagacaatagtaggtcaattttgttggattgtaatattaattgttgaaaaaatccattgtctgtattgttgcttggctttgtttgattctaaagtctgctttgatcgatgaaaactatttattgttaaagagtagaattgacttttggtcatagaatcgatttagagactaaatgtgttttgatgataacaacttaggagggtagagttttgtggccgttgtttgaacaatgactcagtcacacacacgccatacgttgttgttaatcctatattgaatgttctctcgtggttttggctattccttgtttgtagttcatggggttgagtatggatacggggcacacgagaaatcgagctcggggatttttgaggtggagccaaagaagtgtcctggtttcacattcaggaaatcgattcttgttggtgaaacagagatgaaggctaaagaagttcgaagctttatggagaaattatcagaagagtatcagggtaacaagtaccatctcatcacaaggaactgcaaccatttctgcaaccatgtttctttgaaacttactcacaaatcaatccctagttgggtcaaccgtcttgctcgcttaggtaacccaaaacttcctctacaatagaatctttcaggggatcaaataagtaatgttgtacattggtttcttttgaaccttcttaaggtttcctctgcaactgtgtcttgccggcttgcttgaacgagactaaagtgaagcgggtaggaaaagacgggaagctgctcttggaaggagaaaatacgaagaagaagaagaggaagaagaaaatacgaagaagccgatcaggtcctttatcttcgtcttcttcaaatgcaagattagataatactcctacacataacagatcaatatcaacgggtaatcctcctctttctgcttctccatcttgtcctttgagacctcgacttccttctgttgcatctggagctgaagatcaaaatcctccaagcgtaagcgtcaagacatgattatttttcattgtttgaacagctgctagttatatacttgtttatgaatgcgaaggtggtgcttgtgctttgttctcaagttatatatcctccattcgtttggttatacttggtataatttacttataggagaatcatgaatctctctctgtagatactaactgtagagtgaattcaacatttgtttgttatgttttgatgtaaaattttgaaaattgtacgaattacttgtttgaatatcaacaaatcgaagtaaaatagctaaatattttggaaacaacaagtgttttattttaaatttctaattaattcttaagcaataagtcccaaattttcacaaatagagtttttattaaaagaaaaaaaattgatgagcgtaaaaataaaaaaataatgaattttattttattttattacagaaccaggaagtggcataaaccctagtttgaccttttcagaacacaactcactataaatacctatcaaaggacactcttccgcagctacaacgaattcccctggaaccctaattcaccgttcctgtgaaaagctcgcatacataagatctgttctatttctcgctttttgtttctagatttcagtctttgctatttcattatcgttctggtttttatatttgttgaaatctgttatgtaattgaaactgttggctctgccattttgattgaagtgggattccttaggctttgattttggttagttctcagatttaggtttaaaggttcttgttttttgatttgaagcgttatagcaatcccaatgatgacttattaagattaaaaatgttaaaagtagtgactgatatcttttgatgaaattttagctctgagggatttgatttgttctttgtttccttcttacattccgttgttggacatccattgtgggttaatttggtgagtttttgcttttgcttgcttgatgaagcatattgatgcacacgaccttagctgcatcccaatgatgaatgatatgaaaaaaatgttaaaagtagtgactgattataccttgattactagtcaattctgagggattctatcagctaagctaaattcaatccttttgcgccatctctttgtttacttaactctctatgtgcccttcgatgattaataatatattaatggttaaaagtagtctgatatcttattgatgaatatttcaaatccgagggcttaacttatttcttataaaagttgtgactgatagcttgtgcacaatcttgttttcattcttggtatcatctaagagatacctcaacgccagcttctgcagtgaagtgcaatgtcgtaagtacgattccacccggcagaagaaatctctctcgattgcacttcatctgcagaagctggcttttttaggcagtgggagtgatttttttggcagaatatctccattgtattatgctcttttgttttccctggtgtgcttgaccatgatgaattcgctagtggttcacaattttgatagaatagttggattaaatggataacacagcgacaccatctattaatgatacaaccaactaaaaatgttattgtccaacctcaccaccaaatcatctttcgaaagctttcctttgtcttgttaaaatcaactatttaaagatgaagtatacaaagcttagcagtacttgttggacccacgtttgatatttttggggttgagatgtctgcaagcgtctttcttaaagtccaaaagaatgtgtgtgaaacgttgactttctgcaaggtttaccactgtttgtgcgcttagcttcgtttggagaatcttcttcttctctttctttgtagaccggctttgctttgcatatgagaggatg

SEQ ID NO: 3050 - DNA, 3000 bp, Unknown
  misc_feature (1)..( 3000): cDNA_ID_3070648_gDNA_ID_1620622_Annot_ID_162354 3000 nt of promoter + ATG
aatcgtgtataaaactatccttcttccaccttctcattatattcatttccatctttctaatttatctttccatttccgagccgttgagaattttttctgagagataatttaacaaatttcttcttcttcttctgtttctgaaccaccaaatctgcctttctcaattagctatgggcgtcgctgttctaaatccccaggattgcttgaaagatccattctctcacatgaaacaacatcgtaatcctagcgcatgtcccaacaggcagaagaagacggtctccaacaaccgtacacgccggagtcctcctcgtagtcaatcctccagatcttcttctcctcctgtagcgccgccgcttcctcctcctcgtgcggctgtctctgctttcgttccaaagggaacccttaagaagagtcttagcaataccgttgccgttagccaggtgagaatccttaagcgcggcgaagaaatccccaaggagacttcagatctggttgtggaaatgtcagatctgggatctactcgtcggattggaccagatccgggtttgattccgggtcagatccgtttatctggccgcaaatcgaaatcagcaccgttttacgccggtcctgtgaccatgacctcgccgcctcctagcgatgtcccgcttccagctttcttcacgaagaaggcaacaaatgatctcatcaggatccttcgcctagacatcgcctgacggtgtctgtcaccgatcatttttgattttttaaaaatctccgatgatccaaatggttaccaaagtgttacatttccgtattaccgatcgtccgattccgcctgaaaaccggagatctgcaacaaaatataatctccagacgatgatgaatctagaagatgaagaaacacacatcttcgttatgaaccgtttcgaatcttcccttattttttcaaggggcaagatcgaaatatcttcttaacaggtcttagtttctcttcttagggtttagtgtttgtgtaggagtatttgtgtatagactttttactagttttcgtatctttctctgtatcttcgggtttttaatttctgcttaatcgtcaggttctctgggtaaatcataggttggcttttgtcatttcgtctgtgtcttaagtggattagttggtcgtaagacaagttatagagatgtgtttacgggtaaagatgaagcttaggttttgatgtaatcttcttcggtttttcaattctctgtatttctctatctttttagtttatcaagtttaagttttatttggggtttcttcttcgtttgggtatctttctgtttttccttaaggttcttcgtttgtttccgtgtcgtctaggttaagtcaaagtaaagagatgtaattactggttagatgaatcttaaggtttccatgtaaccgtttgtactacaattctctgtacttctctatctttaatattatcgaatttaagttttatctttggcgtttaaagttcagtatttggacatttgatacacatcacatgagattaaataagatggttgacccaataaaaccataaacaaatgaacatacgatgggtttacgcaaatgatctcaatgaattgtaccttggaaaattatggaatttgtgactagtatatgttgagttgtattattgattagcaattctgtaatctcaaacaactcggagaatatggcgcacaaaaaaataacttgcacagatgtttcccgatgtaagagcgacagttttgatatgtgtgtgtgtgtgacaggcaaagacattgacaaattgatataatctctagtccagcgtataaacaaatcactaatgccaatttgatatcagaagttgaaagtgactttctctaagttgataagttgatattgtgctatctcaattatcatcattacaatgggtttaatagcaatggatgttattattgtttaggtgggtaattgatatttcttgctaagggtgtcattatctcaatatcatataccgtatgccacttgtttggtccaagttgtataagatataatgttctctcacaattagacagcccaccttagcccgatttaaggcccatgtatatatctcttcaaggctggacagctggggcttgaattctaaaaaatttcttagtcataaatctgctgcatttagagattcttctataaaagaaacataaggtaagatatataatcattaatgacagaaactcttttttactcatccacaatgtagcaacttgcctttacctattaacggcggtacacagtcgtcaattgttcattggtcaagcttagcaaaaccattgagccacgtcagtttttttttgttggttcctttgcaatactctacgaacatcataattgatgagagcataggaagattttctacctaacaagggaaaaaaaagcaaaacgaaaaagacgaaccctaaagtaattttgcctatttttaaaaatttattcttttaatttcagcattatgccaaatttataattttgcgagagaattttaatttggggaatctttacatatttttcacataccctttccccacacaactcagtttttgggtcccacctttcctttcttattttttttgtcatcacaaacaaaccattgagataaaaaaattaaatccaaatctgcaatccatccagccacagacccgatcttgcattttcgcatcgacattaaaatggcaataaaataaatcattttttttttcttttcgaaaagaacaaagaaaaatgagaaaaggaagaaaaaagagatagaggaataatttagagggagcctcgtatataacaccattcccatctctctctctctctttctcctctatttcgatatttcttcttcttctccttctctctcccttcgtcattatctctcttctgtaacttctctttctttccctctctctctttcgctgcttctcttctgtatctgattcccttttttacgggagctgtagatttgagtagtgtaagcgtcgatg

SEQ ID NO: 3051 - DNA, 3000 bp, Unknown
  misc_feature (1)..( 3000): cDNA_ID_1819297_gDNA_ID_1620622_Annot_ID_162353 3000 nt of promoter + ATG
gaaagatgtcgattccgttagagccagtccgaagactcctctctcgtggagcggcggatctggaagtggtggcggctctgcttctccttccgccgatggattcgaggataacagtcgccaagctagctgctctacatctacaggatctggatctaaggtaactttctcttttccctatcgtgattttcaacttttgcctctcgatttagtcttctctctctatcttctttctctcaattacgaatccggtagctccggagagatggcaaatccgtcatctcgctggataatccgattccgatctggccgataaatctggatttagccgttcgtaattgagaagatccttggccgtctctctgtttttcttcattttttttcctaaaatccataaagtttagcctgacgtcatctctcgcacgcttcaattctcactagaacgtatttagtctgttttcttcaacttctaacaaattcaccggaaaaaattcctccgccgtgattcgccgatgacaccgtcggccggagccatcctgcttctaggttaaattcatctaatctccaaaaagtcaaagccactttaagcttaatttccttgttttctgctcattttttgtaattagaaaactctactaatcttctgtaacaaagcttaataagagacctgtttttctcggtacgcattgaaccggatcttgcgtggccggttagatgtggatttttagaaatcggtcaactttaattttgtcttgaggaataattaaagctccttttagattttgggggtagtacagcttaacagctagttggtcaaacgcgtccgcgttttattgaacgttttgatgctcgagacggtagcgttttgtgggttgaaagttgaaacgagtaaaatgatcttgtcggagagattggtatcacgtgatctttaaaagagtgatgacgatagatgacaatgcccatgacacggaataatcatgatgtggcatcaaatcctcactataaaaattctttcccaattatatatttgagattttttaattttatgctctatttggtttcttcgatatatttttcttacttgtttgaaatttctgttgtgggaaaagaaactttttaccggtatgttaaaataagatcttgggtattgattataaaagtaaaacagttgtcgttatcttcagccatttaatagttgactaatcaaatgcgtttttgttttgcaggtttttcccacaaacgaaatcaccagttgtttctccaagagattgaagaagaggaaggtaaatataaagtctcctttttgaatttcaagtacacactccaaaattcaaattttattgagctgatggttttttattcttttaatatttggcagtcatcttttgagcttaaaaatgaagagaacttgaagttgaaggagagacttgaccttgaaaaggtagattttcgttgctattctctgttttattatcatggttttcattgtattcttaaaaaaacccaatatttttccacaggagattgcaagtctccgagcaacattcgatgaacaaaaccttaggaaccaaaagctgaagaggattaaggtaacatttagattctccctaaccatctttacagtaatcagatattccagatcccttctctctatttgctggtctcatcgactcttgtgttttcttgtttcagcttgacttaaactcaggccgtgtcacaaacaagaaacctgttgatttgattcgtaaatcacaactcgagcggctacagggatcaaaatcttgcaaaaccagtgactcgcaaaatcaggggagtttcttcgtcctccctgatctcaacatggcgccatccgaggaagagatattgtacggaactagctaaaaactggcctatatgaagatttgcgatcgaattatagtgaagggaagaagggagctagagatgtcaactaagaaaagtgaatgtaataagtggtgtaatgaaactctcccgtcacattctggttttccgtttccttctttttttggggtaaaatgctcaattacttcttgattttttcttaggaagagggtgaaaattaggtttttactttttactccctccctccctccctctctgttttctttaatttgatgtgttagaagaaaaaatttgttttaaatagatggtgttatcaatttttaatgcaaaattaactacttttttttttctttctttctctttgtaccgatttaaaagcttttgttggaaattgtaaagaggaaaaagtaggacaactaatagactttttatgttccaaacattttcttcttcactattctccatacattattatattaaaaccctagtttccgctcaactaatccaagacaagaagatctatcaatctctttggacattcatttttctactatttaatttgaatttttataatataaacttgggaggtgtaatgctattggtgggttgtcggcgtgttcatggaaaaagattcgtttttaaatgcccaataaatttgagaaaaaattgccaacttgtttatgagcttattttctttttcatggatcccaagtcttttgtgtatagagattaaaaaaaaatgacattccttcatgtaaaaaagaaaaaaatatctgggttttaaaaatatctacaatgagtttaatggtaaatatacttatcataatttggagaataaagacctaaagaagaaaattacactctagaacagaagttttgtaagcaaatcattgctcacaaaacttgtgaattacagaattacaggctcttgtaggttgagttattttatgcttcattttggttacaggctttatgttgacattaaaacaaagagattgaagtagagtccaaaaaaaaaaaaaatatatataaatataaaattcaagattaattaaaaaatattggtcttcagagagataaataactaggggaaagagaaaacagtcttctcttctccgatcccaaaaacgcaggaaaacaatg

SEQ ID NO: 3052 - DNA, 3000 bp, Unknown
  misc_feature (1)..( 3000): cDNA_ID_2164733_gDNA_ID_1620622_Annot_ID_162352 3000 nt of promoter + ATG
ttttaaatgcccaataaatttgagaaaaaattgccaacttgtttatgagcttattttctttttcatggatcccaagtcttttgtgtatagagattaaaaaaaaatgacattccttcatgtaaaaaagaaaaaaatatctgggttttaaaaatatctacaatgagtttaatggtaaatatacttatcataatttggagaataaagacctaaagaagaaaattacactctagaacagaagttttgtaagcaaatcattgctcacaaaacttgtgaattacagaattacaggctcttgtaggttgagttattttatgcttcattttggttacaggctttatgttgacattaaaacaaagagattgaagtagagtccaaaaaaaaaaaaaatatatataaatataaaattcaagattaattaaaaaatattggtcttcagagagataaataactaggggaaagagaaaacagtcttctcttctccgatcccaaaaacgcaggaaaacaatgtcgtttaacagctcccacctccttcctccacaagaagaccttcctctccgacacttcaccgatcaatcacagcaacctccgccgcagcgtcacttctctgaaacaccttcgcttgtcaccgccagtttcctcaacctccctaccacccttaccactgcggattccgatctcgctcctccgcaccgcaacggagacaattccgttgctgatacaaacccacgctggctctcctttcattcggagatgcaaaatactggagaagtacgttctgaagttatcgacggagtcaacgccgatggtgaaacgatactcggcgttgtaggaggtgaagattggcggagtgctagctataaggcggcgattttaagacatccgatgtacgagcagcttcttgcggctcacgtggcttgccttagggttgcgactcccgttgaccagattccgaggatcgatgctcagctcagtcagttgcataccgtcgccgcgaaatactccactcttggtgtggttgttgacaacaaggaacttgatcatttcatggtaagtttcactttctaattttgcaaaattttaatgttttgaactgtgaacgattcagccatttatttctctttgattatctgagtatagcaaattcacatttttgtgtggctcattgttcccgcttctcgagtcttgcaatcgatatgatctttgcttctacttttttggttagcttgtaattcgaattatgaactttgtctgactcaaataagttatatttgttgcataaagcttcttctttgatgactaatagtttgtctgattcttgctgaaaaggactttgcatgtccaagagaaagaaagcataatctattttttgtaacgttctgtttgtatgtcttatggattggaatcttacctttgattattatgttgatgcagtcacattatgttgtcttgttatgttcatttaaagaacaactccaacaccacgtttgtgtccatgcaatggaagccattacggcttgttgggagattgaacaatcactgcaatccctaactggtaacgtcccaaatcattttttttttttgttattgtcttcttgctttatgtgtgtcttggttttatcggtttttctttgttctggtttgtaggagtttctccaagtgaaagtaatggtaagacaatgtcggatgatgaagatgataatcaagtagagagcgaggtgaacatgtttgatggaagtttggacggttcagattgcttgatggggtttggtcctcttgttccaaccgagagagagagatctttgatggaacgtgtgaagaaagaactgaagcatgagcttaaacaggtaattgcttgatcaagctgcaatggtacatcaaactatacaaaacacattgttaaatcatgttgctcggtttcttttttcccctgtagggtttcaaagagaagattgtggacataagagaagagataatgaggaagagaagggcgggaaagttgccaggagatacgacttctgtactcaaagaatggtggcgaactcactcgaaatggccatacccaactgtaaacaccttggccgagaagttttgttaccacattgtcaaaagcaaggttttaattcgtgatttggttttggaattgcaggaggaagataaggcaaaactggttcaagaaaccggtttgcagttgaaacagatcaacaattggttcatcaaccagaggaaaagaaactggaacagcaactcttccacgtcatctactctcaccaagaacaaacgtaaacggtaaaacaagatccgttctctttttcaaattgcgcaatttcattaaaccaacccggtcaagatcttcttttgtaaccaaactcaggaccgggaagtcgtaggtgacatagcggctaactagaggatggttctttgccatgtgaattcttgggaaccgtatatgaaagaaacgaatccggttctatgctcgtacagagtgtgttatttgtatagtggataccggttagcctatgaaaccggattctggagtccaaattgttgtttgtaacgacttagtagtttttggaagtgatctgtttcgttggtttgcgtcttgtaacgaacgcttaagcaagtgtgggttttttcttgtaaagtgtcaatatgttcgtttgtaatgaatgtatcaagcaatatttatcataattaaactagcttgaaatgtagtattacgatgttgttgtgttcgtctgatttctctcaccggttgatgcatggttacgttcggctcggtttttatatggttcaatttttaatatatcgataattttaaatgatttcacttgtattattaacaaagcccattggtatttggcccaaaatctgaatgccgacttaatgacttgtttcttcttccttcagcttctccaacgaacggcttttgttttagttttttttgcttacctttctctcgacttggtctacttttgttactctttgagttgggtgattatg

SEQ ID NO: 3053 - DNA, 3000 bp, Unknown
  misc_feature (1)..( 3000): cDNA_ID_3610126_gDNA_ID_1620622_Annot_ID_162342 3000 nt of promoter + ATG
atttcctggtctaacgctttccctctgcgtgccccgttccttccctcgcggttactcttccgttttatgtttttttttctgagatggtcaattttcccgtcgtctctgaattttccctttttctcttcttcactccaccgccttccccgaatcacttcctctgcctgatctaattcaatctccttcctagctcaaagaagtcaatttacacgagcagatctctgcactcaaaactcctggatcttcatttctgggcttcaatttagagtttttttatattaaatgggttggagatacaaagctggtctgttcttgattggcactgttgttatcatatgggtcacctccgctgaagttactcaggtattcattcattgtctcttcaattttgtttaaagctttcatcttttgaggttatggatgtttcatttggatcttattccattaggcttgttttcaatcatgttcttcgagctttgaattagcggtttgagtttgatgaatcaaatggcaaatgcaaattcagatctctgtttaaatggtttgataatttattgaatggtttgacttcaattttgaccaggatatctttacagcctataagcagccatttgcagtcacatatcttggagcttctcttatgattgtttaccttcccgttgcattcctcaaagactggctttgtcgatatttagatcgacgctcttccaaatccaataaaattcccgctttgaccgatgattcctcggttgagctcggttctcctttgaggcataaaatcattgaaatgggacttcaagggactataactaagaaagatagtgaggaacacctttcatcccatgaagaagaagatgagagacccttgatcggtaaagttagagaagaagtgcagactctgaaacagaggaaagagatcacgactaagcagattgcaatgtacggcctttacctcgcaccaatttggtttgtaacagaggtgaattttctttgatatgctcgttgtattgttttgatggtggtgcctgaaagtgtcctcttttaaaccttggtattgatatttgtttgctgtttttgatgatacagtatctgtccaatgctgctcttgctcgtacaagtgtggcaagtactactgtattgtcttcaacctcgggactgtttactctgttcattggtgtatttttgggccaagataccttgaacctgtcgaaagtagtggctgtatttgtcagcatggctggtgtggtcatgacgacgctagggaaaacttgggcttctgatgagtcgcaattaaattcttcactgtaagtttttcatcctaattcgttcaccatgcatctttttcttatatgtattcaaaagctcaccctgggctgcgttttaaattgatagctcaatttgtctcattctcatagcatttcttgattccatgagttttccagtttcatcaaccatatttttttaacgtacagttgatatttgtgtttagcaacggggaacgatcccttatgggagatctttttgggcttctctctgcggtctcttatggactttttacaggttagaaatgattaatctttaaaggtttagagtattagtgtgttggggaggataacctcattgatggcttgtacccttctgatattgacaacacagtgcttcttaagaagtttgccggtgaagaaggagaaggggttgatgtccaaaagctgtttggatacataggattatttacacttgttgctctctggtggcttggtatactaatatcttccattcatttttacaagtgtatcatccgagaaacataacatatgagacatggaaaagttgactcttattcaaaaagtttgttttttggttgtatgtttcagtgtggccattgacagcattagggatcgaaccaaagtttaccataccacactctgtgaaagttgatgaagttgtcttagccaacggtttcatcggaagtgtcctctctgactatttttggtatgttttaatgatttcagctattacaagataaagtggacccaacaagcaatgttgagtttagctacaagtgtcttgtttattgctaggctagatcctataaagaggtgtgtaattacttgtttagaaaataacttggctgttttggtgcttttgcaaccaaagggcactttctgtggtgtggacaactccgctggtagcgacactgggcatgtctctcacaattccgcttgcgatggttgctgacatgatgatccatggtcgtcattattcagccatttacattcttggctctactcaggtaactaaaacttatattccatcaacaacagagaatgaataatttttcctgatgctcaagaattagcatttggtttattttgcaggtgtttgctggattcgtaatagctaacatatcggatttgttctcaaagaagcttggattgtagcacatatgattctttttttttggttgttttgtggtatttctgggtagaaaatgtatcctagaagattcttggttggaattgaaagctaaaagggaattttccctgtttaatggatgaaagataagaatgtgattaccaacgtttttgattcccatgtgcacgtctttggaaaaagaaagtgcaaaccagagagagttgttgtctgttgagcaaagatgagtgaaagaaaaaatcaaattcatgtttgaactagctcgtatacatgaaaccgaactaataaccttgttggcatagataaaatatttttttgatctttaaaactccatcaaccaataaccttacgttgacagatatgaaaaaaattctatgttaatgttgttttattattctaaattaaaagccagtaattgataattacgattattggttcagaacgaaccttctttctgagccagaaagtttagttcgccttgttctgtctgtgtttcttcctcttcccctgaaatcgaacgatttataaaatcgtcgtctggctttcgacgatctgctgacgaagacc

SEQ ID NO: 3054 - DNA, 3000 bp, Unknown; identical to SEQ ID NO: 3048
  misc_feature (1)..( 3000): cDNA_ID_1819332_gDNA_ID_1620622_Annot_ID_162341 3000 nt of promoter + ATG

SEQ ID NO: 3055 - DNA, 3000 bp, Unknown; identical to SEQ ID NO: 3047
  misc_feature (1)..( 3000): cDNA_ID_1012056_gDNA_ID_1620622_Annot_ID_162340 3000 nt of promoter + ATG

SEQ ID NO: 3056 - DNA, 3000 bp, Unknown
  misc_feature (1)..( 3000): cDNA_ID_3092820_gDNA_ID_1620622_Annot_ID_162339 3000 nt of promoter + ATG
gtagaatttttagtaagcgtgatgtagccgtcttttcttttcttctttttctgtaacgatatttaaaccgtaaagtcgacgctttttattttttttggttcaaccaaacattttagtattttgatcatatatggatataaattccatccttttagttagtaaacatggtgttgataaaaacaaaattttatatttgaaatgctgctattatataaataaaaggttaaatccacctactataatttatttagctattattaggtggcatgacaagatgtcaagttggtgaatgaggtgcgtctggccttaactagagatgatacccatattttattttcggacgacaatttatgacacttgttgtatcttgttctcctatctttcttttctaatatttacattcgatttatgatcaacaaatggcttcaattgtaaaatgacaagaatttgtagggtcaacgacgtacaagatcattcaactgccgacttcagaagttggtgtggatatacgagagaggaagtcacataaacaaagaacatgaagattcaaagagttgtatgaacatatcagacaaagcaagcctgttcacttttccactatgtatgtaatttatagaacatgatgtcaacaaagattcacacacttcgcaaagcaatgagcttttacattgctctataaataagtatactttttcatatacgtgagttggaaacataagctttttaagccacatgaaaatgctcaggaaaacacaaggtttacaatcagatgaggagataaaaagtcgtggcaacgcgcagaatcgggatggattccttaagagacagatgcacttaaatgcaagatggtagagtaggtccgtggcagagaaaggccactgcaatgtatatgatcaccagtagtagtagtattaagaggaccctgcaagagacaaaaagggttaggaattaggaactatgttcgattcttaaaaaattctcacttgacattacaaatgtggaacttggggtgattaaagtactttttgctatagttaaatgtgttcttaggccaaaaactagttttagtatacagtcttgcaatcataatactgaaaattgtttactaaggttttaggaaacatacgtgagcttgcagtttctccaccagacgttgcttctaaaacgacgagcttgctttctgaaccggaatgtattcccctgcatattggcggttttatcgacaagaagctccaaacgttcacctctatctaggactttgtcaatgttttctatcatgacaccccgcacctatccaaaaccaaaaagaaaaaccaggatgtattgtcaaacagtgaagccaagactcagaaccatgtctctaaacaacttcacaatccgactgaacttgtaagacaaactcatcaaacctgattcatttcacccttaatacgattaatcctatcggcattaggatcattagagtaatagtcaatctgctgactgagaactctagagaattcctcattcattgcataagctagtgctgtatgaacagccctgccataagtccgtacgaatctctggtgaatatcctccaaaaaggcaaaaggaattctccctgacataaaaaagttttgacttttgagttagaaagacattcacatctctctaatgcacagcttctcggatataattgtgttgatgttatgtccaaaaaaatcaaattcattcacatcacaatataagaccaaaggtctcgaattcaataacagagcgatcgttcagagcaaaaaaggattagacttttgaattccactgtcaccaaagttggaaacttcctcaaaattagccatagaagtaaaagaaaggggaggacgtacttccggcggtttcttcggccatacagagaacggtgaggccatcggtgcgtttaacgtggaagacgtaacgatcctgagagtaggagacgttgctgtcgttgtctccagggaccttctcgaggatctgtttggcgatggtgctcgcattcgtagaggtggcggtgaactcagaaagaaccaccgtgccacgagccacgagggcgtacagaatcgccatctccgtcgtcgatccccctgccgaatcaacaaaactcgtgtaaggtcaacgaagaagaaggttttcccgcggaaaccgagccagccagacgaatcgctggatcaatcaatcagagagagagagagagagagagagaaccaattggcttctttttctctctgcatataattgaatctctttctctctctctcctcttggagtttagctggagctggagaccttttcgcctccgctgattacaaatatttaatttcggatagctacgttgatttatttttaaaatactgtattattataaggatcaaaatgaaattttgtcaaaatatcacgggcaaaactaagttagttctttttgttttgtcggaactaatttagttctaataagtaaaaaatataaatatgaaaagaaaacaatttgcttcagtttcgaaaatattgtaccgtgaattgttttataaggattattaatggttaacgctaaattagtttgatatcaaacttataagaaatacaaagaaaacaaacaaattctatcagtttcaaacaaatagagaaatctgagcaaaaagatcgaataattgtaatttatccgtggaagaagatgtgattttaaagtgtaaatttttacgaatatgaaggataaaatgtagggatgtgttcaaatcatcattaaatcagtttttttttttttagtgtggtagtgacgtaccaaacaaaaccaaaaagcggtctatttccttctggtttgaaacgatttgggtcaaaattgggtttcgagtttgaataagatatgagtgaataatatactaactttagccaaagacaaaaaaaaaaaaggaaaattaaaggcagaaaaatgaaaatgacatccaatgagctgagcctaaaccaaacatagccagagataagccttacaaaatg

SEQ ID NO: 3057 - DNA, 192 bp, Unknown
  misc_feature (1)..( 192): cDNA_ID_1819344_gDNA_ID_1620622_Annot_ID_162371 3000 nt of promoter + ATG
ttcattcacgcgtgggcctccaactctcacattcacaacaaatccaacagcaagattactaataaaaaggaagatgtggtcatcaaaccggttcatgatcgacgaaatctactggttaaccgggatgctgtccgagaaaccaatgctgcagccatttgtcatctgtaccagttgatcaaacaggcgatgatg

SEQ ID NO: 3058 - DNA, 3000 bp, Unknown
  misc_feature (1)..( 3000): cDNA_ID_1819267_gDNA_ID_1620622_Annot_ID_162370 3000 nt of promoter + ATG
attgagctcattcaatggttgagaaagctaaattcattcatctcacaataaacacgaaatatttcgatgtttacacatcttctaattaaactgttttatcagttaaaagtagtaatattggcttattgacaaaaaaaaaaagtagtaatattggctttagttacttttatctgaaacaaaatgtacaattgggccttagatgagtaataaacaatagaacttgggcccaaccctccaccgggatgtttaataactgtgtcttttagtgtggttattaattaaaaaattaaccccttttggtgtgagccaaagaaagaaaaatagattaaagtctttcatatacatcaattaaaaaatgttcgatcaattaaaacgagccatgatgaactaatcatatacatcatcatccatcgtgaaaagctagctgttagttaataattacttaataataagaaagaaaaagaaaatgattgttattacttattagtactgctatatactactccatatggaatagtaactgctattatctggcgttctagagttgacatttaaatgtcatagttttatttagatgtggaaaatctagtaagagtaatagagtaggaagtgattaggaagcaaccgaacaagaagcatattttatgaccggtgtggttagcccttgtgggagacaagattacctcaatttttggctaatcttgattttcctcctccattttattattacttattttctttctttttattattatttttatcagcatctttctctttaattatttttcttaaaattaaacattacaccaaagtgttgctgttaatttctcatatttaaatgtgaatagatatatactatatactaatatacatgtgtgtatcctatatgagaccataagccaatgacagtaggtattagctaatgacaagtgacttccaataacttattaagaagtagaatctttacagatttgatgtttacatggatcttctagaaaactgatttctttaatctctctaatgtcatctgcaactatttaacatacacacacacaaaataaaataaaattggaagagctaatgataatgatttgtattagaaagttgtcctttattttccaatgcattgcatcgaacatatgttgatgttcttttaaaatcgtaaaatctagttctgtattcttttattctaggtttatcaaggctttgtcacaagacaatgagaatacaacttttctctaattttcttcatatactaaataaattatcgtagatttgtagaaggttcttaggctagattcaaaaagtcatttaggatctctttctagatcttgcattttttttagtaaatcttatgctggtgatacttttattaaaccttatgattctaatttggaaaacaaaactaactgataacctattttacattaataaaaacgatgcataattgtaataatgttttatttttttatgttaataagctagccaaaacatattattgatccgaagtacgctattttctataagaaaaggagaggcacggaaatgaacacgctgtgtggttaatccaagaaatcatacaaaattaattcataaactataataaaatcattgggatcttattttgcacccaccaagcttgtaggctgaagatgcggatggaacccaacttcaagaaattcttgccttttgttttatggcttttttttgtcttgtcatagttatataaatgtattttgctaaatttaaacggacaatcaaataaataaataatatataatttgtagttaacaactaaattcaatgactaatatcatgtaacaatagacttgtgacagcagttttctttgttgacttcaaagtttaattcgagcgtacgatacatttggtcggtgataaatatcgtgctatgagtttaatttgttgacttgaaagttttataaacattgtgaaccattgtaacatgtgtttcttgattatacatattcctaaaattaatttcatatggtaagagtgtaaaattatccaagtaatggtgtaaattttaaaagtcttttttttttttttttttcatcaattttaaaagtctttctctgacgttaaaaatagtcttgtcttaggtttgaataatatcggcattagccattattggtcgttactatgggatacttaattttgctaaatctttcagaacctgtacgagataagcgaaaaagccatgaaccacggtcacgcgtgtctcgcacttcccaactttcaccatgcatgctctcactaaagcctgtctttttttttctttcttttacatattttaaaatcataataccataatttgcactaattcttatggtaaatccgttttatgagatactcaacttagttgtccattccttaagacacagattaaggaaagtattcaattctttttgaagttatggtaataactcaaattcttctttcctgccttgaatacttggtacaatatcacaaacatatctctaaattaattacatgatctgcagaatcatttacataaacactttcacatttttatccatttaaaaaaaaaaatattatgatcctctttccttttcaattaattatcactaaactaaaaaatattattcccacagtcaaaagaaaccaaactaatttaaaaaaggtggcgcgtgattatcacgctcaaatgaccgatcggttccactgaattttctcagagattctcctctgaaaatgttttttgtttttttcttatgtcaaaaagaaaatttaccagaaatgattaaaatttgaaaagagaattccataaatgagttaattcgccagtcttgaagatcattacagagttttcagaaaccatatgtagtcttagattctcttttgccaaagaagaaaattttactctgccatacaactttttgtctctttctctactaataataataatccgaactttgtttgttcttctacttcaattcataatctttgacggcgatgact

SEQ ID NO: 3059 - DNA, 3000 bp, Unknown
  misc_feature (1)..( 3000): cDNA_ID_1819281_gDNA_ID_1620622_Annot_ID_162363 3000 nt of promoter + ATG
ttgtcattgggcttctggcccaataggcctttgtctttgttactcacgacactgtcgttttgagtcttcgtttcgacttctccaaagggatcttgaagctgtctggattcagatcttgaaggtgatgtcggagcagtggaggtcatgctaatatcaacaaccaaacctgtaagcatatgagaagcttccaataaaacattcttaaaatttattttcaacaactgccaatgtattaaaaaaaagcaatctcatgaattgcctacacgctaattaggcgggcgaaatttgttttatgtgtatgtggtatggtatttgtttttcctcgccatcctttcctggtaaaaccaataattttttatatcacatataaagttacgtgctgaacgaaacaaccgattattattaagaatccatgttgaaatagagaaaatggattgtgtgaatagaaaaacaaaaacgaaaagtcgacaaaaaaaacaaaaaacagaaaaacccactaaagtcaagcgttttgtttcaaccatgttatagtttagaactttataatcagaaattaattccacgaaaatgaataaatgtcagcagtcaaaccagaccattaaaagaaacaattaccattaaaagatatattgactaacaaaatcaatacaaacctttgcgtccatctctgttatggacacagttgacaattacaaaaaccctccatcttcctgtctctctctatcatccatgacttttttttttctcaacaacaactaattattatccaaagttcttagataatgagattaatacatgctatttcttgcccaactaggcacaatagaataaagcttaggatcataattcaaaaatgaaagagactcccttgatactctgccaatgtgtgccctctcttggtatgaacacaaacttgacctcttcaaattgggggagcaacctctgcagatcatccatgacttaaactgcacaataattaaaataggaaacttaagttcatcaagagagaccaaaaatatcacaaaactcttatttataccatttctattggcaatatttaatagttttttataattaaaataataaaataaaagagaaaaaaagtaaaaaaattctcgcttgaatttttttgaaatactctatacaactcatagtgacattttttttttcaattggttcaatttttttttactaaaaaaaaaattttaattacttttttagaaattctttggggttctccttgatggaaaaagatataccaaaataggtaaagattcttgaacaatggtgtaccatctacgacttcaccgaagtgagctaaagcatccctttaacgttggtaatcagttacccatgacacacactggacatttaccttcatcactctggtcgtcctgagacttgaacagtttcttgtttctgttatcatttacaacataaggcccacttcttgcccacacacagtttattactcatcaatttctctaatatactattactctataacaacaaaaaagtaacattgtaatttgtacacatagcgtttgatctagctagttctatatgtagaattgatgttagcaagtgaatcaaaattttgcggagatgatgtttgaacatgggtttgttcattgtgttacccacacgaagccaatttgattgttcgtccagatccttgtaaaaagaacacatatggatcatttagtcgcaacaataaagaagatgtatcagagctacatatgtatgtttcacagtatttctcctctcgattaacaatgaactggtgcaaggatcacccgattcgttcttgagggaagtatcttgggaagcagatcgatttagaggcaaagagggctcaaaagaaatcgttgatgaaatcgctcaaggtctcgcttgaaggttcgcagtttcttcactaatcgtgagcctttttaaagttgcagtaatcgttgtatgaaacaagcgtgcacggtcatagtcatgctcgttttctcgaggcagcttgacaagagttaaattatggtgatggataattagtgtatttttgaggctgtctcaactgaactttcatttaatgacttggctagcgatacagaaccgtctagccacaaaagagagattattaaagtggaatggcgaggcaaatggtggtagtgtgttttgtcaaacggaaatagaaacaagagatcacctatttttctcttgttcatactctcatgcttggtcagctcttactatgaaatatatgctcggctctcgcttcacgacttgctgtgattctcttgttgccctatctacgaccttttcctctccacaacttcatttgtttgtgtttagatatgtctttcaactcactatacacaatctatggaaagaattaaatgccccataactcagagctcccacttctttttaaatcttgttctattaagttttcaaaattttctcggttttatgttgaatttattgtaaaaccgtttttgaattttaaactcatacaaaaacaaaaaaatataattagtgtattttaaattatttgtgttttaatatattttttattttatcttttaaaacatgttttttatttgagttattattatgaattcagtattataaagtcatatcttcatttcaatttttttttgaatataatgttatataatatttctaaacacaagtagataacgttggtcaatatttggttaagataaatggtggaaaaatattcagaaatgttcaaaaatgttcgaccattttttttatttcaaaatgtacgtcagtaactatcgattttttttgaccatatacaatttgcgacccccgcctttcgacgacttgcttttggtcaaacagcagtaagataggcgtatgtctcatgcttacatggtattgaaccgataatatgtgtgtgtatatatagagagacagactatactttttaatcattcaaaactagaaatcaccaaacacacatctcttttgcacgctcaaaccactatg

SEQ ID NO: 3060 - DNA, 3 bp, Unknown
  misc_feature (1)..( 3): cDNA_ID_3070677_gDNA_ID_1620622_Annot_ID_162336 3000 nt of promoter + ATG
gaa

SEQ ID NO: 3061 - DNA, 3000 bp, Unknown
  misc_feature (1)..( 3000): cDNA_ID_1819305_gDNA_ID_1620622_Annot_ID_47060 3000 nt of promoter + ATG
tcatgaacctcttcgttccatgcccgacaacaattgggcagactatatgcgcacaggtgttgtggcaattctgcagaaccgtgtgggtaagttagtagtttgtttggaacactggaaatggcatacccattaatggcattcttttcttgccagccctgaatttcatctacttgttatatgacaacaatcctctcaagatacttaagaaacctgtcttgttcatgtgtagcaccttccgaaaagcttcatgcgttgattctggctgagaatatgatgtcaatattgggtgaaaagtggcttctcggcggggtaaaattacccaatgttgatattccagctgataggtaaatacaacatctttgtattacactctcacttaacctacattttcctagtgacataaagattaatatcattctgatttcttttgtaggtgtcttctgttggtattagagtcatcgcatgttgaaatttctgtattgttaaatgatctcgcttacaagaagtatgaagctcctaaagataattcaactgctgaagacattctcttgaagcaacggtatctacccatcgtgttttcactggtagaaaagatcatcaaatatatatcatctgctggtgaaaacgaaggtataacttagaccttaatcatgttttattaatgtttccaatctactatcagtagtcagtactagcatattcgatcccttttctttcacctttctgttattctatgttattcctaaaatcagtactatataaacatcataagagcttttagttattgctcaaatgtctattaactccgctgataaacagtgtatacatgcgtgtcagccttttcccttcatgaaagaattgggatttacgtattgatctttgcagggactctatctgacgaagctgtcttccaaaaggtgattaaaatacttaatgagacagtaggagcggtgttcgaatatctcagagatgcaaaggtactatacatatatgataacatcaaactcttaggaatgtcttattgtgcttgaaaatgtttttcatgttaattctgtttcatacaggaacatggaattaagaaaggaactgaccttcttgcatctgtgcgagtgattggaaggtatagataatcactctttttgtttcttcttatatctctcgttcgatttatttttgtttaaaatgtataccggattgtgtttatgtaatcatcatttatcattcaaatttgtgtaaggacatggattgtatccttaccactttggcaggtactgaacctttttttgtgttttcaacagctatcttgcggaaactcctgttgcgtgcaaagagcaggtccaggatcttctggattatatgctttcagtgaagggcgaagatgaatccaggtttgaaggcatcctgacttgatatattggttcttttacaaagcttgtttgagtcatgcctcccaggataacttggtctgaactattttgttttgacagcccgtttttgtctacttgcttcttgctcccaatgctttgccaaataacaatgaacgcagaaggatgtaaactcttggcctattcaagaggcgatgtagctgtgagttactcggctttataccttctttatactgatgacaatatgtttgaacaaatctgatttacagctttcttatatctctcagtatgctgaaccaaaatgtatttcaagtgggtgtttatcttgtatataatcttataaggagctgactgatttttcaatacaggtcgttgaatgtctaataaaattgattgagcgctgtggtgagagtgttgatgaggatcgaagcatattcttggcttgtgatacaatcatgaatattcttttgaaggtactctcttccctaagataggacctgtttacattttgccaattgctaaaccctataatgacttcacgttttaaatgttgagaacagagggaagaaataagcccgccggaaatttcaacatttgccagtctattgaaagctttggcatattgggcaggtaaaaaaaaagatttttactgcttctgctgatctgcctactaatttcttgacaaaaatcgaagaccatgtttaatatgtcaatttctctgttccttttgtcacagatgggagtaatgaccattcggtagtaatgatggctgcaagcatatgctctctgatctttgatttcacatcagaagatgctttacaacttagcagaagctccctggatagtttggcccggctcgttacaagaagcttgtcctcaagtggccaggtataataatccgtgacttgtcatagagtctcttgtacttgttttggtagagagaattgcttgttagtgaactgttgcttaccgttgcaggatatgtctgataccgcggatcttcttgaaatcataagagcaggtttggtttcaacatctctctcacttttttttcctcggcttctctttactttttaaatcgataaacacaacaagttttcttcttgctctaattgtgcttgtatgattatggaacaggatactctcggtggataaatcgatttcccaccattatgaaacatcccgttgtgcaatagaaactattagatttggtctcaggctgtttcgagggagagaaatagtcaaaaaaggaaattttgttcagtttattagctccacgttgttgtattatatacacttgagattataattcatggtttctctatttatgatgcttccccaccaagaaatgagatacgatatatagatatttatgcaagtctaaaatttgacttgttatatagaggcaaatctaaaagataaggttccgattatgaaggattcaaatctttaaacgacgccgtgtttccatataacagtaaacagaaacaaacgcgtttttcgttggttggataaatcctccttataaataaacaaacctttaaggaaggttagttgtcaaaagaatctgcgaaaaataagagagagagagagagaaacaggatcattcattatg

SEQ ID NO: 3062 - DNA, 3000 bp, Unknown; identical to SEQ ID NO: 3052
  misc_feature (1)..( 3000): cDNA_ID_1819301_gDNA_ID_1620622_Annot_ID_47061 3000 nt of promoter + ATG

SEQ ID NO: 3063 - DNA, 3000 bp, Unknown; identical to SEQ ID NO: 3051
  misc_feature (1)..( 3000): cDNA_ID_1819297_gDNA_ID_1620622_Annot_ID_47062 3000 nt of promoter + ATG

SEQ ID NO: 3064 - DNA, 3000 bp, Unknown; identical to SEQ ID NO: 3050
  misc_feature (1)..( 3000): cDNA_ID_3070648_gDNA_ID_1620622_Annot_ID_47063 3000 nt of promoter + ATG

SEQ ID NO: 3065 - DNA, 3000 bp, Unknown
  misc_feature (1)..( 3000): cDNA_ID_1819293_gDNA_ID_1620622_Annot_ID_47065 3000 nt of promoter + ATG
aaatgtctgaatgttccatttgagaaatgtcctcatcatgtgacacaagtttattaggctactcaagttagcttagaattaagaagctagaacatgtgaaaataaatagaaaacaaaaaagaggaaacaaaaactaataacagaacgagaagttgaaaccttttggatccaattaaatgaatatcgatgtaattccaaaatgttagttcatgtgttaatgtttgaagatctagtacatatgaataacatttgaaatcatttttgtttcatgcaattacataactacaagggttttcatcacatattgctaattaattttgagtttagaatccaaaacatttaaccgaaaatctaataattttaaaaagggtgatttactcatctataagactaactaaaaaaatacgtactaaattatttacaagagacaattgataactagagtatgaattagttgtttagacttacccatgtgtcaaagtcatattgacaaatggctcggttataactgatttatataccaataattgcatacaagtttgtttcttaaataaatcaagcaatattcataagattgcatgtgtattttctgcgaaactattagtacgaattcgtggatatgcaaatttaatgactatgcaaagtaggtgagaatgtaatagcgattagaatagctagggtttagcctaccaaccatggtaatccagtttcctaattatcgttagtttttgaatcccattcatgcttttatctatttttcaaccaatcatgtctttttaccaacaaagcatttccagtctaagcaatatggtaggtaactcggtacgataaacagaaagataatttattattcatctataaacgaataattggttctcacattactcatacagaggaaaaaaagggatatacaaaccctctctaaattatatagttttgaattcactgttgtttatcaacaacatatataactctcttacccaattcttattattgttcatacttcatagacattaacatgtacgtatagtgattgctacaatgaatggtatgtacagatattgagacagacagtagaaagggatgaatcgagtatttattaaagagaaaggaaagggccaatctatgcctagtttcaattatgaaactcaacccatgaactgatttaaatactttacctatcggataagacttttaagggtctaaaatattttccaactatttttcatttgcaacaaaccttaaagtaatatgctaaagagatcttttccaaaggtggaatgatttttttgatctaaaacggcccatcaaccaatcttcggtccattatcctgacatgattatttgggctacatttttttaagtcttttgcagtaaattgttgaaccaacaaaaataaagagttggagttggacctagtagctgatctgctgatgtgttggtgatggtcgtcgtgggttcctgtcttataaccctagaaaccaagccacttcatcattctcaaattcaatgctttactaaataatattattatcgaaatcaaaatactaatttagacgtatataaatctagaagcaaaccttaggtgaggtcgaaacagagatgaccttttgcgtgcactttaattaatatcttattacataaaatgtcacactttgagtaaactttacattattctctcatccataataaataaataaagcatactgggttttaggtcaggctgacgtcagcagtttctttgtgtttcattttttttttttttgtaatctaacgctccagatttgttgtcttctccacgagccctttgttgttgttggtaatggagattttcgctctaagtcattgtggcttcttcttctttatttagaaaccaattcatcaactccttcgttatttctaaatctctttgccactacctcttgttgctgcaattgaattggctcaaatcttcttcacttggtcgacgtaaagacgactttgacttggtttttaacttcacttctccgtcgaaaactatcccttctcttccgatcgaatcaatcggctctctctccacacaaaccaaggtaagggttaaccctctccggtgattatgctctgataaatttacttgctcggccattagtgttcagaaacttggtgatttatgcatgtttttttttgttcaaagaccgtagatttcggaattaggattgtaaaaattgaacctttacatcagtgtttttacaaagttataagctttacttggaaatcagtggttttttgggtcaaccaaagttgaaagatttgaagaagaatgaaactagttcgatttatatatcattttattgcttcttaagaaagtgtcgtccttggttctttatgaatttccaattgcagccaaatatgtcatgttattcacctaatttttgtattttccaattgcagccaaatatcttctcctgttactggagacaaacctgcatacatttctgtcatctctgttaaggtattacatttagtttacttgtttacttaatgtagctgcttattacatttttttcttcaagtctatattcttctttcaatagcattaaaagttatgtgtatcctcagattagatcttgctgactcgcaagtttttggattatttagcggtttaataagaattatatcttccttgaaattgtgcctaggtagtggaatcgttgttagcctactgtagctcagataggtgatggatcatttccgttcaattgaataatttgactatttaaggtttgcacttagttttgtctacagaatcaattcatcctttttcacagtcaagatattattctcattatcactattgtagacttcttggacttccatacattcatcagtcaacttttcgatggtgcgtttttatcacagtggcacaattatttaagaggctccatctccactgcaccactgagaagtttcgtgtggacatgtctaagcttagaattggtttggttgaaaactgaggagatg

SEQ ID NO: 3066 - DNA, 3000 bp, Unknown
  misc_feature (1)..( 3000): cDNA_ID_1819285_gDNA_ID_1620622_Annot_ID_47068 3000 nt of promoter + ATG
acaaaaacaaaaaaatataattagtgtattttaaattatttgtgttttaatatattttttattttatcttttaaaacatgttttttatttgagttattattatgaattcagtattataaagtcatatcttcatttcaatttttttttgaatataatgttatataatatttctaaacacaagtagataacgttggtcaatatttggttaagataaatggtggaaaaatattcagaaatgttcaaaaatgttcgaccattttttttatttcaaaatgtacgtcagtaactatcgattttttttgaccatatacaatttgcgacccccgcctttcgacgacttgcttttggtcaaacagcagtaagataggcgtatgtctcatgcttacatggtattgaaccgataatatgtgtgtgtatatatagagagacagactatactttttaatcattcaaaactagaaatcaccaaacacacatctcttttgcacgctcaaaccactatggatacttccctcttttctttatttgttccaatccttgttttcgtttttattgctctttttaagaaatcaaagaaaccaaaacatgtaaaagctcctgcaccaagtggtgcgtggcccatcatcggtcatcttcaccttctcagtggcaaggaacagcttctttaccgaaccttaggaaaaatggctgaccagtacggtccagccatgtcgctacgacttgggagcagtgaaacatttgttgtgagcagttttgaggtggctaaagattgttttactgtgaacgacaaagccttggcttcacgtcctattactgcagccgcaaagcacatgggttacgattgtgctgttttcgggtttgcgccttatagcgctttctggcgtgagatgcgtaaaatcgcaaccctcgagctactttctaaccggcggcttcagatgctcaagcatgtccgtgtttctgagatctcaatgggtaattaaaaaaaaaaaaaaacgtatataataataattttcgatattgttaattttgttatgatgcgatattgacatattgtcacatgcatgcatgcagttatgcaagatttgtattccttgtgggtcaagaaaggtggttcagaaccagtaatggttgatctaaagagctggttagaggatatgagtctgaacatgatggtgagaatggtggccggaaagcgatactttggaggcggctcgttatcccctgaagatgccgaagaggcaaggcaatgcagaaagggcgtcgcaaatttctttcacctcgtcggtatattcaccgtgtccgatgcttttccgaaactagggtggtttgattttcaaggacatgagaaggagatgaagcaaacaggaagagaattagatgtgatccttgaaagatggattgaaaaccatcgacaacaacgaaaagtttcaggaacgaaacacaatgattcagacttcgtcgacgttatgctgtcgcttgcagaacaaggcaaattctcgcatcttcaacatgatgcaattactagcattaaatctacctgcctggtacatctttaactacacaaattttgatgttttttagatgaactagatatataaacctaaccaaattaactgggattttgtccaaaaattattgttttctaaaatacaaagttagttatataaacaagtttaggtggaaagacgtaaatgataacatgtttattttgtaagaaattacttcaaccttaaattgatgggattaggcgaatcctgattagatgatacttataagtatattgttttaatgtatgtcatataatgataataaattgaataacaggcactgattcttggaggaagtgagacttcaccatcaacccttacatgggccatttctcttcttctaaacaataaggacatgttaaagaaagcacaagatgagatcgacatccacgtcggcagagacaggaacgtcgaggattcagacatagaaaatctggtgtatattcaagcgattatcaaagaaacattgagattgtatccagctggtcctctcttaggccatcgagaggcgatagaagattgcacggtcgctggttacaacgttcgtcgcggcacaagaatgttagtgaatgtatggaaaatccaaagagatccgagggtttatatggagccaaacgaatttcgaccagagaggtttatcacaggagaagcaaaagagttcgatgtaagaggacaaaactttgagctgatgccatttggttcgggaagaagatcatgcccaggctcttcattggccatgcaagtgcttcatttaggtcttgctcgtttccttcaatcatttgacgtgaaaactgttatggatatgcctgttgatatgactgagagccctggcttaaccattcctaaagccacgcctcttgagattctgatcagtccacgtcttaaggaagggctttatgtgtgatctctgttccagaaacatatactatatgacttcaatatggtaattgaaggtgcattttaatttgtttttttaattttattttgaataaaacgtacgtttgttacgttgtgtacttttttaaaataaataaatgtggaaccaaatgtattctttaaaatatatgtattatttgatttcatctattgtgtaaaactttgtataatataatatatttgatttgacggcaaaaaaaacacaaacaaactgcattttcaattttgaactttgtaaattaacagaagcggaaatattttggggaaaaaaaaaaagaaaaaacagaaacggaagtaaataagctttttaggcatcgatcgaattttccaggaaaccccgagagaggggaagaagaaactgacgaagacgaagtcgaacccttaaaaatccggtagagcatccgattctccgttgctcgaaacctctcaatcgattttttaaaaatttatttgcgatgcattgagccgccgtcaaaagagagagagagagagagagagagagagagagagagagatg

SEQ ID NO: 3067 - DNA, 3000 bp, Unknown; identical to SEQ ID NO: 3059
  misc_feature (1)..( 3000): cDNA_ID_1819281_gDNA_ID_1620622_Annot_ID_47069 3000 nt of promoter + ATG

SEQ ID NO: 3068 - DNA, 3000 bp, Unknown
  misc_feature (1)..( 3000): cDNA_ID_1819267_gDNA_ID_1620622_Annot_ID_47074 3000 nt of promoter + ATG
gataggattgagctcattcaatggttgagaaagctaaattcattcatctcacaataaacacgaaatatttcgatgtttacacatcttctaattaaactgttttatcagttaaaagtagtaatattggcttattgacaaaaaaaaaaagtagtaatattggctttagttacttttatctgaaacaaaatgtacaattgggccttagatgagtaataaacaatagaacttgggcccaaccctccaccgggatgtttaataactgtgtcttttagtgtggttattaattaaaaaattaaccccttttggtgtgagccaaagaaagaaaaatagattaaagtctttcatatacatcaattaaaaaatgttcgatcaattaaaacgagccatgatgaactaatcatatacatcatcatccatcgtgaaaagctagctgttagttaataattacttaataataagaaagaaaaagaaaatgattgttattacttattagtactgctatatactactccatatggaatagtaactgctattatctggcgttctagagttgacatttaaatgtcatagttttatttagatgtggaaaatctagtaagagtaatagagtaggaagtgattaggaagcaaccgaacaagaagcatattttatgaccggtgtggttagcccttgtgggagacaagattacctcaatttttggctaatcttgattttcctcctccattttattattacttattttctttctttttattattatttttatcagcatctttctctttaattatttttcttaaaattaaacattacaccaaagtgttgctgttaatttctcatatttaaatgtgaatagatatatactatatactaatatacatgtgtgtatcctatatgagaccataagccaatgacagtaggtattagctaatgacaagtgacttccaataacttattaagaagtagaatctttacagatttgatgtttacatggatcttctagaaaactgatttctttaatctctctaatgtcatctgcaactatttaacatacacacacacaaaataaaataaaattggaagagctaatgataatgatttgtattagaaagttgtcctttattttccaatgcattgcatcgaacatatgttgatgttcttttaaaatcgtaaaatctagttctgtattcttttattctaggtttatcaaggctttgtcacaagacaatgagaatacaacttttctctaattttcttcatatactaaataaattatcgtagatttgtagaaggttcttaggctagattcaaaaagtcatttaggatctctttctagatcttgcattttttttagtaaatcttatgctggtgatacttttattaaaccttatgattctaatttggaaaacaaaactaactgataacctattttacattaataaaaacgatgcataattgtaataatgttttatttttttatgttaataagctagccaaaacatattattgatccgaagtacgctattttctataagaaaaggagaggcacggaaatgaacacgctgtgtggttaatccaagaaatcatacaaaattaattcataaactataataaaatcattgggatcttattttgcacccaccaagcttgtaggctgaagatgcggatggaacccaacttcaagaaattcttgccttttgttttatggcttttttttgtcttgtcatagttatataaatgtattttgctaaatttaaacggacaatcaaataaataaataatatataatttgtagttaacaactaaattcaatgactaatatcatgtaacaatagacttgtgacagcagttttctttgttgacttcaaagtttaattcgagcgtacgatacatttggtcggtgataaatatcgtgctatgagtttaatttgttgacttgaaagttttataaacattgtgaaccattgtaacatgtgtttcttgattatacatattcctaaaattaatttcatatggtaagagtgtaaaattatccaagtaatggtgtaaattttaaaagtcttttttttttttttttttcatcaattttaaaagtctttctctgacgttaaaaatagtcttgtcttaggtttgaataatatcggcattagccattattggtcgttactatgggatacttaattttgctaaatctttcagaacctgtacgagataagcgaaaaagccatgaaccacggtcacgcgtgtctcgcacttcccaactttcaccatgcatgctctcactaaagcctgtctttttttttctttcttttacatattttaaaatcataataccataatttgcactaattcttatggtaaatccgttttatgagatactcaacttagttgtccattccttaagacacagattaaggaaagtattcaattctttttgaagttatggtaataactcaaattcttctttcctgccttgaatacttggtacaatatcacaaacatatctctaaattaattacatgatctgcagaatcatttacataaacactttcacatttttatccatttaaaaaaaaaaatattatgatcctctttccttttcaattaattatcactaaactaaaaaatattattcccacagtcaaaagaaaccaaactaatttaaaaaaggtggcgcgtgattatcacgctcaaatgaccgatcggttccactgaattttctcagagattctcctctgaaaatgttttttgtttttttcttatgtcaaaaagaaaatttaccagaaatgattaaaatttgaaaagagaattccataaatgagttaattcgccagtcttgaagatcattacagagttttcagaaaccatatgtagtcttagattctcttttgccaaagaagaaaattttactctgccatacaactttttgtctctttctctactaataataataatccgaactttgtttgttcttctacttcaattcataatctttgacggcg

SEQ ID NO: 3069 - DNA, 192 bp, Unknown; identical to SEQ ID NO: 3057
  misc_feature (1)..( 192): cDNA_ID_1819344_gDNA_ID_1620622_Annot_ID_47075 3000 nt of promoter + ATG

SEQ ID NO: 3070 - DNA, 3000 bp, Unknown
  misc_feature (1)..( 3000): cDNA_ID_1819373_gDNA_ID_1620623_Annot_ID_47076 3000 nt of promoter + ATG
taaacttggtcaagatttgcttaaacactgttacttgccagttaaaatactctggttttgatcttagagatagaaaaccaggataagtttgtcatcatcatcaccattattgtgattggtttctctcatcatattttttttgcgggaaatactagaaaagttacaagaaatggggtatatgagtttcaggagtggtccatccattagatgatctgtctttgtttatgtgttgttgttttgtggtcctgatttgtaagagcaaagagtggaaagcaaaagggaatgatgatgatgatgagttttcttctaatttagaaagtgaagaatctctctttacttttgttgcttatgctttgtttctctaaatatctaagacatctcttccaagttttgacctctggatattctaaactaggctaagaatctttgtttcctttgtcttgttttgtaagtgaattttaggcaacaattggacttttcttaggttgtgagttaaacttgataaacatgcatgtgcttatatggttttgaatgtaaacataacatctgaaatgtttaagaaaagagaaatgtctaattaatatgtaagagttctcgttgagctgattatgttcttagtttcaatgtttaatctggccattgatttctaccttgcaggtacgccgtttcagatcttgacagcgatgttactattcatgttggcgaggtcacatttcacctccataaggtacatttttgtaatgctgataatagaagtagtttctactgagggattcttaagtggtacaactttttattagagatgtctcttttatgctcaatgttacattttcagttcccgctgctatcgaagagcaatcggatgcagcgactggtttttgaggcgagtgaggaaaaaaccgatgagatcactatactagacatgccaggaggatacaaagcgtttgagatctgtgccaagttttgctatgggatgactgttacgctcaatgcttacaacataaccgcggtgcgatgtgcagctgagtatcttgaaatgactgaagatgctgaccgcggtaacctcatatacaagatcgaagttttcctcaactcaggcatattcagaagctggaaagactcaatcattgtgcttcagacaacaagatctcttcttccttggtctgaagatctgaagcttgttggtagatgcatagattctgtttcagctaagatcttggtgaaccctgagactatcacttggtcttatacattcaacaggaagttatctggacctgataagatagtcgaatatcatcgggagaagagagaagagaatgtgattccgaaagattggtgggtcgaagatgtatgtgagctagagattgatatgttcaagagggtgataagtgttgtgaaatctagtggaaggatgaataatggcgtaattgctgaagctcttagatactatgttgcaaggtggttaccagaatctatggagtctttgacatcagaagcttcttcaaacaaagatctcgttgagacggttgttttcttgttgccgaaggtaaacagagcaatgagctactcttcttgcagcttcttgctaaaactccttaaagtttcgatcttggttggagctgatgagacggtgagagaagatttggttgagaacgtgagtttgaagcttcatgaagcgtccgttaaagatttgctgatccatgaagtcgaattagtccatcggattgttgatcagttcatggcggatgagaaacgtgtatctgaagatgaccggtacaaggagtttgttttaggaaatggaattttgttgagtgtaggaagattgattgatgcttatctcgctcttaactctgaacttacactctctagctttgttgagttatctgagttagtcccggaatcagctaggccgatacacgacggtctctacaaagccattgacactttcatgaaggtaaaacagagtttcttgtttctctgaaaagaatgaaatatttttggacatttttgtaatcggtgaagttggtttttgtaggaacatcccgaactaacaaaatccgaaaagaagaggctttgtgggttaatggacgtgaggaaactgacaaatgaagcatcaacgcacgctgcacagaacgagagacttccactacgagtggtggtgcaagttctctactttgagcagctccgagcaaatcacagccccgtggcgtctgttgcggcttcgtcacactcgccggttgagaagacggaggagaacaaaggagaagaagcgacgaagaaggtggagctgagcaagaaaagcagaggaagcaagagcacgaggagtggtggtggtgcacagctgatgccgtcgaggtcaaggaggatctttgagaagatatggcctgggaaaggagagattagcaacaagagctctgaggtttcttctggaagctcacaaagtccgccagccaagtcttctagctcgtcttcccgacgccgcagacattcgatatcgtgaatcggtggggagaaacagaatttgtaaagagaagctattatggttgtaacttattataagtgatcttaggatttgtggtagttaaaattaaaactgatgaagttgtgttatgtgtttctttaatcgtaaagatttgttaactgtttcattacatgactaatgttttgaatttgttgtcgttaactttaagcgattagtgaaagtgatggacgacatgttttgttgtttgtttgtcaatcattgttcattagtcatcaaaatattccacattagtgagactaaaactcagatcttatgggctaagctatgatctcttgggccttatgggctcaatcttgggctcataagtgatcctacgttttagagtttagactagttcaatttcgattgtggaaatgatctgacggctaggaatcaccggcggccatagcttgagaggcaaaacccaaaaccctcggaaacacagaggcgtcttctcgacggagagcgacagagatatg

SEQ ID NO: 3071 - DNA, 3000 bp, Unknown
  misc_feature (1)..( 3000): cDNA_ID_2160942_gDNA_ID_1620623_Annot_ID_47077 3000 nt of promoter + ATG
agtacagtagcagattagtccatgacattataaagaaactaatcgtgttttagaaaagccttttttgcatgcaaagtcaaatgttaggaaaatgcaaagtctgaccgactcgtgagcatctagaataacggaaacaaaagtcaaagtgtctctctctctctctctctcggctagcgggttccgttgggacggactacaaaagactgtaccggcgcgtcaattcacaccaactagtacgaagaagggaaacactgattacacgtgtcgagtgttcattcgttgatgtacaagtagcggaactaaagcaaacggagtagggaatgagtcaaagcaagtatggtggtgcaaactgctattgactgatgcagggaaatattgttttgttaagagattttttactattatctactactagtatataacaaaagattatgttttgggaaaattaatctagtgcctaagtttttgagcgaaaaccaaaaaccaggctatgactcagtttagccaatgtacttatttatgtagtgttggaatattatcatcatatgtgtacttacttacctttatcatatatagatgtatagaagcagatacatagggttaattaaagactacacgagacgagaattgagctgtacaatgctatagactatagactatatagtaattggagagatctctaatctacagagaaaataaagtactacatacttcattattacacacacattaaaacttaagacgtaaagaataaatggaagtgaataaagaaaggggataattaataaaaacagttgttaattagtaacattcaaacaacttagctggctaatttagaatatttgcaagctagattcccactcccttttctcttgttcccctacagttttttctcgcttccctttatatagaatataagtatatacataattgttcgagacaagttcgtcagaaggaaaataaatcatcatcattcctcatcccttcccgaagctgctctaaggaaagagatccactattactactactatacatatataactataaaaataaataaactttcattgagatttgagccaaacagagaagaagaagaagaagaagaagagaagatctccagcggatcagtccccgctttaaaagcattggcggcgtctgatttcatttctctctctctctctatctctctttaattccctcaaagacaaagcctttttctctatatatatatatatatctctctatctttcgccattttggtttttgcttctctctgtgtgtgagtgattatgatgatgggattatctttctaaagctttttgttttcctgaaaaattaaaaaagaaaacttttatggttcttcttctcttctgtgttggagttgagagaccaataaatgctgttagtaatggttagttgagatgagaggtaaaaagatcccgtagtccgaggagtgtttggtttcttgcaaaaggatagtgaggcaaaacatgggtttggtttctcttgtctcctttcattcatcccttttccattaatggtctctccctcttccaacaccaacctcttcttttattaactaacaaacattttctgcctttttctcctcttctcacttctctggttcttctgtgatttgatcggttcttctaaaaagagagagagtagaagcttcttaaagctgcttcagggtcaaacaaaagtgtcttccttttggtaaacaagacgaagaaatatgaagttcatgaagctagggtctaagcccgatacatttgaatctgatggcaaattcgtcaagtaagcataattttattttgtttttatcttattttttaatttgatgggtcaaatgaatcttctactatttctgttctctgtgtttttgttctgttctctcttctcttttctattcatttatctccacatgtattgcctctgtttagttcttgtatgatttctagaaacatatgtcccatcttctcttggttcctatcttttttaacacaagctattaaaaacagatttcagtgacttccctgctaaattttcatttgctctatatgaacagagatagctaaacttggtcaagatttgcttaaacactgttacttgccagttaaaatactctggttttgatcttagagatagaaaaccaggataagtttgtcatcatcatcaccattattgtgattggtttctctcatcatattttttttgcgggaaatactagaaaagttacaagaaatggggtatatgagtttcaggagtggtccatccattagatgatctgtctttgtttatgtgttgttgttttgtggtcctgatttgtaagagcaaagagtggaaagcaaaagggaatgatgatgatgatgagttttcttctaatttagaaagtgaagaatctctctttacttttgttgcttatgctttgtttctctaaatatctaagacatctcttccaagttttgacctctggatattctaaactaggctaagaatctttgtttcctttgtcttgttttgtaagtgaattttaggcaacaattggacttttcttaggttgtgagttaaacttgataaacatgcatgtgcttatatggttttgaatgtaaacataacatctgaaatgtttaagaaaagagaaatgtctaattaatatgtaagagttctcgttgagctgattatgttcttagtttcaatgtttaatctggccattgatttctaccttgcaggtacgccgtttcagatcttgacagcgatgttactattcatgttggcgaggtcacatttcacctccataaggtacatttttgtaatgctgataatagaagtagtttctactgagggattcttaagtggtacaactttttattagagatgtctcttttatgctcaatgttacattttcagttcccgctgctatcgaagagcaatcggatgcagcgactggtttttgaggcgagtgaggaaaaaaccgatgagatcactatactagacatg

SEQ ID NO: 3072 - DNA, 3000 bp, Unknown
  misc_feature (1)..( 3000): cDNA_ID_3070694_gDNA_ID_1620623_Annot_ID_47081 3000 nt of promoter + ATG
tgccaaacaaacatattgttagtattaaattataggaccactcaacattccgccgtgtcacatggaaaaataatgttagtaaacttatttggtatcaaatttaaatccatattttacatatgttaggaatgttaaaacgtaaaattgatagattctctatttacattagaaaagttcaactggtggtttggttcacgacatgaaccatggatccagttatccagattgaattagagttttgaatttggtacctcgatttggaaaggagaagttgtgggagggtatctctcgacaactttgccctttttatcaaccaagaatttctcaaagttccatttgatgatatcaccaaggaaaccaccagcattggatttcaagaacttgtagattggagctgtgcttggtccattcacatcaacctgaagaacataacttatcaaaactaattaaaagatatctccctaaactcaaaaaaacgagagttctttttttctatataccttgtcgaatatagggaactctgctttgaaccgggtgcaagcaaattgcttgatctcagggtttgaaccgggttcttgacctccaaattgattgcaagggaaagcaagaatctcaaatcctaaaaacgagagagacacaataaataagaatctcacaatcactgtgttaccttaattaaatttagatgtgtaaaaagcttactataacaagcacaccttggttcttgtatttttcgtacagttgagaaagctctgagtaatttgatgatgtcaaaccactgacaccgtgaagttaaaaaataaacttaaaaaaaaattcagatgcaaaaacttatcaaatagaaagaattcgaagaaacaataaaaacaatcaccatcttgacgcaacgttaacgatcaacaaaggttttcctttgaatttgtccagagaaacatcattaccatcgatgtcctgtttcaaaaaaacacaattatgtctccaaagtctaggttttaattaggaagctctcacatgtactacataattcagtgaggttgagaaaaatcatattttgacgacagaacaaattcttcaatttcgataacgaagaaacaaaaacctaattttcttcttcagataaattaaaagaaacatacctttacagtgaaatcgtgaacagacttctctgctgcagcccttgcatagacactgaaatttttagatttgactagaaacctatgactatttgacgatttcactgaaaccccattactcggattccgagtttttgatgttctggtggagaatctcaatgatgggccgagaaaagcggaagtaatcggagacggatttgcagcgaaaccattgaagggtgtagagaatgatgcgtaagagaaagccatatagaagcagaatctctctacaaagagttttttttcgttctactattatctacatatacaaaagtgttacacgttctaaggaaaagggagagctacttaaaaattaacgctaaatagcagcttcattaagaaattttaaattccatatccacaaatattacacccataaaaggtccataggtcacagggagaacacgttttccatattatattcactaattttgaaaagaagtaaaaatggcatttgacaaaaatgctgtacggaaaagctgagcggtgcaaaagctatggatttgatgaagactagtcaaagcttatcatgcaacaaagttgcaactatacgatattatttctcgagccctctttggtagtagtaatctaaatgattgataatacgataacacggagtaaatcatcacgtctaaaaagaggtggatgaatcaatctggaaggagattatgctattagggactccaaaatgaggttatatatacccttgtcatagactcacaaagagtgtttggattagacctgagatatggatccaagtatactcactattttcatgaatgttttactaaagtttacctgtcccaagtttgtagaccgattttttgggtgaagacgtgtttagttgtgaaacagtggtctggctaattgcaaagtgatttaggtgtacttgagaccaatacttttgatttggtagtagagtaatgtatggagtccgtcaaatcttgccaaatatcgcattgttgccatggtggaagatggtagccgtgtgtcttcctatgtgtgttgcatttattacttgcacatgtctccttggacccttgtgtggaggaaaaatagtaagttaccgttcatacaactgaaattttaggaaactttgacattatgatctttaagaaaatatatatatatatatatatatatatatatccatccacaaatagtcttacaatctactatgtatttaacttttcagaatttaatgaagacacaagacatgtatgtgtgtttgatatatcaatttactccataagactttgaaacatataatacagttgaaaattgcaatacagctaaaacaaatcataaagagtcaggtaatacattattgtattagtgttaagtaaaaatagtgtgttgtgctggcaagtaagagaacacgaacaaaatcttaagaactttcgttgcttttctaaggcaaaacaaaacagactttttctcttcttcttctttttggggctacgacaatctgaatttgatcccaaatcaaaactttcttcttcttcgtcttcctctaatcaaaactgtctcctaccaaaggtctttcctttctccagccagatatgtgaggaaaccaagcttctcgtacaacttcatcacctacttccttttgacgttttcaaatcttggtatgtttaaaactcttatcgattcagccctctctgttttggtttctgtttgtagattgatttcttaattagctctaaaagattaagatcacaggggtccattgtcaaaattctcttttgattttgtttttgtaatcaagaatagtttctttttttgattcatgaagaaatgtctaattttttcgttgcagagagagatg

SEQ ID NO: 3073 - DNA, 3000 bp, Unknown
  misc_feature (1)..( 3000): cDNA_ID_1819360_gDNA_ID_1620623_Annot_ID_47082 3000 nt of promoter + ATG
tgtttcaggaaaaagagaagtggtgtcgttagaccactcacagtgttaacatctggactagcggtaactatttgcttttcagatggcaaaaacttattctgcttgaattccatgtcacctgtcaagaaacaatgagtagctccaatcagagattgcatgtaaacaactatacaagttgcattgtttaaagaagaggttaccgatagctcgtgatagatttaagcttccattgactcgccctgcatgtataaagccaccagctttcaatatcctttctttctcagcttcaagatctggtttgtgatctctagaaagattataagcctgtagacaaaggacacacgttttgacaaaaaaattaaagacgccaaaaagtcttaatcaaacacttcaaaatggtattttacctgattctttctggatatcacacaacgtgagtcacctgcatttgcaacaaatagctgcttgtctctaacaacagctacgcatgccgtgctcccagaattaggtccagcaaaatcagaatgaggaccctgttttgacaacaaaagcacaaaccttagatcaaactttactgttgcttagtgatagaagcagtaatgcaggtagggaatatttacttcctcaaacgcccaagcatcaggtttattagcactgtccccacttcttggtgaccatataagcccttcaatcatcccactgaacttattgattttgtcaccaagtactgctaactctcgccaccctctttgtccttgcatcatctcatccattctacaatagccacaacgacaagacttcaatgcagaacttcaaacaaaaatagactctttttgctgtaaacttacctgaaaaatgctttttgaagagaagtccctacgtctccagctgcatacgcctcatcactaagaacctgctggtgtagatacttggcacagaacttagaaacaactttacctacaatagtagccaaaatcatttgagattccatgtacaacaagaacatgaatcaccaaaaaggttcagctatatcagtctacaagctcttaaaccaagttttaagccggagaaaatacaccaagaagacaaatgtttccttttttacctccatgaccatcatagacacccaagaaggaagtgttatcatcgagatcaagtattgcagcatgctaccaaagttataaaaaaaaaacattctttgaatcagtaaggaaacaaaatctgacaaaaagaagaaaggtttaaactttttgatgataatcactcacagcatcttccatggacgcacgccaaccttgcatagaggataaaccatatctgagtttatgattttcgccatcttctgagaacttgtctgtttttggagtacttagatatatacccatctctctctgcaacgaaaaaattagacatttcttcatgaatcaaaaaaagaaactattcttgattacaaaaacaaaatcaaaagagaattttgacaatggacccctgtgatcttaatcttttagagctaattaagaaatcaatctacaaacagaaaccaaaacagagagggctgaatcgataagagttttaaacataccaagatttgaaaacgtcaaaaggaagtaggtgatgaagttgtacgagaagcttggtttcctcacatatctggctggagaaaggaaagacctttggtaggagacagttttgattagaggaagacgaagaagaagaaagttttgatttgggatcaaattcagattgtcgtagccccaaaaagaagaagaagagaaaaagtctgttttgttttgccttagaaaagcaacgaaagttcttaagattttgttcgtgttctcttacttgccagcacaacacactatttttacttaacactaatacaataatgtattacctgactctttatgatttgttttagctgtattgcaattttcaactgtattatatgtttcaaagtcttatggagtaaattgatatatcaaacacacatacatgtcttgtgtcttcattaaattctgaaaagttaaatacatagtagattgtaagactatttgtggatggatatatatatatatatatatatatatatattttcttaaagatcataatgtcaaagtttcctaaaatttcagttgtatgaacggtaacttactatttttcctccacacaagggtccaaggagacatgtgcaagtaataaatgcaacacacataggaagacacacggctaccatcttccaccatggcaacaatgcgatatttggcaagatttgacggactccatacattactctactaccaaatcaaaagtattggtctcaagtacacctaaatcactttgcaattagccagaccactgtttcacaactaaacacgtcttcacccaaaaaatcggtctacaaacttgggacaggtaaactttagtaaaacattcatgaaaatagtgagtatacttggatccatatctcaggtctaatccaaacactctttgtgagtctatgacaagggtatatataacctcattttggagtccctaatagcataatctccttccagattgattcatccacctctttttagacgtgatgatttactccgtgttatcgtattatcaatcatttagattactactaccaaagagggctcgagaaataatatcgtatagttgcaactttgttgcatgataagctttgactagtcttcatcaaatccatagcttttgcaccgctcagcttttccgtacagcatttttgtcaaatgccatttttacttcttttcaaaattagtgaatataatatggaaaacgtgttctccctgtgacctatggaccttttatgggtgtaatatttgtggatatggaatttaaaatttcttaatgaagctgctatttagcgttaatttttaagtagctctcccttttccttagaacgtgtaacacttttgtatatgtagataatagtagaacgaaaaaaaactctttgtagagagattctgcttctat

SEQ ID NO: 3074 - DNA, 3000 bp, Unknown
  misc_feature (1)..( 3000): cDNA_ID_1819356_gDNA_ID_1620623_Annot_ID_47083 3000 nt of promoter + ATG
tctctgtaaaatacattttcaaacagagttttggaatcttttgagagattattttatggttgtttctcgaatataaaatagagtacatgcctgaataaacaatgtggcggcgtggagtaaattggatctgtcgatctaactacattttgtttgttattgttttgttttgtagcgaaaattttacacaaattcattatagaataatcaagcatcacgtcttgtaggtgtcatcatgattcatgaagcatttctacaaaaataatagagagaaagacacatatgagctgatttaacaagaggaaataaaaacaaagaagagtgttgttgcttcgccagatctcatcagcttctgaggtatgcgacaaatgtgctcagacacaatctaatataatgcatagtactcaaggtacgatgtgtcgttgtgtttgagttaactttttttttggtttggttggtggttttgttaaaagtaaaaaagccaaattggtctactaggcttagcgtgaaaagtattgttataaagttatagagtttgttagcttttacttttaccaattttatcagcttttttactattattatatggttaaattaatactgtatctttccaccttttttttggcttatgagtgagtactcatccttaaaaaacttgagtaagtttatatttttctcttttgttaaaagagtaatgcttatattcgatgtgtactttgtaaaaaccctacaagattttaaggatggtccaaatttgaaatagtacacgtctaaaataattaacaacataattgaaaggtgggagaggcatgtgggagtgtgagtgctttcattaaagacagtctactttatttaagttttgatatgatctactgttatggagaacactcttcttcggctactaaaagctgcactagctgtctctggatatcgacaacatacttatcttatctattgccgtttcatttctataatagttagttttgccatgctcgattaatctagattttacatattagttttggcatagtagtgttacttatactccttttctaataatacatttgaaatttgaatatcacattgtttatacttctagtatctatcctctttaatttttctggttaaatatacctgcccccttatactttaatgtgtaaacatgctacaaaatcatctcattcacattgttagagaatggtacgatatgaaacgtgtataagtctctgtaaccgcttaaacttgtcgctatcttcttccgtgggaatgcgaactcaagcaaattccccaagaaaagtcatctttgctcttcacatacaccgacacctactaccaccagtgcttataatattctataattttcaacattgttgtttataatttggtataagaaagtaatatgttttttttgacagaaaatatatgcttagaggggttttctataaggtcttattagaatatgatgacaacattttaacgtctttttttttctctatctgggtgaagactacctttgcgacgagtgagagaggaggtagctagcgataaagtaatttttttttttttttttcaagtacttagcaatcaaaatgtgctacctagcaaattatcactattttttagtaatgtttaatatttgcatacaaaccctcttatgggcttctcgacgatgctaggaatctgatttgggcctaatgttagattagcccgtttgtgtttcatatagggtttctgagcagcctaactattgggctgcacgcttgaggtttgagtaattctactaaccaagtgttaattagctatagacatgagagacaataggtaaataataaactggaggccctttaatatgtgtacatacgataacgatgactatattatacagtgttagtcctacaaaattcaaaacttatttctatgttttgggacaacatgcttaggaataaatgatttttttttttctttttcttaaaccgcttaatattttttctttcatccagtttttagttgttgaatcttatatttgatttcatgttaatgcaatatgaatcgttatagtttatggatctgttaacgataaatttaataatctatgtttctttttagagttctatctaggtctatattcccaacatcttaatataccaaatagtacatatgtagaatcaaaaaaacaatctaatatagaatcgtataaacttaatagtgacaaaatcttattaaaattgaatcttaccaaattcttatttttcttctttaatatgtcaactacaaatttctacatatatttgtttttcaggattttatcctttatactcatttttattttatttttcatatgcttcatgtgagtctggttgataaaaaagcaaataatactcacaaaatatataaaaatcggatatgaaagcaaataatgagctaacctgagtttataatctaaagtaaaatccgaaataaagggaaaaaatcgcaatactggatttccttgatttttgtattccatttttctataaaaaaattccataaaagagaaagagaaataaaaataaatgaagaaacacatctcgtcaaatagacgaccaactaataaattgccgtacaccaaatattaaatacatcccatttttttatttaaagattatatatatatctttttaacggcgcttgaggactctcctatttttctttacttttttttttctttagttttctgtaaactgttaagattgagagagagcgaacaaaaaaaaaaaaaagagagagcggagagaagaaaaaaaaccctagcgtgttgttcagtgactttggggggaaaatttctcgtagtttcttcgctaaatccgtcttctcatctctttccatttgtggaattcaatggaagctttaggtttttggtgctgagaattctctgttttcgaatctagggtttgtagaggagatctattcaattgtagatacgcaagagcgaaacgagtcagaaaactaggagaaggagtcatg

SEQ ID NO: 3075 - DNA, 3000 bp, Unknown
  misc_feature (1)..( 3000): cDNA_ID_1819348_gDNA_ID_1620623_Annot_ID_47085 3000 nt of promoter + ATG
gtcttccttcgccaacaaccgtacctcactcgccgccgttattttcttccgacagtctcctccgtcatcgttatcttcacgcgccgccgcagctgattgtaactctctgaccacgcgcttcaaaacctcaagagcttcctctttcttcatcgtctcaacatcagcttcaacttcagctagattcaacagatcacaaagcttctccgatttcttcgatgtctcctcgaacgctacgccgttcaacgccgcgccgatcgtattagctttcgcatctttcgatgatgcaactgttgacttcgccgtcaccgtcacgtaacttccttcatcgtcctcttcccggagctcgtgacggtaacgtgagctaccgccgcaactaacggcgtcgacgatctttctacggaatgtggatctagagaaggtgctccagagacggaaatggtagccggaagtagaagaagaagaagtggaaggagcacggtcaagaatgagagatccgatattattccggtgacatttagccatggttgtgattctccgatcagttctttaagcttaacctacttactacatatgcaccaccaacaagcaaagagagagtgcgaaagatttatatatatctttttatttttttgtaagaaagaattataattatttgtttgtttatttggaagcgaaaacagagcgaatgttgactgttgattacttctttttataaagaacaaaaatttgcagtacttattgatttatcaaagaataaaaaaaaaactgtgtttggatgcagtcttataataaatcgcggataagctattctatcaattattttaagtcaattctatatgcttttttcttcattgatgattttttaaattgataacgtttatgaaaattgtttttttttctttgaagagaaaatgtgaaagtacaagagaggggtgagtgaggccatcactaatttcaaccgttcaaaatttacaaaatgtgtgtcagggaagcttctacagttctacacaagtcccatcattttgatgatactaaatcagtagattgctactactattggggctttgtttatgattctttttctataacacacaatatatttcattttaagaaaaaagaatttctagaagaagtttatagctctaaaaatggtccaacaaaaccaccgagaaaccaaaatttaaatcaatgtttaggctcttctacaattgatttcagtaattttctaaagagtaagaacccctttggatacgtttctgtattatttatttttcgtaaggtttggttattttaggatggctctacaaaaaaaatacaataaacatctaaaataacttgtatcaattaaaaataaatatatgcaaatttcatgctgcacagtggacatccagtggaagtattcgagaatgatttaactgtgttgtgttgtttggtcagatcgctgctaattgctattctcaagtctcaaccttcttttactggtacgcactcaaagcccattatcaccgaaaacatttcggtggatattttaataattctctaattgataagcgtgattttatgtcaacttacaaggcttttcaaagcccaaaaagggccacaggcccaagcataaagagaaacattcacaccatatctattttaaagattaataaaaatgaacaaaactgattttaattgtaaaataacaaaaatttgctttcattgagagttgaactcaagacctcccgcttactaaacgggtgctctaaccaactgagctatgaaagcttttgctgttacaattaattaaaatctatataatactttgtaacaaaactttttttaagtgttagttaatttaaaaagcgttaatcaattgaaatgtggacctcttaaaaaaactaacaaatacaaaaatgcaccatttgtccatagagtattggaaactaagtaaaccatcttcatactattggtcacaaccaaatccctttccaatttgtaacggacgactaattttggttttgtggtcaagactcaagataatgctaatttttaaacaaaattacagtgcatgaatctaatctttatttccttcttcttttataacctttttcatacttaccatttgcatgcctctctttaatatttgttttattctatagaaacaaatcacattatattgcattgaatagatttttatttaagtttcatttatttgttttcagacacatatctttagatactaaagatataactaaatatttaaatcttatttctggtcaacccattcagacaaagaatcttaaataaaaaaaactttaaattaatttcttccctaaatatgatatatattttttaattatgttacataaatgtatatatacaatataaatttatagtttttttttggtaagcatataaatttatagtttgaccagtgtcaaggaaacttaataaatcaaacaactttttatactaataaaataaaataactttttgttttaatgatatttaaatatttaattattcaatatatggttattttgataattttattttaaatcatcatcgaatttcttgttgaaatttcaaaattgccgcgtaatcttaacggttttaggtacaatttcattcacaaaaaccactaggactcacttctaaaaatttctcacagccacaactacatctgcatccccttctggttacaaattaattcacctttacattgaaattgacaaaaaaaggtagtgttatctccataaaacaaaattaaaaggaaataaagaataatgaccactccctctctatatatataaacagacgtttatcatatccttaagaatcacccctcttgcgttttagctcccttgcattttcttcatcttgtacgctcctccttggtcttagattttctgagatatttctcttttcactctttcttgttacgattttatctaaaaatttaatgaatcatatttactgaccaaacacattgttgtggttttttcatgcagagaa

SEQ ID NO: 3076 - DNA, 3000 bp, Unknown
  misc_feature (1)..( 3000): cDNA_ID_2105406_gDNA_ID_1620623_Annot_ID_162413 3000 nt of promoter + ATG
tttatctgaatgtttacgatcttaccccaatgaatgtttatggttactggctcggaattgggatctatcactctggtctcgaaggtaaatcgttttttttccttctcgattctgggtttgattgttgttctaagattgcggagaaagatgagacaatagtaggtcaattttgttggattgtaatattaattgttgaaaaaatccattgtctgtattgttgcttggctttgtttgattctaaagtctgctttgatcgatgaaaactatttattgttaaagagtagaattgacttttggtcatagaatcgatttagagactaaatgtgttttgatgataacaacttaggagggtagagttttgtggccgttgtttgaacaatgactcagtcacacacacgccatacgttgttgttaatcctatattgaatgttctctcgtggttttggctattccttgtttgtagttcatggggttgagtatggatacggggcacacgagaaatcgagctcggggatttttgaggtggagccaaagaagtgtcctggtttcacattcaggaaatcgattcttgttggtgaaacagagatgaaggctaaagaagttcgaagctttatggagaaattatcagaagagtatcagggtaacaagtaccatctcatcacaaggaactgcaaccatttctgcaaccatgtttctttgaaacttactcacaaatcaatccctagttgggtcaaccgtcttgctcgcttaggtaacccaaaacttcctctacaatagaatctttcaggggatcaaataagtaatgttgtacattggtttcttttgaaccttcttaaggtttcctctgcaactgtgtcttgccggcttgcttgaacgagactaaagtgaagcgggtaggaaaagacgggaagctgctcttggaaggagaaaatacgaagaagaagaagaggaagaagaaaatacgaagaagccgatcaggtcctttatcttcgtcttcttcaaatgcaagattagataatactcctacacataacagatcaatatcaacgggtaatcctcctctttctgcttctccatcttgtcctttgagacctcgacttccttctgttgcatctggagctgaagatcaaaatcctccaagcgtaagcgtcaagacatgattatttttcattgtttgaacagctgctagttatatacttgtttatgaatgcgaaggtggtgcttgtgctttgttctcaagttatatatcctccattcgtttggttatacttggtataatttacttataggagaatcatgaatctctctctgtagatactaactgtagagtgaattcaacatttgtttgttatgttttgatgtaaaattttgaaaattgtacgaattacttgtttgaatatcaacaaatcgaagtaaaatagctaaatattttggaaacaacaagtgttttattttaaatttctaattaattcttaagcaataagtcccaaattttcacaaatagagtttttattaaaagaaaaaaaattgatgagcgtaaaaataaaaaaataatgaattttattttattttattacagaaccaggaagtggcataaaccctagtttgaccttttcagaacacaactcactataaatacctatcaaaggacactcttccgcagctacaacgaattcccctggaaccctaattcaccgttcctgtgaaaagctcgcatacataagatctgttctatttctcgctttttgtttctagatttcagtctttgctatttcattatcgttctggtttttatatttgttgaaatctgttatgtaattgaaactgttggctctgccattttgattgaagtgggattccttaggctttgattttggttagttctcagatttaggtttaaaggttcttgttttttgatttgaagcgttatagcaatcccaatgatgacttattaagattaaaaatgttaaaagtagtgactgatatcttttgatgaaattttagctctgagggatttgatttgttctttgtttccttcttacattccgttgttggacatccattgtgggttaatttggtgagtttttgcttttgcttgcttgatgaagcatattgatgcacacgaccttagctgcatcccaatgatgaatgatatgaaaaaaatgttaaaagtagtgactgattataccttgattactagtcaattctgagggattctatcagctaagctaaattcaatccttttgcgccatctctttgtttacttaactctctatgtgcccttcgatgattaataatatattaatggttaaaagtagtctgatatcttattgatgaatatttcaaatccgagggcttaacttatttcttataaaagttgtgactgatagcttgtgcacaatcttgttttcattcttggtatcatctaagagatacctcaacgccagcttctgcagtgaagtgcaatgtcgtaagtacgattccacccggcagaagaaatctctctcgattgcacttcatctgcagaagctggcttttttaggcagtgggagtgatttttttggcagaatatctccattgtattatgctcttttgttttccctggtgtgcttgaccatgatgaattcgctagtggttcacaattttgatagaatagttggattaaatggataacacagcgacaccatctattaatgatacaaccaactaaaaatgttattgtccaacctcaccaccaaatcatctttcgaaagctttcctttgtcttgttaaaatcaactatttaaagatgaagtatacaaagcttagcagtacttgttggacccacgtttgatatttttggggttgagatgtctgcaagcgtctttcttaaagtccaaaagaatgtgtgtgaaacgttgactttctgcaaggtttaccactgtttgtgcgcttagcttcgtttggagaatcttcttcttctctttctttgtagaccggctttgctttgcatatgagagg

SEQ ID NO: 3077 - DNA, 3000 bp, Unknown
  misc_feature (1)..( 3000): cDNA_ID_1819281_gDNA_ID_1620623_Annot_ID_162411 3000 nt of promoter + ATG
ttgttgtcattgggcttctggcccaataggcctttgtctttgttactcacgacactgtcgttttgagtcttcgtttcgacttctccaaagggatcttgaagctgtctggattcagatcttgaaggtgatgtcggagcagtggaggtcatgctaatatcaacaaccaaacctgtaagcatatgagaagcttccaataaaacattcttaaaatttattttcaacaactgccaatgtattaaaaaaaagcaatctcatgaattgcctacacgctaattaggcgggcgaaatttgttttatgtgtatgtggtatggtatttgtttttcctcgccatcctttcctggtaaaaccaataattttttatatcacatataaagttacgtgctgaacgaaacaaccgattattattaagaatccatgttgaaatagagaaaatggattgtgtgaatagaaaaacaaaaacgaaaagtcgacaaaaaaaacaaaaaacagaaaaacccactaaagtcaagcgttttgtttcaaccatgttatagtttagaactttataatcagaaattaattccacgaaaatgaataaatgtcagcagtcaaaccagaccattaaaagaaacaattaccattaaaagatatattgactaacaaaatcaatacaaacctttgcgtccatctctgttatggacacagttgacaattacaaaaaccctccatcttcctgtctctctctatcatccatgacttttttttttctcaacaacaactaattattatccaaagttcttagataatgagattaatacatgctatttcttgcccaactaggcacaatagaataaagcttaggatcataattcaaaaatgaaagagactcccttgatactctgccaatgtgtgccctctcttggtatgaacacaaacttgacctcttcaaattgggggagcaacctctgcagatcatccatgacttaaactgcacaataattaaaataggaaacttaagttcatcaagagagaccaaaaatatcacaaaactcttatttataccatttctattggcaatatttaatagttttttataattaaaataataaaataaaagagaaaaaaagtaaaaaaattctcgcttgaatttttttgaaatactctatacaactcatagtgacattttttttttcaattggttcaatttttttttactaaaaaaaaaattttaattacttttttagaaattctttggggttctccttgatggaaaaagatataccaaaataggtaaagattcttgaacaatggtgtaccatctacgacttcaccgaagtgagctaaagcatccctttaacgttggtaatcagttacccatgacacacactggacatttaccttcatcactctggtcgtcctgagacttgaacagtttcttgtttctgttatcatttacaacataaggcccacttcttgcccacacacagtttattactcatcaatttctctaatatactattactctataacaacaaaaaagtaacattgtaatttgtacacatagcgtttgatctagctagttctatatgtagaattgatgttagcaagtgaatcaaaattttgcggagatgatgtttgaacatgggtttgttcattgtgttacccacacgaagccaatttgattgttcgtccagatccttgtaaaaagaacacatatggatcatttagtcgcaacaataaagaagatgtatcagagctacatatgtatgtttcacagtatttctcctctcgattaacaatgaactggtgcaaggatcacccgattcgttcttgagggaagtatcttgggaagcagatcgatttagaggcaaagagggctcaaaagaaatcgttgatgaaatcgctcaaggtctcgcttgaaggttcgcagtttcttcactaatcgtgagcctttttaaagttgcagtaatcgttgtatgaaacaagcgtgcacggtcatagtcatgctcgttttctcgaggcagcttgacaagagttaaattatggtgatggataattagtgtatttttgaggctgtctcaactgaactttcatttaatgacttggctagcgatacagaaccgtctagccacaaaagagagattattaaagtggaatggcgaggcaaatggtggtagtgtgttttgtcaaacggaaatagaaacaagagatcacctatttttctcttgttcatactctcatgcttggtcagctcttactatgaaatatatgctcggctctcgcttcacgacttgctgtgattctcttgttgccctatctacgaccttttcctctccacaacttcatttgtttgtgtttagatatgtctttcaactcactatacacaatctatggaaagaattaaatgccccataactcagagctcccacttctttttaaatcttgttctattaagttttcaaaattttctcggttttatgttgaatttattgtaaaaccgtttttgaattttaaactcatacaaaaacaaaaaaatataattagtgtattttaaattatttgtgttttaatatattttttattttatcttttaaaacatgttttttatttgagttattattatgaattcagtattataaagtcatatcttcatttcaatttttttttgaatataatgttatataatatttctaaacacaagtagataacgttggtcaatatttggttaagataaatggtggaaaaatattcagaaatgttcaaaaatgttcgaccattttttttatttcaaaatgtacgtcagtaactatcgattttttttgaccatatacaatttgcgacccccgcctttcgacgacttgcttttggtcaaacagcagtaagataggcgtatgtctcatgcttacatggtattgaaccgataatatgtgtgtgtatatatagagagacagactatactttttaatcattcaaaactagaaatcaccaaacacacatctcttttgcacgctcaaaccact

SEQ ID NO: 3078 - DNA, 3000 bp, Unknown
  misc_feature (1)..( 3000): cDNA_ID_1819267_gDNA_ID_1620623_Annot_ID_162405 3000 nt of promoter + ATG
gagctcattcaatggttgagaaagctaaattcattcatctcacaataaacacgaaatatttcgatgtttacacatcttctaattaaactgttttatcagttaaaagtagtaatattggcttattgacaaaaaaaaaaagtagtaatattggctttagttacttttatctgaaacaaaatgtacaattgggccttagatgagtaataaacaatagaacttgggcccaaccctccaccgggatgtttaataactgtgtcttttagtgtggttattaattaaaaaattaaccccttttggtgtgagccaaagaaagaaaaatagattaaagtctttcatatacatcaattaaaaaatgttcgatcaattaaaacgagccatgatgaactaatcatatacatcatcatccatcgtgaaaagctagctgttagttaataattacttaataataagaaagaaaaagaaaatgattgttattacttattagtactgctatatactactccatatggaatagtaactgctattatctggcgttctagagttgacatttaaatgtcatagttttatttagatgtggaaaatctagtaagagtaatagagtaggaagtgattaggaagcaaccgaacaagaagcatattttatgaccggtgtggttagcccttgtgggagacaagattacctcaatttttggctaatcttgattttcctcctccattttattattacttattttctttctttttattattatttttatcagcatctttctctttaattatttttcttaaaattaaacattacaccaaagtgttgctgttaatttctcatatttaaatgtgaatagatatatactatatactaatatacatgtgtgtatcctatatgagaccataagccaatgacagtaggtattagctaatgacaagtgacttccaataacttattaagaagtagaatctttacagatttgatgtttacatggatcttctagaaaactgatttctttaatctctctaatgtcatctgcaactatttaacatacacacacacaaaataaaataaaattggaagagctaatgataatgatttgtattagaaagttgtcctttattttccaatgcattgcatcgaacatatgttgatgttcttttaaaatcgtaaaatctagttctgtattcttttattctaggtttatcaaggctttgtcacaagacaatgagaatacaacttttctctaattttcttcatatactaaataaattatcgtagatttgtagaaggttcttaggctagattcaaaaagtcatttaggatctctttctagatcttgcattttttttagtaaatcttatgctggtgatacttttattaaaccttatgattctaatttggaaaacaaaactaactgataacctattttacattaataaaaacgatgcataattgtaataatgttttatttttttatgttaataagctagccaaaacatattattgatccgaagtacgctattttctataagaaaaggagaggcacggaaatgaacacgctgtgtggttaatccaagaaatcatacaaaattaattcataaactataataaaatcattgggatcttattttgcacccaccaagcttgtaggctgaagatgcggatggaacccaacttcaagaaattcttgccttttgttttatggcttttttttgtcttgtcatagttatataaatgtattttgctaaatttaaacggacaatcaaataaataaataatatataatttgtagttaacaactaaattcaatgactaatatcatgtaacaatagacttgtgacagcagttttctttgttgacttcaaagtttaattcgagcgtacgatacatttggtcggtgataaatatcgtgctatgagtttaatttgttgacttgaaagttttataaacattgtgaaccattgtaacatgtgtttcttgattatacatattcctaaaattaatttcatatggtaagagtgtaaaattatccaagtaatggtgtaaattttaaaagtcttttttttttttttttttcatcaattttaaaagtctttctctgacgttaaaaatagtcttgtcttaggtttgaataatatcggcattagccattattggtcgttactatgggatacttaattttgctaaatctttcagaacctgtacgagataagcgaaaaagccatgaaccacggtcacgcgtgtctcgcacttcccaactttcaccatgcatgctctcactaaagcctgtctttttttttctttcttttacatattttaaaatcataataccataatttgcactaattcttatggtaaatccgttttatgagatactcaacttagttgtccattccttaagacacagattaaggaaagtattcaattctttttgaagttatggtaataactcaaattcttctttcctgccttgaatacttggtacaatatcacaaacatatctctaaattaattacatgatctgcagaatcatttacataaacactttcacatttttatccatttaaaaaaaaaaatattatgatcctctttccttttcaattaattatcactaaactaaaaaatattattcccacagtcaaaagaaaccaaactaatttaaaaaaggtggcgcgtgattatcacgctcaaatgaccgatcggttccactgaattttctcagagattctcctctgaaaatgttttttgtttttttcttatgtcaaaaagaaaatttaccagaaatgattaaaatttgaaaagagaattccataaatgagttaattcgccagtcttgaagatcattacagagttttcagaaaccatatgtagtcttagattctcttttgccaaagaagaaaattttactctgccatacaactttttgtctctttctctactaataataataatccgaactttgtttgttcttctacttcaattcataatctttgacggcgatgactatg

SEQ ID NO: 3079 - DNA, 3000 bp, Unknown
  misc_feature (1)..( 3000): cDNA_ID_1819344_gDNA_ID_1620623_Annot_ID_162404 3000 nt of promoter + ATG
agcaaggcagagttgaaatggctcaatcatacgatcaggtaaacaaacacattcctattttcgtggatatatagttacattaagaacccatattaacttatctttctccacacattttcagagtgttaatgagaagtcaggtgagtcattccagacatatttagatattcaaccgctgaatcgaatgccgagggagagctttaagcctctggaacctatcaatgaggaaataagcactaggctaagcgttgggacagatcatgatgtagagatggatgcagcggataacatcattgtgctggattgacatcaaaaatcattattacttctttcatgattgtgttgatcgttggctgattttctttactaagataccttttgctgatttttttttttttgtttgtcaaagttaccttttgctgaattttaattactaagttaccttttgctaaatttgtttgcatacagcgtagttgtcttgagttgcagagtatcatatttgtccatttatagtttcttaggtataaagcgtatatgaaccaaaatataaccaaatatattatggaaactaattgaaactgaagttatgatcatcttgggttttttcatcggataagtattagtttaaactagattgaatctactactcttgatcaaacaagcacacacaacttgaaataactccaaacaccatgagttcatagaaaatgatttcccactaatatctttgttaatgccaaactttatcattgcatgtcttttgcattaaaaatacttcatgggtgatgatcatcttcttttaattgaaccaaagaaacgtcttttgagctctctcaaaacccaagacacacatatgcatatatttatataaactgttgatttctctaatttagatatacatggaaagaacattccctaaccatatcaattaggttggatttgatcgtatttattgttctataggatatattagtaaaattaagaaacaaaagaaatagaaatgggaaatacaaaaagagaaaaagagaggagctgcagaaaacagggaaaatggtgggaaagaagagacaaaagagaaaggctttaaatccacgcttactccaacttccaaacatatacctacttctccactcttttccactttactcttttatacctatacccatcttatattatattacatgtacaaaaatattgttttcagttaaatctgcatttattctacagttcaacgcgattactgtagaataattttaagccaacgactgtttggaactaatttttcagtttgatacgagagcaataacaaaatttcaaagaaggtttttttggggttaaatgtcaaaccaaaactcgttttagacagtaaaaaatatatacgattaaactatagtctaatacatatacaaattttactttgcatatacaatttaattcttagtaaatccaaataagaatctaaatagatgataatgatcaaaatctgtatagagatgcacatagtaacttcgtgaattctaagtattagactaaattctcatatacagcatgcagatatgtcatatgcatgcatacacatttttacgcatttcagtccgtacgtatcgtgtatatacggtaacgatggttggatatacatgtgcatgtttcaaagttatgtacaccgaagggacaagctaggctgtgatgctcctaattcaagcttccttcttacgaatgtcaacttttatttaattttctttattgtggcctggccgaataatcaaagatataataaatatttagaggcaattattgattagtgtcctttaattctccttaaattgtttggtttttggtcggttggttccgagattttattttctgtgttaaaatgttactaaccaataacggttgaccctaattataagttctccaacaagatgtgaacttatttgctaattataaacgtgaacgctaaacataaacggaagatttatttggtttgagtttggcgtctgcatttacatgtcgtagtaatataaatttacattaaaaattaatgtttctatattaaagatgtgaattatttcgttttttcatgcacataaacgcatatgtattgtgttgaaactagacgaggctataatgaagacaactgttgtttctttttatctgcaacaatagtgtatatttgaccgttaatgtaataagttcatgataaggttgggaggatagcttccccgtgatggaggtcgtagggtttgtatgattgtgtacagtcttttcatttcacctagctaaccctattgacgcattgtgcaagtgtaagacagttcatacttcgtactactcttcaattatatatatttacaccacattatcaaccaaaatatatgtatttcaatccaactgtatactagacttttcgaaactaatataagattaatgttgaattatgttttcttcacaaaattctagcattagtacatttgaggtgaaaaaacacaaaattcatcctaatgaacacataaagaaaataaaattttaaaactcttcttcgtcaccgaatatttacaaataaaatgatatgtgtgtgtgtgaacctaatttaaagcctatgccaatgagcacatataggcttttgctctctttttttttttttttttttttaattatcacaatagcataaaatatgcaaaacggaagtacctttacaatcatttgtattcgaatttaaataaaaatgataaaacaccaccaatagtaagcaaaagataattagtgttgaaactaatcatccgtaagcatatagagcacttcgatgaaaattagagtattaaataaaattaaaataaaccctcaaaactatctgaagagacacatagagtggctccttggcatatgattaagctcccttaatttatcttctcgtatatatataggcattacacatcttacttattacattcacacacacccacattttacattcaactcttatacaatatgcccatgtta

SEQ ID NO: 3080 - DNA, 3000 bp, Unknown; identical to SEQ ID NO: 3074
  misc_feature (1)..( 3000): cDNA_ID_3092745_gDNA_ID_1620623_Annot_ID_162400 3000 nt of promoter + ATG

SEQ ID NO: 3081 - DNA, 3000 bp, Unknown; identical to SEQ ID NO: 3072
  misc_feature (1)..( 3000): cDNA_ID_3070694_gDNA_ID_1620623_Annot_ID_162396 3000 nt of promoter + ATG

SEQ ID NO: 3082 - DNA, 3000 bp, Unknown
  misc_feature (1)..( 3000): cDNA_ID_2160942_gDNA_ID_1620623_Annot_ID_162390 3000 nt of promoter + ATG
taaaaaagttgagccacataagcattaaggataaggtacttttaatattcctgtatttgagaccatatatcttttattgcgtggaacgaaatgttttctgaatcaagtattttggaagacgaaaagataacatgaagaatagtgaaataaaacaaattattctttagttgatgtttgtcgcagtcacaatgtcaaatgtattcaaccaactcgaagactttagatacggaggtaacagatcatataacgagttacatatgaccggcatataaggataagtcaaatttgtatatatgtgtacttatcttttaagcgaagacgcagacacacagcaattagttaccattgaaataattaagccactgggggaagcatgcatgcttgtcaaccttcatttactacttagtctacttagctttgggaccaatatacattacatctccataattacgttgcgactcttacgatacgtgttttgtgttcatattatataattgagcaattaatcacgtggaaacagctacggcacgtaaggaaaattgacatgcagaccccaccaagttacatactccgataaaaatggctaaaaacattaaaaccttctaaaccaaatcgggtccaatcaagatcttgactacgccatttttgttaatgtctcgagaaaattgaaaccacaagtagcaggtcaccttaccctctctttaagagaaaacaaacaaatgaacacacatgttttgatgatatgtctgtttatatactccaattttgttgacaataacttgttctgcataatccaaaagcgaataataagtatccatcctatccataaggtttagcaacaatctttaattagattattatactgaccgactgagtatactgtagcttgttgtgaacactatgttgatatgttcgattattttaatttgggatttttgtgagacacgagatattcatgggtatgaaaaatattcatagtgacatcaaaaggagaaactttacatgaagcttccattcagacaaaatgacgttcatataaaattaggacatttgcttttctaaaaagtaaaatctaatatacaattattagagtcatctcaactatttagaattagaagtatagttgatgttttgttttgttttgtcgagccgagttaatttcatctattatctgtggccatgcaatatgagtgtgattccccttataagtattgtgcatactttagttccacaattattgacttgtttgatatttctattatagtacagtagcagattagtccatgacattataaagaaactaatcgtgttttagaaaagccttttttgcatgcaaagtcaaatgttaggaaaatgcaaagtctgaccgactcgtgagcatctagaataacggaaacaaaagtcaaagtgtctctctctctctctctctcggctagcgggttccgttgggacggactacaaaagactgtaccggcgcgtcaattcacaccaactagtacgaagaagggaaacactgattacacgtgtcgagtgttcattcgttgatgtacaagtagcggaactaaagcaaacggagtagggaatgagtcaaagcaagtatggtggtgcaaactgctattgactgatgcagggaaatattgttttgttaagagattttttactattatctactactagtatataacaaaagattatgttttgggaaaattaatctagtgcctaagtttttgagcgaaaaccaaaaaccaggctatgactcagtttagccaatgtacttatttatgtagtgttggaatattatcatcatatgtgtacttacttacctttatcatatatagatgtatagaagcagatacatagggttaattaaagactacacgagacgagaattgagctgtacaatgctatagactatagactatatagtaattggagagatctctaatctacagagaaaataaagtactacatacttcattattacacacacattaaaacttaagacgtaaagaataaatggaagtgaataaagaaaggggataattaataaaaacagttgttaattagtaacattcaaacaacttagctggctaatttagaatatttgcaagctagattcccactcccttttctcttgttcccctacagttttttctcgcttccctttatatagaatataagtatatacataattgttcgagacaagttcgtcagaaggaaaataaatcatcatcattcctcatcccttcccgaagctgctctaaggaaagagatccactattactactactatacatatataactataaaaataaataaactttcattgagatttgagccaaacagagaagaagaagaagaagaagaagagaagatctccagcggatcagtccccgctttaaaagcattggcggcgtctgatttcatttctctctctctctctatctctctttaattccctcaaagacaaagcctttttctctatatatatatatatatctctctatctttcgccattttggtttttgcttctctctgtgtgtgagtgattatgatgatgggattatctttctaaagctttttgttttcctgaaaaattaaaaaagaaaacttttatggttcttcttctcttctgtgttggagttgagagaccaataaatgctgttagtaatggttagttgagatgagaggtaaaaagatcccgtagtccgaggagtgtttggtttcttgcaaaaggatagtgaggcaaaacatgggtttggtttctcttgtctcctttcattcatcccttttccattaatggtctctccctcttccaacaccaacctcttcttttattaactaacaaacattttctgcctttttctcctcttctcacttctctggttcttctgtgatttgatcggttcttctaaaaagagagagagtagaagcttcttaaagctgcttcagggtcaaacaaaagtgtcttccttttggtaaacaagacgaagaaatatg

SEQ ID NO: 3083 - DNA, 3000 bp, Unknown; identical to SEQ ID NO: 3070
  misc_feature (1)..( 3000): cDNA_ID_3092755_gDNA_ID_1620623_Annot_ID_162389 3000 nt of promoter + ATG

SEQ ID NO: 3084 - DNA, 3000 bp, Unknown
  misc_feature (1)..( 3000): cDNA_ID_3070698_gDNA_ID_1620623_Annot_ID_162387 3000 nt of promoter + ATG
aacaatatccaacttgaccaatatatctttattgttcgtcaactgtcatcgatctatatcactttacgtataggattaatgtggcgtaaaaagataaagaagtttggtccaaatttcaatatcaaacttctagtgatgagaaatttctatttggtctacatcggggaacagatcattccacttatgaatccccattactaattttccattcctattacagacgttttacgtagtagggaatctagtttattaatatacatatcacatagattaatcttgattgtttcgcaaattttaatggttttcggaaacaaaaagggggtacaaagtgagctttccgaaatagtgtagttcccagcatccaaatctctcaaaattccttccacaattagaacgattgttcgttcgttcgttttcacaatgtatctcgacctcttttagcaagagtttgctactaaactcgaaccaagtggaaacatgtgggttttgcaatctaaattgaatttgttttgtcaaaaaaggttcttatatttagtacactgtaaaaaatttcgtttctaataacataaatacctagtatagtgtaatggtgttcagagttagcatgcaaacttgtgttaggaaaggatatcaaaagtctcttgtttcaacaatttttattttatattcaaaaattattatgatttgatctttcaagttgattcaattcatgaagatcacataaagcttcttctctgaaatgaatgtcacatggaataattatgtattgaagagcaaaaaccgcatatagtaacctagcttaaaccgaatatacccgaagtcaagactttaatgagaatcagactaaatcctgaatttatttgaaaacaaatcatatgatttggtcttcggtccggtaaaaaaactcagataagtttgaaaacaagttttaatatttatactatatgattccgtcttaatcaaaattgtcaacttacatcaataaaatcaaaactcattttaactagattctaagaatctcatcgaacaatcgatctttgtaaatcttcatggaatagtggttagcatttgtatcattgagtttgaaagaaacggaataattaaagatgacactaaattcacaactttgaacaaacaaacaaaaaaaagtgacaagaaaaatagaggtcggtgtcggagccgcccaaggtggcaacttgttcacacctcataataaaagcttctcacaagttggaagtcgcggtcgagtccagtcaagattttgttgcccttttcccgtgtgggctcaccaccctctttgtcttcttctccccaaaaattttccacgttttttgtttcactctctcaatttatttatattttttttgtcggctcatatttaatttgtgttaattaacacttccttgattagaaagtttttttgtaccgacttaaatttatcatgcaatgtgattggtcgctttcccaaaacaatctctcaacgacaaaaaagtagtaattagtaattaaatacattatattttgttgttaaatagtactcattctatttcaaaatataaaatatttaagtaaatatcacacggttaatgaatttaaatatataactcaagtatagtactaaaaagaatactttaacaaacaaacagaaacctattgtacagtaaaatatcaatcagtgaattattaatcaaatagtaagggaaactaggatataatagaaaaagaattgccgacctacaaatcagagtcaatggtcaagcaagtcaagggaaagttcgtaattgttatggatctggagtctggacaaattaaaaaaaatttgttaaatagaagaggatataaagggaacacagatcctacatattgaaatttatgtatgacgtccaaatttttcttcagcatgggacactgccccgccgaaattattgatttttcggatctttcttctacttgcttcttttttgtttgcttttataagttttgcatagctaattcttaatttcttatcatttatttctagttggtagagacttataaattgaacgtttcaagtctttggacggtatttgagatttcttgtaatttcacttgtaattgtaccacctaacagtgactaaagcagaataaattacgattcgtatacaacaaagtattcaaatttctaaatgtggatatattattgattttattttgggaaacatgtttatgataatcacctatatctcctctatagtctactagaaacgatatttgtcaccttcatcgtacaagactataatgtataattctatccataatgaacgatctagtttttaacatgtactatagagatgaatgattacgacagtaaatttaacccatgcatacgaaaatacataccgatagatataacacaattcagaatgttttacacaatcccatatttttagccaatcagtgtgattttaatagacagctttctatgtcttgttgtgctttttcttcttctttttttcccaaagtctttaatgtcttctggactttatagaagacagctttttatatgttatcttcactttcgaacgactttccttcctaacatatcccaaaacctatctctttaatttattcctatcgtacttacagcttttattaaaaaaactttcttattttaatcactaaacaattaataaaacatttatttatgatttttcattttcgttaaagctcttttattaaaaacttaatcacaacaaatttattaatcttaaatttgaccttaggataaaatttatatattaatcttatatctgttatacattaaataaactttaatttctgcgcaacaaactaatttattatttatttcttgtctctgtctttgtagttttagtataaataaagccattttgctccgaggaacttctcattcagtcggaccaacttgtgaccgaagaaagcaaattgagactacgcaccaactagtcctttggtttgtatcttaagataaaggtttctttt

SEQ ID NO: 3085 - DNA, 830 bp, Unknown
  misc_feature (1)..( 830): cDNA_ID_2107050_gDNA_ID_1620623_Annot_ID_162384 3000 nt of promoter + ATG
ataaatcgtctgagtcggattatacttcgttttttcataactctttttcagatacaagaatcggttgtttaagaaaaaaagaaaaatcgctgtttaatgaatcattttaccaaagaacccatgtagactatctatatctatagtattataccatgtggcttggatcgggtccgaagtactataagcctaaggcggaaaatcttttggttgagagaattgagctaaaatatcaatccagtatataaaaaacatataccgtatctctattcattataagttggttaaaaccattcccaaactcatgataatcactctctcaccaaaaaacaaaaatcaaataaactgatatatatatatataagaaaaacttgaacatttcctcacattgttactctagattttaaaggtgatagtgatacaatggctgataaatgtgctaaaatttgaaattaatttgtccattatgccgacatccatttataagcttttaacatgatactagaatcaacaaataaatatttttattattttatttggaaactattaatgagtacacgatatttacatttacataaattggttgattggttacctgaattttggtagaaattgcccacagaatattcggataagtatttcggtttagccaaaagcagtgtcgtcttcttacacaaaaacaacaaaactccaatcgtcctccctcgtcctgaatccatccatcatccactctcctcttaaaaatcctatctttgtggtttgcaatctctcccacgacgcgcttcatcattcatggctatttgaatctctcttctctctctctatcaaatatg

SEQ ID NO: 3086 - DNA, 3000 bp, Unknown
  misc_feature (1)..( 3000): cDNA_ID_1819344_gDNA_ID_1620623_Annot_ID_47086 3000 nt of promoter + ATG
ccgttgacaacaagcaaggcagagttgaaatggctcaatcatacgatcaggtaaacaaacacattcctattttcgtggatatatagttacattaagaacccatattaacttatctttctccacacattttcagagtgttaatgagaagtcaggtgagtcattccagacatatttagatattcaaccgctgaatcgaatgccgagggagagctttaagcctctggaacctatcaatgaggaaataagcactaggctaagcgttgggacagatcatgatgtagagatggatgcagcggataacatcattgtgctggattgacatcaaaaatcattattacttctttcatgattgtgttgatcgttggctgattttctttactaagataccttttgctgatttttttttttttgtttgtcaaagttaccttttgctgaattttaattactaagttaccttttgctaaatttgtttgcatacagcgtagttgtcttgagttgcagagtatcatatttgtccatttatagtttcttaggtataaagcgtatatgaaccaaaatataaccaaatatattatggaaactaattgaaactgaagttatgatcatcttgggttttttcatcggataagtattagtttaaactagattgaatctactactcttgatcaaacaagcacacacaacttgaaataactccaaacaccatgagttcatagaaaatgatttcccactaatatctttgttaatgccaaactttatcattgcatgtcttttgcattaaaaatacttcatgggtgatgatcatcttcttttaattgaaccaaagaaacgtcttttgagctctctcaaaacccaagacacacatatgcatatatttatataaactgttgatttctctaatttagatatacatggaaagaacattccctaaccatatcaattaggttggatttgatcgtatttattgttctataggatatattagtaaaattaagaaacaaaagaaatagaaatgggaaatacaaaaagagaaaaagagaggagctgcagaaaacagggaaaatggtgggaaagaagagacaaaagagaaaggctttaaatccacgcttactccaacttccaaacatatacctacttctccactcttttccactttactcttttatacctatacccatcttatattatattacatgtacaaaaatattgttttcagttaaatctgcatttattctacagttcaacgcgattactgtagaataattttaagccaacgactgtttggaactaatttttcagtttgatacgagagcaataacaaaatttcaaagaaggtttttttggggttaaatgtcaaaccaaaactcgttttagacagtaaaaaatatatacgattaaactatagtctaatacatatacaaattttactttgcatatacaatttaattcttagtaaatccaaataagaatctaaatagatgataatgatcaaaatctgtatagagatgcacatagtaacttcgtgaattctaagtattagactaaattctcatatacagcatgcagatatgtcatatgcatgcatacacatttttacgcatttcagtccgtacgtatcgtgtatatacggtaacgatggttggatatacatgtgcatgtttcaaagttatgtacaccgaagggacaagctaggctgtgatgctcctaattcaagcttccttcttacgaatgtcaacttttatttaattttctttattgtggcctggccgaataatcaaagatataataaatatttagaggcaattattgattagtgtcctttaattctccttaaattgtttggtttttggtcggttggttccgagattttattttctgtgttaaaatgttactaaccaataacggttgaccctaattataagttctccaacaagatgtgaacttatttgctaattataaacgtgaacgctaaacataaacggaagatttatttggtttgagtttggcgtctgcatttacatgtcgtagtaatataaatttacattaaaaattaatgtttctatattaaagatgtgaattatttcgttttttcatgcacataaacgcatatgtattgtgttgaaactagacgaggctataatgaagacaactgttgtttctttttatctgcaacaatagtgtatatttgaccgttaatgtaataagttcatgataaggttgggaggatagcttccccgtgatggaggtcgtagggtttgtatgattgtgtacagtcttttcatttcacctagctaaccctattgacgcattgtgcaagtgtaagacagttcatacttcgtactactcttcaattatatatatttacaccacattatcaaccaaaatatatgtatttcaatccaactgtatactagacttttcgaaactaatataagattaatgttgaattatgttttcttcacaaaattctagcattagtacatttgaggtgaaaaaacacaaaattcatcctaatgaacacataaagaaaataaaattttaaaactcttcttcgtcaccgaatatttacaaataaaatgatatgtgtgtgtgtgaacctaatttaaagcctatgccaatgagcacatataggcttttgctctctttttttttttttttttttttaattatcacaatagcataaaatatgcaaaacggaagtacctttacaatcatttgtattcgaatttaaataaaaatgataaaacaccaccaatagtaagcaaaagataattagtgttgaaactaatcatccgtaagcatatagagcacttcgatgaaaattagagtattaaataaaattaaaataaaccctcaaaactatctgaagagacacatagagtggctccttggcatatgattaagctcccttaatttatcttctcgtatatatataggcattacacatcttacttattacattcacacacacccacattttacattcaactcttatacaat

SEQ ID NO: 3087 - DNA, 3000 bp, Unknown
  misc_feature (1)..( 3000): cDNA_ID_1819410_gDNA_ID_1620624_Annot_ID_47093 3000 nt of promoter + ATG
gcgatgtctttggctacacggagacctgcaacgccaccagaacagccaacaaagtagagcagaacacggtgtgtgtcaggactgagtccaagccccttggccaggtacaagtccccaccaggaagacgagcttcgcttgaggagacatagacaacgtgagttatgtcggaaatagaacgtccccagttcttgatgcaggctctggaggcttctactgccatctcggtcactgcatcgttgcagatgtctagacgctgcgtcactgtggatcctccttcaatggcaagttctgggtacttcttgagaatctcctctgacatcacaacataccttgtcttcaccgttgttgtcttgcctgtatatagtaaacgaacagttcaaacaaacctcagttgctgttgcaggagcttacagaatgagataaaaagttgaaaacagaggttaaaatgaagagattacagagacgagtaagtttctgtttgagttcagggtcatcacacttggtggttttgaagtagccatcgactaagtactcttgcattactagctggtgaggaaaggcttttcccagagcaagaattgtggcttttcccgggtttgatttcttctctgaacccaacactgcagcatcgatgcttcccatttgtatctgtttgttgaagactcaaatcttgggtctgtaaataaggttcaaagtgaaggcatatatatacactgcagcttttgcagttttgtgacctgcatattgtgcggtatttctgtctagttgatatttggtgaagagtaggtgtgagatttagaagcttcatgtttattgcattggctctttctaaaatccaactccagttctttgagatttttttcttgatacatagtctttaggcttagttaaaagccaacacaaaggtgtgttatagttatagttgttttgtacatcttcacacttaaaaagaatgaaagagaaactaactaaattttttcttctgttaacatcaatcattcgaaattgatattaaagaattatgactctgttgttgggtatcaaatttgctgagtttctacatgtatgatggatcatcaatagaaagacagcaaaaagaaatagaggaacaaatgagaaaaggtgaagagttgaaatttctgctcaaacctattccctacctacgccctttgcttgaatcttcatatgctttcttcgcccaatgcacatactgaacagatgaaacttaatacgtatgacttgttagaggtctgagagacatttcccactgatgaagtcaatcactttggtaagtgactcatcaagtttggcagtgactgcagctaagttctccaaaaattcttcagaagttggtctattgccatccacaatatcagtcacaccttttattagaatcgtaggcactttaaagatatcagccacataggccactgctgctccctgaaatgccaagaatccgtaaataagtcgtagtaactgataaagacacaaagacaaacacatagtatggagccaggtacatcaacacaggaaacttatggattgttgacctccatatctttaactgtagcatcatttgctgtgatggattcttcgtcatgtggagacatatccatagaatcgccagtggataatcttcccacctgggaacattgcaactaaatcataaatctaccacttatgcaaaccatatcaagaaataaccaaaatcttgcatgaggatcaaatggtgaactcagagcaactaataaagtatacacctttaggttcagctcctttataaggttgggtgtggggaaggtgttccgcataccaacaccatatatatcaaggacctgcagaaagtataaaaatgtttaggaaagggcaaaaatatatggaattagaatgcaagtataacactcaagaacatcaggtttactttgcaactcatactgatacatgaacaatacaaaggagcacttacaggaacaggtattcttctgtcatggaaagcaacagtagagacaacataaacatcgctaatacatgctcctttggcctgaaaagaccatttaaaaacaaggaagggtgttcattatttctgacacataagaggcatgaaacgagaactatgtagagaaatttgtaatgttgataccttaaagccaccagcggttcccgcattaatgattaagtctggttgaattgctagaatggaagcataagtcacgagtgatgcaggaactgtgccaacactctcaacccctgaaaaacgaattaacatcaagaacttcacaaaacatcttgaaacactatttcacttacaatcacttaaccacatggatacacataccaagagttgaatcttttccaggacacactatattgatgttcaagtctttatacattcccttaaacataatccaagtcacctcttttggaaacctacaaaaaagctatcacatttgatttcgaatcaaaataaaaaattgaaagaggtcaaagaactcacggagtattaacttcttcaacgaggcgtaatctgttgatcagaggctgagcttccttttgcatagcttttaatacacaaacccattagaagaagaaaaaaaaatcacaattcgagaaatagtaaagacaaaatagtaccaacgatgaagacgatggtagaaatcggccgtttctctacctgacccataacaccttccatagcagcgtctgagaatccgtcgccggcgattcgtcaagatcaaatttctagatttcccccggaaaacaaaaacccggatccgacccgaatcctatccactactcggacccaggcccaataaaattttagcataattaataaaatatgttttttttaatataaacaacgttgacgacttgacggccgtttatgccacgtaagcaaggggtccacaatgcgaagaagagagtcgttcgttatttcatatcctcacttccttctctgaagctttatcctctaatcgttttctctctaagcctctccaatg

SEQ ID NO: 3088 - DNA, 3000 bp, Unknown
  misc_feature (1)..( 3000): cDNA_ID_1819403_gDNA_ID_1620624_Annot_ID_47096 3000 nt of promoter + ATG
ccattattactcataaagatcaaagtctctcactttctcactcagatctaagaaagctgaccacaatcagtgatggtaacgactttggaagtctttccagaatcagatccaactttctcaatcgccttcacgacgtccaagcctttaacaacttgtccaaacacaacgtgcttaccatctaaccacgacgtcttatcggtacagatgaagaactgagatccgttagtgttaggaccagagttagccattgagagaatcccagctcctgtatgcttcttgataaagttctcgtccttgaacttagcaccgtagatcgattcaccaccggttccgttcttggcggtgaaatcacctccttgacacatgaatccgggaatcacacggtggaagatcgatcctttgaagtgaagtggcttacctagctttcccattcctttctcgccggtacagagagcacggaaattctccgccgtgtttggggttgtatcagcgaaaagctccatctcgatccgtccgatgggagtaccgctgagactcatgtcgaagaaaactctagggttcgacatcttttgggagatttggaagagagaaatcgatgaagaagattgtgaaagtgatgatgacaaattagggtttttggagaggttcttatagagaggatttaatttctaaaacggtgaatctgaaaatggaaattatgttggtgaccgttgatttatgacacgtgtagagctgtgatgatatggaaattaaccgtggttgaatcggatctgactagggttgaagtcgcgtggatcctaggctcctttccataattgatttgattctttttagatggaccgacagaattacggcgttggagtttaggtgggccgactccaaaagcctaaagcccaatatcttattttaacattacaattttttggtgtatgattgagcatttttttgccacaacactcgttatccgattctattgacactcccatttaaatcatttaggtagtgattatctttctgcacgtgaacgcttgtatgatgggatatttactggattcacgatcttattttcttcgaacaatgatcttacttatgacttgcatagttacattaacgtcgatttacttgaaaaacaaataaaaagtagaataatgagggaggttttgagctgaatattcacttttgtttttgcttatttcgcttcttttatacaattcactctttttctttctttttttgcttattgaccttgatccacttcctttacatcggttggtagactatgaccactcatatccttcaaaataagaatgttggagacaaagataagtaatgattaaagccttaaacaaaaagaaagccagaaaatgtaagtaatgatttgcgttgaatgagactaattatgccttgggtgggattagtagattttactttttactagattaggccactttgtttagtttggcaaagtgatttgattattttcatgtcacatcaatatgtgaatccaaagtccaaactgaaaaaaaaaaaactaagtacgaagtcatcatcaattcttaaacatatggtttttggatcagcgactcctaacaatggtctatagccggaatctttctttcaacaattttcatcatattttatacactattagtatcacactactgtctagattcgaataatcttaagttcttaacaaaagaagtatttatgtccctaaattccaaaagtaaaatcaaatcaaagcatcgcaaaagaaacttttggagttgtccaatagacacaatcattttagtaatcttaaagctagtaatattctttctccaacgttagcaaactatacgaccttttcttagtgtcattatcaacaacaatgactattactaattttgaaggacaaacttgccaaaactaaaattcaaagttttaaaaaacaaaaattcagaaagaaacaaccaatatgcagcaggctgcgcagggcacgagatccactgccaccgcacacgtggacaaccaaacattttactcactgcaaagatactctctcacgtcactaaaaattatttaacttgtaattatagtttagtaggtaaatcgcaaaaaaaacattttaataaatcaaattacaaataaaatgcatacaaaaagcaaacaacctccgtgcaaatcatatcatatgcatggcttaaagggtttaggcttcaccttcccgatcgctagagttactgtgctagtctctatcttcccatcacagtcacatctcgtccgtacacgtggacccacatcctctttaagctcactagctgattgatatcgtcttatacctttggccgtttcgtctctctctctctcgtttaattacttgtacctatcaactcagtgatactctcgcttctgagagagaagagagaaagcgaagctcgtttcgtatcgtcttctttctcttcatccgacgctggattcataaggttcgtgatctatctacgtcttcctctggttatgaacgttacggttgatgaagttatttttcctgctttgctttcaccggatctctccgcgtgctttagcttgacgagagttttgtttccgatcgtttctgtgcgtgatatcgttaaaaccgagtcgaaatctctccggtttgttttcttgttctttgtgattacatggaatccgacgtttcgatgttcaatttctgttgttcgtgaagtttctctgttgtttgtgttctgatttgatccggtttacattaatcttgtatagaacagtcttgaaggaaggtttgattacatttttcaactgaggatgcccaatccagtttgtctataacctgtttacacgtttgatcatgacattgttttggtgttgttttccttcaatttcttagtgaattatagaagacctctgttctgtattgcgagctaaatggatctgattgatttgtggaaatgcagggcattgataattggacttgttggttaagatttgaatcaacctggagctatg

SEQ ID NO: 3089 - DNA, 3000 bp, Unknown
  misc_feature (1)..( 3000): cDNA_ID_1819400_gDNA_ID_1620624_Annot_ID_47098 3000 nt of promoter + ATG
aaccttatgaatccagcgtcggatgaagagaaagaagacgatacgaaacgagcttcgctttctctcttctctctcagaagcgagagtatcactgagttgataggtacaagtaattaaacgagagagagagagacgaaacggccaaaggtataagacgatatcaatcagctagtgagcttaaagaggatgtgggtccacgtgtacggacgagatgtgactgtgatgggaagatagagactagcacagtaactctagcgatcgggaaggtgaagcctaaaccctttaagccatgcatatgatatgatttgcacggaggttgtttgctttttgtatgcattttatttgtaatttgatttattaaaatgttttttttgcgatttacctactaaactataattacaagttaaataatttttagtgacgtgagagagtatctttgcagtgagtaaaatgtttggttgtccacgtgtgcggtggcagtggatctcgtgccctgcgcagcctgctgcatattggttgtttctttctgaatttttgttttttaaaactttgaattttagttttggcaagtttgtccttcaaaattagtaatagtcattgttgttgataatgacactaagaaaaggtcgtatagtttgctaacgttggagaaagaatattactagctttaagattactaaaatgattgtgtctattggacaactccaaaagtttcttttgcgatgctttgatttgattttacttttggaatttagggacataaatacttcttttgttaagaacttaagattattcgaatctagacagtagtgtgatactaatagtgtataaaatatgatgaaaattgttgaaagaaagattccggctatagaccattgttaggagtcgctgatccaaaaaccatatgtttaagaattgatgatgacttcgtacttagttttttttttttcagtttggactttggattcacatattgatgtgacatgaaaataatcaaatcactttgccaaactaaacaaagtggcctaatctagtaaaaagtaaaatctactaatcccacccaaggcataattagtctcattcaacgcaaatcattacttacattttctggctttctttttgtttaaggctttaatcattacttatctttgtctccaacattcttattttgaaggatatgagtggtcatagtctaccaaccgatgtaaaggaagtggatcaaggtcaataagcaaaaaaagaaagaaaaagagtgaattgtataaaagaagcgaaataagcaaaaacaaaagtgaatattcagctcaaaacctccctcattattctactttttatttgtttttcaagtaaatcgacgttaatgtaactatgcaagtcataagtaagatcattgttcgaagaaaataagatcgtgaatccagtaaatatcccatcatacaagcgttcacgtgcagaaagataatcactacctaaatgatttaaatgggagtgtcaatagaatcggataacgagtgttgtggcaaaaaaatgctcaatcatacaccaaaaaattgtaatgttaaaataagatattgggctttaggcttttggagtcggcccacctaaactccaacgccgtaattctgtcggtccatctaaaaagaatcaaatcaattatggaaaggagcctaggatccacgcgacttcaaccctagtcagatccgattcaaccacggttaatttccatatcatcacagctctacacgtgtcataaatcaacggtcaccaacataatttccattttcagattcaccgttttagaaattaaatcctctctataagaacctctccaaaaaccctaatttgtcatcatcactttcacaatcttcttcatcgatttctctcttccaaatctcccaaaagatgtcgaaccctagagttttcttcgacatgagtctcagcggtactcccatcggacggatcgagatggagcttttcgctgatacaaccccaaacacggcggagaatttccgtgctctctgtaccggcgagaaaggaatgggaaagctaggtaagccacttcacttcaaaggatcgatcttccaccgtgtgattcccggattcatgtgtcaaggaggtgatttcaccgccaagaacggaaccggtggtgaatcgatctacggtgctaagttcaaggacgagaactttatcaagaagcatacaggagctgggattctctcaatggctaactctggtcctaacactaacggatctcagttcttcatctgtaccgataagacgtcgtggttagatggtaagcacgttgtgtttggacaagttgttaaaggcttggacgtcgtgaaggcgattgagaaagttggatctgattctggaaagacttccaaagtcgttaccatcactgattgtggtcagctttcttagatctgagtgagaaagtgagagactttgatctttatgagtaataatggtgtcttttgctttcggttgttcttcctcttaccttaatggattattctgtttagggtttgagttttcgtttcagagtttgtaacaaaacccttttgtgttttctggggtttgaaataattatgagcttacccaattgcttctttgtgtttttgcttctatgaacaagtagtaactgattcgtcttctgattcttcaactgaatcgtgaatcttgtaagactgactagaaaaaagaagactttgttacacgcaaatctgtttaacaggaaaaaaaatacaatctttttgaggagatgattgataaaccttagcacaactctcaatcttaaattcaatcgtttcgtctcacaaaagctacataaatgaacgtcaaattttcatacttgtatgagttaaaaaatgtaatgcaagtaaagtacactcaaatatgtaacacagtttggttgattttcgttaacgatgttatcaaatctcgtttagtaaagcaatcgagttattggcgttgaccattttcctttctctttctctagcc

SEQ ID NO: 3090 - DNA, 3000 bp, Unknown
  misc_feature (1)..( 3000): cDNA_ID_1819396_gDNA_ID_1620624_Annot_ID_47099 3000 nt of promoter + ATG
aatttttaggcagtggccattaatgagcggccaatcaaaaaatgactgaaaacagttgaaagtagaagaaagagtgggaatagattgttagacaaactaatcattccttttaaatgtgctctgctatcttacaggttggatttacgaacgaagggaaaatattggcgttggaccttgaaatctacaacaatggtggaaactctatggatctctctctttctaatcttgaacgtgccatgtttcactcggataacgtttatgagatcccacatgtgaggatcgttgggaacgtttgctttactaattttcccagcaacaccgctttccgagggtttggagggccccaaggtatgcttataactgaaaattggattcagagaattgcagctgagctggataaaatccctgaagaaatcaaagtgagttgaatattttctaaagatactcatctcctgaaagtttgtaggaatctgtcctccttttgtaagtttagtttaatgtttcctggtgatatttactttaggagatgaactttcaagtggaaggatcgatcacacattactttcagtcacttcagcactgcacattgcaccaactctggaaagaactgaaagtatccagcaacttcctaaagactcgtagagaagcggacgagtttaatagtcataatcggtggaaaaagcgtggtgtagctatggttcccacaaaatttggcatatcctttaccacaaagttcatgaatcaggttatctttgtttgatgtgaatccttttctttcaaatttagttatctgtcgaggaactgaaaagattaagctaaagcttccttggaaatctcaccattgcactaccgttcaaagctagaatctgaattttgagatacttaatccaatatataattaaacggctgtcacaggccggtgctcttgttcacgtttacaccgatgggactgttttggtgacacatggaggtgttgagatgggccaagggttgcatacaaaggttgctcaagttgctgcaacggcctttaacattctccttagttcggtttttgtgtcagaaacaagcaccgacaaggtacatttaactcggttacaagcagtggacttttggccaagacgtagtcagacaaaactgttgttgttctctcttatcatttctgtggtctcttaataggttccaaatgcctcacagtttttgctctcttgtcgttttgattgccttgtaacaggttcctaatgcgtcacctactgctgcttctgcgagttctgatatgtatggtgctgcagttttagacgcttgtgagcagattatagcaagaatggagcctgttgcatctaaacacaatttcaacacattctctgaggtattctttctttcttctagcaatttgatataaactcagaagattttgatgaacaaaactctctttttctctgagtgtatgtagctagcaagtgcctgctactttcaacgtatagacctatcagctcacggttttcacattgttccagaacttgaatttgattgggtatctggaaaagggaacgcatatagatattacacatatggagctgcctttgctgaagttgagatagatacattgactggtgattttcacacaagaaaagcagacataatgttggatctcggatattctcttaacccaaccattgatattggacaagtgcgcaatcttctctcaacatcctacgcttttagctgttcgttggccttttgcaatgtttaaaatccaagaaaatcatagagaaaagtgttatttctgaaattcaccatttgcagatagaaggagcgtttgtacaaggactaggttgggtagctctagaagaactcaagtggggagatgcagctcataaatggattaaaccaggaagtttactcacttgcggacccggaagctacaaaataccttccatcaacgacatgccgttccaactgaatgtttctcttctcaaggtatgcaactataggaacaagctgtttaaattggtagcaacacatttgaaactgaacatgagattatactcagggtaatccaaatgcaaaggcaatacattcatctaaagcagtgggtgagccaccgttctttcttgcagcatcagccttctttgcaataaaggaagcaatcaaagcggctagaagcgaggtaggtctcaccaactggttccctctggagactccagccactccagagcgtatcaggatggcttgtttcgacgagttttcagctccttttgcaaattcagatttctgcccaaagcttagtgtttgagctttaaactttaatagaggggagaaagatggatcaatccattttgtcaaagtcatatatgtaagttacttccagtctccaaatacatgatgtaacatgatacatgtttcttcaaagcagcaactttgttgactaaatgcgcgcgccatcgagataaaatatcagattttttttttctgaacaacctctaacttcaagtgagcaaagaatgtgaagcagttatgctgagcaatgcaagacgcttatcatcatcatatatcaaaaccaaaaataaaacaaacaatatcatcaaaatttcttttaaagtaaatcttaagacaagacaataacacactagtcataactaatcagactacaatttataaacgaaacataatcagcaaaattcagttaaacaaatatataagtggcattgtaaaaacatcatataggcttcaattgttttactttgttcaaacttaaatttcgttctttctattttgggttctttacaaaaaaaaaaaaaaaaaaaaaaaaattgactgcacaagtgatgatgatgaagatgcgtattcattcggtggatgctatcggaaaggaacacgaattttattattaaaaaaggaaaatgttattccttttttgcttctcttgacttggcgtaatcaacttcgccatcttcgtttttgtttcgatcccaatcgagttttctctcaatttgagaaatg

SEQ ID NO: 3091 - DNA, 3000 bp, Unknown
  misc_feature (1)..( 3000): cDNA_ID_1819392_gDNA_ID_1620624_Annot_ID_47100 3000 nt of promoter + ATG
ttatctcattcctcaaatcctgagctcgagactctcgaaccgcaatctttgtaacactctttgccacatcctgcaaacaaattgcaacttttaatactgttcacttaatgaaagaagtaatcatcttactacagagattactcacctcagctctatatctaagagactcgacagcattttcggtcaacaaaggaaagggtgtgataatatcaatatccttgttcttgtcgcttgctaagaaggactttatatcttcaaacccttccatctcatcaggagaaatctgtgccaaataaagcagagcattagacttgcaaaatttaaagagatcatgccaaacaacagtattattagacgagaaactcacaagagaaacggaagatccgctgctatatgctctccctgtacgcccaattcgatggatatatccagtaacactttgaggcatatcaaagtttataacctgtgcataaaaaaggtttaagggaaggttaagagtatagagcaaagaaaagaaggattcttacaatatcccaagcagcaaagagtacaaaaacaaagaaaagaaaacccccttagcaaaagtcaagtagcataccgtgtgaacttttttgaaatcaattcccctaactacaccgaactcagcatctagctttggtttgctacgcttattatttttcttgttctccttgttagcctcacctttagcctcttccttttgttttttagtctggctattatcatccgttgcaatcaagtaatcgaaaagtcctgcattgaattgctgtatacaaaaaaatatacactgattaattatgaaacgcagctgcttccggaaaaactaaatctaggtgcatgacttggtgatgtacctcaaggatatgaagtcgagaattctgaggcaattccccgtttaaaattgcagacttgattccaaactggaagaaacaaaacaaaagactaattcaatattattattacaggtacagtttttagaatcggaatgctcgtataggtgcccacaagttaccttttccaagaataatttcaacctgaatcccatgtcaattgtattgatgaaaatcagaattttcttctgaacaacctctagcttcaagagagcaagaatgtgaagcagtttatcctgagcactgcaagagatctaagacaagataatacacttataatcattaatcagacccagaaatgtgaacttataaaaatatctaagcgaccgaatcatacccaaaactgctgaacattacttgggacggcctcttccttgtcattatcttctgtcaaggtcaaaacgattgggttgtgcagaatcaatttcttcaatttttcgacatcagagctaaaaatttgcaaaaatattattcagttaaccatgcaagacaaacttcggagaaaaatatgagtctaaacagaatcattattatcgatatatgtctaaccttgtggtagccgacataagaaggcattggcaacgccttgggattattgatgttaccgaccttagattatcttcatatccatatgacaacaaaagatctgcctgataacaaaaatattatcaacatcaactctcaaagagaggaggaataaaggaaaaacatgatagatataaccactaagaaatgcttaaactacatgttcttccaagaaaatcaaatcatgagacttccacttaaaagagtgactactaaaacaacctctaacaaagccactattataattgaagcacatatatcatacctcatcaagaaccagaattgaaagtgattcactgacagcagtgggctctaaaactccggcagcaaaacatttcggaatacaagcaggtgtggagacaagaatctcaggcagtccagccaatgcattacgctgcaaatgaaacatcaaaacaaaattagaaaaaaacaatggaatgctttcatgatgagaaatgcaatactaaccatatcagatgcagacatgctactagtcaactgcactgcttttagctgaactctacacagctcaataagcgatgaaacctctgtgtaaacctgtatttttccaaatcaaacaagatttcccatcaattactgaaataaatgaaagtaggagagatatgaaacaatggtccaaaacaaacctgctgacatagttctcgagatggaacaagaataaatgcagaaggagcaagcttcttcttgctcacagaatctgctgaaaatagcttctggagcaatggcaaaaggtaagccaaagtcttacctgaaccagtctttgccctagcaaccacatcttttccttcctatataagaacaacagagacaataaatcatcagtcccaagattatataagtagccacgaaactcaaaaaaaaggtagagactttctattatcattaccagaatgtaaggaatggctgattgctgaataagggttggtttctctataccctttttagttagggcacgaattagacgagaatcaagccctagctcttcgaaacttttaggtgcctcttcttctttttgctcttcttcttgttctctgtcgtttctctgttcctcaacttcctctgctttctcaacttcgtccaccacttccgagttcacatcctccacaggttttaacttcgtcttacccatggaatatgaaatttccgagtttgtctggtcgaataggtttgaaaagcggcgcaggaagaagatgaagaagtgaagggaaaatagtcgtaaaacctcctccgccgcgtttcctctgttagactgttactgagttttttcaatgtcccagacctgattgatgactccaatattgggcttattttgggctacattcttctttatgggcttaataattgggcttttctattttttgtcgaaaaatgaaaacaaaaaaaaaacattttaaaaagagaagattttgcaattattggatttttgccattattggatatttgccattattggataacagttattcgtctgggttcagtgaagatg

SEQ ID NO: 3092 - DNA, 3000 bp, Unknown
  misc_feature (1)..( 3000): cDNA_ID_1819388_gDNA_ID_1620624_Annot_ID_47101 3000 nt of promoter + ATG
gtttttgcattttcatgtgtatccgcgacaagcacaccaatgacctgaaatacaagattagcttagaaataagggaacgaaagcagtacatgaaaactttttaaacttatttgacgtaacaaaatcaatacatgctcctttacttttctggtatcacttcttctaagatacagataaactaaaagttccccattgaggtttattttcttacttgtcccacacacgtgaccacgtctgtagcaaataattcttcgtcggcaacaattggtccaatcatattattcccgggaacatctttggcaagaaacagaccaacaaaaccagatgaagatttggctgccgaatcatcaactgaaaggatgcgggcatgtggaactttacttagcactaaagcagcatgcaaggtacaaggcggcaatggggtatcatcagtatattctgcttcccctgtgacctagatgaatatacaagagtgttgagatacactctatggaccttcggcgagccaacagatggaccaaaatacctgcattcttgccgaaagatggacctctggcaagccaacagatgtaccctgttttactgtctcatagtcttgttttccaattctagagaaccgaggaacaagttgcacagctgacatatgcgagggtggaaaggtctctatagtgggatttacattatttacatgatgagtaacccataagaaaaatttaaagaagaagcttagggttagagatttgcgaaactccaccattcccccaggagcaccttccttaatcaagacatcactctgtatgaccttaagtgcgtcttgcagaagacatttattccaattcttaccaattagaagttcctcagtgtttcttgcacgcaacgaaagaggagccacaccaccataaacaatagatgcatcagaaacaaacaattgttgccctttctcttcaagaaacacacgcattccaccattgacaatagctatatcatcatccctgcgatgggcctgcttaaattctttcacatactctaaaggccttgtccatggaaggaataccgacaacaagatctcgttgcttcccatatccactttacgatagccaaggaagaaatcttttgcaggtatagatctaacatctccattgcagttgattatccgaaactctgctcttgaagccatccaaagaggatttaaatcagatattggactagctgtacagatgtttccaccaatgcaagcaacatttcttatttgtgtcccagcaaaccacttcagctgttcgataaaagccttgcatgctgatgtttcatgtgcaggacgctcctttactaccttcctgaataacctcaggagttcagaaagtctcaaagctgaaccaacctctatcccattgtcattgacattcaatgcgttgagttctgggacttgagcagcagagattagcaccggatactgtaacctctttagtctcatttcgattcccacctccgtgttaccaaccagtagttttgcatcaggaaaatttgctttgagttcaagcaagttctgaagacttacgggtctataccaggtaatcccctcatttccccctaactttaagggagctaacttcctcagcagaagttcagggggaaaaataagctccttatctgtatacttagctccatctatatcactataagagattgactgaaatctatcttcattacaagtagctgcttcacttgttgtttttgatccacaagaacaaggtttgccagtagatggacaaatatttgaaccgtcctgaaggctaagtgaagataaaccactgtatagagcatcatcagattttgcaaaaacccgaaacgcatcaatgatgggtctataaccagtacaacgacacaaatttcctgcaaggcattcttcaatctcctcctcagaaggtgagtttttacttgacctcaacaaggcatacatcgacatgacaaaaccgggagtacaaaacccacattgagaaccatgcgaagatgccaatgactcctgagagaaatagggagaattaggatcgcagaaatgagaaaaaaaaaatctggaagaagtaaaaccccacctgaagagggtgcaagccaagtttccgatgaccaactccttcaatggatattacatgcatcccttctacagagtagagaggtgctaggcaagcgttgacagcataatgcctgcaataaaagtttccggtatgaacagtataagaaggcctaaacttaagcaaagcagatgcaacctatgagagaaaaagatacgcacacacatgtctttgactctcggtcataactagacaccatcacggtgcaagacccacaaccaccttcgccgcatccgagctttgtcccggtcaatcctaaatctaaaggaaacaaaaaacgttttcaagaatcccaccacacaacaacctaaccctctaaattttgctgcattgtacaatttgtggcttctctactctatctaaacttagattagatataagcatttgaagaaatcaataatatagagttaaaagcacctctgagatattcgagaagcgtcatgtgagctaatccatcaggcaaaactctacgaacaccattaacgtacattattgcctccatgaactcgttctgctccatcttcactgaacccagacgaataactgttatccaataatggcaaatatccaataatggcaaaaatccaataattgcaaaatcttctctttttaaaatgttttttttttgttttcatttttcgacaaaaaatagaaaagcccaattattaagcccataaagaagaatgtagcccaaaataagcccaatattggagtcatcaatcaggtctgggacattgaaaaaactcagtaacagtctaacagaggaaacgcggcggaggaggttttacgactattttcccttcacttcttcatcttcttcctgcgccgcttttcaaacctattcgaccagacaaactcggaaatttcatattcc

SEQ ID NO: 3093 - DNA, 3000 bp, Unknown
  misc_feature (1)..( 3000): cDNA_ID_3073035_gDNA_ID_1620624_Annot_ID_162459 3000 nt of promoter + ATG
cttgtcttctcatctcctacactagcaacactttccccacggttagctttaaagttctcttcttttactttgatttcgtgaaattttagcttggtgaagttggttttgttgttgaagcttatgagttggatttagtcacaagtatttgttaggttttcttaaagtcttcttctttctgctaccttagtgaatgtactgatgtgatctttaggatttgagagactcagagattcatgtaccgtagcaatgttgttgatctgtttaatgatcttagaaagagtgttaggtaactttctgtaaggagattttgtagctgatgttttagtggaattttctatgtgacaggattatgtgccaactgtgttcgataatttcagtgccaatgtgattgttgatggcaacactatcaacttgggattgtgggatactgcaggcaagttgttaccttggatttttttgtcttttgaatttcctcctcttccagagagtcatttgtgtttttgacttggtgaaacagggcaagaggactacaatagactaagacctttgagctatcgcggtgcagatgtcttcttacttgcattctcacttgtcagcaaagctagctatgaaaatgtttctaaaaaggtttgatctgtggtcttctcctgaaacttctttcctgttttattcagtttacattcagtgattctgatagaatacatttggtatcttgcttttgattcttagtgggttcctgaactgagacattatgctcctggtgttcccatcatcctcgttggaacaaagcttggttggttttttcttagctcaactcttaatcgcctgattatcgggggttttctgttttggggaactcttctgatattttgatgactgagtctcgtacagatcttcgagatgataagcaattctttgccgagcaccctggtgctgtgcctatctctaccgctcaggtacctttctcattatctttctaaactgaatcctaggtgttaatattctgcatgtttcatattttgatggtatcaaaacagggtgaagaactaaagaagctgattggggcgcctgcttatatcgaatgcagtgcaaaaactcaacaggtattaacctgagagtcaatatctttatctaatctttacctgtctaaaaccgccaattgaatctgctgatgattcctatatctgttatctgttcaacagaatgtgaaagcagtgtttgatgcggctatcaaggtcgttctccagccaccaaaaaacaagaagaagaagaagagaaaatctcagaaaggttgttctatactctgattcaacaagaagaaaggaatcaacaggagaattagagctataagtatttgttttctcctttttcataacttgtttacccaaggaatcaaaaatctgttgtttgtagtctgaaaatgacaaaagttgaagaactagtaacaagtatttgtattcttgtttgcattttgatctgtaaatataccacgaatccttgatttctctgtttcctagattcacaccaattgtcttaaggattatgttccaaacctaaagacaatgagagcttacacgcgcgaaccaatgagaatgagagagcacttgtctttcttggacaatagtatctaaaccagcttatttgaaaccttctgaatgagccagagtgtcttccatacatatcaattccacatagacctaacctgatctttagactataatcttcaatgatttcagaacctcaaaacttttgattttacatttttaatcaaatttatttgatattcattttgcttattgactagacgttttccccttggagataatagaatgattgattttaactctcaccggaaaagacaaaaaaaaggaaaaataaatcattgattaaataaaatttatggtgaataagcttggcttctctttaccaaacatatatgtttgttgatcaatctctttctttgcgttatctgccccttgatttagacccacgtattattcgattcctaaactaattgaaatgattagatatgtgtcatgacgtttagtgaactaatattcacctaatatgtctttcaatcacttaagaatttgcattattcttgtgaaaaacataaattcacatgctgctagtaaaatatgttaacaaatcaattaaacatcagaaaataataactgagatcttcataaagaaagtggaagtttttttaaatatatgaagaagaaaagtgcgtagtgtgcacgggacttagttcatttaattctcgagccattgccgtacggaggaggctgccttcaaggcttaagtcgaggcgtgttcgttacgtttaacccgcaatagccggtggctacacactcacaaatcccctttgactcaccggatatcgacggtttcccgctattttttcccctaactaactttttttccttttcttgtaaaactcttaaaaacaaaactcggtgttgtctctttgtttgctcactccttttctttctctctctcgccgacactttcattctcacttgtgttcgtacgtaatgttcttgatccggtaggtttttatttgattataaactcatttcatttaacaaattgagtccatctctctatgattcacccataagatgatagaagaagatcaacatttacgtctgagataaatcatgtcctttaatgtatatttgtttattttctggtcaatcatcgatctttcttagtcgtagcagttacacaatgctgatggtacatggcggcagattttcgattcttattatttaaagaccaaatttaataatagatgtatgtacaacgagttttggtatcactatcttgtccggtaatgctcattgtttatcttttaaatctacgtcttcttctgcataattgacacaaatcacttgtttcaatggagtttttgtttgtttgatttcctctgttacttatgcagcaaaagaagaaattgagtttaaaggagaagtgtgagaaggaagtttcaggaag

SEQ ID NO: 3094 - DNA, 3000 bp, Unknown
  misc_feature (1)..( 3000): cDNA_ID_2173052_gDNA_ID_1620624_Annot_ID_162457 3000 nt of promoter + ATG
ttctgaaatcattgaagattatagtctaaagatcaggttaggtctatgtggaattgatatgtatggaagacactctggctcattcagaaggtttcaaataagctggtttagatactattgtccaagaaagacaagtgctctctcattctcattggttcgcgcgtgtaagctctcattgtctttaggtttggaacataatccttaagacaattggtgtgaatctaggaaacagagaaatcaaggattcgtggtatatttacagatcaaaatgcaaacaagaatacaaatacttgttactagttcttcaacttttgtcattttcagactacaaacaacagatttttgattccttgggtaaacaagttatgaaaaaggagaaaacaaatacttatagctctaattctcctgttgattcctttcttcttgttgaatcagagtatagaacaacctttctgagattttctcttcttcttcttcttgttttttggtggctggagaacgaccttgatagccgcatcaaacactgctttcacattctgttgaacagataacagatataggaatcatcagcagattcaattggcggttttagacaggtaaagattagataaagatattgactctcaggttaatacctgttgagtttttgcactgcattcgatataagcaggcgccccaatcagcttctttagttcttcaccctgttttgataccatcaaaatatgaaacatgcagaatattaacacctaggattcagtttagaaagataatgagaaaggtacctgagcggtagagataggcacagcaccagggtgctcggcaaagaattgcttatcatctcgaagatctgtacgagactcagtcatcaaaatatcagaagagttccccaaaacagaaaacccccgataatcaggcgattaagagttgagctaagaaaaaaccaaccaagctttgttccaacgaggatgatgggaacaccaggagcataatgtctcagttcaggaacccactaagaatcaaaagcaagataccaaatgtattctatcagaatcactgaatgtaaactgaataaaacaggaaagaagtttcaggagaagaccacagatcaaacctttttagaaacattttcatagctagctttgctgacaagtgagaatgcaagtaagaagacatctgcaccgcgatagctcaaaggtcttagtctattgtagtcctcttgccctgtttcaccaagtcaaaaacacaaatgactctctggaagaggaggaaattcaaaagacaaaaaaatccaaggtaacaacttgcctgcagtatcccacaatcccaagttgatagtgttgccatcaacaatcacattggcactgaaattatcgaacacagttggcacataatcctgtcacatagaaaattccactaaaacatcagctacaaaatctccttacagaaagttacctaacactctttctaagatcattaaacagatcaacaacattgctacggtacatgaatctctgagtctctcaaatcctaaagatcacatcagtacattcactaaggtagcagaaagaagaagactttaagaaaacctaacaaatacttgtgactaaatccaactcataagcttcaacaacaaaaccaacttcaccaagctaaaatttcacgaaatcaaagtaaaagaagagaactttaaagctaaccgtggggaaagtgttgctagtgtaggagatgagaagacaagtctttccaacagcaccgtcgccgacagtgacacacttgataaaccttgaagcactcatctttctctccttcttcaaacttcaaaaaccctaatttgttcacgaattggggatttttgactaaagagagagagagtgaggttctttaaagagaaagaagacaaagaaatagctgctgaaagtctctcccagactagagtcttcctaatttttactactcatcctcacatgcacctcaatttcttggtcttcttcttccttttttttcttctttttactaaaattttataaaatagcatttcttcttagatagtgcgtttcccaacataagaccctacaaaaatttatgggatgaaaattataataataatttctatgtacttttttttttttttttttttaaacttcgttttcatctaatactatgcagcccatatactaaatgcctaaatctatacatatttagattgatctttaaatatcaataaaaaatttagctaaattttgactggtttagaggatttttccgatgtgtcattaggattatacaactatggtttaaatatcaataaaaaatatagctggttttacaatgcaatatgattggagtgttaatttttattgatcagcctcctttggatacatattcttctgttacatgttaaatgataatatttttgtcccggtatgttgaagtaaacattaaaaatgtacatacaacttctctaagaaataaatgttgagacactaaaaaaaacgtgaacttaaggtcaatatttaatatttttataaccaatcacggtataaaggcttaccttttgaatctgtctagctagttattgaccgttaattttaaaaacacttattgaccgttaaagaatctgttatggggacccaaaaaaaacgaatggtaatttcactaatttgttatgttatgtccaacataataggcgaagaatagggtgaaaccaacatttaaaaatagcaaaaacaaattaaaaaaaaaaaatcgaaaaggaaaaatgaagagagtttcaaagttacaacggtggattctatttcagacgcgtaaatttctccggaaacctgaaaacctgagtgcgaaacattctcttatatcatcctcttttctgaaagcttgttatttgagctctccttgttttttattcctccgacaaggacgaggttccaagagaacttagcttcttgttctacgtacgacaccaaaaattaattcaaaaaagaaaaagaagagagttcaatg

SEQ ID NO: 3095 - DNA, 3000 bp, Unknown
  misc_feature (1)..( 3000): cDNA_ID_1823602_gDNA_ID_1620624_Annot_ID_162455 3000 nt of promoter + ATG
ttctttatgatttccttgcttaattaagtttcaataagataagaaagtgttgttatgtgttgacaagttcagtttgtggtggcaggatgaagatgcattcttcagagactacgcggaatcgcacaagaaactctctgagcttggtttcaacccaaactcctcagcaggcaaagcagttgcagacagcacgattctggcacagagtgcgttcggggttgcagttgctgctgcggttgtggcatttggttacttttacgagatccggaagaggatgaagtaaacgaaataggaagtaaaacacgaagcaacgatgctcttatttgggtattaaagaaactattaatcgtctatcgaatctattttgctgctacaagattctaaactctttgaatccacgattctactgtttagtagtaaaaaagttaaaaagtcaatattttgggtccgtgattcatttttgcgatatttgttcattgcaatgttcgtttcacttattaattagtaccaaagaaaaagaaaaaagaaagaaacaaagatcggtcgatatctaccaaagtggggacataacctgaaacttgacctaacctggtagtggtaggtttagttaggtaggaaacttctactaagaaattaaaattaaatttttttttgctttcgtattttcattaaagaagataatatatgatgttggttgccagttacctaaatataggctcgggatgacatgtaatggacgcaaagtagcaaatagctttattcaagttgacataaaagaattgttgttacgtaaaagaagtgtactgtattttaacagaatgtgaaatcacctaacaataacttatataagaaactaaaagaaagaaacgcatgtcttctaaatttggcaagaacgaaggttttgtaacttgtaagtagtttaaataaataaaccatacatttttaataattaggaaatatatgttacatgttgcactttgtatacattctaaaagtcgtataatgtacctatttttttaagatttgtttggtgtgtgtgtagataacaaatcacatgtcaattctatcccatttctattttcttcgttattaaatatacaaatatgtcggtaggagttcagagtaaatgtacaccatgaaatctaccaaactcttttaagattgtctttcaggtatcaaacaaactttcaccaataaagctttttcccttttccaaataaagaactccaaacaagaataaaaaccacaatcattattcgatatgtttttatcgatacttatttcaaaatatccccttacctatttacaaaagcatttcacgaatgtttttcttagagtcgtcgtattttcatatatactgatattagcttaattagctcgtgatgacagcaaaattcttgaatattttgtaggccatggtctttgtaacttgtcaagaacatagatacgtcggataaattcatagatatcaattcaaatgataagctagcttacgaaaagcgtttctcaagaaactatgatttttttctaagaattagttggtcgttacgataaataagaaaccttgaattgatggaaaagaagataaggaattaattaagagattggtaaaatggtagttgagaaagtaaaaaggtcacgtgttagggcaaatcattaatggaagaaggagaaagcaggtagaaatgcactctccattttcattacattacaaactccacgtgaggtttcaccgattgtaggaactcctgattttgtgttaattactcacaagtaattatcatatagcgcgtagctaaatattagtataggatgtaggttttacttatataatgctatatctcactactttggtgaagagaaaatggatattaaaatttaaacggttgatacattatctgaatagttcttatatatacgaaacgatttgttgagatatgttttaacacttcttaaaggaagtaggataaagtggaaggtcacgaaccactccccatattgcagccaaatctacaccaaaccgtacccaaaaatgaaattaactttccctcaaaaccaaccttgtttgtgtcttctagattaatcctccaaacttttgattaaccaaaaaaattatcaaactaacatgttctccttttttctttagaaattctaacgaatttatctttatactgatttgaatatacttaatttggtcatttggatgccctttacaacctccttaccaaactcactatggcaaatatatactattttccattgtaacataaatgtccataatttgaattaaattcgttgcagtacgaaaccatccaactttgtccaaaaacaaaatccttataactatttactttaatgtaaatatatcctctacttttgtttttacaaccctagctcaaacaaatttattatttgcgatataaaatcatatcgaacaaactcgatgattttttttttcttacgttattaatgaaactaaaatatagaaaaaaacaagatgaaccaaattttcacctatctaactacttaaatataatatgattaaatttggtaaagtttgaaaagtttctttaggaaatgtgaaatattgatcacagtttctattgctaaaatcaccaacaaaacgcatgtcgccattcataattatggtttcacacctacaactaggctaataagtaaataagtagacaactagactcaggtttgaaaaaaccataaaagccatatagcgttttctcattgaaactgcgaacacgatcgtgtgaatgttgcagtttctagttttgatacaaacaaacaaaaacacaatttaatcttagattaaaaagaaaaaagagaacggagcccactagccactccttcaaacgtgtcttaccaactctcttctagaaacaaattaggcttcaccttcctcttccaacctctctctctctctctctttctcaaaccgtctctccataaagccctaatttcttcatcacaagaatcagaagaagaaagatg

SEQ ID NO: 3096 - DNA, 3000 bp, Unknown
  misc_feature (1)..( 3000): cDNA_ID_2132959_gDNA_ID_1620624_Annot_ID_162453 3000 nt of promoter + ATG
gtgtttaaagctgggcctggaagcatctgtagcttttcacttgaggtttttctagactttatttatatgatttttagttcactctacttcagttatgtagatatatttattatgagttgaattattgtatacattctatcattattttcacctcttacgtatgatacaattctgacatacataaacatccaaaagtatcaaaacaatttgccaactagttcttactattcttctactcgcttttccgggagaaaaaaaaaataaaaaaaaattcgttgattaacatttttaataaaaaaaattgttcctgaattatgcctttattagttgggttaaaatataattatattgacatatctaattaaacctctttacactcaaatcaagacctacaatttcacaagtttaaggttgggattactcgatatatagaatgaaactattgcaacaaaaaaaaataaaaaaatgaatgaataggattgatggtgtgataaaagaagagatgaatacaaagaagaaacgaacacaagtattgtgaacaagtcaaagcctaactattgaacaactttagaagacaagccaccaaatgtacaaacaaatcctcccaataacaaactacaaaagagaaattaatcaattagaaatcataagacatatcgacacatgctaatggtattatctacttacacctcatcaaactcgtgcatgggctattgttatccacatatgtatacagtcatggttatgtcccctcaatctcttccagcttgagaactatttgtaaaccactagtcaattatttcatattcagttcatagatagcctataaacattacatattatatctctagagataacaaaggggagcaggaagtgttagtactgtcgaccttatgcgcccatataattcttccatagctttagattttagtgtttgggctattttaattgcacccgaataatgacaggtaggggtccatgcaaactcatattcatgtgcatatcatcataaaatatccaaaaatctatcttatctatataacttcattgaacaaaacatatatatattcatgcagacgtatggcatgatacagttaatggtctgaattgctcaacgtaaaccatacatgcactagacagtttcatgggaagactaagattttgggactgcaaaattcttcttggaattgtgtagcggctttcaacgtatctttaggttatattcggtgaaccctttatttaccggcacagaatattacggttgatattcaattgatcaaacaatgtgaattagacgtctaattattgatggtcgccatatgaatatcttcttcttccttttccaaaccaacaccaacatcttttaatcgatagaagtgtcaattcgagctcgactctcacatctaatgcgtcattataagattgaaaatcagagacttgaagttttcgtttaggaacttaaaatgaagtttataactattgcttaacgtttttgttgttcatcccaagaaataattgacgttttcaagttaggtttttccaacccaatttattttattatccaataatattataaattctctagtgaaatttcattccttagcttccacgcaaagggtcgcttgagttttgagtaacacaagattggagagatcaatgagaatgttggcattggatccaatcctactatttgggaccagcttcactcgattcatcgcgtcctatttttgtccgtttacacatcttcggatcattcaattcttgtttaatcatcttcattagtaataacgttgccactttatttttaagacggatttatcttctgcaactcccaaattcatattcgctaaatcttctctaaactcagcataatagttaacttgaaaaagaaaaaaacgaaaacgataactaagatggtgaccactcgcatggtttagtgatgaatttagttaaaccgtatgttaatttccttggttaggctcttcaaacagaaattcgaaaacgatatcaaatgctccatgataagtttatgatttcttagcattgtctaatctaagagactagtaagaacatgaaaacaatattcgttaaaccaagtggtaaaacaactatatacagtatgtgtttttcgattataatgttgttaacttttaagattattatattttatattatttcttaaaatatgttgaggtttaaaagatttcttttcagaaaaggattaatgtcttcagcaatatatgctagtaatttactaagtgatattttgcaagtttgttggcaatatttaaccttttctgaataaaataaattcaatattaagaaacaaaattatatacatatagtagtatttaattgttatctatttttaaattatatgtgaataaaacaaagcaagtgtaactgtgtaattataacattggtacacgcacgggaaaaaacacagctagcaaattgaaacgttaatttggtaaagaagaaaaatattttatttttaaaaacacttaatatagttttaattggtgattttcccaattctgaacatatatatgatgataagttttccatcccaagttgttttttctcattagtcactggaaacattaattaccagcaatcagtagttactttggtattccccacacaaattcaaatttaaaagaaataattagtagtacttcttatgactgttttttttactgaataaaaaagaactatatataggttgttcttaactataaccactaaaaaaaggttctaaaattaattttaaaaagaaaaatatatgaagttaacttttatatattacacatcaaattccaatttcaggggctggtaatttggtaataattaaagaaactcaatggcaatgatttaagcacttctttatataagtccaccaaactacactgatctcctcaacaccacacacagcaaaacaaaaagctctctacactcaaaatataacgaaagaacaagaagacatcatcttagctcact

SEQ ID NO: 3097 - DNA, 3000 bp, Unknown
  misc_feature (1)..( 3000): cDNA_ID_1823608_gDNA_ID_1620624_Annot_ID_162452 3000 nt of promoter + ATG
gaaagaccttttttgacataaaaagggtcagatgaaagtagttgcttgagagttttgttatcatgttatgaagcagtgaccagtgagccaaagttgctatattgtattgatattctgttagaatcatattccaaatctacggcaaaaaaaaaaaaaaaaaaaaattcgaaagagttggaaaaaagttctagttacaaatatttctctaattacatctcgggactgataccgactagtgcataccacaaaagaaaatccaatattgtacttaccaatgaaatggaaagtgatagaatgtttacccgctgagttacttcatcaaaaaatggtcgtatacattgcgcgcgcaattacatgcaacatgtctttgaccgtaaatatcacattaaaatagaatgacagtcactttctgatataatatattaatatacaccaaccagcatgactaggatcaaggtgtacaacaattttttttttgaatttatcaaattcacacaaaacatatcgtgtacaactctaacgtacgtttcacatcggctaagccttgtatttctttatttgtagcttgtacggaacatttatagcttgcaacactgacaattttgcagattagttgctttgttctgataaagatggtttaagaatttagttattccgcggtttactttcgtatggaatacagcagataccacaatttaaggtaccaacttggaaagagtcattcggatcatcggatgagacaactattttcatcgaccaagtaaagaatatttcatcgatcggtttagttttgttaaacataattgcagtatatgtgtgttaaccgtcaaaaattagagtgccaataaatctttttttactctaccaattaaaaaaataaaaaaataactggaagtgaagaaaatatcatttgcaaaataaattaaataaaacgtaacgtacgctaatatggaggaggaatttcggaatttcatcagttctttttttgaagcttatcgacaccgcctgacggctttgctggatgaaaatatagctggataacatttatttttaagaagaacaaaaagtgtaataattatgtgttgtatagcgattgtaattcatgttatccttagccgcctccttattattatgtaagcaatattttctttggcaaaatgaagttctaataatctaatccaagaaaattcgtaagttactctatcctgtgatacaaattcagacacgcatgaataaaggagattaaaggttgcatgtatctttaaaaaaccatcatttctttcaacgggttaaaaatgagttattcacaaataattgttttgcattgcataattagattgagttatatatgttattcgattccgtcaggtttacatgatcagatcagcagacaaaagattaaccaaaaaatgaacgtcggtggattacagattgagaaacaaaaatatgttcaacaaagtcgtgttgtatttgacagcttaaaccacttgccagatgtggttaatgataagagcgatgtatatttgatggggccaatccgggattttatacagtaagtgagtgataaggatatgtttctttctatcagctagtgcataaatattgtgggctaaattatcacaaattgtcgaataagtgatatgatttgtgggcgaggttatcacagattcacaatttgcttatcacaaaagatatttttttgtttgttttagaaaaacaaattatttgtatggtatcacaaaaagacatttgtgtatgttaatgttgtaggattccaaaaacgacttcataataataatataatgatcattaacaaagaaaatgtggcaacggttgagaatgaaggacaaaaatatttaataaaataaaaaagataatagcatgtactagtagcaaacaacataaaagaaatgagtaactatcgctttaattaaaagtgggactaaacatgtctctagactattgaaatattcttattgatttgaattttcttattgtaaagataactttgaaattcactctttaattattttcttaacgagtttttggaatggatccgaatgtatatatatatattgatttgtgtttctatttatctaagcttgtggtaactttattggcgatggttaataaaaaacacgttgggtgcgtatatgcaatattcttgatactcgaattcattcctgaacatgagatattaagataaacgacctactacttcgtgattaaaaaacataagttaaaatttaaatgtccgaaggaatcatagttaagtgacagcatttaagttgtctaaaaattgccatttgccactcgcatcaatttgtaattttgcaaagtgcaattttatgtctcaagatttgtttcgcagtaagtaatgaaataacataatcaatgttctaacaaaatatctcacctaccagccacacgagtgtcaatttagtttacatttgaaccagagacctaaaagtttgaactaccaaaataatgattttgccgacaaaataggaaaactaagaaagtagtaatgaatatcagatatctgtttcttcagatcaaagcctactaaggaacgcaaaaatatataactaaacaaaattgcgtaaatttagaaacagtgattaaaagcccatatttgattcaatagtaattgaaaacagcataagataatggcccattagccgttatttaggcccgttatcatatcacaaaacaaaacacgaatcatctacgacgaagacctgaaaaaacacactgcaattgagatcgatttcgactgtaagtgaactttgattgccgcgaagattactcaaatcgccggacacaagtttttcagtgaattccattggcatagaactcgagagaaagagacacagagagagagagagatctaacaagagtcaaagtttctgactttttcgcattctttttgagatcgagttctgtttttgttggcgtgtgagatgaattcttaagaaggaagaagaagaagaaggaaag

SEQ ID NO: 3098 - DNA, 3000 bp, Unknown
  misc_feature (1)..( 3000): cDNA_ID_3593514_gDNA_ID_1620624_Annot_ID_162451 3000 nt of promoter + ATG
tactagtacatgctattatcttttttattttattaaatatttttgtccttcattctcaaccgttgccacattttctttgttaatgatcattatattattattatgaagtcgtttttggaatcctacaacattaacatacacaaatgtctttttgtgataccatacaaataatttgtttttctaaaacaaacaaaaaaatatcttttgtgataagcaaattgtgaatctgtgataacctcgcccacaaatcatatcacttattcgacaatttgtgataatttagcccacaatatttatgcactagctgatagaaagaaacatatccttatcactcacttactgtataaaatcccggattggccccatcaaatatacatcgctcttatcattaaccacatctggcaagtggtttaagctgtcaaatacaacacgactttgttgaacatatttttgtttctcaatctgtaatccaccgacgttcattttttggttaatcttttgtctgctgatctgatcatgtaaacctgacggaatcgaataacatatataactcaatctaattatgcaatgcaaaacaattatttgtgaataactcatttttaacccgttgaaagaaatgatggttttttaaagatacatgcaacctttaatctcctttattcatgcgtgtctgaatttgtatcacaggatagagtaacttacgaattttcttggattagattattagaacttcattttgccaaagaaaatattgcttacataataataaggaggcggctaaggataacatgaattacaatcgctatacaacacataattattacactttttgttcttcttaaaaataaatgttatccagctatattttcatccagcaaagccgtcaggcggtgtcgataagcttcaaaaaaagaactgatgaaattccgaaattcctcctccatattagcgtacgttacgttttatttaatttattttgcaaatgatattttcttcacttccagttatttttttatttttttaattggtagagtaaaaaaagatttattggcactctaatttttgacggttaacacacatatactgcaattatgtttaacaaaactaaaccgatcgatgaaatattctttacttggtcgatgaaaatagttgtctcatccgatgatccgaatgactctttccaagttggtaccttaaattgtggtatctgctgtattccatacgaaagtaaaccgcggaataactaaattcttaaaccatctttatcagaacaaagcaactaatctgcaaaattgtcagtgttgcaagctataaatgttccgtacaagctacaaataaagaaatacaaggcttagccgatgtgaaacgtacgttagagttgtacacgatatgttttgtgtgaatttgataaattcaaaaaaaaaattgttgtacaccttgatcctagtcatgctggttggtgtatattaatatattatatcagaaagtgactgtcattctattttaatgtgatatttacggtcaaagacatgttgcatgtaattgcgcgcgcaatgtatacgaccattttttgatgaagtaactcagcgggtaaacattctatcactttccatttcattggtaagtacaatattggattttcttttgtggtatgcactagtcggtatcagtcccgagatgtaattagagaaatatttgtaactagaacttttttccaactctttcgaatttttttttttttttttttttgccgtagatttggaatatgattctaacagaatatcaatacaatatagcaactttggctcactggtcactgcttcataacatgataacaaaactctcaagcaactactttcatctgaccctttttatgtcaaaaaaggtctttcgtctgaaccgaaaatcaaaccgagttggaagcttctagcaaagataatgagccgtactagtcacaactcacaagtcacactttcgaatttcaaacttcaattgaagatccgaatatccactgccgtagtttgtacgatactttcactcatttcatgttgtcatgtgtcgtacaacagtttccagtttcccattattatttaatgtttatttattaatatttggactttaattacggcaggttatactatatggtatgatagaatattttcttcattccactggattttgctaattatatatatttattccaaatcacaattttgatttatcgtcattacaaaaactaaaaagtaatgaccaaaataaaagatatgtaatttcagatattccgttctaactattctattctcttcctgattccattaccaaacactgagagacaaataagctactggccgctaattggctatcgctctctttacatcttcgaacataagcaatagttgaaaaatataactttactaaaaaaatacatatttttcgttaaaaaaaaccttgtggtcgtctatatactattctaataagtaaaaaaaaaaaaaaaaagtaacggaagcatgaactttcatgcctggaagaaactactggccaaaaccatccactaaatacaactaatgaagtaatcatcctagttgagcatattgtaatcatcacattcaagaaaaatatcccatggagaacaattttgcattatataaaaagttaattccttgtcgacttttatataacacaaacaagaaggagcacatcgtaaattcatcaccgcttctacaccttcaccgtacgtgtctctttcgtactttctcactatttgtcattctaattataaagtacaaaaaaatcaatagtttaattattaaattaatattaaaaataaatactttctactaaaagtctaaaatattataacatcgaagttgcgaaaaataaaataaaataaacgtaacatttcacctttaaaaccgtacgcagagtgctcaacgaacccaaacacactctaaaaatatcttctttctccttcttcttcattcttctcaatatctcctaatg

SEQ ID NO: 3099 - DNA, 3000 bp, Unknown; identical to SEQ ID NO: 3092
  misc_feature (1)..( 3000): cDNA_ID_1819388_gDNA_ID_1620624_Annot_ID_162447 3000 nt of promoter + ATG

SEQ ID NO: 3100 - DNA, 3000 bp, Unknown; identical to SEQ ID NO: 3091
  misc_feature (1)..( 3000): cDNA_ID_1819392_gDNA_ID_1620624_Annot_ID_162446 3000 nt of promoter + ATG

SEQ ID NO: 3101 - DNA, 3000 bp, Unknown; identical to SEQ ID NO: 3090
  misc_feature (1)..( 3000): cDNA_ID_1819396_gDNA_ID_1620624_Annot_ID_162445 3000 nt of promoter + ATG

SEQ ID NO: 3102 - DNA, 3000 bp, Unknown; identical to SEQ ID NO: 3088
  misc_feature (1)..( 3000): cDNA_ID_1819403_gDNA_ID_1620624_Annot_ID_162442 3000 nt of promoter + ATG

SEQ ID NO: 3103 - DNA, 3000 bp, Unknown; identical to SEQ ID NO: 3087
  misc_feature (1)..( 3000): cDNA_ID_2173042_gDNA_ID_1620624_Annot_ID_162439 3000 nt of promoter + ATG

SEQ ID NO: 3104 - DNA, 3000 bp, Unknown; identical to SEQ ID NO: 3098
  misc_feature (1)..( 3000): cDNA_ID_3593514_gDNA_ID_1620624_Annot_ID_47105 3000 nt of promoter + ATG

SEQ ID NO: 3105 - DNA, 3000 bp, Unknown
  misc_feature (1)..( 3000): cDNA_ID_1819545_gDNA_ID_1620626_Annot_ID_47133 3000 nt of promoter + ATG
agtgagaataagaagattaaagagaagatagcaacgtgaagtgaagaagaagccatagatgccgatagaaacatagtattgagtagtagagaagctagttgcttggagtgtagtgttaggaatgttgttttggaaattgctgagttatgaggaggttcttgtgaggttttatagtggtgaaaattcgaaaactagccgttagattatttactttttgttttgttgtgaaaaaagaagaattttgaaaaggtaaagaaacgttaaatgtttgttactgtagccgttgcgagtgatgtaaccgttagagaaaatttgaaacaatgtaattatggatactgacatttgttgtgtgtgtcaggcaaaactatgagtgtttctcgttgtctcgcttttaattttgacaaaataattgttcgtgaataaacgtagtaaacaaagtaaaatctagtcattctatttggtgatggtgacgtttgggtattgccgtattgggcctattagctattggggtgatacgtatacacacctttacattttcggatatatttgttgagatcactcctggcccaaagaaaatagaaattttcaaaaattttaacaaggaatttacgttgttcttcttttttcaataaggatttcgaatcaacagagcaaggaccaagtgctaaaaccaattatcaattgagttatcttctttataacatttactagaacaagacataagctcatctatgactatgagaggcgtgtttatacaagggatttggtttaactaatagcaagaatggctcatgagtttaccaactaacgaggcatcaactcatttactcagctacatgatccgtttgtgcaacgtttcccactgattgagactattgtactgacatgtctagcatcaccccgtaaactatagtattgtttaggtgaatttggtctccctaaccatatatagggacatgaagaaaatgtcttgtgcagtttgtcagtcatattagtgtattatatcttgttacctccaataatgtcatatattggaaaacttgagaagtgatcagggccgatgaatgaaacattttttttatgtaatttggttaaaaagtgtaacgaaaaaataattaaagtgaaatctacttttcaaaatcgttaaaatgttttttgtgaacttcaaaaaatataaaaaatagcttacttttcatttaaaatgtctaaatttaatgtaaatattaaattagaaaaatgaatttatacatataccaaaaatcccagttttattttgtatgtgaccccaatattcttaaaaccaattaactttttcgacggaccaagtattccgtcgatttggttcaatatatatgtaacgaaccataatctacctttcgcggttgaatcggtagctaaaaaattatttctaacaaatataaaattacaaaaattgtatttttccattaatgacttaaaaacaaactatgatatctaagtgtgtactcattcaaagattatttaatttttttaaatgaagtcatggcaaaaggaaataaattgcaaattccgagtttaggaaagaaaagaaagcaaatcttaaataactcaaaaaagaatattggaagacatgtatcatagtcctaaacaaagtaacagatctttgggtcctcctttcttttttttcccttctatctgaaatccgacatcatcctcaatctctgtctgaatttctcaatagctatatcatcttcttcttggtcttagaatcaaagaaaaaccctagttcctcttttcccaagataaccaaactctctctcttctctctctgcatcattccctttcttctttctcgcatgtgcagagctatcaaacatctgttttgattgaaagctaagtttccaattccaaaacggaagaaattgaaagtgtgtatgtcaagacaaaccaccaaactacaaaagaaacaaaacccacatcgcattgttccttaaagacccagcaataagattatctcacgcttccttctttcttcctgacatttttctcgtttttgttttctccttatttggggtttttcctgcaatgtgggtcgcatttggtcataagtgattatttctagggattgtgtgacctctctgcttttttgagttaagcatttaaagaaacctctcaatggcgttgtttagaaagttctttcacagaaaacctcctgaagggttgcttgagatctcagagagagtttacggtatgctctttcttcttttaagtgatgggtttagggtttgctttcttatccttgctcttctttgggctttggagtattgatttttagaaagtttgagtttttaggtcttaagatcagattttgataagtgtagtgtcctgttttagtttctagttctttttaggcttgttgattgaactgaatctaacatttgatagactaagattcttgatgggtgagatttagttcatggattctgttaactatccatgagcacaggctcaggctcattggtggaaagtctatctattatagcttaagatgtctcattctcaaagaattgtcaggaaacagtttcttttgtatggtcactgggttgcatgatttctcaaatccttttgcttgtcttatcccttgctcttagagtattaaattttagaaagtttgaatttttaggtcttaaaaatcataattttagcctaagtttatagtgtacttcttgttaggcttgttaattgaactgaatctaacatttgatagcttaagattcttgatcggtgagatttagctcatggatagatttttcaggttttgtatgttcactgtgttgcatgacttctcaaattcgtccttgtcttatccatgcttagctctgagaaatagactattttagtgagaaagatacaaaagattgctctataagctgcttacgaaatataagattgctctataaggttgctgaactttgatgtttttgtattacagtctttgattgctgcttaaccacggatatg

SEQ ID NO: 3106 - DNA, 3000 bp, Unknown
  misc_feature (1)..( 3000): cDNA_ID_2993331_gDNA_ID_1620626_Annot_ID_47135 3000 nt of promoter + ATG
ttttctgcagcagctctagcttggacagtgaaaggacgagacttgaagagaaacccaggattaattggagattttagagaaaacccattactcagattcgcgaaattcgatattccggtggagaatttcaaggaagggacgagaaaggttgctgaggaattaggtctagaactgttgacgactgtagagaatgttccgtacgaagaagatgaagtagtcatggaaaccatttttggttaccggagacgagtttatgttcgtcttctttcgaccagtgttacacgttcaatagtgaaaccgagagatgatatagtcgagacacgacgcactttatatcatgccaaaatacacattaactaaaaaaacaaaaaaaactaaatttttggaccataaatgtgtttttaattttatttactttacaaaaaatataatgatatttttcttcacaatttgttttcaaattcgttttggagacataattggaatttgttttgcagtatagttggattttttgcagaattcaattggagacaaagttggatttttttatttacaaaatgcttattagatttcttatgattacttaaattctggagcattttattctatgaaattactgcaaaattatatttattttatgattatttatcttctgtagtattttatatgaaatcactgtaaaattctatttaattttatgattatttatatgctgcagtattttctatgatttatggtagggttttaaattaaaatattagatgatatttttataatgaaaaattttccttaatatttttgcttttataattttttttttttaaatgggacaaagtaagtaattaagttgagtggtgcaaaatccacgttcattcacgagagcattttggaccaatttgaggcacatatttaagtgttatgatatctatgttcttgtcccaaaaattaaatggattttgttttggactatgtttcatcctcaaatttttgtttagttccttggttcaatccttatcctaattattgtctctggttacaaatatgtcgcactcaaacgaagagttataatctaaccggtggcaatgcctatccattattattattttgtaatatatattggaaatgttgggccacataaacaaatagataagatgtgacagccaaatttagttttcttattagtactttagtagtatactcattagaagctacctctctccattattacaatatcaatctcaaatgttgttctatataacatgtgtttactatagaatatctttattttgttcaatcagtatataacaattcccttttcgaaattgaagctaaggaggttttatgcgatgagggtgatacttacatgctcaccgaattcactcccactcgttattccgattcggtttttcttcgtgaagcgaggctcttaaagtatctgcaccggtgatcaaagtgaagtgtcttaagttagattaaaattttaatcaataaattgtaaaaatattaaacccaatcaaaaagtgacatgtaagtaaaaagtgtctttaacatatgtttcttctcttttctcctttcacaaatatttcaaatttatattaaaaaaaaatagtataaacactcgttaatataatcgatggaggtgcttttagaagacgtcgaagctatcttcaccaacatgggtctaggaagacctctctcgagagttccttgcctcattgaaagtcaaaaatattatatttttagctatttaagatatttaaatgttaataatgttgtaatacaatatttaagtcgtaaatatttgatagaccacataattatttttgtgcttcaagcctctcaaaactaaggaccggctttcacttggagacaaaaaatcttctgaagttcctttttcttgtatttttttcttccatttctattacttcacatacctaagtgcaaaaattgattgtatcatgaaactatgtatgttcgatataaaaacagaaatcataaattttgttaaatgccaggtaaaaactagcatatgttaatttgtttttgcaatttatcctaccataatactctttttctgtttaaaatttttaatatacttttagccaacgacaaaaccagtttatatgaaagttaagatgacaaaatactaatggtctacatatagcaaatacacaactagttaaattcttctgtaattttgctgtttacaatgacgattacacacattcttaaagctgtgatgacgaatcagagaaagctttaaacagctgtaaagattacacatctcaagttttagttaagtaagttattaacaagaaaaagttttgaaaaaagtaaagacctttaatagttttcttttctcggacaaaacaataaataaaaagaacacactttttttatcttttgtccttaggatttgattgtacatacatctgatctcaagtgatttcaagtggttggttctgttccttttctcgtccccgatcaagtttcttctcctaaactccagaatttggtcttgaagatctctaaaggctcttcctttttgttcatttctctacccagatatgtaagttgctagcttcttctgtcataactttaatatctgaatctttttccgatccaaatagtcaaatattcgcatctaggtcaaatcgattcaaaaccctttttgttgattgatgtgctaagtagttctgagttgattaagtctatcagtttaagagaaaaggattgtgtaagattatgattcgtacaagttagcttctttcttgattaggtccactgtgaatcatgcacacgtttatgaggaagatattagattgtgtaagattctgattggtttgatggtttcaagttagtttctttgttgattattgattgctgagtagttctaagttgattatgtcaactctgaatcatgtacaagtctatgagctagaaaatgaattgtgaattgtggagctaagaatgatgttgttgttttggctgaaagcgatg

SEQ ID NO: 3107 - DNA, 3000 bp, Unknown
  misc_feature (1)..( 3000): cDNA_ID_1808527_gDNA_ID_1620626_Annot_ID_47136 3000 nt of promoter + ATG
tgtcttatcatcaagatcaagaattgcagcatgctacaattgaagcaagagatgtgatcagtcaggtagtttgatactaatcaacaaggaaaatataagattatgttttgactaaccgcgtcttccatggtagcgcgccaaccttgcatagacgataaaccaaatctgagcttatcattctcaccatcttctgataacttttcagttttcggagaacttaggtatgtacccatcgctttcagccaaaacaacaacatcattcttagctccacaattcacaattcattttctagctcatagacttgtacatgattcagagttgacataatcaacttagaactactcagcaatcaataatcaacaaagaaactaacttgaaaccatcaaaccaatcagaatcttacacaatctaatatcttcctcataaacgtgtgcatgattcacagtggacctaatcaagaaagaagctaacttgtacgaatcataatcttacacaatccttttctcttaaactgatagacttaatcaactcagaactacttagcacatcaatcaacaaaaagggttttgaatcgatttgacctagatgcgaatatttgactatttggatcggaaaaagattcagatattaaagttatgacagaagaagctagcaacttacatatctgggtagagaaatgaacaaaaaggaagagcctttagagatcttcaagaccaaattctggagtttaggagaagaaacttgatcggggacgagaaaaggaacagaaccaaccacttgaaatcacttgagatcagatgtatgtacaatcaaatcctaaggacaaaagataaaaaaagtgtgttctttttatttattgttttgtccgagaaaagaaaactattaaaggtctttacttttttcaaaactttttcttgttaataacttacttaactaaaacttgagatgtgtaatctttacagctgtttaaagctttctctgattcgtcatcacagctttaagaatgtgtgtaatcgtcattgtaaacagcaaaattacagaagaatttaactagttgtgtatttgctatatgtagaccattagtattttgtcatcttaactttcatataaactggttttgtcgttggctaaaagtatattaaaaattttaaacagaaaaagagtattatggtaggataaattgcaaaaacaaattaacatatgctagtttttacctggcatttaacaaaatttatgatttctgtttttatatcgaacatacatagtttcatgatacaatcaatttttgcacttaggtatgtgaagtaatagaaatggaagaaaaaaatacaagaaaaaggaacttcagaagattttttgtctccaagtgaaagccggtccttagttttgagaggcttgaagcacaaaaataattatgtggtctatcaaatatttacgacttaaatattgtattacaacattattaacatttaaatatcttaaatagctaaaaatataatatttttgactttcaatgaggcaaggaactctcgagagaggtcttcctagacccatgttggtgaagatagcttcgacgtcttctaaaagcacctccatcgattatattaacgagtgtttatactatttttttttaatataaatttgaaatatttgtgaaaggagaaaagagaagaaacatatgttaaagacactttttacttacatgtcactttttgattgggtttaatatttttacaatttattgattaaaattttaatctaacttaagacacttcactttgatcaccggtgcagatactttaagagcctcgcttcacgaagaaaaaccgaatcggaataacgagtgggagtgaattcggtgagcatgtaagtatcaccctcatcgcataaaacctccttagcttcaatttcgaaaagggaattgttatatactgattgaacaaaataaagatattctatagtaaacacatgttatatagaacaacatttgagattgatattgtaataatggagagaggtagcttctaatgagtatactactaaagtactaataagaaaactaaatttggctgtcacatcttatctatttgtttatgtggcccaacatttccaatatatattacaaaataataataatggataggcattgccaccggttagattataactcttcgtttgagtgcgacatatttgtaaccagagacaataattaggataaggattgaaccaaggaactaaacaaaaatttgaggatgaaacatagtccaaaacaaaatccatttaatttttgggacaagaacatagatatcataacacttaaatatgtgcctcaaattggtccaaaatgctctcgtgaatgaacgtggattttgcaccactcaacttaattacttactttgtcccatttaaaaaaaaaaaattataaaagcaaaaatattaaggaaaatttttcattataaaaatatcatctaatattttaatttaaaaccctaccataaatcatagaaaatactgcagcatataaataatcataaaattaaatagaattttacagtgatttcatataaaatactacagaagataaataatcataaaataaatataattttgcagtaatttcatagaataaaatgctccagaatttaagtaatcataagaaatctaataagcattttgtaaataaaaaaatccaactttgtctccaattgaattctgcaaaaaatccaactatactgcaaaacaaattccaattatgtctccaaaacgaatttgaaaacaaattgtgaagaaaaatatcattatattttttgtaaagtaaataaaattaaaaacacatttatggtccaaaaatttagttttttttgtttttttagttaatgtgtattttggcatgatataaagtgcgtcgtgtctcgactatatcatctctcggtttcactattgaacgtgtaacactggtcgaaagaagacgaacataaactcgtctccggtaaccaaaa

SEQ ID NO: 3108 - DNA, 3000 bp, Unknown
  misc_feature (1)..( 3000): cDNA_ID_1819534_gDNA_ID_1620626_Annot_ID_47140 3000 nt of promoter + ATG
cctcgaatcataataaaagttttgatgcctaaagacggagatcatgtacataacagattttttatgggtatctagaagcccaaaaacattaaattaatggataaaacaactgatttgggcctgagccgtatcattcaagtaatacttctgataccagtctctgatgacatggcagcttgtgattagttgggaaaacgtgtttttgtgggaaaggagagaaaaaaaaaatcatttgctcttctcttctctcctcttcactgcctcttgacccgattcttcttcaatggaagcgagaatcatcctccaaattaagacttcttggaaccctaatcgcaaattctctcctactcctttagatctatgccggaggcgcttatcttatgtttttctatatttattttcgattttgcaactaatttttttttaatgataccaacaccgatctcaccattgaaaacagatttatatcagtatcataaaaaatctcaaacaataaacaaactttaaaattaatagtaaaaaattgttagtgatactctatgagtaccaactatgtgcatgctccaaagcccttgctttttgggtttcaacccagatctgggtctagatgcaaatatactctcgctttctagatttgagttttatcgaatataccttctgctttaaatatcttttatttggagaagttcttcgattatatggataatctgttctcgcgtaagcgaacgaaagttcaattcaagatattctttagatactttggtatatgtggaaaactaaaactttttttcttttttttaagtcatcgatcgaacaactttggagatacatgatttagcagtcaataaaaagtgagatctaattcatagctaaggcttgagtggattgtcagagtagagatagttcaagtgatttacaaaccataattttcacattttatactgatggtccttaaaaacaaaaggattaaacgtctagtgttgcttggattcttcaacttcaagatggaacaaccaatattttaggtcttcaaaccgtcataggggcgtttcctcccttcgtatggagttgcatatatttttattggttgggtcaagcacaaataaggatcattttattttttttcgaataaggatcattattacttctctcgtttgttacaatttcaataaattactgcaaagagtaaaacaaccatctccaagggccttctcttccgagttgcaagaattcgagttactataagagaagactcattcaccggtccgaagaaaagaacgtttaggtagatttgttagcaaaacaagcttaactcattaataatttaatactattgtttcatttatcagcacttatgtttctttgttggtttgataatatacataattgatataatatggatttctttgttcgtgaaaaaagatttaaaatttgtggatttcttcccttatataagtgacattgcgtatttttttctaagaattactttaatttttaaatattactgccaactgttctatacttctattgactgaatattaatacatacatgcattgtctataagttgagataacatagaaaggaattagctaacaaattcttgaccacccaactttacgttacttttgaaacaggtccacatcaacaaactctccaaatacattgtaataactttaaatgttccctataaattacttttgcttttattgctattaaggagttagttaacatttcatttagatattatttaattatttcaaaatctttcttcattttctcctttcttacctcttatatattccttcttaagtatatctaaaagtgaaaagtttatacattactatatatttagcagtaatgttgtcgtattcatgttttgagaaaatctagtctatataaataatgcagagagaggactattaaaaccagtttaaaagaaagaagctcacaaacatctccgagaaatttagctctcttgttgtagtttggttttgtaatacgaagacgaaacaaacccaaacatttgtctggtgggataaggatcaggatcaggatcaaggtacacttttgttataactttctagtttgcaaacttttttttacttgaaagattcattttttctcttgggcacgtataattgattattttatggcgttttctggttgattaacttttgtgttgtatgaattatttatacatttatctaatgtgatgtgaaaggagtttttttgtgtttcaagtgcagtgacatgaaaaacacctatcacattaaaattaataaattttgatatgcatatgacaaatatttagatatatttttgttaccataaattttgtacctatatttgttatttttaaaaagaccatttgaacttccaaatgttgttaaaataggtaatacttaagcggggttatttgcctcgtcctgttaacctgctaaagtatacaactagaaaagtcttgacgagttatgtttgagttacttgattcatttcttatacgcttgaaatctaattattattagcttatatatatatataagtatttcttttgttgtaaaaaaaatgataagaatttttttgtcaaagctatatagttcttttcgagttgtttcggccactcgagttttggttggtaatttgattaatgtttcaaaatactatgtgtatatatatatattcagggtatttttgattattaaaaaaaaaattctctacttttatgcatactattcagtgttaggccaattttatatatttatattaaattggttaaaattataaagattgtgttatgttgatatgtcaagttatgttttcactcgtacattatctatcataacattaaatattcaggcataatatactatactatcatattcatatcaacttttttttttttcaatctttgattgtagggtgaaagacgaatttgtgggttataaaacaaaagctcaaatttcactatgacccgcagcagaaagttcttaacgaaaaag

SEQ ID NO: 3109 - DNA, 3000 bp, Unknown
  misc_feature (1)..( 3000): cDNA_ID_1819530_gDNA_ID_1620626_Annot_ID_47141 3000 nt of promoter + ATG
ccgcaaatatatagagaaagacccagctctagagcgtaggtttcaacaagtgttatgtgttcagccctctgttgaagatacaatctcgattcttcgtgggttaagagagcggtacgagttacaccatggcgttactatatcagatagtgcccttgtttcagcagcagttcttgcagaccgctacatcaccgaacgctttctgccagacaaaggtatggacattggacttgcactttccctgattacaaccagttttctttgggaagtgtttgaccatagtatttttttctaagatgaatgttcttttttcagctattgatcttgttgacgaagctggtgcaaagctgaagatggagatcacttctaaaccaactgaactagatggaatagatagagctgtgatcaaattggagatggaaaagctttctcttaaaaatgatactgataaagcatctaaagaacggctacagaagattgagaatgatctgtccacgctcaaacagaaacagaaagaactcaatgtccaatgggagaaagaaaagtcgctcatgacaaaaatacgttcgtttaaggaagaggtaaaatctttctcaatcactatgccttttcgacttaacgtctcataaaaataattttatacaagacacactgcagtttcttgttctaaattcgtacttttagtggtagtacttgtggtggttgctttcgttgttggtatatgtcgacgttaatgtcctccgtaacattttctatgttctatgttttacagattgatcgagttaacctcgaaattgaatctgctgaacgtgaatatgatctaaaccgagctgctgagctgaagtatggaacacttttgtccctccaacgccaattagaagaagctgagaagaatctcacgaatttccgacagtttggacagtcactactccgagaagtggttaccgatcttgacatagcagaaatagtaagcaagtggactggtattccactatctaatcttcagcaatcagagagagagaagttagtgatgttggaagaagtgctccaccatagagttattggtcaagacatggctgtaaaatcagtagcagatgctatccgacgttcaagggctggtctttctgatcctaaccgcccaatagctagtttcatgttcatgggtccaacaggtgttggtaagaccgagcttgccaaggctctagcgggatacctttttaacactgaaaatgcaatagtgagggtcgatatgagtgagtacatggaaaaacactcagtctcacggcttgttggtgcaccacctggctatgtcggttatgaagaaggtgggcagttaactgaagttgttcgcaggagaccttactcggtggttctgtttgatgagatcgagaaagcccaccctgatgtctttaatatcttgctacaactgctagacgatggaagaataactgattctcaaggaaggaccgtaagtttcaaaaactgtgttgtaattatgacgtcgaatataggatctcaccacatacttgagaccctccgcaacaatgaagacagcaaagaagcagtttatgagataatgaagcggcaagttgtggagttagcaagacaaaatttcaggcctgagttcatgaacagaattgacgagtacatagttttccagccgctggattctaacgaaatctccaaaatcgtagagttacaggtaactaacccttttaaacccactttgttttttcagaatctttgttcttctaaagacattagcttcatgttattacatttgtgtaatgtgcagatgagacgggtgaagaatagcttggaacagaagaaaatcaaacttcagtataccaaagaggcagtggatctccttgctcagcttggctttgaccctaactacggggcaaggccggtgaagcgagtgattcaacagatggtggagaatgagatcgctgtcgggattttgaaaggagattttgcagaagaagataccgttcttgtcgatgttgaccacttggctagtgacaacaaattggttatcaagaagcttgagagtaatgcttcagctgaagaaatggccgcttaattgcacaaacaaaattagacgattcggggtttagcgtttataactcttttgttctgtcttttgtagattcgtactttagtgttgctctctcttctaactcgtacggaatgtaatgttttgaggattatcttttgccgacaaaagtaaatgggaacacaccgacttattcctccgttagcatttgaaattatgaactttatggagcttttaaggactcacgtaccaatgtggtactattagaatttgtcacagatctgattttcaagtaaggagattacaaatcttacaaaatcaaaattgaagaaacgtttttgacttggaataataatttttttaaccacgttctcatgtcgctagaattgaatcggatattcggatccttctctttaatagcttccgacattgaagtatttgtttattcttaagtaagtttcttattaattcgtgtgtctgatatttaaacgagttagtattcttactagtgataaagtattagttagggactgagaaatgtcggtcgtgtcatgcaatgagggaaacaacctggtacatggagtctaaacaattatcgttttcttagaattgtacttttgaaattgcgaaatgagcctacaaattataatcaaaatttagctatatttttactatttgaatgattgaactaattttgatatacgttcgttatgttcgtcaaaactacccaaaacccgactatatataaatgtgaaacttctaaattctcaatcttaaaattaaatattctctagatctccacaatattgtttttgtaaaatattcgataaatctctttaaaatcattttggttcctctgttttcgcttccaaacagaacaaactcttttctctctccctctctctttcttgcttcctcaagctctatagaactgatcggcgataatg

SEQ ID NO: 3110 - DNA, 3000 bp, Unknown
  misc_feature (1)..( 3000): cDNA_ID_3022153_gDNA_ID_1620626_Annot_ID_47142 3000 nt of promoter + ATG
aacgacatattaaattagatgttgttattaactattcatgtattcgcaataatgtgaatcatgtattatactatccgtgtgaaaacgatacgtttataaattagggtatatagagatgattaatattttatatatacacgttttacttagaagttcatgacaatatattattctatcgatttcaaaatattttactttggcttaaccagctgggatatcaaaaaacaaaattattttacaatatatatcattatagtttattcacttctaacttgttacatcctactattacgttaaatacaggaggcatgaagccttcactatatataaacagcatcgcgaggttagaagatcttacattatacattctaacattggtaagagatggcaaaccaaagaaaaccaatccttcctctattacttgaaaagaaaccagttgagcttgttaaaccctcaaaacacactcattgtgaaactctttccctctccactttagacaacgatcctttcaatgaagttatgtatgcaacgatttacgttttcaaagccaatggaaagaacctagatgatcctgtctctttgcttaggaaggctttgtccgaacttcttgtgcattactaccctctttcgggcaagctgatgagaagtgagagtaatggaaagctccagttggtttatctgggtgagggagttccatttgaagtcgctacatcaactctagacctctcctctctgaactatatcgaaaacctcgatgaccaagttgctttgcggcttgtacctgaaatcgaaatcgactacgagagcaacgtttgttatcaccctctagctttgcaggtatgttttcattttctagatgtattgaaagttatagatttccaaaatattataacattgaatatattatcaatacataatcaagataatatattgttcactttgtttcttttgtaggttaccaagtttgcctgtggaggattcaccattggcaccgcattgacacacgctgtgtgtgatggatacggtgtggctcagatcatccatgccttgaccgagttggctgcaggaaagactgagccatcggtgaagtcagtgtggcagagagagcggctggtcggaaaaattgacaataaaccaggcaaagtgcccggtagccatattgatggttttttggccacctcagcatatttgccaactactgatgtcgtatgtcattttgtcaagcttattttatactctctccgtatcaaattaatatcatataattaaagtaatgattcagctattaatatcatattaagtgatgatttagcttattagaagatcttgcaaatatttatttttgtaataattaggttaatgatttttatttatttattatccaacaggtcacagagacaataaacattcgtgctggggatataaaaaggcttaaagactctatgatgaaagaatgtgagtaccttaaagagagtttcactacttatgaagtacttagttcatacatatggaaattaagatctcgagccctaaaactaaaccctgacgggatcactgtcctcggcgtggctgttggaatccgacatgttttggacccaccacttcctaaaggatactacggtaacgcttacatagacgtctacgtcgagctaactgtgagagaactcgaagaatcatcaatctctaacatcgcgaatcgtgtgaagaaagccaagaaaacagcctatgaaaaagggtatatcgaggaagagctaaagaacacggagagattgatgagagatgattcaatgttcgaaggggtaagcgatggattatttttcttgacggattggaggaatattggttggttcggatcaatggatttcggttggaatgagccagtgaatttacgaccattgacccagcgggagagcacagtgcacgtagggatgatcttgaaaccttcaaaatcggatccatcaatggaaggtggagttaaagtgatcatgaagttgccacgagacgcaatggttgaattcaagcgtgagatggctactatgaagaaactttattttggtgataccaactaactttattttggtgataccaactaactttagttggtgcctgaatgattttctatgtctgttaatgtcttaatgaatgcttttcatttgatgtcagtgaataatgggtaaatatattcacgggtgaatatatgtaatactcaatatgttcatgtaatacttaatctgttcatgtcatgaataatgaataaagaataatacatatatatgtattgataataaattgatttgttgtgaaatataatgaaacaagcaaaattttcttaaacatattacaaaaaaagggaggttttcgagcaaaactagaattaataaaacaaatgcaacttggtttactactataccaaaagactcaaattgctaaactgaaccgaaaatcggtttaggtattagcctgcctatagaaaaacccagtggtggatcatcactggaaacttctcgatgaaatgactttcttctacaaacttctttttccctcttctccaagcttacgcttgtctccatgtaaaaaacctccgtcgtcttcttcctcctccttcataaccctaaaccaaaaaccctcatttccttcaatcttcttactcacatggcgctaaggagattatcaaagtctgtttcgtcagccatcaaagctcaatacactctctcgagaccctctcctctcctccgttctcgctctctctcttcctctcctcactacacctctattggccggccaacaaattcattcatcggaaaaatcaataactcttctatcactcatgcgactactactcatggtcaactcttccctctttcttctccgcgacgcttttgtactaccacagctcaggttcgtgctcgatttcagtgttagttgctcaattgtgaacttggaactgttaattttatggtttagtgataataggttaatcaaaatgagtttacggagatg

SEQ ID NO: 3111 - DNA, 3000 bp, Unknown
  misc_feature (1)..( 3000): cDNA_ID_1819518_gDNA_ID_1620626_Annot_ID_47144 3000 nt of promoter + ATG
agttcgtacaatagctactaaacaactcgattcatcaaactctataccacatgagcaagatcgactaaccttgtgaaagagaacgagagagaaattggaaaaaaccctagccaaaattacccataagaataaacaattgagcatcgaaatgtgagtacccagaagtcgaattaacaatctcttaccgcaatatcatgaaaagatcaaaactttacaaaacccaaacagtttcaaactcagtttgtaacgaaaatttgaaagaaaggaagagaaaaatagtaacttgagaagtaatttgagaagtcgaaagcgatattactagtcgaagatagagtaaaaagtgaagcagagaagagtgtggaagagaaggagaagacgaacctttgaaatggttgggatctgtttttgcagaagaagaaagtaatccgaaacgaacgaaacttgaaaattcagacaacacaaatgatttctaacatttagcttaccaattttaacttatggttattattaactttaatacacttcttaaggtataaaatatcacctctaattaaattaccttctcaatatcattattttttcacacacaaaaaacttacttttttgtttgaaaaaattataattacttctaacttataaaaataagtgtcaaaaataatgacaattacttttcacttacccaatattgttattatataaacttagatatttttaaatatttaagtttatttaccttttcccctcaaagaggctagaggaagatttaacatgctttgcttggtttcgctatttatcatggagctgaaatctcttgacgtgggttcactccttgttggtgctaattatggagaagattttgagacaaggtttaaaacaatattgaaggaagtatatgcttcgaatgggcaaacaatcttgttcattgatgagattcacattgttattggtgcaggtgctctttctttttttgattcagattatacattaatagatgacctttttatttatacacaatacttgtatgcatttttttactctgaccaagtaaaacgttttgtataaatggttttgatgggtggtaactctataaaaatgatttttcatctcattagaagaatactgcatcgaacaattattgaggattaacactggagatgaacaattatgtctactaagtatttcttgtataatcttgtgtctctatactaatgagttattactcttgtgtaggagctacttgtggaggcgtggagcaatagaagcgagcaacttcttgaaaccgttgcttagaccaggtgagctgagatgcattggtgcaactatgtttgttatatccaccttaacttatttagcttaaacttaaccaaccaaacccactaacacttgtggggctataattcacttacggcccaatggccttattacaaaacacaaatccaactccgttcttatgttggatttgtgtcgttgactcttcttcctcctttggtcagtggtcacgacaacttcttattctcttcttcctcctttggtcacgacatcttcttcttctcttcttccaagcttggcttcttctcttttcttcatcttcttcttctcatgaagctttcttcttcttgtaggatttaatctaggattcaatctccaacgacattgaccaaaaatatatagagagatatccaacgctaaaacgtaggtttcagcaagtgttatgtagtcaaccaactgtcaagaactaattgcgtagcccttacaatatgtaataacaattgtagcttaaattacatgctttgttttcagattttaactattaaatttttggtatatttctttgaaattttttggatagttcacaaacacattaccatatttaaatctgaattattatgtgacatcaatatatagtataacaaatgatgatgaactataatttaatcgtatggatactagcataaagcttataaaatgcgtgctccggtgttattacacgtggtccaagttcgactatagaatacaatacaaaggacacaaaatcttcatgtacaatcaaaaattatcaaccccatatcttatagttggaaacgatccaaaataggttatataaataaaatatataaaatatgtcaagtataacggtctcacatcacccttttggcttttggggaaatatcggatttatagaaaaaaaaaaataataataataattaaaacaataaaatatttggtctgaatcttttttgagatactgttgtatcataacaatatcttttagagtcattcaacatcaatccacatgtattgcactggaacatgcattttaataaggttctatgtttgttaaattatgcagtcatgtaataatcaaattttatgataatgtctttgtaaacgctataaactaaaaatttataatagttacatgtgtaaaaaatgttgtcgcttaaccatgtcatatatatgttggttggtatacgtggatatacgatacatataattggtgtagttagctctcattttttcttttgttttgtacattatcgtcgtacgtcgactttgtatactactttatactccgtcaaactaaaataacttaaaatataataaaattgtattcattatattcacagaaaaataaaaatgttattcttgtaacaaatcaaactaaaaaaaagggaaaataagaatgactaaatgtttatgaagacgaaagagagaaaacatttttgtatttttattgacattttttagcagtcaagatgttagggtgaggaaatgaaaagttaatagaaacatgtatagtaaaagagacattttttcttgattgtagatagtgaatgtacgagtatactatcaccattagatttaaaaaaaaaaaacattttgcagaattattcataaactaaaatttagaaaataatgtaggagttaggtgaaccgcttatatataataaagacccaattagtaagtagatcaaacacaaatcaaatcagccatacatg

SEQ ID NO: 3112 - DNA, 3000 bp, Unknown
  misc_feature (1)..( 3000): cDNA_ID_3031914_gDNA_ID_1620626_Annot_ID_162487 3000 nt of promoter + ATG
tatggttatcttaatttgtttacaaaatatggttattcagttaaatcaccctatactatattgtccctctacaaaaattaggtattttcttaaatcttgactttgggggagttggatattttcgacgaagaatatcaaaaatctaaaaagacatgttttggatatgtaaaacaaaatttagaaaagtatcttatatataaggtatgttatctccaaaaaaatgtaatagtagatttgcatttctagtcaatatgttgatattaaacaccaataaaatagtcaatgcactaattaagttgccattttcatgcatcaaaacacactatttaaatattgccatccaccataagattttaaaataaagaaaacattcaaaacatcacgttcttagaacttaaaactaaattgacaaacacaaaatttcaagctagggatatgtcggcatcaaaagcaacaatgctcattttgttcgctctctttctttccggtaagtcttgattcctctcatcttcttttatataaatgaaactgattagaaacatagcttgattccagtcaaattttattttaaaaatgaacagacatattgttggtgagcattcctagagctgaagctcagttgatagttccatgcaagacatcagaacaatgtaaatcgattcgatgttctaatggaagcgcacaatgtgtgaacaaacaatgccaatgtccaagcctcaaacagatttactcggtgacggatgtgtcgtgcaagacggtctctgattgtgttgcttctcatcaatgcccgactggtttatctgcttgtattgaaggaaaatgtatttgtttgccttagtatgttcaaattatattatttaatatatacctacaagttaatttttaaaaagtttagttttatagatattaatttgaattcgtttactatggggaactctatcgacataaaaaagaaatctaatcgtagtcaacaaggccagagtatatgttggtaacgtactctatttactttctaatattacacaatcgactactacgtgatataaaagagacatctctacaatgataatgtgaaatattcattgttgatactttacgaaaaaaccatagtttcgacatttatattaattatgtatatattcatcaaagttatgttaaccaacataaatttcagttacaatcaaattttttgttgtaatatctaaggctgggtaaaatacccggacccgaagatccgaactagctcaaaatatctagatgaaaaatactaggctttttcttttgaaaaactaaatcagcgaatgagattaaccaatgctaccgacggctaacttatcgataacatttttcttctcttatctcgatgaaagatgatctctcgaaaccaaatacacaagacttcataatctagtccgtatacgccaaaaaatgaacctcataaaacacttcttgatgcggcgaaaacaattgatgcataatggagcgcctataaaatccttataaaagaatctaatctcaatcagtttcggaaatttggagacaagaagcgaaagctaaccatcttgataaacatcaggaacaagaatgacacttgatcgaccaggttagcatccacaaatggggctttgttagcttaggtaagacaacaaagagtgagtgcgaagacaaaggttggatgaaggctaacgagaaaccactttcaagctaagcctgtggcatcgaaactatagggagcacctaagcgataactagatttgggttgggagaaggcaaatatcaatggctttattattgactaagcacactgtcgatctagcaaatccggcaaatcctcattgcatgagccacaaaacgaatagatatgaaacgcttgaccgctttcgcatagaacacaacttcacaacccaaaataacaagagaaaatctccagacgaatacaaaaaaaacaaaaaaaactctgcatctcctatgatttaaaaccaagaaactaaagcagataagaaaaggagaagccactcacgacattgacgagaatcgctgatcacagcaccagagtgacttcccagccacaaaactggaaatgagctaggattctactgttgtttgagtgaaagagcacacactttggttaaaatgacattagatcatcgttctaaccacctgccattgctcttttaattatataattaaatttgatttttataaaactacaaaatctcttgtaattttcaaatttattacctttttaatccaaagcgatccaaaaataaatgtaaattgaagaatagcaccaaaaattgataaaattataataatttcgtaatttaaccaaattatcaccataatcactttggtaatttctaaaaattactttaacttcgataacataattactaacatacaaattaaaatcaaattttgtaaagagtatcaatcttccattacaactttagacttcaaccattaccatacaaccaaatgaaactgaactatttgtatataaaaattattctattttggttccaatataaataaaatatctagtttacattttttctgtgtttcttctaattatatagatttagttctataaaaatacaaaacctctaagtaattttcaaatttattatatttttacccaaaacaaccctaaaataaatgcaaattgaagcgtggcactgaaaataaaataaaaatatcttaccatatttaaaacaaataaccagattcagtgaattaacagaaacggatggtcaagtcgacaagacaaacaagtgctaaaagaacacaacataactcttttgcttaagcctcaaaaaattgtcattaacccaatttcccagaaacttcaaaaacagttgggggaagaagaagaagatgaaacgacgaagaacccttttataaagtctcaatcttctaatccaagatctgccctttttcagattctatctcaaagctttcctcgatcttgtgatgtattgaagccggagactgagagag

SEQ ID NO: 3113 - DNA, 3000 bp, Unknown
  misc_feature (1)..( 3000): cDNA_ID_2143028_gDNA_ID_1620626_Annot_ID_162485 3000 nt of promoter + ATG
gaaagagttttgatgcacgctcaagcgtgtaacgcacttcccaatctcaagcatgcttgctctctctaaagcctgtctcatttttaaaatccaaaatattgttttgtcaactaatttaaaacagttttttttttagaaagctatttaaaactgtttcacaagatacacttttcgaatattcatagtagtttttgaaaccatactccaatcaatctgattacttgtaattaaagtatggtcttgtaatattaatttccaaaggtgtgattttataaaattcaaatttaaggcgataacaaaacttttgagcttactttatccattgagaggcaagttttcctacgcaacaacagttgacacggaagtattagaacacaaaaatagtaaattcaaaggattcttctatcaaaatataagcttccaactcaaaactaattggtaatgagtgaagaacgttatatcttataaatattacttaagattatactaacttctaatatgtgacaatatctctaatacgatccttctaaatgatggcttttctatccattagtcttgatatgtttgggcatagattagtggaccgatgtggattgggttgactatatgcagatcggacactgataccatattagattatgggcttccaactcaaaatcaatcgggaatgagtaaagagacttatatcttatatataactgcttaagttcctactaaactttcaacgtgggacgatatctctaatatcgatcaattcaataatttcaaccatgccgaaagctaagacgattatgagaaaaaaattgttttcttatacgccgagctggaaaaatgatccacgacagtctatcatttctatgccaaattatagtgaaaaataaagtcaagatgtaattaagagacatagtgtttatatttttggaaaaagatcaaaaggatgctaaaatttgaataccagataccgttacgatttggatatcagtggagtccgagtgcaattgtcagtttactatcttttgtaccatatattttagagcgtttttcttaacgttatcatatatttcgatagcgtttttctaagaataatgatatagtcgattttaagagtatgtacaaaaaacataggctactttatggtttctacaattgatttgctaagtcaattttatcatttgcttgtacatcagtgcatgaaaggagaaaagggaaaaacagtaaacagatatgtattatctacatgaatggacatatcttagacctcgtgaagtaccttaaaaacttataggagaaagagggttactacttactacctcatctagacctcgattacgcgatcaaagcaatactggatatcagatagatgtggtcttatctatcaaaattgtttagtccgttttcgagtttgggacaaatctccttagaaaccagctagaatggcttaatctatatataagataataataagtttaacaccaagacttgccgaagttaagttacatgtaatgctacgagattctctgatacatatgttataaagtgaagttaaaacacttttctcaagaaacacacttacataaaaattagtcacgaaggtaaacaagtgctaaaaaaaatgaagggtcttctccaacaagaaagaccgttttaacactactacttggggttcgtaaattaatacaaaatcctggaataaaaccatttatcatcttatatccaaccaaacaaattaatataaacactgttaaaaaataagaaatgaaatttaaattaatgatagaaataatcgaattaggtgttttgatttttttttctgtgactacaatatatttaaaacccaaaattttacaaaaatcgttttagtaaatcggtttaaatctgaaacaaatgctaaggaaagtatttaacagtgattgacattatggaaataatttaattttttttgtccgtttaacagttggacaatactagattaacaagaatcaaaatgtatctccacaataatgatgcgatataaatgatagtataaaccaaaatctttttacttaaacactttcctatctctaacataattactttttaatttcccccattcaaataacacctaagtattattttacctggtttttactttttaacacaatttaattgcaaacaagtagtgtgttttattagtttaaactttaaagtctttagactagagagaggaagtggcaataatactaatccggttcagtcactaaaccagtgtacaatatatggttggtcctacaaatgataatttttgataaacctaaaaaaaatggtgtattatatatcacctgaggatagggatacaagtttcttttagggtggaaatccttatatataagtgtagggactactcaccaaaatcaaacaactcacttcaatttgtaacggtttaaactcggtacaatatgcggattttgattcggtataatgacattaaaacaccactttaacaaaaaccactagacaaatattagtcatttcggttcagtttcgtttaaaaattacgaattttcgtataattgagtttattattccgtttggtttaaaagaaaccatacaaaacaaaacaaaccaaactaaaccaaattggttatgtttcaaagattctttctaagtctctcaataaaatgttatttgttttgtaatgtaaagaaaaaaaaaagaattgcagaaaaagagtggatagtgttaagaagatgatcacacacaatttccatagccatttatagatagctagaagagctaaagaagattcctttttttaactctgctggaaaaatctttttgtctctctctctaaatctaaatattatatactactactctctctctctagaccccattcacatatttaatctttaactcatttctccatcgacgttcttgcacatcccactttctctctttcttcaacttgcaaaaaagattaaaaatccaatctttcgtttctgggtctgttgaaaaacgatg

SEQ ID NO: 3114 - DNA, 3000 bp, Unknown
  misc_feature (1)..( 3000): cDNA_ID_3070714_gDNA_ID_1620626_Annot_ID_162484 3000 nt of promoter + ATG
tatacatgtttctattaacttttcatttcctcaccctaacatcttgactgctaaaaaatgtcaataaaaatacaaaaatgttttctctctttcgtcttcataaacatttagtcattcttattttcccttttttttagtttgatttgttacaagaataacatttttatttttctgtgaatataatgaatacaattttattatattttaagttattttagtttgacggagtataaagtagtatacaaagtcgacgtacgacgataatgtacaaaacaaaagaaaaaatgagagctaactacaccaattatatgtatcgtatatccacgtataccaaccaacatatatatgacatggttaagcgacaacattttttacacatgtaactattataaatttttagtttatagcgtttacaaagacattatcataaaatttgattattacatgactgcataatttaacaaacatagaaccttattaaaatgcatgttccagtgcaatacatgtggattgatgttgaatgactctaaaagatattgttatgatacaacagtatctcaaaaaagattcagaccaaatattttattgttttaattattattattatttttttttttctataaatccgatatttccccaaaagccaaaagggtgatgtgagaccgttatacttgacatattttatatattttatttatataacctattttggatcgtttccaactataagatatggggttgataatttttgattgtacatgaagattttgtgtcctttgtattgtattctatagtcgaacttggaccacgtgtaataacaccggagcacgcattttataagctttatgctagtatccatacgattaaattatagttcatcatcatttgttatactatatattgatgtcacataataattcagatttaaatatggtaatgtgtttgtgaactatccaaaaaatttcaaagaaatataccaaaaatttaatagttaaaatctgaaaacaaagcatgtaatttaagctacaattgttattacatattgtaagggctacgcaattagttcttgacagttggttgactacataacacttgctgaaacctacgttttagcgttggatatctctctatatatttttggtcaatgtcgttggagattgaatcctagattaaatcctacaagaagaagaaagcttcatgagaagaagaagatgaagaaaagagaagaagccaagcttggaagaagagaagaagaagatgtcgtgaccaaaggaggaagaagagaataagaagttgtcgtgaccactgaccaaaggaggaagaagagtcaacgacacaaatccaacataagaacggagttggatttgtgttttgtaataaggccattgggccgtaagtgaattatagccccacaagtgttagtgggtttggttggttaagtttaagctaaataagttaaggtggatataacaaacatagttgcaccaatgcatctcagctcacctggtctaagcaacggtttcaagaagttgctcgcttctattgctccacgcctccacaagtagctcctacacaagagtaataactcattagtatagagacacaagattatacaagaaatacttagtagacataattgttcatctccagtgttaatcctcaataattgttcgatgcagtattcttctaatgagatgaaaaatcatttttatagagttaccacccatcaaaaccatttatacaaaacgttttacttggtcagagtaaaaaaatgcatacaagtattgtgtataaataaaaaggtcatctattaatgtataatctgaatcaaaaaaagaaagagcacctgcaccaataacaatgtgaatctcatcaatgaacaagattgtttgcccattcgaagcatatacttccttcaatattgttttaaaccttgtctcaaaatcttctccataattagcaccaacaaggagtgaacccacgtcaagagatttcagctccatgataaatagcgaaaccaagcaaagcatgttaaatcttcctctagcctctttgaggggaaaaggtaaataaacttaaatatttaaaaatatctaagtttatataataacaatattgggtaagtgaaaagtaattgtcattatttttgacacttatttttataagttagaagtaattataattttttcaaacaaaaaagtaagttttttgtgtgtgaaaaaataatgatattgagaaggtaatttaattagaggtgatattttataccttaagaagtgtattaaagttaataataaccataagttaaaattggtaagctaaatgttagaaatcatttgtgttgtctgaattttcaagtttcgttcgtttcggattactttcttcttctgcaaaaacagatcccaaccatttcaaaggttcgtcttctccttctcttccacactcttctctgcttcactttttactctatcttcgactagtaatatcgctttcgacttctcaaattacttctcaagttactatttttctcttcctttctttcaaattttcgttacaaactgagtttgaaactgtttgggttttgtaaagttttgatcttttcatgatattgcggtaagagattgttaattcgacttctgggtactcacatttcgatgctcaattgtttattcttatgggtaattttggctagggttttttccaatttctctctcgttctctttcacaaggttagtcgatcttgctcatgtggtatagagtttgatgaatcgagttgtttagtagctattgtacgaactatctcttgatatagttgtaaaggttttagattgggaacaaaaaatttcactgtgatgtttgtttaggtagtagagttcaattgtgtgaaactctaatttcatagtttgcttaagtctcagaactagcactgagtctattgttatatgtgttgtttatgtaagtttgttgttattgatgggagatatgttttgtgtgcagaaa

SEQ ID NO: 3115 - DNA, 3000 bp, Unknown; identical to SEQ ID NO: 3111
  misc_feature (1)..( 3000): cDNA_ID_1819518_gDNA_ID_1620626_Annot_ID_162481 3000 nt of promoter + ATG

SEQ ID NO: 3116 - DNA, 3000 bp, Unknown
  misc_feature (1)..( 3000): cDNA_ID_3022153_gDNA_ID_1620626_Annot_ID_162479 3000 nt of promoter + ATG
ggttttagacaagagataaatctgaaaattagttacaaaagatgcattgaaaatgtaaaacaatattgtttttgaaaaaaaaactcaaaaccgacctctttgtgaaatagagggagtagtgtttaatttaaagaacaatttctcttaaaatcaacctatatataattcaattaaactcaatgatctataaactatcagttttgtagtcttaacttagataactaatgggttttccaaaataaaataaaattagataattgatagtgttaagcaagagacaatataatatttttcaacaatgaaaagttcgtttagctgacgctatatcaagttaattcatgtgaaaacgacatattaaattagatgttgttattaactattcatgtattcgcaataatgtgaatcatgtattatactatccgtgtgaaaacgatacgtttataaattagggtatatagagatgattaatattttatatatacacgttttacttagaagttcatgacaatatattattctatcgatttcaaaatattttactttggcttaaccagctgggatatcaaaaaacaaaattattttacaatatatatcattatagtttattcacttctaacttgttacatcctactattacgttaaatacaggaggcatgaagccttcactatatataaacagcatcgcgaggttagaagatcttacattatacattctaacattggtaagagatggcaaaccaaagaaaaccaatccttcctctattacttgaaaagaaaccagttgagcttgttaaaccctcaaaacacactcattgtgaaactctttccctctccactttagacaacgatcctttcaatgaagttatgtatgcaacgatttacgttttcaaagccaatggaaagaacctagatgatcctgtctctttgcttaggaaggctttgtccgaacttcttgtgcattactaccctctttcgggcaagctgatgagaagtgagagtaatggaaagctccagttggtttatctgggtgagggagttccatttgaagtcgctacatcaactctagacctctcctctctgaactatatcgaaaacctcgatgaccaagttgctttgcggcttgtacctgaaatcgaaatcgactacgagagcaacgtttgttatcaccctctagctttgcaggtatgttttcattttctagatgtattgaaagttatagatttccaaaatattataacattgaatatattatcaatacataatcaagataatatattgttcactttgtttcttttgtaggttaccaagtttgcctgtggaggattcaccattggcaccgcattgacacacgctgtgtgtgatggatacggtgtggctcagatcatccatgccttgaccgagttggctgcaggaaagactgagccatcggtgaagtcagtgtggcagagagagcggctggtcggaaaaattgacaataaaccaggcaaagtgcccggtagccatattgatggttttttggccacctcagcatatttgccaactactgatgtcgtatgtcattttgtcaagcttattttatactctctccgtatcaaattaatatcatataattaaagtaatgattcagctattaatatcatattaagtgatgatttagcttattagaagatcttgcaaatatttatttttgtaataattaggttaatgatttttatttatttattatccaacaggtcacagagacaataaacattcgtgctggggatataaaaaggcttaaagactctatgatgaaagaatgtgagtaccttaaagagagtttcactacttatgaagtacttagttcatacatatggaaattaagatctcgagccctaaaactaaaccctgacgggatcactgtcctcggcgtggctgttggaatccgacatgttttggacccaccacttcctaaaggatactacggtaacgcttacatagacgtctacgtcgagctaactgtgagagaactcgaagaatcatcaatctctaacatcgcgaatcgtgtgaagaaagccaagaaaacagcctatgaaaaagggtatatcgaggaagagctaaagaacacggagagattgatgagagatgattcaatgttcgaaggggtaagcgatggattatttttcttgacggattggaggaatattggttggttcggatcaatggatttcggttggaatgagccagtgaatttacgaccattgacccagcgggagagcacagtgcacgtagggatgatcttgaaaccttcaaaatcggatccatcaatggaaggtggagttaaagtgatcatgaagttgccacgagacgcaatggttgaattcaagcgtgagatggctactatgaagaaactttattttggtgataccaactaactttattttggtgataccaactaactttagttggtgcctgaatgattttctatgtctgttaatgtcttaatgaatgcttttcatttgatgtcagtgaataatgggtaaatatattcacgggtgaatatatgtaatactcaatatgttcatgtaatacttaatctgttcatgtcatgaataatgaataaagaataatacatatatatgtattgataataaattgatttgttgtgaaatataatgaaacaagcaaaattttcttaaacatattacaaaaaaagggaggttttcgagcaaaactagaattaataaaacaaatgcaacttggtttactactataccaaaagactcaaattgctaaactgaaccgaaaatcggtttaggtattagcctgcctatagaaaaacccagtggtggatcatcactggaaacttctcgatgaaatgactttcttctacaaacttctttttccctcttctccaagcttacgcttgtctccatgtaaaaaacctccgtcgtcttcttcctcctccttcataaccctaaaccaaaaaccctcatttccttcaatcttcttactcacatg

SEQ ID NO: 3117 - DNA, 3000 bp, Unknown; identical to SEQ ID NO: 3109
  misc_feature (1)..( 3000): cDNA_ID_1819530_gDNA_ID_1620626_Annot_ID_162478 3000 nt of promoter + ATG

SEQ ID NO: 3118 - DNA, 3000 bp, Unknown
  misc_feature (1)..( 3000): cDNA_ID_2142994_gDNA_ID_1620626_Annot_ID_162473 3000 nt of promoter + ATG
aatttttttggtgtttgtcgacaaaatatcaatactacaattaatttttgtcctactgttacaccttttagttttaacttgggtaagtgagtcgttggactaaaaatcacgatgattatgtggtcaaatatgtgtatcttggtgtatatttgtattttctgtgattaagatgattgcatctttaagacatatttgtagctttaattgaagtcaatactgatatttctgaagagattgggaaatttggaagacatggaatattggtgaactttgtttctgactttaatgatttcagagttgttggttccagctttattagttcgcttcatttcatatattcaaaaaaaaaaaaaaactttcctttctcatcaaatctattgatagttctaaaataaaacgcaaaatcaaacacatttgtacatcattttaataaagaatgttcaaatgagagtaatgtgtattatattgtaacatggaaatgcaattctaaacgcaaacgacaaactctgatcgaagaaatgtgttaattgattagggaattgtcacggagatatatgtaggaaatcaaaattgttaacgaagtgtctttcaaaatatatcttcacaaatacacagttcgtaaatgcgtaattatttttaatctaacagttcgttctgtcacatggatctttcagaccagtacagtcgtcctttgcaaagatttatcaactttctaacaaaaagagaagctacagaaagtagagaaaattttgtacttttgaagtaaagaaaaaaaaaagaagtagacaaaattgtgtaggattcttcacggtttttgcattcttctttattaccaagtcttcaatattttcatttcaataaaacttcccctttcttacaaagaactcttattttccatttttcttcacatttttccttgcaagatcactcattttaatttatgtaaatgatagaatttgaagatccatacttcagcaatctgtttttcttggcatgttgagtttttatcaacaacaccaattattattttattttctctggttcaagaaattgtctaagctccattcaaacattctgtacttatatataaagtttacatcatcacatattgtgcatcaaatagcaaaggttttggcaacatacatataatatgaatcgtgcttgtacacacacacacactcatgtatatatatgtatttattgtttacccttgaacaacatttttaggtaagggggtcttctatcatcaggaaaacataaggtagatgaggtaacatctttagattcgttcgaagtagaactcctatgcatttgatcaaattgttttctaattaagtaatgcaacatttaaaccatgtgcagcacaaacgatggcttatttaggtggatttgcaaatcttttcactctttagggcatattccaatcaactactgcttgaaatttgactgatcaatgtgatgcaaaattcacggcatggcttgttttagcagctagtttcgacaacctaatcacccgaaaataacaaacaatcggaaatgcagcgcgataagtagatatatgtctgtgatcacccaattagccacaaaatagtgtactatgtttgtgatgttacccttttactcttcaattttaaatacatatctcgttatagtatttttttttttttttttttttttttttttgggtaaaactcgttatagtatttcgttagagtattaacatttgtgtaaacataattgttgtcattaatcgtgggtccaaatcatgacacatcacaaagtttcttggacttgttatacatgttccttaaaatgattagttatatattatcttaataatcctgatctttaaatcgaacaaatttagatttagcttcttttttttttgttaaaatttagatttagctttacaagatgtacctttgattatgatagaggaaaataacagtatcccacccaaatacacggttataatgagattttcatgtatgtagaaaaatcatcaaattgtaagaaaacaattggaaaaattgagtgtgttgttttgagtagcaaaatatgaagaatccatcaaaccaagaaattagcaaagatgtagaaaggaagatttggtcgatagattcacggacgtattagaaatgaccactttccgatacaatcgtcccaactaggaaaagagtcaaagcttttcgaaagaaattaaaaattcctctatgaaaaataagtcaagaaattgttttaaaaatatttaagggccaagtagaaaaggtcacatcttgccttaccaaaaaaagacagttcattgaaattttatcgggacaagtttactatttttaattaatgcgtatctacttcaaaacatgcgtagcattaacggcgattccacgtcaatttcatggcgtccacaatttttgtataaggataagagagttacttttatatttttaaaatctattctgaaaactttaagaacttatttacatgaatacatggtcagaaatgtgcgagaccattgtttaactggttaaaaaaaggatttatttacatagaaatggatttaaatcacctgttacacttttattgaaatcattctcttatgatcattgcatcgtaactcgagatatttatttttcatgctttagtttgttaattatatctagttttatcatgttctataacccttttttaggcactcaacataaatagcaaaccccgatttagttcaattcgcgaatcaatttcgtcttggttattcttttggctttggtcgtatttaattatgctagctgccagatcttaggcacatcactttgtttagataagattagaacatttcttcacagttcacttagtcgtcacatatcaaacaaagtagacaacattataaataaaaaaattccacaaataatttctgcttatatatatagatatgtaaccaaatcacaaaattccacataattagtctcacatatacttgtaactagtcagacaaagacaatg

SEQ ID NO: 3119 - DNA, 3000 bp, Unknown; identical to SEQ ID NO: 3107
  misc_feature (1)..( 3000): cDNA_ID_1808527_gDNA_ID_1620626_Annot_ID_162472 3000 nt of promoter + ATG

SEQ ID NO: 3120 - DNA, 3000 bp, Unknown
  misc_feature (1)..( 3000): cDNA_ID_3070726_gDNA_ID_1620626_Annot_ID_162470 3000 nt of promoter + ATG
agagaaacccaggattaattggagattttagagaaaacccattactcagattcgcgaaattcgatattccggtggagaatttcaaggaagggacgagaaaggttgctgaggaattaggtctagaactgttgacgactgtagagaatgttccgtacgaagaagatgaagtagtcatggaaaccatttttggttaccggagacgagtttatgttcgtcttctttcgaccagtgttacacgttcaatagtgaaaccgagagatgatatagtcgagacacgacgcactttatatcatgccaaaatacacattaactaaaaaaacaaaaaaaactaaatttttggaccataaatgtgtttttaattttatttactttacaaaaaatataatgatatttttcttcacaatttgttttcaaattcgttttggagacataattggaatttgttttgcagtatagttggattttttgcagaattcaattggagacaaagttggatttttttatttacaaaatgcttattagatttcttatgattacttaaattctggagcattttattctatgaaattactgcaaaattatatttattttatgattatttatcttctgtagtattttatatgaaatcactgtaaaattctatttaattttatgattatttatatgctgcagtattttctatgatttatggtagggttttaaattaaaatattagatgatatttttataatgaaaaattttccttaatatttttgcttttataattttttttttttaaatgggacaaagtaagtaattaagttgagtggtgcaaaatccacgttcattcacgagagcattttggaccaatttgaggcacatatttaagtgttatgatatctatgttcttgtcccaaaaattaaatggattttgttttggactatgtttcatcctcaaatttttgtttagttccttggttcaatccttatcctaattattgtctctggttacaaatatgtcgcactcaaacgaagagttataatctaaccggtggcaatgcctatccattattattattttgtaatatatattggaaatgttgggccacataaacaaatagataagatgtgacagccaaatttagttttcttattagtactttagtagtatactcattagaagctacctctctccattattacaatatcaatctcaaatgttgttctatataacatgtgtttactatagaatatctttattttgttcaatcagtatataacaattcccttttcgaaattgaagctaaggaggttttatgcgatgagggtgatacttacatgctcaccgaattcactcccactcgttattccgattcggtttttcttcgtgaagcgaggctcttaaagtatctgcaccggtgatcaaagtgaagtgtcttaagttagattaaaattttaatcaataaattgtaaaaatattaaacccaatcaaaaagtgacatgtaagtaaaaagtgtctttaacatatgtttcttctcttttctcctttcacaaatatttcaaatttatattaaaaaaaaatagtataaacactcgttaatataatcgatggaggtgcttttagaagacgtcgaagctatcttcaccaacatgggtctaggaagacctctctcgagagttccttgcctcattgaaagtcaaaaatattatatttttagctatttaagatatttaaatgttaataatgttgtaatacaatatttaagtcgtaaatatttgatagaccacataattatttttgtgcttcaagcctctcaaaactaaggaccggctttcacttggagacaaaaaatcttctgaagttcctttttcttgtatttttttcttccatttctattacttcacatacctaagtgcaaaaattgattgtatcatgaaactatgtatgttcgatataaaaacagaaatcataaattttgttaaatgccaggtaaaaactagcatatgttaatttgtttttgcaatttatcctaccataatactctttttctgtttaaaatttttaatatacttttagccaacgacaaaaccagtttatatgaaagttaagatgacaaaatactaatggtctacatatagcaaatacacaactagttaaattcttctgtaattttgctgtttacaatgacgattacacacattcttaaagctgtgatgacgaatcagagaaagctttaaacagctgtaaagattacacatctcaagttttagttaagtaagttattaacaagaaaaagttttgaaaaaagtaaagacctttaatagttttcttttctcggacaaaacaataaataaaaagaacacactttttttatcttttgtccttaggatttgattgtacatacatctgatctcaagtgatttcaagtggttggttctgttccttttctcgtccccgatcaagtttcttctcctaaactccagaatttggtcttgaagatctctaaaggctcttcctttttgttcatttctctacccagatatgtaagttgctagcttcttctgtcataactttaatatctgaatctttttccgatccaaatagtcaaatattcgcatctaggtcaaatcgattcaaaaccctttttgttgattgatgtgctaagtagttctgagttgattaagtctatcagtttaagagaaaaggattgtgtaagattatgattcgtacaagttagcttctttcttgattaggtccactgtgaatcatgcacacgtttatgaggaagatattagattgtgtaagattctgattggtttgatggtttcaagttagtttctttgttgattattgattgctgagtagttctaagttgattatgtcaactctgaatcatgtacaagtctatgagctagaaaatgaattgtgaattgtggagctaagaatgatgttgttgttttggctgaaagcgatgggtacatacctaagttctccgaaaactgaaaagttatcagaagatg

SEQ ID NO: 3121 - DNA, 3000 bp, Unknown
  misc_feature (1)..( 3000): cDNA_ID_2993328_gDNA_ID_1620626_Annot_ID_162469 3000 nt of promoter + ATG
gatgcaccgggaaactgttcccttaactgactcattatgcggctcacataaactctgtaatcttcatcttccaacatatccgtggttaagcagcaatcaaagactgtaatacaaaaacatcaaagttcagcaaccttatagagcaatcttatatttcgtaagcagcttatagagcaatcttttgtatctttctcactaaaatagtctatttctcagagctaagcatggataagacaaggacgaatttgagaagtcatgcaacacagtgaacatacaaaacctgaaaaatctatccatgagctaaatctcaccgatcaagaatcttaagctatcaaatgttagattcagttcaattaacaagcctaacaagaagtacactataaacttaggctaaaattatgatttttaagacctaaaaattcaaactttctaaaatttaatactctaagagcaagggataagacaagcaaaaggatttgagaaatcatgcaacccagtgaccatacaaaagaaactgtttcctgacaattctttgagaatgagacatcttaagctataatagatagactttccaccaatgagcctgagcctgtgctcatggatagttaacagaatccatgaactaaatctcacccatcaagaatcttagtctatcaaatgttagattcagttcaatcaacaagcctaaaaagaactagaaactaaaacaggacactacacttatcaaaatctgatcttaagacctaaaaactcaaactttctaaaaatcaatactccaaagcccaaagaagagcaaggataagaaagcaaaccctaaacccatcacttaaaagaagaaagagcataccgtaaactctctctgagatctcaagcaacccttcaggaggttttctgtgaaagaactttctaaacaacgccattgagaggtttctttaaatgcttaactcaaaaaagcagagaggtcacacaatccctagaaataatcacttatgaccaaatgcgacccacattgcaggaaaaaccccaaataaggagaaaacaaaaacgagaaaaatgtcaggaagaaagaaggaagcgtgagataatcttattgctgggtctttaaggaacaatgcgatgtgggttttgtttcttttgtagtttggtggtttgtcttgacatacacactttcaatttcttccgttttggaattggaaacttagctttcaatcaaaacagatgtttgatagctctgcacatgcgagaaagaagaaagggaatgatgcagagagagaagagagagagtttggttatcttgggaaaagaggaactagggtttttctttgattctaagaccaagaagaagatgatatagctattgagaaattcagacagagattgaggatgatgtcggatttcagatagaagggaaaaaaaagaaaggaggacccaaagatctgttactttgtttaggactatgatacatgtcttccaatattcttttttgagttatttaagatttgctttcttttctttcctaaactcggaatttgcaatttatttccttttgccatgacttcatttaaaaaaattaaataatctttgaatgagtacacacttagatatcatagtttgtttttaagtcattaatggaaaaatacaatttttgtaattttatatttgttagaaataattttttagctaccgattcaaccgcgaaaggtagattatggttcgttacatatatattgaaccaaatcgacggaatacttggtccgtcgaaaaagttaattggttttaagaatattggggtcacatacaaaataaaactgggatttttggtatatgtataaattcatttttctaatttaatatttacattaaatttagacattttaaatgaaaagtaagctattttttatattttttgaagttcacaaaaaacattttaacgattttgaaaagtagatttcactttaattattttttcgttacactttttaaccaaattacataaaaaaaatgtttcattcatcggccctgatcacttctcaagttttccaatatatgacattattggaggtaacaagatataatacactaatatgactgacaaactgcacaagacattttcttcatgtccctatatatggttagggagaccaaattcacctaaacaatactatagtttacggggtgatgctagacatgtcagtacaatagtctcaatcagtgggaaacgttgcacaaacggatcatgtagctgagtaaatgagttgatgcctcgttagttggtaaactcatgagccattcttgctattagttaaaccaaatcccttgtataaacacgcctctcatagtcatagatgagcttatgtcttgttctagtaaatgttataaagaagataactcaattgataattggttttagcacttggtccttgctctgttgattcgaaatccttattgaaaaaagaagaacaacgtaaattccttgttaaaatttttgaaaatttctattttctttgggccaggagtgatctcaacaaatatatccgaaaatgtaaaggtgtgtatacgtatcaccccaatagctaataggcccaatacggcaatacccaaacgtcaccatcaccaaatagaatgactagattttactttgtttactacgtttattcacgaacaattattttgtcaaaattaaaagcgagacaacgagaaacactcatagttttgcctgacacacacaacaaatgtcagtatccataattacattgtttcaaattttctctaacggttacatcactcgcaacggctacagtaacaaacatttaacgtttctttaccttttcaaaattcttcttttttcacaacaaaacaaaaagtaaataatctaacggctagttttcgaattttcaccactataaaacctcacaagaacctcctcataactcagcaatttccaaaacaacattcctaacactacactccaagcaactagcttctctactactcaatact

SEQ ID NO: 3122 - DNA, 3000 bp, Unknown; identical to SEQ ID NO: 3114
  misc_feature (1)..( 3000): cDNA_ID_1819514_gDNA_ID_1620626_Annot_ID_47145 3000 nt of promoter + ATG

SEQ ID NO: 3123 - DNA, 3000 bp, Unknown; identical to SEQ ID NO: 3113
  misc_feature (1)..( 3000): cDNA_ID_1819510_gDNA_ID_1620626_Annot_ID_47146 3000 nt of promoter + ATG

SEQ ID NO: 3124 - DNA, 3000 bp, Unknown; identical to SEQ ID NO: 3112
  misc_feature (1)..( 3000): cDNA_ID_1568553_gDNA_ID_1620626_Annot_ID_47147 3000 nt of promoter + ATG

SEQ ID NO: 3125 - DNA, 3000 bp, Unknown
  misc_feature (1)..( 3000): cDNA_ID_1819608_gDNA_ID_1620627_Annot_ID_47153 3000 nt of promoter + ATG
aaccgagcaatttaggatgggatcaaacctcgtaaatggggcaggttcgctcatagttatggacatggccgtagaaagcaaggtctactttgtacttctgccacagtttttgtaggctttctcttcccataggctcttcaaaggttccttctttgccataccaatcattggtggaataaccaaggacacgatgagctataaaaatgagccaaggctgagtctttctatcaacagtggcaagacaattctcaatgaatttgtattgctccgtgccttctctccaatcgtgttcactgtctgctacacagaagcgaaacattccataatctgttttgtacctgcccattcaaccgaaatttgtaagataccgttctgaaacttgcaagaaaatgtcaatggtttaactaactttaccagaatttagctctgttctcagcaggaaagtagaacatggtctctgcaggaacaccacactctcctccggagtctgtaccggcataaaaagatccagtgtctggccaatcacgctcatggttgccactgcagtgaagaaaaggataacttaaagcactgcaagagtagagagtagaagcacaatgttgtagattttcttgttgactaacctggcgatcatgtagggtacagtagaagcaatgggctggacttgagctgtgaactgatcccactgggagagatacccattggaataagtgagatctccaatgtggaaaacaatgtcaatgtccttcaagtccttgatgacttggtctgttgtgttgagggaaccaggctggtaatcattgtactcattcgagccatctcgctcaccctgaaacatatttcaatcaaggaaaatcattttagatattagtctgagagcgcatggagatcataatggcctaaaagagacgataccatacctttcccatgtcaccaaatattatgacccgttgtttcgagtcttgtccaggataaggagaggacacaaaggtgtaattcttgctccaaattgtggaaccattgaccaagtcatggcctagcctgtatatgtatctgtaaaccaaaggattgagagttacatgtatgaaactatattagtgctcctggattagacgataaagaagcaaactaaagatttcatactcgcggtttggccaaagttctttcaagaaagaagtatggaagaaaccaggatcacgccaaccaacgccgcgagcaggattacctgtgtaaacatagcatgcatccacaaatcaaatctctagaatgatccagatgagtagtttcagatattccaggactgctggctcagagatcacagcgaaacaggacataccacacatgctgtttctgttaaaggtcaatgttccagctggtgatcttctagctggaagtccctttgcactccattcaatgaaaggaacagcctcatctatgttgtacccactagtccatgtcacggtcatctatcaaagatagaaaaataagcaagttttagctaaagatcccaaatattgtatagctgcttcagaagtctcaaggccattgagtggaaaaacttacttcgtcccaattcttccctaatgcaagacgcggatagacaggtgctttaggattgaagaaagctacaggattcgaaaccccgagaaggtgtggctgtgatattcaaaagatcaataattaagtccacttgatatacaaaatactaaactgagaaaaactatagttataacctacctcttgaactccattggaaaacagtgcaaaggagacatcagctctctgatttataatctggaacttgagagtcacattcccggacttcatgtaatctggatgagaattacaatacatgtactgccaaatagaaattaaaaggggaatgttacaccgggacttaaaaaaaaaaaaaaaatcactggtaaatatgtaataaaccaaaccttgatgggagaagagcatatgtaaggagttttctctttgccaccacttgttggccaacagttacccgaactaacaaacaacaaagacaagttaataatgcacaaatggcacgttcacaagttaacaaacacagatgcagattagaaaaaatactcgaattttgctggagagaaaactcctatccaatcatctgaagtgggcttggggttggagatagcaagatttacccattctgtatcttcaccctgtaagatcaaagtcatgacatcaataacatatctatttaagtttggtttttgtgataattacgtgaaatcaagaaaacatattcaagtctatcatacaatttttttgacatttaaaaaaaccatctcttaagagttaatatatatctgtcaaacaagaatctgacaagaacaataatatgatgaaagaatttgttattggaacctgggaaccaagaacttgaggcgaagcgtgaagtttgacagaactatctaaagcaagacttgtttcgtaaacattaatttgagcaagtgcttgatctccacgaccattggcatgatccaaacataagctcgagctgaacagtgcgagtaaacacagaagcacacctaaaactctagccatatttttttttgtttttcctttgttgtgactgagaaacaaaaccagaaaggtatatatatatatattataatcaggatatatctaggaatcccaaaattgattcatgtctatcgaattaaacaaaatcaaatattttctttcaccgtcaaatctttagtcaggaatattctaacagtttctttttaatattctaacagttttttcttaatgatagttcatactgttttaaaaacaaataatgataacggaaaaaacggattttcgttttattcagacttatgtacattaggctgatccgggtcggaccggctttgaaccggaaattaataaagcttgattgttaaatttggcaaccgtggcttcggtttcaatcgcgctgtaatcgcatcactaattcgggtcactttggaaagaaagaagaagaag

SEQ ID NO: 3126 - DNA, 3000 bp, Unknown
  misc_feature (1)..( 3000): cDNA_ID_4262337_gDNA_ID_1620627_Annot_ID_47155 3000 nt of promoter + ATG
ttctccgtccattcccaaattcaagctatcaattcaacaaagctttgctctaagaaactagaatttgcgtgtataattttactggatttatctatgaaaactggagctttcgataaacctagtcctcccactgggtcgattttggtcaactctctcacagtgtttgccaaaaaagcaacggaggtttctatttattttatttctagtaaaatagaaaaagaaaaaatataaatggtatgtttcgatcgccggttggatccggtccgaccgcatatcagttgattaatacaaaatttaatacataaattatacaatagttttacacagttttcatatgttctacggtcataattcataaacctagtctccactgaatcgatgtttggcaataatcataattcatgaattgataaaaatatttttgaaatactaaaaaagcgtcgacggtcaaattggtttgagtctttgcatggcaacaatgtcggattgtcaccggtgcttttgtaagtcttaactttggtttgataaatcaagtaaaaaagtagtatctgttttgcaggttaaatactgaaaatttacaagagttttcacctcttttgtttgagtaatcatctatatcaaaatattatgaaataagtaatattataaaaagacatacctgcgaaatcgtgaaaatagagtttccttgtccaataaaatgttgttcattctcctttagtcctttctctgcacaattctgcaaatgttcaaacactggtgaatataaagaaacatatttaattctctcaagaccattgaacgtcttattttctatcgtttcatttgcctctcgctctctttaatttaattcggtggtaatttttctagtggcatgagtcaatagttttttgttggtttaatgaaacattcaatgaacatgttacgtgtatcggtgtatcattagttacattgaactttgccgcttgtaatttaccatcgaatttttgtaataggatgatgaaaactaggtgaaacgctattggtattgggtgaaactctatttcttgataattttctaccaatctcatagtgtttttattgtggtcaaacaagaacacatctcacattttatatcgggacattatggaatttgtagtcaactaaaatttaaaagttcaaacatacaataaaaaaaaaaaacaattttaattaattttcatttcagtaaagcgttttgagacacttatatattaataatatttggaggagaagagagtaaccataaactacaaacatgagtttggtcgccagtttgcaactcatcctcccgccacggccgagaagcaccaagttgttgtgctcattgcaaagcccaaaacaagaacaagaactctcttctacttctcctccaatctctcttttaccaaaactaatctcttttgctcttgctatctctctaacttccttttcccctgccttagccattccttctctctcctcttctcagccactcaccactcctttcacccaatccaagttcgtccagaccggtcttctcaatgggtttgttcctcttctcactctgatttctgctctctaaacaaagctaatctttattactctcttttttttgtagcaaaattaggccttgcccttccacgaacccaggatgtgtatcgacgaatccaacctcatcttccttctcttttccattgacgatcccagaaaccgatacacaggatcccattgaggtatatttcctcctatcttcatcaatttagcatcgtttctgattatttgttcaacgcagaaactgaaagaagcaataatgagcacccagaagaaccccaagtttgtggttcttgaagatactccctatggtaaattatttctcaccacaattggatttttaaatgattcccaccaaggatttgaggaaagatcacacacaattgcatttgcagggaggtatgtggaggcagaggtagaaggaggaggatttagcagagatgtgatggagtttttggtgaagcaagatgtggttgcttacaggtgtatggccactaaggttacctttgtgtatcctttcaccactgcttttggagactccaagggacaagaagagaggttgaagaagctcatcgatcagcttggttggtatgctcctacctttgaatctatggaataaattgcaagtaatgtatattttgttcatcactttccaacttactactacttgagacattaatatgagtttgtgtttgtcctttgagaaccaaagaaagctatacaactttttcaattgaggagctaggtgatgtgtgttacaatttccaaatgttatattgtaccaatgtcaagggagaggagtgtattcaaccacatcttttagaattaatgattttgtgttaaaaggacaaattctatgtatacaatccatgaatgttaaaagtccaatgatatctggtattcttggttatagatgtacacgtctctcaaggttattctggtgtacttgatcttgacttgtcttttaaatggttaggtgtatataggaatattttgactcaaaacacaaaggtgtgtacatgttatagatctatggttttgattgaaaatctcaaaaagcttttaaaaatcatatcaatttctatatattcattcatttgaaatcactaaaattttaaaatcattttaaaactcaccaaaacctgatgttatccaagatcaagaagggaatgttactcagctagtgcctagtgccatagccgtttaaaatgggctttggtcaaaaaaagcaacgcgagcccactatagttttgactttgctgacatggcacaactccgtggaggatcggtctgtgattggttcttcaatatccatgtgacgttccctctctctctctttttctatatatcttctttgccgtaatttttccgaagactcacaatttgtttttcattcagaacaaataataaaaacgaaacacacaaaaaaaaaaaaaaaaaagaagggacatg

SEQ ID NO: 3127 - DNA, 3000 bp, Unknown
  misc_feature (1)..( 3000): cDNA_ID_1974121_gDNA_ID_1620627_Annot_ID_47162 3000 nt of promoter + ATG
taccctaacgtctaataaataacaagtactctagcctcttcgttttatgattcctctaggaaaagttaatgttacggcccaatcactttttttaacagcccaaacaacatatattagctccaaatatcattttttcccctagaatattctcaacctattgtccactcaaaacgtgacaaatggaggtctaaagggagaccatacttgactcattttagagctaggatcagacagagtagattttttgccataactccttgtaaatgtattcacatttcattcccaagaaaaatagactgatgaagaaatatatcagatatgacaaggccgtgtcgtttaggttacgtaactctacaaggtttagggtctcaatataaacacacaaagcagatagaagaagcaaaccattcacaatcagacaatgacatctctccatacgttactcttctcttctcttcttttcttcatcgtctttccaaccttcacgttttcctccaccttattgtttcaggttcgtctttagttttgcttctttacatacacagactctacacactcacttattgggtttctttcaattgtgaaacagagtttcaattgggagtcatggaagaaagaaggaggattctacaattctctccacaactccattgacgacatagccaacgctggaatcactcatctttggcttcctcctccttctcaatccgttgctcctgaaggttccatttctgctttactctttacacattcacataccaatcttgttactcacgcaatcttcattcctcaggttacttaccgggaaagctatacgatctaaacagctccaaatacggttcagaggcggaactgaaatcgttaatcaaagcgttgaatcaaaaaggaataaaagctttggctgatatagtgattaaccacagaacagctgagaggaaagacgataaatgtggatactgttatttcgaaggtgggacttccgatgatcgtcttgattgggatccttcctttgtctgccgcaatgaccctaaatttcccggtaccggaaacctcgacaccggaggagattttgatggagcgcccgacatcgaccaccttaaccctagagttcagaaagagttgtccgaatggatgaattggcttaaaactgaaatcggattccatggttggagatttgattatgttcgaggttatgcatcttccatcaccaaattatacgttcaggtaaatcacatatgaattctcaaatatcagacaacagtattagtatataagaaacataggttgagataattatttactattagtatatataagtatcataggttgatagggttatttactactatttagtatataagaaacataagtcaatgcaatcaataagaaatatataagaaagttcactactgattatgtgataaattcctctgtttttggatacacagaatacatcaccggattttgcggtgggtgagaaatgggacgatatgaagtacggaggagacgggaaactagactatgatcagaacgagcatcggtcgggtctcaaacagtggatcgaggaagcgggtggtggtgtgttgacagcttttgatttcaccaccaaagggatcttacagtctgctgtcaaaggtgagctttggagactaaaggactcgcagggaaaaccgcctggtatgataggaatcatgcccggaaacgctgtcacattcatagataaccatgatacattcagaacgtgggttttcccttctgataaagtcttgcttggatacgtttatatacttactcatccaggaactccttgcattgtaagtatcattttagtatgtagctatactatttacaactacaatcttgttgatatgttatttttgttgcagttttataatcattacatagaatggggactaaaagagagcatctcaaagctggtggctatcaggaacaaaaatgggattggtagcacaagctctgtaacgataaaagcggcagaggcggatctctacttggctatgattgatgataaagttatcatgaagattggaccaaagcaagatgtgggaacacttgttccttctaattttgctttagcttattcaggccttgactttgctgtctgggagaagaagtaacgcataactcgaatcataagaaaagtaatcgaatgtatcttcttcctttttaataaaacattttggcagtatctaaagatatgtataatgaaatataaaatgataaagaatacctaaataaaaagagcactagtggtgttaaaggatacaactccagtgaaagaaaagagttcaagtgaagaagtgtcaacttgtagaaataagtattggaaagtttccatcgttttgttttgttgcatacaactaatatattatatattggccgactcgtataagatttggagccctactaaaatcagaattatgatgtcttaaccacacaatactgccaaaatcagaacgaattatattattgtagaagaagaaaaaaaaagtatggtgggaagtgggaacagttagacaggtaaattcgaataaaacgacagcgtttttggctaggacaataaaagttgaagacgtcggcttgagaagaagtagaagtgacgacgaaaagaaaggggaaaaaaaaaaggaaggaaaaaagtgaaaaccgtcggcttgagaaggaactttgatatttggtgactcttgaaaaaagcaagctctttcttcttccttctttcgcttttttcacacctcaaaatcaaagatccgaaacacgatttcggaggaagcttcgattctgtgtgtttgattcttcctcttttttgttttttgtttttttgttctatcccgtttcgaagcgagctctgattctcgttcctgtctactttttttcagacctattttcagatctgaaatagttgtgtttgagaagcgggattggtgatcggagctggaatttggttggtaatcggaggtcagagagaagtcaacggatatg

SEQ ID NO: 3128 - DNA, 3000 bp, Unknown
  misc_feature (1)..( 3000): cDNA_ID_1028908_gDNA_ID_1620627_Annot_ID_47166 3000 nt of promoter + ATG
attcttaaaacgatgtcgtttttaagttatagcatcaaatacgtgttattttgactcagcaaccgtaacagttgactattacccattatttacgattttgaattgtgcagtaactgtaaagtccagatataaaattcaaattttttgaagtttgaatatgaattaatcctataatttattcgcgtatgaaaatatacttaacagattttaaggatatgaaaatactttttacttcatatgcatatgtatatacttgtttgaactttaaagtcaatggagaaaatacactagaggttacaggtgctgccgctgcaatgcaacatgtcgtttatatagtaactgatagaaactatcaactaaagtctcatcactaaattttccttaaaacttattacattactcactactacacaatgcattaaaaataacatatttgaaagtatattgtgtatgctaatttttgatgtgtacttaaatctcattattggtatataagtaaagaactttaaaaactaaagataggcagtaaaacaaatcatacataaaatttacgttgaaattagtttgaatcaaatttgcgatctacagttttcgtgtaaaactaatcaaagaaaaacgattcaaaataaccaatatattttgaaatgatgattaaaacttggcgacaaatgaaataaaaataaacaatgggaaaaagttttgtgttgttgaccaattagagaccaaaagactggtttttgtagtaaaaagcagattacgtacaaaacaatttagcgggtgggtatatggaatttaggttcagaatattttcttccttttaggattagggtttgtcttgcaatttaggatgttattggacatctgttcaattatggataggtgggaatagggtttgagtctcacatataaatccttgaattttccactaccatgtacatctatatatgaaacttcataaagtccgatttaacaagtttgcagtatggcgagatctgttttggcatcttagaaacaaagcttaacactaatacaaaaataaatattcgtcaagaacaagagtagatgacaaacaagctaaaggaggaggaaaacaactaagataactagcaaaagatagcatttcatactacaagtataaggtaaaaataataaaggcacaaaaatacccggagaaggcatttcttttgggtctcttcaggtgtctcactcttaaacttcttgatcatcttctcattctcaaaggaggtgtcgctctagtctttacctcatacattcttttgttcattttctctttcttatttttttttttttttcaactttcgtttaatgtggagatttaatatgtaattcttatctaaaagataattaactttttgcttatgttttgcttatttttagtctttttttttgttaatatagtttctttgtttttgtttatttatttttaataattgtagacaaaaataattattaggtttttaaattagtttgatgtttttaagcaatatagttgttggcggcggaggaatacatgtactgaagataaacacagttaaacctttttagtaaccgaaccgacccatttggattgagataaaatacaatcgaatagtttgagtcttagattgggtttggtttgggtcggtttgagttcggttgggttgggtcggttcggttaaaatgcccacccctactttcccatcatccccttgacaaattaataaccaaattagtcataatccaatctttcaacatgaaaaccggaatatgagggtcaaagcggacccattaagagaaaaggtgggtcagttgacacaccttaaatctacaaataaagtttaatgcatgaaatttgttaaagagataatagctaagttggtttatcatgtgtcattgacacccccattatccaagttcaatccttccctatgtactttttcgtaaaaaatttctttttatatattaaacgaaaaaactattgactcaggtaaaaatctttcctgggtccgccggtcaacgaggaggaaacacgacggaatgagagagagaagttggtggcctaatttttgtaggagaaaaaacacacagaaagaaaagtaaaatgttgacaaaatggggttgggaaattgagaataaaaattcaaagaaggcatgcatattgcaataataatgtgcgatttgtcaaacaagtggggctgtgagagagagcgcgtggtcagcacgaagaagaagcaggtacagagttttatcaccagctatctatctttggtttgttcttaaataataatcaaacgccatctctctctattctctatctatcttctccacgttactaccacctaacctctcatccaccttttctcctttaagcatatttcatttcatctccgaaaggaattgtatcgttcctcacacacgcctctcatctcttatccgtaagttttgtttctcttttctctattgatgtacccttttgcccatatttgtgcttgtgaactcgcatttgatcgtttatgctagatctggtttgggtttagtcgtttagatgctcgtcaagctccctttgaatcactagtgctcttagactcttatatttactgatttggaattttgtaattcaaaagtccgagtcttttgatgaacccccgtgccgaccacacgattgctttcaatttgggcttcttcttaattttggtgaactattgaggatttttgcaagtttctgtgtgaatcctagagtagaatgactcaaaaatgatttcttttgattcaattatatgcgattgttaatgtctttgaggttctatgatctggaattagattttggtattatcttagtatatcaaagcttagatgatgtttctttagcatgtaactactattgtccatataaattgcataactcatttaactttcgagcattctctgcgtctcgattacttatatggttcctttgtttgtttttgttcagattcttgtccttttttcagctcaacaaga

SEQ ID NO: 3129 - DNA, 3000 bp, Unknown
  misc_feature (1)..( 3000): cDNA_ID_2107558_gDNA_ID_1620627_Annot_ID_162532 3000 nt of promoter + ATG
aatctcctcttctctttgatatttcttcggatttcgcttatgtcctgaatctcttgaagacccaattgaaaaaatctcaactttttttctcccggcgtttccggcgatatacaatgcggattctcgtgaatctcattctcttctccttgattcctctggcgttctccaatgaaaactccagctcgtatctcattgcgcgaccattgatcttcgaaacccagctcaagaacataaacgacaatgtcaatctacattgcacgagctggagattcgcggcggagacaaacaatctcgctccatggaaaaccattccagctgaatgcgccgattacgtgaaagattacctgatgggtgaaggttacgtcgtcgatgtggagagagtctccgaagaagctaaggtttacgcgagcagcttcgaatctaacggtgacgggaaagacatttggattttcgatattgatgagacgttattgtcgaatcttccttattacatggaacacggttgtgggtaatttatcttaaatctttcattttacaacattgctataaaaagttggttccttgataattgtatagatggatttgtctttttactatgtcgaattagttaagatttgaggtatgtgttgttgtctgtctttttctttgcttgtttgtctatgtatgataaatgtgaatgtttgttctgtttgggaatttgcaggttggaagtttttgatcattcaaagtttgatatgtgggtagagaaagggatagcacctgctatagcaccaagcttgaagctttaccaaaaggttatacatttggggtacaaagttatcttgcttacagggcgtagagagaaccaccgggttatcactgtcgaaaacctgcgcaatgccggtttccataactgggacaagcttattctgaggtatgcatactctacttttggacctccattacaatgtagctcatacagtttttaaccaactattgatctggatccatggttgtggtaacatgacgttgtttgatcttggattgtaatcttgggtttgaatggatgattgacgctttggtttgctgcttaatgttaatagatcgttggatgatcggaacaaaacagcgaccatgtacaagtcagagaagagagaggagatggtgaaagaagggtataggatcagaggcaattcaggtgaccaatggagtgatttgttgggttctgcaatgtcagaaagatccttcaaacttccaaatccaatgtattatatcccctgaaggggatcaactagaatcaggaggcaattcaggttactaaatggagcaacctactgtttttgaagtttgggttgccatgtaatcacttgcaataaatatatgtactaatgactgcatcggcttgcgtgtctaaatttgtagcttattgaaaactttttgtggttaaagacgaatccagttaactaacataagtttaacaaaacaagaccttttccatatatagaccaccgttaccaacttacaaagaagccaaataaagtacaacacaacacttgcaagttacaaaaagagaggaaaaaaaacatggtaccatttgacaacatatagaaacacacataaacattacttataacaaaaagattcaaactcggcttttattatctccccctgatcaaattctaaacactttattcctcataaactaactccccgacattggagttattggactatgacgatgacatcagtggggtaacttaagtagtgtgctggccaccacgagtacggtcacggtcatgttccccaccagtatgttgctgtccgtagtactgagctctgtctttcagatcctgagctttgcttcccaacttcatccttgcactgtccaacttgtctgatccctgtgggtgctctcccgttgcgtacctattcacaatcaataggtatcataccaagcattttacctatatagatgatatacacagacacattcaagctagctaggtcaaatttcgtatttagttaaccaaatgttccctagaatttgcaatttcttattgttacatttgttattcgaccaaaaaaattgatccaaagctactggctcaacacatgcatgcacatattgcacaaaattatgaagtaagatgataaatgtgtgcttacttgtaaatccaagagaaaacggttatagcggcaatgccaaaccctccagaggaaagaaaaccggtgatgaggagtgcaactgtgatgagagccgggacaaggattgggctgaagataacgagcagaggtgttgcaacagtcaaagctatgacagttccaacaagggtaaggctggagagaacaaggagggaaccaccagctgtgacagcagttgcagctttagcaatctgcctagacttggagtagtcagatcctcgtccggacatctggtactggtctcggtctcggcccatcatcgggtactggtctctgccgatgatatcgtgatgggttcctctagctgtatccgccatttttttgttcttgtttactagagagaatgagattttgaatgagagattgatcaaaaagatgtgtatatattttggaagaggtaggagtgtttgttagatatattaagaaaggagacgagaagtcacgtgtcaatggagacatcatgcaattgtaggccacgtgttaatggcgtcaccatgcagccgctgcatgtgttaacgagaggagtctattcaaagacacgtttgttttttgcctagctcagaatgtggcgttggcatcgaaccgaaacataaaacgcaaaacgaacctttgggctcgtcagtatgggtttgggccttcaatagattccttctatacggcccacatatccactattggcaacaaaattagaaaaatttaggatttagttttaaaatttgttccgcgacattctagaacaatgaagaaaatggatacaaataataaatctatctgcctcttaaaagttccaaatttcaccacgtcactgctttgataatg

SEQ ID NO: 3130 - DNA, 3000 bp, Unknown
  misc_feature (1)..( 3000): cDNA_ID_3071670_gDNA_ID_1620627_Annot_ID_162531 3000 nt of promoter + ATG
tctccgaaatttcatactcattcttttgtcttcttaaggtgatattataaagagaagggcttctcatatacagcaaatgcctcgttagcgctcaactgtggttcctgccgaagcaaatccaatataccaacatatcttgtcaacaatgcaaatcaattcacataatcttgctacaaaaatcattcactactatatcaattatatatacatcaagttatatttagaatttataccgatttaattttccattagacaagactaatttcgtgactttaattagtatttccttacatattttctaatcgatccctattatgaattttctttttataggtgagaactacatcattttggatctctaatatctaatgtaaaaatgtgaaatttcaaactaatgtttttgatgtattgaagatgtatgaccaatcattaaaaaactaaaatatgttggtccatgaagatccttctaagttggagatagccataacaatattgcaatattatatgagtgagctctaatgatcataattgttcatgataattaagtttagataaaaataattagtatagatgaatggatcacctgagttttttgaggggcttggtttacttcctcttcctcatcaggaggagaagcgcctaagatgagcaaaccaagaagagtagagagaaaatcagcacctcccacttccacaagctctctacctttgtttttgtcgaagatctcatgaaccgttgatctcattgcattcagcaagctcccataagtcatcccgtggccacgttctatggcctgaatgaatgcataagtcattgcccccgtccatgcgctccctgacaattgctgtagtgcacacacgtttctttgtgaggagtacttttagaatgaaggtatggggtaattactataagactataacatctcggtgaaactataaaatgtggatggtttgactggacttgctaaatactatcaaaagttgtttgaaatctagagagattatttatatggccaatagttgggaatgtaccggagtgtcagccgaggtctggtcatcatcgcagcctgtgaaggagaagacttcaccgccactcgtacctttccacattcctgttttaggccgatggtcttcccattcatagtttccgagcctaaaacgaaggatcaagaaaagaaaaaaaaatgggttacatgtgctatgcataagcagtttcttatttgtgttagttcatagggtatagggtttataaccaatataagaactatatggtctccatttgttttttgtttttttaaacatttctacaagctatcgaggtctgcatacacacgtacataacaagaagtcaataattattgaattcgtacctgtccattctacaaagataaggtaagtccatgacggtaccactatgacaagcgtcgacgatggcatggagcttaactccataagggagcggccgtacgattgtagcattgatctcatcgtccacgatgacacctgaagtcctgtggtccaccgggagaagagtctcatcgaagccgtcaacctcgtcgccgttgtcgtccatctggttgttgccgtgaccggagaagtgaaagacgagggaatctcccggtttgcagctaagaacaagccaatgcatcgccattgttatgttgttcttcgttggccatctcattgggtccgcttcttcttctacaacattttgacacttttaacattacttttacgtgttacacaaattatgacattttatgatatagaataataccggtgagcataagaatgcaagattcagggaattggaaacgcttcatcaacatgaacttcatgcagtttgcgtcattgatacatcctttgagttcgtcctttgtgttcttgtaagaaaccccgactatcaccgctcgcttctgtccatgtaccggcggtggaggacccggcggcgcgtggttgaatggagacgatgctggaggcgcgtgagtgaacgggtaagaatctggaggcgcgtggttgaatggagacggtgcatgcggcgcgtgagtgtacggagaaggtgttggcggcgggtagatgaaagtggatggagccggagatgagttggggaaaggaaaagggctcgccgacgcgtgagattggagacggggctcgggggcgatgagagtgaaggcgtgacaaatggcgcagcggattcgggtggctccgggaggaaggtgaagcggcgtacgacagctggagcagtccaccagcaacaacattattttctataataacccaaaactccttttcttttctcgggaaatccaatttccacccaaagtttcttgaaagttgcagattatagcctttagtttctgatgctgggaaaatcatcaatgatcaaagcattggaactttagaagaagatgccaataaggcaaggaagaaaattctttcgacgactttaagcttatccgctaatgtattcgtcaagacttttgtttgatgatcaaatgaagtcgtctcaacttgcatatatacaacccaagttaaattagcaagttgcgaattataattgttccttcattgcagaagtttggatttgatagtgcgaatgaactaattagaatgtagttgactttgattctaatgagtttgcttgacttttatttataattataattttaccaaccatactagtcatatgaagctgttcttataagaccatcgacatggttaatgtatgtggaggacatgacctttttggaaaacttaagtatagtagactgtttctatatacaaaaaagactgtttagaaaagaaaactcttttgaaaaaaaaaagaaaaaaaaaaaaaaaaaattcattctcgaaagcaaagggcccagatgggccataggcccaataatatcatctatggagaaaaagggggtttcgttgtctctaggttttttcagtctgactgatttcagtcatttcgaattttcccacactttctcgacgaagatcaagggggaag

SEQ ID NO: 3131 - DNA, 3000 bp, Unknown
  misc_feature (1)..( 3000): cDNA_ID_1819565_gDNA_ID_1620627_Annot_ID_162528 3000 nt of promoter + ATG
tgtctttgtaaggatattgattcatttttttgggcaaatagataatcaattcaatgctatgttttgtctgaaatgtgcagcttcaattacaaagaatggctgcttcaagtgctgtcaccgcaaactacgtcctcaagccacctccattcgcactggtactttcttatgataaagattgatattgtcggcaaatgtcattttgttttcgttggactatagattttgcttttctattactagatgatataacttgttgctcccacaaagccctaaaaatatcttttcatcctcgtcaaaggcgttacaaatgattttcagctattattaacggaaaaccaataccaaaaaggcgttacaaatgaactcctctaattcatatttgaagaaaataaaaatcgaatcaatctacgcattagtgtttttcccggaaattaattgtaggaacgggtcaagttgggtggtccatattgggtaaaggccgtgaatgttctagttggtacgtactatccgacatttgtcaaatgggaaatttgggtatggccataggggttaggtatgggtcaacatatctgaaatgattttgaaaccatagctttcatagaacattgattcttaattgaccctcaattgaactagtgaaaatttgttgtttttgtatacaaaaactatctcaatctgacccgttactcaaactacactaaactgtccaaatcatattactttgtaagaaaattgttacgttgtgtaatgtcaatgttagattcataaatctttaactagtatatgaccactcctagttcaaattcagatgttccttggtctgatattttcgttccttctagtggacctattggttgagtcatgagtgagagcaatagccaatatgatgaaatgtttttttgatataaaattggaaaggatgctttggagccgcatatgagcaaacaaactctggagtttcactggggaaaacatcacagagcttacgtggacaacctcaagaaacaggttcttggaaccgagcttgaaggcaagcccttagagcacattatccacagcacttacaacaatggtgatctcctccctgctttcaacaacgctgctcaggtgataattaacaaacctatttttagtttgagattataaaatgggtgtgtgattggttagctgatgatccattggttatgtttataggcgtggaaccacgagttcttctgggagtcaatgaaaccaggtggtggaggaaaaccatcaggagagcttcttgctttgcttgaaagagatttcacttcttatgagaagttctatgaagagttcaatgctgctgcagccactcagtttggagctggctgggcctggcttgcttgtaagtgtttcaaatgtttaagagctttagataaatatattaacttcttccttactcttatctcaatgctttcagattcaaatgaaaaactcaaagtagtgaaaactcccaatgctgtgaatccccttgtgctcggctctttcgtaagtttttcattaaggaacttgaatacacaatttacttgattaaatatcaccgtagagttaatgcaaatccttaacttttaatcttggttaattttcttgcagccattgcttaccattgatgtctgggaggtaaataaacacttttatagcttgtttgtcttaaaacctattttctttcttacaaattttattgataatttttgttttcttttgctacatgaacagcatgcttactaccttgacttccaggtaacagcttattcataattgttagcaacaaggttttcttgagtttctttgtgttgttgattgtttcaatctatttgtatatgagcagaaccgaagaccagattacataaagacattcatgaccaatcttgtgtcttgggaagctgtaagtgccagacttgaggccgccaaggctgcttctgcttaagcaaatttctgaacaatttgacttcagtgacagtgagttctgcatcaccgaagtctcttataaaatattggtcgctgtaataaggacacagctctcttgttgtgtatgtgtcacagagttcttcattttgcttgtgtaatgaacaattaaacatgctcttttctgagtgtgtgtgcgttttgtgtgtgtcaagtttttcatcgtctcctttattaaactcaaattggcacctaccatcagtaattcatagtttggcatggcccattattcaattggacatttatagttgtaataacgtggatgcccctgtcccattaaaaaatcacaattcatcaccatagctgttaacaaatctcgcattgctgtgctaaaaaaatgagaaatattgatataatagatcattttgatttttggataaacaaatcagtttacaatgttaaggtggaagactttagacttgaactaaaaaacaaagatgttaactgtaacagggtaaggacgttggtgtttactattttgatattttgacgttggttaggtaattgacttagagcttttgatagatgaatgattaacaaaggaattagaagatggacaaccatgttggaagaattttgaaatattacatttttaatacttaggtgttaattgtctgatgaggttttgtattcgggtctttaattaatctaccaatgaagagagttgaccaaaaaaggcaaaaaaaaattgtgggccagtcggcccatgtcttattttctttgaatatgtttagcttatttatctctctgtatacatgttggaatatattttgtgcgttatctaatatagtggttgttgattgtgatggtctgatggacgtagccgtttatttaaaaagaataactaagcgaaaatttcaggtcgtctcgtattacatgccaaagagtttctaaatccgccagagcattgacttgagatgcaagaaacaaattatttcgtttaatcatcattttcctggctcccccgttttgtttccctttgagattgtccgttaaaaaggggacgaaccaatg

SEQ ID NO: 3132 - DNA, 3000 bp, Unknown
  misc_feature (1)..( 3000): cDNA_ID_2999601_gDNA_ID_1620627_Annot_ID_162526 3000 nt of promoter + ATG
actgatctctcatttgaatccaactcattatcattgcagttagacatgcttcaagaagaaaacgataatataatggataaggtcagtgtgaacgctctctttatctctaatgtaggttatttgtttgtgtttgctgcctttttgtacttgatgtgtatattcttgagttacatatgcagcttcagcgcgctgaagaaagacgcgaagctgcagaagcaagggctaaagagcttgagaaacaggtgtttattatatccagtacatttgacttttgtagacatgtttatatacaatgttgatggttacttttaagcttggtatgacttacaacaggttgcttctctaggtgaaggagcaaattttgatgtcaagctcttgaagaggtttgattttctcgtctttattatatagcctttgttcacaaaattgggttttcacgaactttgcgctgatccctccaggaaagaagcagcattgcgtcaaagagaggtccgtaatgcattcatatctaaaggatgttgttgcatttgttcttcgcaatatacatgtcctttattcttctgctagcttgtgttggcagttgctttgacagtaaagttattgaaaaggagaaacataaatctatttgcaggcagcattaagggctgctgaacagaaaagagatggaagaaatagggaaactaatgcccttagctcagaatttcaggtacaatgctctggtaaccaatactcaagctggtactaaacagtagtttactagactttattgtataaacctttcaacttgacaagggaacaatcatctcttctgtgttgtgttatgatcagagtttaaaagatgaagcagagaaatccacggaacagctccaggaggttgaagctgaaataaagtctcttcggacaatgatacatagaacgattttgagtcaagaagaaatggtttgcttacaatctaaactagaattttgtgcattgacggtttaactccaccttctttgtttcatttaactatatgattgaccaaccttgcaggaggaagttgttctaaagagatgctggcttgctcgctactgggaattagctgttcaacatggtaagagaatttttctctcgtaaagatacaattgttttatcctctgttgggtattgacctgcaatgatggatatgatgaagtaacctgttcttctcatgatgatgccaagggttcaaatggttttgaagatctcataaattggtcctattatgattaaaacatgattagagcatatgcatgtttcccattcacgcagtgtacttgtccactaaactgtatactgacatggagaacaactatgtgatccccgctagctgatcatttgcccttatttggaaatgtttacttatgcatttcattgggtcactcttaggaatatgtgaagatatatccacatcaagatatgaacattggtcagctttagctcctcttccctctgaagttgtcctttccgctgcccaaaagtctgaagattcctggcagacaggtttgatcttcaactatcctgccaatatttcccacataatcatttagtttgagtatataaaactaattggtaaaatcacatctcgcaggtggtagcgatcgcacttggagcaaagtcatcagtaatttcagtgatttgaatggagaagggaacattgagagtatgcttgctgttgaaacgggattacgagagatagcatccttgaaggtttatgcacacattttgatctgtttattactaaaaaaaactgtttcccagaaaatacacatctcattcatatcatttcttgcacctcataggttgaggatgctgtaatgcttgcactttcccggtatagacagacaaatgtggctcgacaagccgtcactggtaaaactatatctaaaactgattggcacatataaatactgatgtgatgttatacaacagacactcatctcatcttaatatccagatcccagggtgcaaggggaacctaagttctccgaaacatttggtgagtcacatccttaaactgttttcgttactatctagacagagtatcatataagtaaacaagcctctcaacaaaacctgttttcttgttcttcttcatctatattgtatttgaatcttatgactaagcaggaagggtttattctgaattttgaatgcagagttgagtcatgatgagcaacaagatattctctttaaagaggtaagttacatctttaccgggagagtttagcttttacttagcaggatcatatacattaactcaaaaaacatatatacatggtgtgtataggcatggctgctgtatttctggaaaagagctaaaattcatggcgtggaaagtgatattgcggaagagcgtcttcagttctggatcaaccgactcgggcaacattcatcttcacatgatgcaattgatggtatatttattacttgaagctaaatcagttaaagtaaagaatctgattccttttgtgtttgctgggacagtggaaagaggaatgagggagctaaggaagcttggaatagaacaacaattgtgggaaacatctcgtaaagaactcatcgactcctcttttcttccttcttattccgtttctgactacaatgacgagtgaccacctctactctcctctttgcctccaattttctttattcacgacacacgctcacataaacatacacatacacacacaaaggtaatcaaaatcattttttcctgctcgacaaagcttagaagaaacacaaaagaattcatactacatctgttttgctttcagactgtgttccaattgttgatatatgtttggcttccatgttgttacttgtataatactcttcgttacctcacccaaataacccaaatacaggttttttgagaacaaaaagctgaatttcatatagttaggggcaaaaatataaattttatatagttgagggcaaaactagaaagtttgtgtataaaaaaggtcgaaacgttaaaat

SEQ ID NO: 3133 - DNA, 3000 bp, Unknown
  misc_feature (1)..( 3000): cDNA_ID_1441291_gDNA_ID_1620627_Annot_ID_162524 3000 nt of promoter + ATG
ctctattatcatcaaatctccttcttaaattttttttttttttttttgaaacaaatggattttattaaaaatacaaaaaaaattgtatatttggattacgtcaactcttacaattttgctagtctcatagaaagatgtcatacaatgcttgcatgtattgcttataacagtacgtgtgcttttgttatttcttttctagtattgtaattgcgtcgtacaagaaaacttataagatgcgtcggaattcgaaataaaacaaataaggttggaatgtatcacatgattttcatacgtttttacaatttctgataagtcccccttggtatgatggtatcgactttgttttcagaaagttgagtttgtttcttttccgaaaactaacgatgtcaaataatgtgaattcacaacatatataaaaaaatgataagaagagagcttaattttgagcgagtgttacaaattaattaaaaactgtgtctagtttaacacttaaaaaaattgcaatttaaatgataactacccctggattattttcataacaattttgtacatgaaagaatttaagataatatattattttaccaaattagaaaagctaaaaaaataagtactataatttgttgtatttagtgaaagaataaatgttgctgggaaaaaaagtgaaagaataaatgctttgggtatataccttatattaaaaacaaaacgaaaaaaaattaatgatatttgttaccatatatattatatacaatctataaacagaaattaagataatttatctgaaaagtgttttcaatgaggaaaataacaataaacagaaaaaatgaggtgtatgtacaaagatttgttaccaaatttaaagtattcaaacagaaagtacccatctgtttaggcaaaggattcgatcatcaaacgtcctacaatatcttgttttgcgatctcacccacaaatttatttcctataaattctcttcctctgtctgatctcttctattcaagcccacttcttttctctttctcttgtcttcgtggagttttcggatcttacacaacaatatctttgtcttactgtatttcttgtcctttttcttcttacctttctaacaattattaagaagagtaaagcttgaatttaaataaaaatgatgggagacaatgaaggaagaagaactccgttattgaatcttggggttcaagtatcgatgagagtgttaaccatcggagctgcaatggcctcgatgtgggtcatgatcactaaccgtgaagtcgcatctgtttatggcatcgcttttgaggctaaatacagctactcctctgcctttaggtatatatttttttaaatttattctccttttctatcatcatctacttcttattttatgaaggtgcaatgatctagttattgaaataattcatatatgatacaacgaagcatccatctgcatgaaatgtcatcattcacgttgaaaatatgaagaaaacagatcacacattcggtagaaaagattgaaaagatgaacacatttttctaaaaaaaaacatccctcacgtatgatgtaggaagaacaacatgtgggacaaatcataatttggcatttttcattcatcgatatgatcatctttattgaaagtaagagatcgagtgattaaagtgtatgatttgatgtttgacaggtatttggtgtacgcacagatagctgtctgcgccgcgacattgtttacgcttgtatgggcttgtttggcagtccgcagaagaggacttgtttttgcactcttcttctttgatttggtaactatattacatgtttttgatctaaacattttcatttctatacgtgaatactctttatcttttaatttgaattagcatgttcacaaattatataaataaacgttttgagatgggtttgatattttgatgtacagcttacgactttgacggcgatatcagctttctctgctgccttcgcggaaggttacgtagggaagtacggtaacaaacaggccggttggcttccgatctgcggttatgtgcatggttattgcagtcgtgtcactatctccctcgctatgtccttcgcctcttttatcctcttgttcatccttacggtcttaactgcctccgctgctcgtcattactgattttcttacattttatatcatacaattcaattccttctactccaagataattcagtctttgttatatataattggatttcatgagatgcaaaattgatttgatataatgaaatgaaattgtatgattacttgcatgtatttatctttgagatcacttcttctgttctttgctgtgcttaattagtctcctatttgtttttcttggagaaaatctaagaaacaacaaagtattgacaagaaagaaaacgaaattaagatcttggtaatcggaagagcatttttctaaaacgtataattgtacaataatccttctgccaccaaaagagtgataacatgtttcaaacatgcatagataaaacataatcttattaatgttacatatctcttcacaaaatctattcttccacatatttctcctaaatagggttttagcagagccaacagaaaataaaatgcatacgatctcatcatcactgtatgatggatttccaaaagagaatgttacatatatacatcatcataattcataacatttgcatcagaccaggctcaactagatgcaaaagaaccaagatgggcccgttgaagtaacttatattttggactgggcctgtcacttggcaactgtgggacccacatgaacatgtgccgaagataggcctgaatctccgagaacaaacctccgccacaaaaacagaagacttgttgcttgcgtatcataatacgacgccgtatctctacttgctcgaacaaacccaaaaagatacatatcaagagattaaaccttatccaactaagagaagccatttttattttttttgggtctctgagttgtgtattgagcttcatctccttcaa

SEQ ID NO: 3134 - DNA, 3000 bp, Unknown; identical to SEQ ID NO: 3128
  misc_feature (1)..( 3000): cDNA_ID_1028908_gDNA_ID_1620627_Annot_ID_162522 3000 nt of promoter + ATG

SEQ ID NO: 3135 - DNA, 3000 bp, Unknown; identical to SEQ ID NO: 3127
  misc_feature (1)..( 3000): cDNA_ID_3091785_gDNA_ID_1620627_Annot_ID_162517 3000 nt of promoter + ATG

SEQ ID NO: 3136 - DNA, 3000 bp, Unknown; identical to SEQ ID NO: 3126
  misc_feature (1)..( 3000): cDNA_ID_4262337_gDNA_ID_1620627_Annot_ID_162504 3000 nt of promoter + ATG

SEQ ID NO: 3137 - DNA, 3000 bp, Unknown; identical to SEQ ID NO: 3133
  misc_feature (1)..( 3000): cDNA_ID_1441291_gDNA_ID_1620627_Annot_ID_47168 3000 nt of promoter + ATG

SEQ ID NO: 3138 - DNA, 3000 bp, Unknown
  misc_feature (1)..( 3000): cDNA_ID_2999601_gDNA_ID_1620627_Annot_ID_47171 3000 nt of promoter + ATG
cttcagcgcgctgaagaaagacgcgaagctgcagaagcaagggctaaagagcttgagaaacaggtgtttattatatccagtacatttgacttttgtagacatgtttatatacaatgttgatggttacttttaagcttggtatgacttacaacaggttgcttctctaggtgaaggagcaaattttgatgtcaagctcttgaagaggtttgattttctcgtctttattatatagcctttgttcacaaaattgggttttcacgaactttgcgctgatccctccaggaaagaagcagcattgcgtcaaagagaggtccgtaatgcattcatatctaaaggatgttgttgcatttgttcttcgcaatatacatgtcctttattcttctgctagcttgtgttggcagttgctttgacagtaaagttattgaaaaggagaaacataaatctatttgcaggcagcattaagggctgctgaacagaaaagagatggaagaaatagggaaactaatgcccttagctcagaatttcaggtacaatgctctggtaaccaatactcaagctggtactaaacagtagtttactagactttattgtataaacctttcaacttgacaagggaacaatcatctcttctgtgttgtgttatgatcagagtttaaaagatgaagcagagaaatccacggaacagctccaggaggttgaagctgaaataaagtctcttcggacaatgatacatagaacgattttgagtcaagaagaaatggtttgcttacaatctaaactagaattttgtgcattgacggtttaactccaccttctttgtttcatttaactatatgattgaccaaccttgcaggaggaagttgttctaaagagatgctggcttgctcgctactgggaattagctgttcaacatggtaagagaatttttctctcgtaaagatacaattgttttatcctctgttgggtattgacctgcaatgatggatatgatgaagtaacctgttcttctcatgatgatgccaagggttcaaatggttttgaagatctcataaattggtcctattatgattaaaacatgattagagcatatgcatgtttcccattcacgcagtgtacttgtccactaaactgtatactgacatggagaacaactatgtgatccccgctagctgatcatttgcccttatttggaaatgtttacttatgcatttcattgggtcactcttaggaatatgtgaagatatatccacatcaagatatgaacattggtcagctttagctcctcttccctctgaagttgtcctttccgctgcccaaaagtctgaagattcctggcagacaggtttgatcttcaactatcctgccaatatttcccacataatcatttagtttgagtatataaaactaattggtaaaatcacatctcgcaggtggtagcgatcgcacttggagcaaagtcatcagtaatttcagtgatttgaatggagaagggaacattgagagtatgcttgctgttgaaacgggattacgagagatagcatccttgaaggtttatgcacacattttgatctgtttattactaaaaaaaactgtttcccagaaaatacacatctcattcatatcatttcttgcacctcataggttgaggatgctgtaatgcttgcactttcccggtatagacagacaaatgtggctcgacaagccgtcactggtaaaactatatctaaaactgattggcacatataaatactgatgtgatgttatacaacagacactcatctcatcttaatatccagatcccagggtgcaaggggaacctaagttctccgaaacatttggtgagtcacatccttaaactgttttcgttactatctagacagagtatcatataagtaaacaagcctctcaacaaaacctgttttcttgttcttcttcatctatattgtatttgaatcttatgactaagcaggaagggtttattctgaattttgaatgcagagttgagtcatgatgagcaacaagatattctctttaaagaggtaagttacatctttaccgggagagtttagcttttacttagcaggatcatatacattaactcaaaaaacatatatacatggtgtgtataggcatggctgctgtatttctggaaaagagctaaaattcatggcgtggaaagtgatattgcggaagagcgtcttcagttctggatcaaccgactcgggcaacattcatcttcacatgatgcaattgatggtatatttattacttgaagctaaatcagttaaagtaaagaatctgattccttttgtgtttgctgggacagtggaaagaggaatgagggagctaaggaagcttggaatagaacaacaattgtgggaaacatctcgtaaagaactcatcgactcctcttttcttccttcttattccgtttctgactacaatgacgagtgaccacctctactctcctctttgcctccaattttctttattcacgacacacgctcacataaacatacacatacacacacaaaggtaatcaaaatcattttttcctgctcgacaaagcttagaagaaacacaaaagaattcatactacatctgttttgctttcagactgtgttccaattgttgatatatgtttggcttccatgttgttacttgtataatactcttcgttacctcacccaaataacccaaatacaggttttttgagaacaaaaagctgaatttcatatagttaggggcaaaaatataaattttatatagttgagggcaaaactagaaagtttgtgtataaaaaaggtcgaaacgttaaaatatgataaagaaactggtctgtgacataccgcattaagatgggtcccatagaaatcgaaatgtggatcgtctccttccctatcttatccaggataacgataacaacactctctctctcactgcaagagcgcgaaacagagtaaggctcactttgttttagctttctcctctacttcgata

SEQ ID NO: 3139 - DNA, 3000 bp, Unknown; identical to SEQ ID NO: 3131
  misc_feature (1)..( 3000): cDNA_ID_1819565_gDNA_ID_1620627_Annot_ID_47172 3000 nt of promoter + ATG

SEQ ID NO: 3140 - DNA, 3000 bp, Unknown; identical to SEQ ID NO: 3129
  misc_feature (1)..( 3000): cDNA_ID_2107558_gDNA_ID_1620627_Annot_ID_47176 3000 nt of promoter + ATG

SEQ ID NO: 3141 - DNA, 3000 bp, Unknown
  misc_feature (1)..( 3000): cDNA_ID_3091891_gDNA_ID_1620628_Annot_ID_47181 3000 nt of promoter + ATG
caccaacctagcttcaagatcctgtctctcatcgatcgcgtgttactcctttctaaaggaaccattgtatatcatggaaggcttgacttacttgaagcattcttgctctccaagggattcacggttccttctcagctgaattctcttgagtacgctatggagatacttcagaacatccgtgatccctacgaaaacgccaacattgctcttccagaccactgccctgaaagtaaaaaacagaaccaaaaacagagcattgttcgatataaaagctcgagaatcaccgaaataagccttctctctagcaggttttggaagatcatataccgtacaaggcagttgcttctaacaaacatcttagaatctcttgtagtcggtcttgtcttaggcactatctaccttaatatcggaactggcaaagaaggaatcaggaaacgatttggccttttcgcattcaccctcacattcctcctctcctccactacccaaacccttccaatattcattgatgaacgacctattcttctccgagaaacctcaagcggactctacagactctcctctcacattcttgcaaacactttggttttcttgccatacttgctactcatcgcaatcatctactctgtctcactctatttccttgtaggactctgcttttcatggcaagctctcgcctactttgtgctcgtaatctggatcattgtcctaatggctaactcttttgtacttttcttgagctctctcgcacctaactacattgctggaacatcttcagtgaccattcttcttgcggctttcttcttgttctctggttacttcatctctaaagagagtcttcccaagtactggctcttcatgtacttcttctcaatgtacaagtatgcgttggacgcacttctgataaatgagtactcgtgtctgcacaacaagtgcctggtctggtttgaggaagcttctgtgaatagctgcttagttactggaggtgacgtgttagacaagaatgggcttcatgagagacagaggtggtttaatgtttatatgttgttagggttcttcgtactatatcgtgttttgtgttttcttgttttgcttaaaagggtttcgggttccaaaagataaatgcttttcaatttcttaagcttaattttatatataagggattttcttgtttctgtagacttcgtggtatatacacaaagaagcaaattaattgatggatgaacacaaagaagcaatttattgatggatgagttaatgaaagtataaattcctttatttttttcgttttatacattgttctatcatgtatttagtgtgtatatccatgagcttcacatacattcataatgtcactagaaaaccaagagaactatttgatgtactatctagccttctatgattgggttacgtgtgcagggaatatagagaatctactggattaagagatatttgagccatgttcgtgtatcttctaacttggccaaaaaaaagagatcgtcacgggtctacatggtcttcacctcctctggaaaaccatatcagtttatacattattgttctaaatgtatgtacaaatataaaattaaaggtttatttaaaagttcagttgtgatttggattcatgatcttgattgttttatcatttatgttagtggccgtgtcttaaagcgatgttaatattcatgatttcatctattattgttgcagatcctagactttactttgggtacatcaatttatacgtctgcttatccaaaaacaaacagcgagctactttttttttttggtcaataacaatgtaaaaaaaaattgttttggttaagaagtaggcattcacgatgttgacaaacaataaagtagaaatcaataaatagttgtgctcaagttgacatacaaaatgccacatctcttttgtattcatgggttcacggacatgcaacttcattggtcgcccgtgaacatttttgtttagcaagtaatttttgtctcgaccaagctggcttcctgactcagttataatccaaattcattttttattactaacttcaaaggtttactcaaaaatttaaaattcatatgtatatcacgttttaatcttggagtttgggaacttgaataggatatatgtgttgggacgtccgtcattggtatccggtttcaaacttgagaaacaaggaatacgtttcttgagaagcaaggtttacattaccacctaatctacttaacatactccatcagcatgtctttaagattgtgttcctcagcttgagtcactgaatcaatatgcaagcagctttgttcgcccactacaaaattggttctgaccgtgatgtacggctggagaaagcaacatgagttgttgggaccaaatacttgtgtctccaaaaaacattgacgtctacattattttatgacaaacttgtccgttgacttcactaggtggcgagtgaaggagtaagattggattgagtaaaaatttaagcctagcatgaaatctagcgccgaaaccttaatgagtgaagatcatatagatacacaaatcctagaatgtgactgtaattgaatgattcacttaccaaactacaagattttaaataaaatctcaattctcaaattcataatttccaactatggtgttttagtggttgcaaattaatctgttagtccaagaacaagaatttgaatcatcctactatgatttaattcattgttggtcattattatgtgaattttttttctaggtcagcctatgattctcccgttaacagaagaaaattcactatgggactccgaaatctaatatggaaccggttaaccatctaaccggaccatgtaaaggccagctttgtagcaaataattattagattatcagcccaataaaagcccaaatccgtaatatataatctaatcgtcttttatccgcagaaaaccctattgctcccctttgctcaagctcagtgcctctttgcagcgaaagctcaaccaacaagacgatg

SEQ ID NO: 3142 - DNA, 3000 bp, Unknown
  misc_feature (1)..( 3000): cDNA_ID_1819646_gDNA_ID_1620628_Annot_ID_47187 3000 nt of promoter + ATG
agtgggttaaggagcagtcgtatctcctctggttagcccaccatgttgcatagcttgcgatctttacgtcccacaccagtggaggcaaacctgttgggaatgaaaattttcatatcaatatacaacattactaataatttaatttgatatcacaattatgttaacaaatgttatttaattgttcgtttctttagtgtagtccatttccttagaacatgtatgtaatatataaggtctcaaacaaaacaaaatatatctggtttaatttctttgtatctagaaaacatcaaaatacggatatatttttgttaatattctatatatatcctaatcgtttttatcttgtagtttcttatgaataggactacatatgagtatgacaacaaaaattacaaagatatatcataagtgaccgtttatgttgtttatggtcatgcatagtcttataactatgaccacatcgggtcttaattctatttatagttaatatatgaaagtacctagaccgcctcggacagtattatgtggatcaagaaattgttgttcgaacgagcccgtgggtggttggtatgtgggaggaggctgataaaggataggtttggggctgggagttgggagcggctggggctttgcaacgtagggaggagggctcggggttataggtcgctgtgggcggtgccggtaatagtctgcatgaacggcttggatggcgaccaagaaaagggcgattgcgaaaactatggcttgggttgatgttgtggtcgccatctgttttcttcgtggagtggctccaaagattttgttttggatggtggtagaaaatgatttgatgagggtgattatttatatgtttaagttagtgcttaattaattatgacaatgcaatttgggagtcaactagaagtggcttacatgttcgattatggttaccacttaccactttgtttcgctttagtaaaagcgagagagttgtagtcttgtagatattttaaccatgcaagtaggtattttatatacattttttccttagactaaagatcaataacagagattaaattttctaacggcaatattataagaattagtaataaaaagaaatattatcattaaaatataaaatgtgaggtttatgatacattagttggtctttagaaaaaaatgtttgtcgactaaaaaaaaaaaaaatagattgaatgtagaaatttcaacagagagaaaaagggaaaaaatgtctatttttcaataccacttttcaaaaaggcccctccctaaacttctaattattagttgttttttttacttaagtattactgtaataggtttcctggaacaaaaattgttataaaactagattttaacctgcggtataccgcagggacaatttattttttaaattagtatatataaaagtttgcaaattaaatttatttataaaatatttttattttctagtttacaattgttattaagtaacgtcctctcaaacccgtcccacaaaaaaaaacccgcggtacaccgctaatttaaatatataattaaaataaatattttacgggattgcaattgtattttggtttgtcaaacaaatatttgttttaaatagttgccaaaatctagttcaaattttggagaaataagatttattggatagataaagaatgtatttaggtgtgttttgctctttttaagggattgcaattgtattttggtttgtcaagcattttttgttttaaatagttgttgaaatctagtttaaattttggagaaatctgcctgacatatgagattagaatatatttgaaatattttttgtttgttaatcaatttattactaaaaaaaaacaataattaaaagttagtgacagccattgtaaataagtgccaactacagaatttatttcacaaaatgcctacaaaaatgtatatgtagattttatacaaaaataattgacaaaaggcaataaaatagaattgatcagctgtaaaagaaaataatcagaaaacaaaaaacacacaaaaatcaaacctaaaatatgacttataaagtttcatttttaatcaactataaaaccaagtatgttctgacaactccttagtaaaaacttataatttcgtaaaaacaataaaaccgtaccgaaatctggcttaaatattttaaaattttattcaaccaaatcaacatattgtaaatatagtaaaagaaacaaggagaaatggatataaatttattaaaataaaaagcagcactacgtggaacgtacggctgttattttatataccatcggaaaaagtcacatttgagaatgtcgtaagtcccgacacgtgactagcacggcaggtctaccgtagataagcgtagacctcagcacaccgtaccacataataaaccacactcaaactcagtccgaggttgacccatttaccaaacaaaacagagaatcgcagagcaaactatagactacacaaaacacttccgtcaccggcgaatttactcaggcggtaatctcaccggacatgtaattctctctttccctttctcgcaatttattattctgtttgtcaccgagagagtctacgcaaagtcttctgcggaggatttgcttacgggatttagagtttttctgtagtctgattcatgtacttgtgttgttcgcagatctcagaaaagagggtttttttattttctggaggtaataatattatgaagaggaatttcgagaggaacgatgacgacaagcctgagcgaaagcgtcctgctcttgctaggtgagtttctctgattttaaccagattgtttttgaaagtttcttagtattaaagactttttctggtcctattgctttttgtctgcgcagtgtgattgttgaggctctgaaagttgacagtttgcagaagctttgctcgtctttggaacctatcctccgccgagttgtaagatttgcttactctgtttttgttgtatttgttctcgtctctttgaaaagctagttatgtttaggt

SEQ ID NO: 3143 - DNA, 3000 bp, Unknown
  misc_feature (1)..( 3000): cDNA_ID_1819642_gDNA_ID_1620628_Annot_ID_47188 3000 nt of
actgtttttttcagttctgtattttctccgaaacgaattggaggtccagatggccggaacttgcagctgcatttcaagtctagattatctctccctttattcactggaggaagagtggaaggagagcaaggtgctactatccatgttgtattgattgatgcaaacacgggtcgtcctgtaacagttggaccagaagcttccctgaagcttgaggttgttgttcttgggggtgactttaacaatgaagatgatgaagattggacccaggaagagtttgaaagtcatgttgtaaaagagcgtgaaggaaagagacctttgcttactggagacttgtttgttgttctcaaggaaggggtaggcactttgggtgagattgttttcacggataattcgagttggattagaagtcgcaagttcaggcttggtttgagggtaccctctgggtactgtgatggcatacgtatacgtgaagcaaaaacagaagctttctctgttaaagatcacaggggcgaatgtatgtgttttcttttcttgttctctttttgccttgtgcttgccacttgttttcttctaaatcaacatgttgttggattggttatgtgtagtgtacaagaagcattatccacctgctttgaatgatgaggtgtggaggttagagaagattggtaaagatggggcgtttcataagaggctaaccgctgcaggaatagtcactgtggaaggctttctgagacaattggtcagagattctacaaaattacgggctgtgagtgcctcctattacgtcaagctcattgttgttggatgagaacattcattcaatgctcatgagtaattatgattatttgatatttgtctagattcttggaagtggcatgtcaaataagatgtgggatttgctagtggagcatgcaaaaacatgtgtcctaagcggtaagctttatatctactatactgaagattcaaggtctgttggcgttgtattcaataacatctacgagttaagtggcctcataactgaagaccaatacttatctgctgattcactctctgaaagccaaaaggtctatttcattctccttattttcttacacttatttgcctcatgatgtttggtatattgttctggaaaactctgatttacagatttttgttttggtgatgtgtgattatatagttcagttctgttatatatatgcggtagtgtaaattttttggtgtttaaatctgaaaggtatatgtggatggactggtgaagaaagcgtatgaaaattggaaccaggtcgtggagtatgaaggcgaatctcttttaaacttaaaccagcctgagaggttggatatttctcagactgatcctgtaacagctctggcaagttactctacggtgcctcttagtcagtttcctgaattcgctatagaaggttggcaaatcagtcccttgtaatattactaaatctcaaatcttatgttctttgttctgtatcataagtttatattctacttctatctttactgcagggtataatcaaacgctgacaacagccctacctcataacccacaagcacaatttgattttgttccccagcaagatcagtttatcggaatacagcaacctcaaactcaaaccaacatagagaatgaaaatgtaactaggttggttcttggtcctccacaatcatccacaggtgggtaccaagacatcaaatcttctgctgaccaggaaaatcttaatcctttcgaagactggacaaacctaagtgagaatgactttttctcggaggaagagatccggcaaacaagccatgacttgttagcgaatgaggacatgcaacagttgctcttcagcatgggaggtggcaaaggagaagatggttttactttcccatcgtttatgcagaatacaccaatgatgcagggatatgatgaggagggccgtgggcgatcaggaaaagcggttgttggatggctgaaggtaaaagctgctatgagatggggattcttcataaggaggaaagctgctgagaggagagcacagattgtggagcttcatgataataacgatggtaaatgaatagtcaggttgcttgctagtgtatagaagccatgtacagtttagggatgtataacaacatcacttaccgatatggatttgcttgatttagcttattagacaagaatataatcgatgaaccatgagaaatttgaagactaaccttcagcagcaagacaagaagctgattttctgtctctttaagtttcaactttcaacttgcagatatattagaagactgactaagtatgggcctataagcccattaatgtctctactgaacgcccaacttgtgaaaaacatgtctctcatctcaattttgttttcttttcacatcaacttaaagctacgagaaccaaacaagtgatgtttttggtcaaacaggacgaaacatgtatacataaaaagaggtaattatgttcgataaacataggtataaataaactataagaatttgttacaacattctttagatttgatattaactgctgtttacatttgaagaactcagttagttatttaatattttattttatagggtctagaaattacttgcgtgtggggactgatcaccgattctaaagaaggctcatcctttggataatagtatgaaacttgtcaataaagataagtcatcacaagtagggagatcttagctgtgttccatacgcccatctagaaaaagcgacgatggtcaagattaaataactgtatttgaaaaaccaaaaccgcgtcaccaactccaaagccattaccattagccatcactttccatcttccagctgttcgaatcaggacgcccctttttcttcaccaaacccatcggccgataacgaaccttcctctctgactgcctctgctcttactataaatacaaccaatacgacctcatccaaaacccaacaaacctaagctcaaagcccaccaaaaagaaaacaatcacttagca

SEQ ID NO: 3144 - DNA, 3000 bp, Unknown
  misc_feature (1)..( 3000): cDNA_ID_1819638_gDNA_ID_1620628_Annot_ID_47189 3000 nt of promoter + ATG
ttggttcttggtcctccacaatcatccacaggtgggtaccaagacatcaaatcttctgctgaccaggaaaatcttaatcctttcgaagactggacaaacctaagtgagaatgactttttctcggaggaagagatccggcaaacaagccatgacttgttagcgaatgaggacatgcaacagttgctcttcagcatgggaggtggcaaaggagaagatggttttactttcccatcgtttatgcagaatacaccaatgatgcagggatatgatgaggagggccgtgggcgatcaggaaaagcggttgttggatggctgaaggtaaaagctgctatgagatggggattcttcataaggaggaaagctgctgagaggagagcacagattgtggagcttcatgataataacgatggtaaatgaatagtcaggttgcttgctagtgtatagaagccatgtacagtttagggatgtataacaacatcacttaccgatatggatttgcttgatttagcttattagacaagaatataatcgatgaaccatgagaaatttgaagactaaccttcagcagcaagacaagaagctgattttctgtctctttaagtttcaactttcaacttgcagatatattagaagactgactaagtatgggcctataagcccattaatgtctctactgaacgcccaacttgtgaaaaacatgtctctcatctcaattttgttttcttttcacatcaacttaaagctacgagaaccaaacaagtgatgtttttggtcaaacaggacgaaacatgtatacataaaaagaggtaattatgttcgataaacataggtataaataaactataagaatttgttacaacattctttagatttgatattaactgctgtttacatttgaagaactcagttagttatttaatattttattttatagggtctagaaattacttgcgtgtggggactgatcaccgattctaaagaaggctcatcctttggataatagtatgaaacttgtcaataaagataagtcatcacaagtagggagatcttagctgtgttccatacgcccatctagaaaaagcgacgatggtcaagattaaataactgtatttgaaaaaccaaaaccgcgtcaccaactccaaagccattaccattagccatcactttccatcttccagctgttcgaatcaggacgcccctttttcttcaccaaacccatcggccgataacgaaccttcctctctgactgcctctgctcttactataaatacaaccaatacgacctcatccaaaacccaacaaacctaagctcaaagcccaccaaaaagaaaacaatcacttagcaatggcgatgatcagttactccaccattgtggttgctctgcttgcttcttttatgatttgctctgtttccgccaattttcaacgagacgtagagataacttggggagacggacgtggacagatcacaaacaacggcgatcttcttacactctctctcgacaaagcttcaggctcaggattccaatccaagaacgaatatttgttcggtaaaatcgacatgcagatcaaactcgttgccggaaactccgctggaactgtcaccgcttactatgtaagtccatttcctttagtgttttcttaaagttcacatattaagagtgattaggctaaatgttttttttgtttggttctacagttgaaatcccctggatctacatgggacgagattgactttgagttcttgggaaacctaagtggtgatccttacacacttcatactaatgtctttacgcaaggaaaaggcgatagagaacaacaattcaaactctggttcgatcccactagtgatttccacacttactctatcctctggaacccacaacgcatcatgtaagtccaaaattataaaaaataaatcacacttactcttttgaatctaatcttgtttgttttttctatctattcagattctccgtggatggaactcccataagagaattcaagaacatggaatctcaaggaactctgtttcctaagaaccagccaatgagaatgtactctagtctatggaacgctgaagaatgggccacaaggggtggtctcgtcaaaaccgactggtctaaagctcccttcactgcttcctaccgcggcttcaacgaagaagcttgcgtcgtgatcaacggccagtcttcatgccctaacgtgtcaggacaagggagtactggttcgtggttgtctcaggagctagactcgacgggtcaagaacagatgagatgggtacagaataactacatgatttacaattactgtacggacgctaaaaggttccctcaaggtcttccacgcgagtgcttagctgcgtaaagcttttaaacaaatgatccaaagccatgaaaagtaatactattctttgattcatcttataaagtatctgatgtttggttacatctgttttttatttattctatgtaagtatatttgtattcgaatattgatcaatcactttaccaaaataaaacatttgaacgtacgatcagaaaagtttaagtcatagacctcaacgaaaagtaaaaacgaaaaagttactgtacattattttctgagattcttattattgattcctaagcataattaagctataaattatatgctattagactattaaataacccaatgttttatcaataagtagaatccttcaactcttctaatttataaatggccttttgatctaaactaatgtctagcacaaaaaaagaataataataataattgttttggtgacacagaaataatattccacgaacctgtctatgttgaaccgtgtaaggtcgaataactcgatttaaatattattacatacaaagtttaagactaccacgtcgataatgtgcctccacgaaactctctttatataaccacttatttccacttcatctaaatccatcgacaaagacttacctctcacggcgagaaacaacagagaatcggggaaaa

SEQ ID NO: 3145 - DNA, 3000 bp, Unknown
  misc_feature (1)..( 3000): cDNA_ID_2049489_gDNA_ID_1620628_Annot_ID_162583 3000 nt of promoter + ATG
caaatgccccttttcgcgcttggcgtctcgcaagccttagtttcctattacagtggttgggatgagactcaaaaagagatcaagaagatcgctatcctcttctgctgcgcgtccgttatcactctaattgtctacaccattgagcatatctgctttggcactatgggcgagcgtctcactctccgtgtccgcgaaaatatgttcagaggttcgtctcaaactctcaatgcaagctttaaataaatgataaatttaaaattcttcagaaattagagatcccaatttttattatcatgtgatacttattctgtttttggtttaatagcaatcttgaagaatgaaatcgggtggtttgatgaggtggacaacacaagctcaatgttggcatcgcggcttgagagcgatgcaactttgcttaaaaccatagtggtcgataggtcaacgattctactgcagaacttaggtctagttgtgacctcttttatcatagcatttatactcaactggcgtctcactcttgtcgtcttggccacatacccattggttataagcggacatatcagcgaggtaattaacgcaccgttttgccacttttaaaaattttcctttatgtttatgtttacgtttgtgtttttgttgtatttgtagaaacttttcatgcaaggatatggaggagacttgaacaaagcatacttaaaggccaacatgttggccggtgagtctgttagcaacatccgcacggtcgctgccttctgtgctgaggaaaagattctagaactttattcaagagagcttttagaaccttccaaaagttctttcaggcgtggacaaattgcaggacttttctacggtgtctctcagttcttcattttctcttcctatggcctcgccctctggtatgtctctatgtatatagaagattgtaaattaataggcctagggttcagaccaataaagaataggcatagggattcaccggttttaaatattgaattgtcaattgtttgatttgataggtacggatcaactttgatggacaaaggattagcgggcttcaaatcagtgatgaaaacattcatggttttgattgtgacggcgttagcgatgggtgagacattggctctagctccggatctgctgaaaggaaaccagatggttgcgtccgtgtttgagatcttggaccggaaaactcagatcgttggagaaaccagcgaggagctgaacaatgtggaaggcacgattgagctcaaaggcgtccactttagctacccttcgagaccagatgttgtaattttccgggactttgatctgatagttcgtgccggaaagagcatggcgctcgttggacagagtggatctgggaaaagttctgttatttcactcattctccggttctatgacccgactgctggaaaagtcatgatagagggtgagtgcacttgacttagacctatgaacacaaaattcttgcgtttcaagaaataactaaggtttcttggatcaaaagacagtagttgtttagttgaaataaatttgtttttttccctcttacccaaattgcaggaaaagacatcaagaaactagatttgaaagcattgaggaaacacattggtcttgttcaacaagaaccagcacttttcgccacaacaatctacgagaacattttgtatggaaacgaaggagcatctcaatctgaagtcgtcgaatcagctatgctcgcaaatgctcacagcttcattacctctctcccagaaggttactctaccaaagtcggtgaacgtggagttcaaatgtcaggcgggcagagacagaggatcgctatcgctagagccattctcaagaatccagcaattctattacttgacgaagccacaagcgctttggacgttgaatctgagcgtgtggtaggtttctttaccattagactttgtaaaatttaatcacaatggactaatgagtatacaacgaatgaatattgttaggtacaacaagcattggatcggttaatggctaaccggacgactgtggtagttgctcacaggctatcgacgatcaagaacgctgacacgataagtgtattacacggaggtaagatcgtagagcaaggcagccaccgtaagctcgttctaaacaagagtggtccatattttaaacttatcagtcttcagcagcagcaacaaccttaaattaagtactatactttatttattgaaaaactctttttatttttatttttgtggaaaatattgatcatatactcatttgatgtgattatcttaatcttcttgatttaccgttggtaaaaaaaaagttacgaaatccaaaataggaaaatgttctgaaacgttggctatgtattttcacccaaatttggatttagttatttttgagcactgtctttatcgtcagcacgtttcactgcgacattctccaaaggaaatgatcaacaaaaggacaacttgattggtttcaggaatctccagagttcatcatgtcctactaaatgacaaaaccctttacaaaaagggagccatcaccacaaataattaaataaaaccaagtcaaattaaaactgtattaactatttcaccaacaccaagttgaagttttctaattactattttttttttttgtcaaacatcatctttaatatgttataaatcgtttgcataattttgttataatttgtttgtattatttggttataaaatctcccacctttttggttatttcacacatcttttacttatacaaaaatctttcctgattttaattaaataaagctaaaacactttagtaatacaagtaaaattaaaaacaaaacaaaaaaattcgggaaaagtatttggtgtgataaattccctctccagcttctcggtgacacagatattttgcttccaaataaaacgagtccggtcactggcgctcactgacttcgtcttcctccatctccgatccattggtttaacaagcgcgtgagggccagatagaccgagaatc

SEQ ID NO: 3146 - DNA, 3000 bp, Unknown
  misc_feature (1)..( 3000): cDNA_ID_1820850_gDNA_ID_1620628_Annot_ID_162582 3000 nt of promoter + ATG
aaaatatatctcaaacatactatttatagaaaatcccaaccgattacaaagcagctgatcggtgtgtatttacaagtaatgtgtgatttttttttttgaaaaatcgtgaattaaaaggaatcccaacgtgtgaggtgtgactctaaagtctgaataaagttgacgatccataattttcttatgtttgccgtcgattgtgagaattgagaagcatatgtggtttctcttctaagagttaaaaataccgtgaaataaaagctatattaattcatatgttttatcatatatcttcgaatatcagcattagaccttattagccagctcaagtacgtcattttcactgatataaatgcaaattaataaccagatcgtgcccaaaacgaataaattattccatgcatgcagttgcatcattattttttggtatagtataaagttgcatcattatacttcgcattaattttccaccacgcattccctcctaaataaaaagaattaaaattgtcacatccatctatatcaacataagcaagaggttcgagttggaagataaaggagatttttttttcttttccatatttcatctatttggaatggtgctgtcaaaatatctatcaagataatttacaaaatatgatggtgaacaataggatgtggttgttttcggttatccttatagcgtcttgtcttcttagattcaaagcggtgataatagtcgcggccggagcggtggccataattgcgtttgatgcggcgatagtttggttaaaggtctcgttgatgtttgaatgccatactttgatgttattctttccttttagtttgttattttatgttcttgtacaaaaaagttattgaattgccaaagaaatcttttctatatctataagttcaatatcgaacttcagaatataaaaaagaaacaattgatatcaataacattcaaaataattgaaattaataaacagtgattctaatttagccatttacaagcaaacttaaaagataaaggtgatctagatatattttaaatagaaaatggaatcatataatgaattttttgaaagtttcaccatagataagttgttgaaaacacatggtgagttttttactcatcaatgtcgtatatatgacttaaaaaatactttcttatatccaaatataaagaaaaagcaattaggtatgtaacgatgaagcaagattaaattgaaattaaattgcaacaaataaaatttgatagaaaaaaaaaatagtttttaccaaaacgaaaaagcaagattaaaatatgtggaaaaaacgtcgaatcaggagaatatatgagatgactctcagacatcataacacatacatacgtagtaatatattaacaactgcgtcgaatcgtaagacttggtcacttcagtacatgactaagcatcattcgggaccagccaaaaaacatgtatgcttcaaaaccagaccccaccacattataagctcatctcagtcatcaccacaaccaacgcaaagaattcttcttcttcttcttcttgacttggcgttttttcttctaataattttaattttaattttattttcaacatattcaagtaattaataggatcgacttgttggaaattgtttaagttctacttgttgaatattgtcaatttatttggatcatgttatttaagttctacttgttccaaaaagatatgaaagctaattggaacagaaatttgtctagtttcttaaaaaaaattggaaaatattattttaacgtatattttttcagatatatttcaaaacataataaagaaatattttgatgatataaatttatttaggagatgtatacagtcttaagtttttcttacatgaatttgagataaatcttttcttcttgaactgattaaagagggtatcaatgtcttattgaatctcaatccagcggacatagatcaaaagtccaaagcaacaacatgtgaacgcgttttgatataaatacaatcattatccattaacacgaacttccttttttacatcatttttaacttcattgtaggggcgacgtgttgaagtcttgaataggggtggacattttttggtttatttttagagagtttggatttggtttcattttcccaaactagagtttaatagagttctgaccgaagttatttatttggtgcagatcagtttattagatcattcatcaatttcttattcattatttcatatttctaattttttttatgaaaattatcgatggaattggtttcccaaaattttgtattaactcgtattttcataattttctctttaacaggttatacaaatagtagttgtcaactttacgtaaattacatcaaattttaagtaataaattttaaaattctagatgttgttaacaatgacaaacaaatttatttagtgacagcatttttattcagttagtgtatacacttttgtttttgtcaaagactataaacttaaaacatttaaatatagataggagtagttgaatcatctttgtaagtttgactattacaaaactgagtcttaaaagacattttatattaaaagatacctcagataagcaaactcttttacacgaaaatagacacttgttcctttcaccatttattatccctcccttaccgtgagcaagctaacgagccgagaaaactacgcacgtaccaaattaatacttcaagtaactactaccatttaccaacataattcggtaaaaaaactaaacaaaaatccaaaatttgggagtgatcaaactttattaagagagttactaactagggtcacacacacatacatacatagagcttcacaccaaacaattctcgctgaaaccaataaacttggtcttatgtcttctttcatttaatgtatatctctctcatcttcttcctctctaaccactttcctcccttaatttctatccctatatttattttcctttcattttcctctccaactaattacacacacttgaagctgaaaaaa

SEQ ID NO: 3147 - DNA, 3000 bp, Unknown
  misc_feature (1)..( 3000): cDNA_ID_2049863_gDNA_ID_1620628_Annot_ID_162579 3000 nt of promoter + ATG
ttttaagtcatatatacgacattgatgagtaaaaaactcaccatgtgttttcaacaacttatctatggtgaaactttcaaaaaattcattatatgattccattttctatttaaaatatatctagatcacctttatcttttaagtttgcttgtaaatggctaaattagaatcactgtttattaatttcaattattttgaatgttattgatatcaattgtttcttttttatattctgaagttcgatattgaacttatagatatagaaaagatttctttggcaattcaataacttttttgtacaagaacataaaataacaaactaaaaggaaagaataacatcaaagtatggcattcaaacatcaacgagacctttaaccaaactatcgccgcatcaaacgcaattatggccaccgctccggccgcgactattatcaccgctttgaatctaagaagacaagacgctataaggataaccgaaaacaaccacatcctattgttcaccatcatattttgtaaattatcttgatagatattttgacagcaccattccaaatagatgaaatatggaaaagaaaaaaaaatctcctttatcttccaactcgaacctcttgcttatgttgatatagatggatgtgacaattttaattctttttatttaggagggaatgcgtggtggaaaattaatgcgaagtataatgatgcaactttatactataccaaaaaataatgatgcaactgcatgcatggaataatttattcgttttgggcacgatctggttattaatttgcatttatatcagtgaaaatgacgtacttgagctggctaataaggtctaatgctgatattcgaagatatatgataaaacatatgaattaatatagcttttatttcacggtatttttaactcttagaagagaaaccacatatgcttctcaattctcacaatcgacggcaaacataagaaaattatggatcgtcaactttattcagactttagagtcacacctcacacgttgggattccttttaattcacgatttttcaaaaaaaaaaatcacacattacttgtaaatacacaccgatcagctgctttgtaatcggttgggattttctataaatagtatgtttgagatatattttattttttccttccacactcacccggagatcgcacattgtctttttaaaagcatctaaatttgaagaaagaaataatgagtcaaaaactaactccatgaaccaaggagaaaaacactctccgtctaatccaaaccataaccaaataggcttatatttacaaattccacttctggcaccaaaatttgcagaagaataaacacaacttttcattgtctttgaagagaacataagccatggattctttaagaggccaaggtgggattcagatgcttttaactgctgaacaagaagccggacggattgtttcagctgcgaggaccggtatagtctctttctcctttatggcttgttggctctaatagtaagattttggttttgaatccttttcagcgcttttcttttctttttgtatggacggatcgatgatcagcaaaactagcaagaatgaagcaagcgaaagatgaggctgagaaggagatggaagaatacagatcccgattagaagaagagtatcaaactcaagtttctggggtaagcaacaccgaaacaaaaccggctagtgagatatcttgatttgtactcatattctttaccttttgtttcagacggatcaagaagcagatgcaaaacgtttagatgatgagacagatgtcaggattacgaaccttaaggaatctagttcaaaggtctccaaggatattgtcaagatgctcatcaagtatgtcaccactactgcagcatgattctcactacaccgcccccatcgtatcttattctcctgataataaaactgttatgattcttcagctctagttttttggtccgcgatttctaatagagccaaatacatagtccattggtagagaaactcataaatatatggaaactaaaacaaacattagatgaaagtatcattgtaaaaaaaagaggaggggatcgaaaacgaaactaagtacacaagtgatgaattttaaacataagtacaaaagagaacatgcatgcatgataaatgcaatgtttggtaaatttgtatcatattcgtactcttgagcattatgtggacattcgtaaacaaactgttaacttgttaatgacattcactaagataaataaatgagcatttggaacaaaacaaggcaaccaccgtatgaactaccgtccgagtccgacacattaggtccatatggcgtagctttgacattgcgctcaattttgtaaacgtataaataataataaattcctttatttaaaatgacactacatatgtaaaattcaaaatatgtttaatcaggtaaaatagtttttttttttttttaaatcagattgagtaatggaaaatttgagattgcattacctttcttttttttttttttttttggacaaagattgcattgcatatcttacaaaaattactggatttcattttgacattagctatgtataaatcgataattgaggcaaatgatgattctataccaaaataaaagaaaagtttaataactggcatccgattataggaggaataatacgaaattagtaaatgagatgtacaaatttcgatataaatttactctgataaattacaaaaatctatttaaaaataataatcaagattccgttacgcacgtaatggtgaggcaagagagagatagagagtagcattgttgaaaagtctgttattggtgttctgtttgttgttaaggcgactaacaacagagcatatcaaaaacttggtcttcgtcttcttcatccttatcttctcttttctccatctctccgtcctaaccaaatcatttcacaattccggtgatcgccggaattatcaagaaatttatccagattccgatttatcgctagatg

SEQ ID NO: 3148 - DNA, 3000 bp, Unknown
  misc_feature (1)..( 3000): cDNA_ID_2991550_gDNA_ID_1620628_Annot_ID_162576 3000 nt of promoter + ATG
attctctagtttagctaaacttaattggaagtaaagtttattgttgctgatatataataaaatattttcatgtttaaaaatctaaatatagttgaatggactctttaacaagaaagtaaatattggcgtctataaggtcaagagatgtggcgtaatgactacttttgagcaaatcagtggacaaattaagactttccaatctttcattggtcaagtctaaatataaatgattggatttctaagtttcatttcctgtttttaggctcactcgtggactttttttaatttctttcctttgccatatttataaaataaaagagagagaaagaattttcaataattttcaacaagcaaagttcatgatggggaataagcgaaatctcggatttgtgatcttcttctgggctctggtggttgcagtagtagccacggccatcgagcatcgtcgcaatgagaggactaaaggcgtcaatggtcttgacaagatcatcatccgcgaccgtcgtggccgatctgctgaggtactcactcttacggtttggtttagatctattgattgtgtcatttacatcaaaaaacttggcttcaaaacatcttttggatattgcatgatgcagattttgtttctttgtttattcaggtttacttgtatggaggtcaagtcagttcttggaaaaatgagaatggagaggagttacttgttatgagtagcaaggtaacttcagtcagattcactctatctccttttaggatcatatgattgctacaaatattgttctctgattggctaaaaatattgttctctgattggctgtatctgcgataatgtttttttttttgttttgcttttgtatgtgcaatagttgactaagtaaattatgcaaagatgaatctttacatcttctttttttttgttttgaatctttacttcattagaggcttgtaaatgaatagataagtatagcttaataatctgctttgttctaaagtagtagtaattttatgtgtgtgtatgagttccaaagcagagtgatctaaaacatgtgttacgtattgtgcaggctatattccagcctccaacaccgattcgtggaggaattccagtattgtttccgcaagtatgtgtttatagaaaaaaaaacttttctttgttgttgaagggtatagttttgttaatgaaatgttttttatggaagtgcagtacagtaacaccggtccacttccctcacatggatttgtaagacagaggttctgggaggttgagactaaaccacctcctttgccatcactttctactgctcatgttgacctgatcgtaagatcatccaatgaggatttgaagatctggccgcataagtaagattcttgaaacatctctctctctctctcattttcaacattttttcagatatttgattaggaatattttacataaaatatggagactgttttttaatctatgtatccatttcaggtttgagtatagactgagagtagcattgggacatgatggagatttgacgttaacatctcgtgttaagaatactgatacaaaaccatttaacttcacatttgctcttcacccctacttcgctgtttccaatatcaggtaatccaaggagtcataacttcacgttgatatctttttttttggttgtgttggtgtaagtgtcattgaatcagctggttgttgtattcagtgaaatccatgtcgaaggattacacaacttggattaccttgaccaacaaaagaacagaacacgtttcactgatcatgagaaggttataactttcaatgctcaagtaagcctctttccatttgccaattcaaatttcaacccttttattattttagtccatcactaaaaaaaaacacaccttgcaaaaaaagcttgacaggttgtacctaagcactccagatcaactaagaatcgtggaccataagaaaaagaagactattgttgtacacaaggagggacaagttgatgccggtaattacaaatttagatttgtaaacatacatagacatagacacagtcacacagaaacagattgttttagtagtactaatgatggatcacttgtaattacaatgtgcagtggtgtggaatccatgggataagaaagtatccgatttgggagttgaagactataagcgttttgtaacggtggaaagcgcggctgtcgcgaaaccgatcacagtgaaccccggcaaagaatggaaaggaatactccatgtttctgtggttccatcaaatcggaaagcttgaccctataaaagtcttgcattcatcatcctcatcctttaaaaaaaaaaacttaaaactgtctttattaaagtatacttaatgttcccgagagacatcacatggtgaacacaaagttagttgggttccaaactggactcttgaccagttttattgttttgtaactttagcattcatgaataaaaaaagtgcgttaattacaataattgttaaatgtaattaaataaaagtgcgttaactacaataattggatattggttatttgcaaaattcatgttcttaaatcatcagtctaaacaaaaaaattagattagccgaagatttcttcttctacccttgatgatactatttgggatgggcttgcttagatgtgccgaatccaattctcgtttttgggtctatctatatttgggctgggctttataagaggcgaagcccatgtcgaacaatcaatttttttttaattttatatttcttttgggagtctgttctgtcgtattgattaataaagtaaaaaatcttagccacaaaattaaatcatctccaagacgtatcaatatcatcatcaatccaccaatgaaaagttctctctttttttttcccactcttactctgttctcgctacagaatctcctgggaaaaaaaaaaaagaaacttgatccacccgaattccccaaatcttcacaatttctggaaactctctcgatcgtgaagcagaaaagtgaggttccaa

SEQ ID NO: 3149 - DNA, 3000 bp, Unknown
  misc_feature (1)..( 3000): cDNA_ID_3071205_gDNA_ID_1620628_Annot_ID_162575 3000 nt of promoter + ATG
ttggtgagaccttatggaccaaacctgatacattttctgcttgaactgattagattggatattaactgtaatccacctttaacagatgatgatgaaggaccagtatggaaactatgtggtgcagaagatattcgagacatgtacggctgatcagcgtttaacattgttcagccgagtgagaatgcatgcatctgcattgaagaaatacacatatgggaaacatattgttagtcgtttggaacagccctctattgaaggtatgaaattccccaatgtaagtcaagttcaaaagtgaggtgaataatcacaatctttaggaacaaaagggctttgctgttataccatataagctgaaacagggcgaagtacacaatcaaatatattttctatgctaaaaaatggtcggtgaatcgctcaagaatgacatgtcacatgtgcatatagaaatgtgtggtagcacaagactgaatagaataagatgggattggtagcacaagactgaatagaataagatgaggattggtatatggatcaggaagagttacacattgtgtttgttgtttctgcagaaaaccaagaattgaggagatgagtggctcttctgatttcaagacagtgggctgactcagattcactcaatacaattcgctttttcatgaaagctggatattcattgggaaggtcttagatgattgtgaaggacatcgatattgttgtttacttggaattttatcatagccgttgtgatgattgtgtggcatgttctgtaaatattcataactgtatcagtagtttacttcagatctgtaactggtttgtggaatttcacatggtattcgaaactttctagatactagagaatattattattgaagccaaacattacatgctaatcctgaaatagcctcctcttcctcaaatttcatgagctacagattcttatcacatttcaacactgttttgagactttctttcattcatctgacatgaggagccaaagtataggatcgaaagagaaacttgtcattactcacgaaatataattgaaagcagtgtagcatatcacacttgacaatggaagaaacaccccacacaaaaatggaaagctcaaaccaacacctccaaaatactatttcaatcttaaccaaagagatcgaatccgaagtctccttcttcctcttctgattcttctttcttcttctcatcttccttaggggcagctgcagcttcacccgcaccacctccacttgaggcagctcctccagcagagaatcctccaccaccaccaccaccaacaattacctacgccacaagaaattgattccaattgataaaaattacaatgcaaaacaggaattatacacaaatattgatttgtactagtttccggagccatgtaaactaaagtcacctactaaaacagagaaggcaaccaaaaacaaattgagtgatttagctattacaaagctgtaacctttaggtatcattgttaacctataaaacaagctacattgacgcaaaatcacatttgatgcaatgataagagaactatagtgagccatgacacttgtatcactgatcaacgaccataattactgtgaatgaatcattcatctgaaaatgcaagctctgattctcacacagtattgccaatttcaaagatgcacgatctcaaactgtaagcttgttcgagcaagagagacttatacctggaatacggcggaggtaggggagacaagagaaaacgaagactgaacgccaccggaggaatcagcggagagagatacctgaacgagcttacgctggagctcgtaggtagaagaagctgaagattcaagttctccttcgtgttgcttcgcgctccacgcgccgcctccattcttgcatacgaatgtgaatactcccatcttcttcaatgtctgctaaaatcgatggcgatagtgagagatttctggaaaaagtgacgatcgagagtggttttgtttttatatacgatgatgaacgaaagctcaaaaagaagttaagaaccctagttttttggaggtctctgagtaaaagactgttttacccatagtggacttataggtcttaaatgggccacttttgagagtaatgaatatatataggcctagagtgaatagcaacaacccaccaaggttctttcacttctttgaaaaaccaaaaaagcaaagatcaacaaaatttatcagattctacgagagtcatttcctaacacatgagatgatgagattattagagtatcacaactctcaactatgtttttccataaactatgcatcgcaccattcaccacatgatattgtaactcttaagtctaagccatgaaatcaacattgaagtaaaagaactcacatagtaaattggttttctattggtttatattttaacaaaattatactgtactcatgtcatctttatgtcaccaaatcacaaactaattttctacttttaaaacaaaacatctaccaattccaccacatatcctaaaaactgactcaaatctctcaaaatctaaaatttcctaaattccacaaaatcatccataatctttaatcctccttagttatgatatcaaaaaaccattttattttaagtatctaatttccttgccataaattttattctctagtttagctaaacttaattggaagtaaagtttattgttgctgatatataataaaatattttcatgtttaaaaatctaaatatagttgaatggactctttaacaagaaagtaaatattggcgtctataaggtcaagagatgtggcgtaatgactacttttgagcaaatcagtggacaaattaagactttccaatctttcattggtcaagtctaaatataaatgattggatttctaagtttcatttcctgtttttaggctcactcgtggactttttttaatttctttcctttgccatatttataaaataaaagagagagaaagaattttcaataattttcaacaagcaaagttc

SEQ ID NO: 3150 - DNA, 3000 bp, Unknown
  misc_feature (1)..( 3000): cDNA_ID_1819626_gDNA_ID_1620628_Annot_ID_162572 3000 nt of promoter + ATG
caagtcttccttctccagtgattgaattcgaaaacaagagagtacttaattaattccagcagtctattttctccaataatttcttgttagtattaaactagtgatataaaagttcccaaagaatctaaattttgttttggattggagttggcttcacgaccttttttttttttttaagttttagtattcattttatatgaatggaatggggcaatggaaagaaaaatagtccaagtgggtctcaaaaataaacgaatttagctctgtcaatcgcacttgtctcttcatgtcattcgccggtttgctccttccacgacggcggacgatctgcttttcgacattactgtcttttaattttcttttagttgcctatttttcgttgttgttgtccattacgccattattacttttactaaacaaataatattcaaaaatataacaactaaaaaggccaattgtttttaatgacccctaaatttgagaaattaggaaactggccatttgaactttgaagcgcctagaaataatgagctgcctgggaggcagagctacattacacagtgcggctgggcatctttttctgaggttaatgggccaagtggtccggcccgtataggcccttaaccaaaaaaaagaagaaagaaagaatcgtacatggaagtttgaggtgtctcttagcatcatgagccatagtgtacaaatgcatcaaaagattagactaaaaaagagttgtacgaatagtgtgatataagcagaatattcgtctttgaaacatcttatcattgcccaatttggatatgattcggctagtgaaatatgggtttatgtttcatcgaatagtagacatttatcttatgaaaagtgcattagcataaacgaatatatggcttccttaagaattcgttgtatttgtatctgactaatggagatttctttgtgcaagtagagtattgtttcttttttgtgtgtgcgggcatgtacttgtaaatgacttgtggaaatttcattattcaagtacaaatacaaagaaatttccattgattaagatgttggatagtagtagctagttcttttttcccttcgaaaaaattaaattaaatggaagatagatacatagcatctgctcggatattagtatgttgaagcctcaaaagggcctaatccaaacatcgcaattcatagtaatttagagtatgaccaaagtcaaccaatataactatctaaagttatttcagtttttctaattttcacatctataaagtaggaaaatgatttggattagtataaaactagcaaaaaagaaaatttaaattgtagagtttgtacctataagtgtagaccattaaattttgttctgcatctgatcaaatctatacaagatcaatattaatcctatacgaactataaatcatgagaaaatcctcccggaaaaagtaatccaaaagaaagattatgaaaataggcacactgagcagtaatcaaaatctgttttatcagatgagaaattgttctaatataatggatcaagattaaactccacacgtctcaggttttagtcgacaccatttttctttctgattttggacaagagcaaatcagcaaaatgtgagtgagtttctatggttttgtcacaaaacttttgtgtgtgggctcgttggatacacaaacaaagtcaaaggttagaaatttattgagttttgggtatttccggttttagttatgagtcacatattctttcacaaaattcagacccacgtttttagcaattgaattcaactttttgagttttcgtctgttttactttctcaatataaatttttaactttgatactatatataaatttttaatataatatgtaaacttgttgtacatgtttcagttatacttagtgttttaacaaataaaatacactcagtcaatcaaaaatcaactgagtttctaatgttaaaggagtatttatttttgtaattcagttaacacttctaatcattttcatgaaaagctttaaacatatgcttttagttttcaacaaacatattacaaaagctattaagttaatcttcaaagttattaagctaataacttataaacgatattttacacataataatgttagttgtagttagactaaccatgacttaatcacccaaagagaaaacaattctagaagactagaaggaacatagaaaattaaaaaatgatatttaaagaaagaaagtaataaaaatttggtaaaccgataatgaataaaaagtcaaactccataaacttcgcggaaaaagaaaagcaccgtaatggtggaaatatttttgccattaccggaaaaaaatccaaacattttaaaaatcccactgacttagccaaagatggtcactttttctctctcccccttgtctctctgagcaccagaatctagggtttcttcacagtgaatctttttttttttttttgcttcctcctcaataatcgccttctcgtaagtcaatcactctccctctcgtcacttctgctccctatgttaaaaagttcattcatttctgcttttctagggtttttttttgggatttcaaagtctagatttttcttctctgttctacttacactctgtttcttctctctttatctctctgcctctcttttgggtttctctgtttttttcttttaatggaggaccatttacatggtcatgtatttctatctgcgtggagatatttcgtaggctttaaagttttgtgcttgtttgtttatatgttctttactttaaagttctactctgttagtactctgtctgcggaattagattactggtagggatgtaaaaaaccttgaggaaaatggtagagattctgattagaagctatatatcatttgcttattccatagtggattgatttagcttgtttaaattccagttctttttgtgatagtccctttcttatttcattggtgataaatttgtctttaggtacttgtgtgaaagctcccttctttgtggagaa

SEQ ID NO: 3151 - DNA, 3000 bp, Unknown
  misc_feature (1)..( 3000): cDNA_ID_1819630_gDNA_ID_1620628_Annot_ID_162570 3000 nt of promoter + ATG
ttctttctttaaatatcattttttaattttctatgttccttctagtcttctagaattgttttctctttgggtgattaagtcatggttagtctaactacaactaacattattatgtgtaaaatatcgtttataagttattagcttaataactttgaagattaacttaatagcttttgtaatatgtttgttgaaaactaaaagcatatgtttaaagcttttcatgaaaatgattagaagtgttaactgaattacaaaaataaatactcctttaacattagaaactcagttgatttttgattgactgagtgtattttatttgttaaaacactaagtataactgaaacatgtacaacaagtttacatattatattaaaaatttatatatagtatcaaagttaaaaatttatattgagaaagtaaaacagacgaaaactcaaaaagttgaattcaattgctaaaaacgtgggtctgaattttgtgaaagaatatgtgactcataactaaaaccggaaatacccaaaactcaataaatttctaacctttgactttgtttgtgtatccaacgagcccacacacaaaagttttgtgacaaaaccatagaaactcactcacattttgctgatttgctcttgtccaaaatcagaaagaaaaatggtgtcgactaaaacctgagacgtgtggagtttaatcttgatccattatattagaacaatttctcatctgataaaacagattttgattactgctcagtgtgcctattttcataatctttcttttggattactttttccgggaggattttctcatgatttatagttcgtataggattaatattgatcttgtatagatttgatcagatgcagaacaaaatttaatggtctacacttataggtacaaactctacaatttaaattttcttttttgctagttttatactaatccaaatcattttcctactttatagatgtgaaaattagaaaaactgaaataactttagatagttatattggttgactttggtcatactctaaattactatgaattgcgatgtttggattaggcccttttgaggcttcaacatactaatatccgagcagatgctatgtatctatcttccatttaatttaattttttcgaagggaaaaaagaactagctactactatccaacatcttaatcaatggaaatttctttgtatttgtacttgaataatgaaatttccacaagtcatttacaagtacatgcccgcacacacaaaaaagaaacaatactctacttgcacaaagaaatctccattagtcagatacaaatacaacgaattcttaaggaagccatatattcgtttatgctaatgcacttttcataagataaatgtctactattcgatgaaacataaacccatatttcactagccgaatcatatccaaattgggcaatgataagatgtttcaaagacgaatattctgcttatatcacactattcgtacaactcttttttagtctaatcttttgatgcatttgtacactatggctcatgatgctaagagacacctcaaacttccatgtacgattctttctttcttcttttttttggttaagggcctatacgggccggaccacttggcccattaacctcagaaaaagatgcccagccgcactgtgtaatgtagctctgcctcccaggcagctcattatttctaggcgcttcaaagttcaaatggccagtttcctaatttctcaaatttaggggtcattaaaaacaattggcctttttagttgttatatttttgaatattatttgtttagtaaaagtaataatggcgtaatggacaacaacaacgaaaaataggcaactaaaagaaaattaaaagacagtaatgtcgaaaagcagatcgtccgccgtcgtggaaggagcaaaccggcgaatgacatgaagagacaagtgcgattgacagagctaaattcgtttatttttgagacccacttggactatttttctttccattgccccattccattcatataaaatgaatactaaaacttaaaaaaaaaaaaaaggtcgtgaagccaactccaatccaaaacaaaatttagattctttgggaacttttatatcactagtttaatactaacaagaaattattggagaaaatagactgctggaattaattaagtactctcttgttttcgaattcaatcactggagaaggaagacttgttggtttcaccaaaaagtctcttcttcaatttttttaattcagaggcagtagtagtacactcagatataaaagaaaccaaaacgatcggaatcttcttccacttgttcttttaaaagattaaagcttttttttttctcttaaagcaaaaaaaggaaaactttccctctcgcgtctctctcttttgacctcacattcgctgaatcactcttctgggttttttttttttttttttttctttgccctagatcttaaagacaaggaggatcaaattatacttttttgagatctgggttcggacaaagattctgtctttctgcattctctaccgtttcgattcagctcgaggtaaacttttatttgactctttttgactgagaatgctcgttagtcattacagtgtctttttgttgctggagggttgaatctgggatttgtagcttttgatttttgtttggtcggagaataaatcacgagacttattagacttgttaagcttgtccgtgtgctaaagagtgttttctgaggaatgtcctgcactgcccgtatcacgggaacaacgtgcattttgcttattgcttctgtctgaagcagttttcttcttaagattagtttgaaacattacttaatctctccgtgttttccggaatctctaatctcggagagagtctttgttcttcatcaggcaatgccaatctaaaaggagtaggtgaaaaaagattcaatttttgtatgcctatcaattagaaaggagaagaggggaggtggttagattggtttcaatg

SEQ ID NO: 3152 - DNA, 3000 bp, Unknown
  misc_feature (1)..( 3000): cDNA_ID_1841306_gDNA_ID_1620628_Annot_ID_162569 3000 nt of promoter + ATG
gagtttttttttttaaaagacagaaaaaacaaacattaatttcttttgttattttattttatttgtgaagaacaaaagatgaagttcgtcttaggatttatgatatcaagtgttcttaatattttttagtatgtaaaattatcagtgaattgtgaatattttgcatgaaatagaaactgatacgatacatataattaagaagaatcttactatatatgatttattagtaaaaattccaacagtttataaagttatgctagcatgttgcataggtttcaaaattcatgttaactacccataagatatcagttacatgtattatagtattgatgttttgtattaatgctaaaaatatttggctcttgtgtttgttagtagcttagtattaattagtagtgttatctccgtaggtaggtacactatactatgcatgaaagtgaactgtgaaccctccaactattacttctctagatagagtattaaataactcgaaaaaaccttttttcattttatacaaacacccatttatttatatttttgaaatctatgagaggtattaactacgtactgtttaagtagtaaaattaatcataccatgtgcaactaagttttttgggtaaattatacaccacttgtaacttatacagatggtataatcaaactctataaaacagttgaacatttatatttcgtacaaatcaagtcattttccaattaatttatttagattatgatgtttagcttaattatttttcttcgatcgtaaagctgccacctcagctgaacctaccaagatcacaactccaatgttacggcgagatggtctacagcttcgtcggtcaggatctgcttggggaatgcagccgccgtgatcttcccattgaacggctcaaatcagtggtgacgtggaacatctccacactccgtccggtggtctttggcatgtctccgtacaactccgttctcggcgagactcaccacgtatcgaacggtcacatcaacgtcatcgccgaacaagtataatcatttgtaatataatcattatttagtcattacaactataaacgaaacatagactgatatatatacatcgttaactcttaggtagtgcatcatcctccggtttccgctcttcatgcgactcacgaacaagaaaatatcgacgtgacatggtgtcaatatttcactcctaaatttcgtggtatgtttttttttatcattttagttttgtagttaaattgttctgctacatcccaaattatctcaaaaccaagtctttttgttgttgttgtcaaacctcaaaaccaagtctagttttgagtaatccgtccaagaacgaacaccaattcgaatatgcatccggtttacactttcaaaccgaagcatctcgtctttgttcaaagttcaaacatatctaatttctgcatgtactcatttaatggtccataaggtactcacgtggacgttgaggtaaagggtaaaagggtaatgaagcttctgaatcatatagagacttatgagatggaccaaccgagactaataatgagattcttaccggcgccgggagcttactgggccggaaaagtgaaaataaagtgtccggagactgatctcgaagctgagttacatttgatctccgattcattcattgaaagattcagaggcaacaacaacagatcaataaaaggaaagatctttgaatcttcctctggtaatcagctctacaacatttttggccattgggacaggtaaaaaacatagtcgttattacagctcttaaaaaccatcattagctttgaatgatgtgatacgcctcccataaatatgtttcagaacggtaatggcgaaaaatataaagactggtgagctcgaggtcatttacaatgccaaggagaatatcacaggactcaaacctccaacagtcaagaacctggaggaggtaacggagagcgagtcgacaatggtgtggagtgaagtaagtgaaggaatactgaagaaagattgggaaagagcaagagaagctaagatagttgtggaggagaagcagagagcgtctttaaaacagagagaggcttctggtgagtcatgggttcccaaacatttcttagtggtcaaagacggtaaagactgggattgttcaccgctacagcctacggttcctccggcgccactcgtcatcacataggagcaaggacgaatcattcaccggtttcaagattccaaaactctatgttgataattataggttttgaaattataaataaatagaaaaataggttgatacttgataatgacatatccgtcaataagtattaaagatgaatgatgttttttgtcaattcatttgaggttgaatgtgtgagtgatacgtcaggcttttgagaaaaagagttcttaaatactatatgtctatatgagatttttcacctatgtaataacagaaaatattttgtttttcctctacaaaattatttataatccattaaatttgaaaatgaagattcaatctacttctctgttattcgatggtgaatttgcatgtattaaaataatctgtgttaaaataataaatcaatttcatctccataataatttaataatagttaagcattagggcaaccttatttaaaagcattaagcgagccttaaatgacgaaaacatggatctaacgagtaacgactaacgcccctccgatcgaatcaatagttaatgctaacccaactctctattttgatatcctatctatctttctagctagctatatagatggagcaaaaagattgatactactagtaattgtcactatatgtactacttagtacgtaagtcatagctccttggctcttttcttaaaaataatttcttttccaaaagtaacaacctcaaatggtaattacttagtgtgagtcattgactttttggtaaagaagtgaatcatacacgtagattaaatttacagatctaatatttttggttgtgtataggcagaagaagagaaa

SEQ ID NO: 3153 - DNA, 3000 bp, Unknown
  misc_feature (1)..( 3000): cDNA_ID_2049449_gDNA_ID_1620628_Annot_ID_162568 3000 nt of promoter + ATG
ttctcggtaacttccttgtcttctttgatctcttgcttttggttaatttgtgtaactgtcactgttgttattacaagttttttttttttttgttcttgttccatgagttctctgtttgttgattggaaaataaactgacaaaagtatagtatgataggagactgaaactgttctaaatttggaaactttaagcatatggtttcttattgaaagatctgtctcgttgatcctgaactctctcccagtgagcatagcgtatgctaaacttgtctactgtttgcagacacggagaagttttacacggaggtccaggaaaagatacttgctagatacaataaaacatttgattggtctttgaaagcaaagatgatggggagaaaagccatagaagctgcaaggcttttcgttgacgaaagtggaatcagtgactctctttctgctgaagatttcattgtagaaagagagtcaatgttgcaagacctcttccccacaagtgacctaatgccaggtacacaatccgcattgattaggccattctttcttttcatatatatatatatatatgtctttaaattctgtttgtttagtttcatttgaatcagcctctgatttattctctttgagtcactaatcactgaaagagacaagctcttagctcttctacttttcgctgtatccaatattcttcctctaatgcaggagctagccggcttcttagacatctccatgggaaaggaattccaatatgtatagccacagggtatctctttctgtattagcacatgctcttcttatagatcactgagagtgcaaatggctttttcagcttctttttataaatttatggtttatggcatatgttatctgatttagctactttttaatgcagtacacatacacgacattttgatcttaaaacacaaagacaccgtgagcttttttcgcttatgcatcacgtagtacggggggatgacccagaggtgaaggaagggaagcccgcgccagacggctttcttgctgcatccaggagatttgaggtacagatggtcactaaaactgtacttatcaaactaaagcaccagctattagcatgtgtttccacctttgagaagtttgtaaaccaatgttttccctcttctttgcggatttcataggacggtcctgtagatccacgcaaggttctcgtgtttgaagatgcgccttctggagtccaggcagctaaaaacgccggaatgtaagtggatttcgtgtaacattttccaagttctcttagctgatgagctattagtggttcagttctgactggtgtgtgtgcaggaatgtaataatggtaccggattcaaggttagataagtcctactgcaatgttgcagaccaagttctggcctctctgctagatttcaaaccagaggaatggggcttaccttccttccaggattcacacaactaaaacaacaaagctttcagggcaacgttatcctcaagctaacgatacttgactcgttaactttgattctttaagcctcttacgctatacgagaaagattattgcaaattatagattcttattggggtaatttaaaacaatatatttatgttcgtgatttgttttcttgattcatgaatttgtaattgttatccagaccgttaagtgtgactttggtgagaatgatattagaatgattgttgtgagtgtgggttacattcgaaggtcataggcttagattttgcgggatgtcgttaacagaacttgaggtcaactttatagtcggtagccaagttcataagcaagtctttgctactattattgtagaaaccgacatgattggtacatgacattgaatgttaaaatcaaaaccaatcacatatctctattctctaccaaaccaaattgcaacttatctcttgtaagaaacttcaatgattgcaacgggcgaaaatattgtctcacttttttattttatttgtgtcgtccgcaattaacttactcacataatcggaatccaagttagcactaatacaaagtatgtctttatgtagcaatgttgcatcgttttcaaagaagtgttattcattgcttactttcgtaatgatgattttttcccactcgtttgtcgttactatttactatcaatgatttataaatcatcgttaatgaaaatttagatctattttagtaatagatttgtttggtttagtacaagggattgtgaaaaagataaatttgatgattaaagaggacgcaaagtttggcgagtctttactctatatagagatagggtctaagcattcacatgcacttatgaaccgtccaacatcaacgttaataacgtgtgattcgtatcaaagtttacatatatttggcaaactttaatttattatcttgaaaactatatgtttcatttttgccgttttgagtaaagaatcgtacacccatcaattttcagatatatatgagccaatccataattaatctgattgattagagagaacgttataaacatctttaagatcaacagtatattattggttgaccaaaaaaaaattattttgatggtgaaagtcacataaatcaagtataagttcttgtcaaatttaaagtaatctctacgaataataatattggatacatgaatcataatttgtgatggtataatatatggtacctttcccgtgcaaaagaaattgagtcattgaagtgttaagcaatagtttgaagtttttatattgaatattacaaagtcaaaagcccttaattacatcatacacatcaagtcatgaaatacatataatatcacacatcaacttgatcattcataaagtcttacgttccatcttctctacaggacaagagtctcccaagatatatatacccactaatacccaaatccatagacacaatctccctctatatatccatttctccaaacgaaaacaaaaaaaacattaagccaagaaccgcatatacgaaccaagaacacatcatcgttagttctaatt

SEQ ID NO: 3154 - DNA, 3000 bp, Unknown
  misc_feature (1)..( 3000): cDNA_ID_1443622_gDNA_ID_1620628_Annot_ID_162565 3000 nt of promoter + ATG
aactcctaatgttatacatgttgtggcagctatcgtcaaaaggcacggcatgggatgagattgacttcgagtttttgggaaatcgcacaggacatccttacactatccacaccaatgtgttcaccggaggtaaaggcgaccgtgagatgcagttccgtctctggttcgatcccactgcggatttccacacctacaccgtccactggaaccctgttaacatcatgtgagtatatagtctatcaggaaaccctaaattgatagtaaattatacaatataatccagtatattaacaaacgttttattaattagttcatttattatcaattggtttttatataataagcttatgaacattgacagcgtctaatctcatatatttcctcttttgatgtgatcccttacattgagcactataaaaaaaaaaaacgagttctcttgacatctatagacatatttgatatatatttcttgacattcatgttggtttcttgtgtctgaagcttccttgtggatgggatcccaattcgggtgttcaagaacaacgagaaaaatggggtggcttaccctaagaaccagccgatgaggatatactcaagcctttgggaagccgatgactgggctacagaaggcggtcgcgtgaagatcgactggagcaacgcaccattcaaggcctcttacagaaacttcaacgaccaaagctcatgcagcaggacatcaagctcaaaatgggtgacttgcgagccaaacagcaactcgtggatgtggacgactctcaatcctgcccagtacggaaaaatgatgtgggtgcaacgagacttcatgatctacaactattgtaccgattttaagagattccctcaaggcctccccaaggagtgtaaactttgattctattatgggaattttcaagcatttttctttccgttttgtttcatcttgtgatgttactttgatttattttgttctttcttttggtgtttctgagatacgatattacatgtatacgtattcttcctgagaaaataagaagttgtattactcgataatacattttatctctcaatgtggtgtgattgtttattgggtttggcgtacaatgaaagctacatcaatgtgctttagaaaaatgcatacgaaaagaaaaacacaacaatcaaaaacccgtgaggtaactaaattatctccatttacaaatatactaacaatactactaatttattgctaagctgtcagctgtcacgaccatgataatgaaaaaaaaaatcatctctgttttcttctaaactttagagtttctcgaattttcacatataataaaaataaccaacagttatggtactctgttgggtgaagatttgctatgtggatatgtaaaatgcttagagtctttacattgtgattttagtggctggttagtggttattaggttattacaaacgcttttatctttgtacatgatcttcttaagtagttacagaaatctcaacttttcttaaactaaacgaatatctttgatttttattttctttacatcactcttattgggtctaactcactgtaaaattcctgcatgtttatattatgaaattgagaaaatagtaaatatatgttttaatttcaaagtttaatgaacgcgttggttggtccaactaactaatagggcccaacattaaagactttaagacccacatttaggaaatgaatttggacagtccaatttaaagcacagaacgtgtctcaatacttattcagtttatttcttcgacaatgatttttcaaactaaattgctatttttgatattcaggatatttcatttcatataattcagttgcattttcaggatttacaaactttgtaattgtctcctcataatgtcactttttccttcattccatccaatttgtcgtcaaagggcaataaaaataataatcacaatgctaaattctgataatcaaatctcaacaaaatatgactcaaatcaaaccctgttgattggaccaacgaattagacacttgagctttagctcctgtgattttaatgtggtatgcttgcagaaaatttcttaccaaaatgtcaactcatctccgagattaagcgtactatttgccaatacccgagtactcggagctaaataatagaaaaagaaaaaaagaatacatatctcatgtccaaacaatattttatatacttatttcatgacaaaaatcaggaacaaattaaaattttacagatataaaataggtccacgcaacaaacacacgttaagtttcattaggtttagattattgaataagatgcagaattgtcattttcaatattgattagtttctggtttaagtcaatatcacctggtttagagccactcgtgacaatgtataaaaaaattacgtaccatctctatatccaaaactagagacagagatgtgtcgaccatgaaactgtcttaagaactatgacaatttggtcataggcatagcctaggcaaaaaaacttcatttaaaaaaaaaagatcaaaatgtttcgattataaaagattcgtaaggttatataaaatacagaaagcatgagatataagttttctcaatattacaaggttattctcaaataattcaaacgaagattctcgtctaactatcacttttagaggataaggacagaaaattaaattagaaagtcctgacggaccaaattcattagacgcagttggctaatcatacattcaatgccaatggagaagtccaactgtatttcatttcaatcttactcatacaactatacaagtgatctgcaaattgccgcgtacatatatgaataagaaaaatacattaaaattttatatccacctgccaaatcctttcaacgccaaaccattcccctatataattatatatacaattacaaattttatgttacagtcttcatttattcgcgtaaagatttcaaaaagtagtgaatatattcttgtaggaagctgcaggggttaaggagagaaaaggg

SEQ ID NO: 3155 - DNA, 3000 bp, Unknown; identical to SEQ ID NO: 3144
  misc_feature (1)..( 3000): cDNA_ID_1819638_gDNA_ID_1620628_Annot_ID_162563 3000 nt of promoter + ATG

SEQ ID NO: 3156 - DNA, 3000 bp, Unknown; identical to SEQ ID NO: 3143
  misc_feature (1)..( 3000): cDNA_ID_1819642_gDNA_ID_1620628_Annot_ID_162562 3000 nt of promoter + ATG

SEQ ID NO: 3157 - DNA, 3000 bp, Unknown; identical to SEQ ID NO: 3141
  misc_feature (1)..( 3000): cDNA_ID_3091891_gDNA_ID_1620628_Annot_ID_162555 3000 nt of promoter + ATG

SEQ ID NO: 3158 - DNA, 3000 bp, Unknown
  misc_feature (1)..( 3000): cDNA_ID_2049474_gDNA_ID_1620628_Annot_ID_162554 3000 nt of promoter + ATG
tttttattactaacttcaaaggtttactcaaaaatttaaaattcatatgtatatcacgttttaatcttggagtttgggaacttgaataggatatatgtgttgggacgtccgtcattggtatccggtttcaaacttgagaaacaaggaatacgtttcttgagaagcaaggtttacattaccacctaatctacttaacatactccatcagcatgtctttaagattgtgttcctcagcttgagtcactgaatcaatatgcaagcagctttgttcgcccactacaaaattggttctgaccgtgatgtacggctggagaaagcaacatgagttgttgggaccaaatacttgtgtctccaaaaaacattgacgtctacattattttatgacaaacttgtccgttgacttcactaggtggcgagtgaaggagtaagattggattgagtaaaaatttaagcctagcatgaaatctagcgccgaaaccttaatgagtgaagatcatatagatacacaaatcctagaatgtgactgtaattgaatgattcacttaccaaactacaagattttaaataaaatctcaattctcaaattcataatttccaactatggtgttttagtggttgcaaattaatctgttagtccaagaacaagaatttgaatcatcctactatgatttaattcattgttggtcattattatgtgaattttttttctaggtcagcctatgattctcccgttaacagaagaaaattcactatgggactccgaaatctaatatggaaccggttaaccatctaaccggaccatgtaaaggccagctttgtagcaaataattattagattatcagcccaataaaagcccaaatccgtaatatataatctaatcgtcttttatccgcagaaaaccctattgctcccctttgctcaagctcagtgcctctttgcagcgaaagctcaaccaacaagacgatggtatacacatactctgcttctactctgtttctctaaatttacatatttactgaatgtaatggaaggaattatccgagtattaattgtgatcttgttcgtccttttatcagattatctcagagaacaatcgcagagagatctgcaaataccttttcaaaggtttgtgagtcatgctctctttcatttccttctattttcagctagtggaaccaggtttaagctagttacatttctctagggatcttcgaatctaagcttgtagtgagaaacaattgcattgaaatgtgaaaagatttatgcttgctttcagctccttttaggcctacgattttagatatgaacttgtttataaagtagtattgtaaggttcagagtaattggaatgctggatctaacaatgtttgttcataagttataattcttgaagagtatgatagattggtatataactgttgagggatttattatctagtactgtactcagttgtctagagaaagaatttgtgtggatactaaatgatcatatcttactgggtttcgtagagggagtatgctttgctaagaaggatttcaatctcccaaagcatccgttgattgatgtaccaaacctgcaagtgattaagctcatgcagagtttcaagtccaaggagtacgttagggagacatttgcgtggatgcattattattggtttctgactaatgaaggaattgagttcttgagaacttatcttaaccttccttccgatgttgtccctgctactttgaagaagtctgctaagcccggtggtcgtccctttggtggcccacctggtgatcgccaaaggtagtttcatctttaaatcccttgacctgtccggtctgagggattggctaatttctgatattgttttggcttttgttttcagaggaccacctcgctctgatggagaccgtcccagatttggtgaccgtgatggataccgtggaggcccacgtggtggtgatgagaagggtggagctccagctgatttccagccgtctttccaagtaaatcttcgacttactaatcactcctagtttactgagcctatatgccttccacttactaatcactcctagttaactgtgccaatatgcttcgtttaaagtcttttagctagttgatgaagagattgtctaacagcgtgttgtatgttggcagggaggtggtggtaggcctggttttggccgtggtgcaggcggttacagtgcagcagcaccatctggttcagggttcccttgaaaaatttgttgtcatattgcgacgatggaaggacagttttgttttttgttctagttctgtttgtgtaatgcaaatctggaatctataatctatctattaccttcaccttggtttaaacgaacaaatcctgtagtttcaggattagtgtcaaaattcatgtttcttactctatctgtcatggaattaggtttgcctttttaagaacaagaagagggagaccaaatctgtcttctttagtaatctagtgtggtaaaatattgaagtggaaatgtgtattagagaattcgtcttaacttctacaaaagacaaaagggattcaatgctaaattggaatttgatccaatttctttctagtctaatctttgaacaatatccttacaagaaattttttatcggacatagcgcaactctttctttaacgttgaacaataaatccaacttcgtctagatgttagtgttccaagaacaatccacttgatacctcaatttcgtctgtgttgcttccaatacaacatcttgtttcttagattgttgacaaaaaagttgagcttctttctaaacatattaaagggccgtttaagaagcccatcagaaagaggttaaagggcctgtccaaaatagaaatttgaaatcctctctgtgagacgaagggtttacactaaggcggaataaaccctaaaccctagctgagtagcttcttcctccccaattgctatttctctgcctccgtgtgctgagaaccagaacgaaaccctagcaaaatatcgccatg

SEQ ID NO: 3159 - DNA, 3000 bp, Unknown; identical to SEQ ID NO: 3154
  misc_feature (1)..( 3000): cDNA_ID_1976739_gDNA_ID_1620628_Annot_ID_47190 3000 nt of promoter + ATG

SEQ ID NO: 3160 - DNA, 3000 bp, Unknown
  misc_feature (1)..( 3000): cDNA_ID_2999612_gDNA_ID_1620628_Annot_ID_47192 3000 nt of promoter + ATG
caattaacttactcacataatcggaatccaagttagcactaatacaaagtatgtctttatgtagcaatgttgcatcgttttcaaagaagtgttattcattgcttactttcgtaatgatgattttttcccactcgtttgtcgttactatttactatcaatgatttataaatcatcgttaatgaaaatttagatctattttagtaatagatttgtttggtttagtacaagggattgtgaaaaagataaatttgatgattaaagaggacgcaaagtttggcgagtctttactctatatagagatagggtctaagcattcacatgcacttatgaaccgtccaacatcaacgttaataacgtgtgattcgtatcaaagtttacatatatttggcaaactttaatttattatcttgaaaactatatgtttcatttttgccgttttgagtaaagaatcgtacacccatcaattttcagatatatatgagccaatccataattaatctgattgattagagagaacgttataaacatctttaagatcaacagtatattattggttgaccaaaaaaaaattattttgatggtgaaagtcacataaatcaagtataagttcttgtcaaatttaaagtaatctctacgaataataatattggatacatgaatcataatttgtgatggtataatatatggtacctttcccgtgcaaaagaaattgagtcattgaagtgttaagcaatagtttgaagtttttatattgaatattacaaagtcaaaagcccttaattacatcatacacatcaagtcatgaaatacatataatatcacacatcaacttgatcattcataaagtcttacgttccatcttctctacaggacaagagtctcccaagatatatatacccactaatacccaaatccatagacacaatctccctctatatatccatttctccaaacgaaaacaaaaaaaacattaagccaagaaccgcatatacgaaccaagaacacatcatcgttagttctaattatgaagaaggatacatgcaaggaaggatcatcaatctcgagaaactcatcggtgggatactatgatgaacggatgccagagggtgttccgttcgagtgggagatgcagccagggactcccattaatactcaaccacgggaggttgttcctccattaagtcctcctccagctatgctcagcctcggcctccccaagccatccatctccatcgaagagccaaagaactttgtgtttccaacgaagctgaagctgcggaattggaaacatcttcattgcaagagatatttttctagattgactaacaaaatggttttgtcttcaatttgtttgtaccctgataaacgctacatgtggaaaaaatgaatcaaacgtatggaaatgggccggggtcgggcaagattttttttataataataacaattttttaaaaaagttgaggacttataggcctattgacaaagattttctagtaaaattttctatcataggttttaccatctaaacagctagcgtttgcttttatgttgttctaaatctgttaacagtgtttttaaaaagtaaaaaaaaaatagtttatcagttaaacaaagtgaaccaatttcaagttagctgcgaatactacttagtagtactacgattattgttaatatcagaaataattgtttatcaaataaagaatgaaagttgttaaaatctctgatcgtgtattttttgtcaacgaaatgttcgtattaactgaaacagaaatgtcaagttatacgtcgtcttcattaactctgtctctgaccaatatgtgtcgaaataatcatgttctgatttgtttgtcagaaaatcagcggatcggaacctctgtccgggggagaggctgcttggtttatttgatacttttatcatttccttaatcatacccccttcattttctgaaactattttcttacatttcttttgtttcataattgactgcaactctccaagtattagtatcaaatgtaaactttcataaaattaattttattaatcgctccagtacacaaaaacctacttttaacgtgaaacaaacatcttacttagttaccactacaatcatctaactaaccctatttactagtatttgtttttgttttattctacaagattttgaaagtttctagacatgaccaaaccggattctaacaaaaccgactaaactaaactcttaactcttaagtgaactaaaccgactaaactaaagtcttggaccattcccctaagtgcaacacaaatcggccacgatctaagcgaacgatgagatattaaatgacgaaaagatggacctaacgaccaacgcctcctccgaatcaatagttaatgcttacccaactcttttccttattttaccatctctctctgtttgcattgtttatatataatatgatcggagccaaaaggtagagaactatcacttcggctaattgtgatgaagagtgttttaaatcattagtttttgaggttttcagattcgtttcatacattgaactcactggttctttgtcaaaagaaactatcataaaaaagattcagaaatagcgtttccttcaacagcttctcaaatggtaagtggattattctctatcaaacttgtaattacaaaaaaaaacttttaacaacgtttaataactttcaaaaacttcacaaattaatgttttaattttttaaaaaacttctcaaatgtaagggtgaggcatagatagtttatacttgtaatcataatttagtttttaacaattctaagttctaactgttagagattgtacactctaattctgatttatcgtaattttgataaatcctgaattctaactgtaaaaccctaatatagcggattttagacgtgagaaatggtgattataaattgagttaggtttcaacaagaaattagatgcttagttttgacttatatattcaattatttttgttgtgtataggcagaagaagaa

SEQ ID NO: 3161 - DNA, 3000 bp, Unknown; identical to SEQ ID NO: 3152
  misc_feature (1)..( 3000): cDNA_ID_1841306_gDNA_ID_1620628_Annot_ID_47193 3000 nt of promoter + ATG

SEQ ID NO: 3162 - DNA, 3000 bp, Unknown; identical to SEQ ID NO: 3151
  misc_feature (1)..( 3000): cDNA_ID_1819630_gDNA_ID_1620628_Annot_ID_47194 3000 nt of promoter + ATG

SEQ ID NO: 3163 - DNA, 3000 bp, Unknown; identical to SEQ ID NO: 3150
  misc_feature (1)..( 3000): cDNA_ID_1819626_gDNA_ID_1620628_Annot_ID_47195 3000 nt of promoter + ATG

SEQ ID NO: 3164 - DNA, 3000 bp, Unknown
  misc_feature (1)..( 3000): cDNA_ID_1819623_gDNA_ID_1620628_Annot_ID_47197 3000 nt of promoter + ATG
gtgagaccttatggaccaaacctgatacattttctgcttgaactgattagattggatattaactgtaatccacctttaacagatgatgatgaaggaccagtatggaaactatgtggtgcagaagatattcgagacatgtacggctgatcagcgtttaacattgttcagccgagtgagaatgcatgcatctgcattgaagaaatacacatatgggaaacatattgttagtcgtttggaacagccctctattgaaggtatgaaattccccaatgtaagtcaagttcaaaagtgaggtgaataatcacaatctttaggaacaaaagggctttgctgttataccatataagctgaaacagggcgaagtacacaatcaaatatattttctatgctaaaaaatggtcggtgaatcgctcaagaatgacatgtcacatgtgcatatagaaatgtgtggtagcacaagactgaatagaataagatgggattggtagcacaagactgaatagaataagatgaggattggtatatggatcaggaagagttacacattgtgtttgttgtttctgcagaaaaccaagaattgaggagatgagtggctcttctgatttcaagacagtgggctgactcagattcactcaatacaattcgctttttcatgaaagctggatattcattgggaaggtcttagatgattgtgaaggacatcgatattgttgtttacttggaattttatcatagccgttgtgatgattgtgtggcatgttctgtaaatattcataactgtatcagtagtttacttcagatctgtaactggtttgtggaatttcacatggtattcgaaactttctagatactagagaatattattattgaagccaaacattacatgctaatcctgaaatagcctcctcttcctcaaatttcatgagctacagattcttatcacatttcaacactgttttgagactttctttcattcatctgacatgaggagccaaagtataggatcgaaagagaaacttgtcattactcacgaaatataattgaaagcagtgtagcatatcacacttgacaatggaagaaacaccccacacaaaaatggaaagctcaaaccaacacctccaaaatactatttcaatcttaaccaaagagatcgaatccgaagtctccttcttcctcttctgattcttctttcttcttctcatcttccttaggggcagctgcagcttcacccgcaccacctccacttgaggcagctcctccagcagagaatcctccaccaccaccaccaccaacaattacctacgccacaagaaattgattccaattgataaaaattacaatgcaaaacaggaattatacacaaatattgatttgtactagtttccggagccatgtaaactaaagtcacctactaaaacagagaaggcaaccaaaaacaaattgagtgatttagctattacaaagctgtaacctttaggtatcattgttaacctataaaacaagctacattgacgcaaaatcacatttgatgcaatgataagagaactatagtgagccatgacacttgtatcactgatcaacgaccataattactgtgaatgaatcattcatctgaaaatgcaagctctgattctcacacagtattgccaatttcaaagatgcacgatctcaaactgtaagcttgttcgagcaagagagacttatacctggaatacggcggaggtaggggagacaagagaaaacgaagactgaacgccaccggaggaatcagcggagagagatacctgaacgagcttacgctggagctcgtaggtagaagaagctgaagattcaagttctccttcgtgttgcttcgcgctccacgcgccgcctccattcttgcatacgaatgtgaatactcccatcttcttcaatgtctgctaaaatcgatggcgatagtgagagatttctggaaaaagtgacgatcgagagtggttttgtttttatatacgatgatgaacgaaagctcaaaaagaagttaagaaccctagttttttggaggtctctgagtaaaagactgttttacccatagtggacttataggtcttaaatgggccacttttgagagtaatgaatatatataggcctagagtgaatagcaacaacccaccaaggttctttcacttctttgaaaaaccaaaaaagcaaagatcaacaaaatttatcagattctacgagagtcatttcctaacacatgagatgatgagattattagagtatcacaactctcaactatgtttttccataaactatgcatcgcaccattcaccacatgatattgtaactcttaagtctaagccatgaaatcaacattgaagtaaaagaactcacatagtaaattggttttctattggtttatattttaacaaaattatactgtactcatgtcatctttatgtcaccaaatcacaaactaattttctacttttaaaacaaaacatctaccaattccaccacatatcctaaaaactgactcaaatctctcaaaatctaaaatttcctaaattccacaaaatcatccataatctttaatcctccttagttatgatatcaaaaaaccattttattttaagtatctaatttccttgccataaattttattctctagtttagctaaacttaattggaagtaaagtttattgttgctgatatataataaaatattttcatgtttaaaaatctaaatatagttgaatggactctttaacaagaaagtaaatattggcgtctataaggtcaagagatgtggcgtaatgactacttttgagcaaatcagtggacaaattaagactttccaatctttcattggtcaagtctaaatataaatgattggatttctaagtttcatttcctgtttttaggctcactcgtggactttttttaatttctttcctttgccatatttataaaataaaagagagagaaagaattttcaataattttcaacaagcaaagttcatg

SEQ ID NO: 3165 - DNA, 3000 bp, Unknown
  misc_feature (1)..( 3000): cDNA_ID_1819727_gDNA_ID_1620629_Annot_ID_47200 3000 nt of promoter + ATG
tctccaaaatgactacgttgtgaattgtgtgagcacgagttctccaacgacaccgttttcaacaagtaattgtaggttttctcacactagagtttatttacgtctaatcatcaatatatcactgagagtgaaatcggaatcacaaaaatggcgtcgacgaagccattgattgtcgcagcgaagacgctccgaaaccggatccacttccgatctggatccacatctactggtccaagccggtgggcgacaccgggtcacgaagaacgacccaaaggatatttcatgaaccggactccgccgcctccaggacagtcgcgcaagtgggaagattgggagcttccatgttacatcacaagcttcctcacgattgtaatcctcggagtgggtctcaatgccaaacctgatctttcaatcgagacctgggctcaccagaaagctcttgagcgcctcgagatggagaagcttgcatctgccggagattcatctggttaatcccaaaacttgggagatatgattcaatggttgatctggtatgtatgtgttttgtttgtttttccggggatttgaggagattttcccatttatgatgatgatcacgaatactagtgacctagggtttcgttttgttcctcctctcctcttcgttagtgtcgataaatatgttcatgaaataagcgatctttaactcttgacgatggttttatgtaactcaccttaatttttgatcatgtttcaaagctctcttgcctccaatcctttgcttataacttctcatatttggttacttttttaatattcttggagaaagtgatgaaaagtttattgcttttgctgacattgtatgattcatttgcttagaggggtctggtttgtttctgttcgttatcttatgactctgtgtggtacagtcccaacttcacattagtaatagtcagaagttataagtatagttctggttgggaaaagtttctctcttttgttttctagatataaaaatgtcgagacggttcattaccatagcttaagattctaggttctagcactatatacagtcatggagttaggtaatgaacactagattcctgtttgttttgtttccaaacatattggggggatagaatgattgcttgagtgtgcttcccagtttataaccattatgttagtggctgcgtgtgccgaattgcaagccactgtactaataccaagtgaaagaacatgagagtgtttgatatcggttttcggggaggaggttttgatgaagtacttggatatgtcgagggagagggaggtgcaaacataattacactcaagtaggtagatgaagttttagagtaacagtatacttcatgtcgctgcaggttctgatgaatagatttaggaataggtactgtcactttgaagattattacttgtctgatattttcattagccttcattgttgccttgtgaatcttctaggtaaccctaggttctgtgttggatccctaaatcttttcatctcattttggttgtttggattcttactctgtttcaatatctcccaagagtatgattctaaaatccttttcttcttttatacattgggatgtccaaaccgaacaaacaacgaaaaacgattgtagaaccggaaaatctaaaccgaaaccgagatttgatatccataccacacttgcatgatttgaccaaattggctcaactgaaaaagtgagtctcggtttacttgaatgtttgttggctgtttttgaatagtgaacggtaaaactggcgggtgtacttattgcttgctgccacctgcattgatatttcttaaatcgtatgcatctacatactacaggttccaaaatcacattaagtgcttcttgtcgtttcatattatatgtttataagatatcaaactagcaaaacttttgctttgattattttctagctgtatcttataataaagtttaatattatctcttgtgatctaccatccttagcttggccacacactctctgttcccttgtccacaatcgtaaactcaataatttcattttaaataaacgacaacagcttgttcacatataaaataacaaccatctcaaaataaaatcaagagttctgcttctctatccagttttattactaatttactactgcacaacatcatatatagccattgcaaaaaaatgttgcttctgcctttcacattttgttgtgtagaagcaagatcatagttactgtttagtgtttacaagtggggaaggcaaataagatctgaaggactaaagtgaaagtgacaatacggtcatcattactctgacctaaagtaaacgagtacaatgtgactggcgactcccggtaaacacttgaaccaccgacaaaaacttcccggtttatatgtaacggcatcattcacaacgaccgatcttcacggtccgtaccgtacacgatccatgtctgtagaaggagaaataaagtactagctttttacggttttcagaataaagaaaaaactcatttgctgaacaaaaaacggatttcttggtgatcccaaagtggaagaaagctctgtttcttcatccagattctcagtcactcgtaaattttcatttttttttttccttttttaatatctttcctctatttttcaaatatagaagatcaaaaatcattcttgtgaatgcactaatatctaatagcaactttgggaaattgtgagaatcttactgattgcttatgtggggacttgccgtttttagtattaaaaatgtaaatcattttttttccttttcatgtagattgaaacgaaccataacaagtgtcaataatgttgtcgttttccttatttcatatcctaatttgccttggatttcaggaatatacgcaactgagtttttgtcattttcttctgtttcagactattgatcacagctgttctttttttcaggcttttcttgaaagttgttaagtaactgttgctttggctgcaatggaggaaaactgaaaagagtttgatg

SEQ ID NO: 3166 - DNA, 1804 bp, Unknown
  misc_feature (1)..( 1804): cDNA_ID_2164645_gDNA_ID_1620629_Annot_ID_162627 3000 nt of promoter + ATG
ttctttggatgtgatatcagaagtaatccttatgtcaaaagattcatttccttctcatataccctggtatgcaatcatttatgtttttcgtcccaattttctatttctagcttttctgtatcttctttatttgcattctcatcccctcagaagtcagaatcattttctgctcttatttcaggaaagagattgcggactgcttgttaaagtgccttgatgacgaggaaacatgtatctgtaaacaaacttcagagttgctgaagtcaatcggttggtcttcttttagcctttatccgctattcatttggaagcttttgtttgtggccattattaatttctggtattggcagtcttatgtctcttatgacctctaaatatggcctttcttcatttgataagatgaattttgctgataataatcagtgttttgttaaaaggaggatttctgttaattattcattattcagatgagaaaaacttataaagatccaatttatggggtccaaaacttgttattccatattgcaatggcagttatagttcatattggataacatttattttctgctttcctatataatgaagccaatcaactgaatgatttttgttatcgttttttcttccagagccatcatttgtgctaccgaatttagtaaacctcatttatgcacccaatggaaaagtacaatcatcagctacagaaaccttgcttggggtcctgaaacaccataaggaggattttgatgttatatgtatgttgctgaccagtcttaggtatcgtgctctgtctctttttctcctttccccattgtatacatagttgtttgtttattcccatttaccctaagtgagatgtgagaatacactggattcttaggtcaagtttgtaaaagtaaacttacgaatgctcatacgtgaaaatattgacctgactacctggtttggtttttaattttggttttgcattgtatcaagctaatattgaaaaaggctttctgcttttgatctccacttttctcttgtagtaatatccaagctttggatactgcagaaagtaatggacattccactgaaggtatttggcttcttatttcattaccataggctacatgcgatacagaatctgtgttaaaatttgtcttatatatgtacaatccgaacgtattatataaaattattacaacacttcaaatttaagctggataagaaataaaattactggaatgtgaaacttaaacgatgtgaaatatgaactagtctggctgaattacatagcggacactatcaagttattcttggtcaaggcatgctcatcatcttcttgtactgttacaggtttaacttttgacagtgatcgagtgctaaagctgatcccagagtgggctagaagtgtaagtacaagaatacgtcatgcttgctttgctatctttgaaatcaatccatttttgtttctaaagtgcatgtataggcaccatttacgaactgttggtgcactactgaatagaaaatggtaactgaactattaactctgaaccttcaacacaaactttttcaggcattggttgtcccttttttcccttccagtactatttccttttatctaattgttttcttgtgtatgtgctgggaaactcttcgcatgggaatgaccaaagtgaccaaagcttgtgccagctataattaggcaattagaatatatttctgcctgttgactgaaatcaaattcttacaggtacaaaactggaactcactgatcggacctttgcttgacaagatgttcttggagccatccaatgccatcatg

SEQ ID NO: 3167 - DNA, 3000 bp, Unknown
  misc_feature (1)..( 3000): cDNA_ID_2164629_gDNA_ID_1620629_Annot_ID_162617 3000 nt of promoter + ATG
ccttttggctaagatcaagtgtagtatctgttcttatcagtttaatatctgatatgtgggccatcggctcacacgatattaactctatcttttaagggagaaagcccgctatgatagcttgctatctgggcttccacgagtcgcccatgcgttgcactactgcacgggcctggctcaacccgccaaactagaagtgaaacttttaaaattttagtcacttttgatgtttagtttttaaaatgatgtaggattctttatcattcaaagtccaaaacatccaaaatatacgacaagtaaaaatctgtgaagtaaatatatgaacttttgcttgtctctggcaaaaatctgaatggtaatgtttcagactgaagccaaaatggcattggcattgtctctgcgtcatgtgtgtctcatctgcgatctacagtttgatggataatttgcagaattctcaatcagcatgatgctatgtttatgaatcatgtaagcagaaacgactcctgtttacgttatatcaatgtttccatgggttttgttagttaaagattgccgctggaagcgtgtgcgtatactatcactgagaagaaagatgaagacaagccaaagatgatcgtagtagcttaaggaactcaagtggattcagacatcactttagagatcgaaatagggtttgagaattggaaaacagtgtgaaaataagctaaagcagttgcaatctcctcagttatattcattgcaacgttcgatgagatcttctaacagcatctcccccctctagctcttgatatcttattcctcaactaatcgagaaacacttaactttgaaaaataaaatgacaaaacttgaagacctcacacactctcagttgatcaaaacgaagaacactagctaagatataaagtcaagctgtcgttgttgaatatcccacaaagtcgtccttccaagaaaaagctcacaacaagacttgcggactaatttcatagttctttctacatcacctgaaaactagttaggaagctaaggctttctctgttttttttttgtttgtcattgttccactggttctttgctacaatttaggagactagaacaaaactaaattttttgtttggttatacaatgcaaaaaaatatctgcaaaataagtgatttagtctctaaccgagaaaaaagtaattaaaaacagagcaattactaactataatttctggtgtcattttgagactatagttaaaacttacaagcaatgttttacataaatcatttttaaaattataagtaaaaatgttggcgcctcagtatttcaggttcgattcccattgttctttttcaaattggataatttagtccacattgacaaaaagaaagaaaaatcataatatgtttaaggatgcgtcaagtgtatgcatatatattgttgtaaaaagaaaaaaggtgtatgcatacgtttctaacatattttgtctggcagtcaactatttgttatgaatatgtacaatcacatagaaatgatagcatgtggctatgttacgtgaattaaggcaaatgatcttacgtagggaaaattgtaactaaaaactcaacaacccttatttgttttttttgttatcttttccactttgctgcaaaatttattggagaatctgaataaagcggtgagcatagtacagctgaaaataactagatgatgaacttgttctttagtttgttttgattcttcattatatttaaagaaaatttggttagatagatcaaccacttcaacaatacttttgtaacttcaaatatttaataacaaaaaaattaaaaaatgtttgaactttactgaaatgaaatttcgatattagaatactaaagaatcaaacgtgcacttaaatatcatttagtttatatttatacaaaccatgaaagactctcatactttacaccgcacataaacaatcagaaccataccaaaccatgtgaatagaatcacaaagacgtcatgctttaatttacaagcaaaaaaacaaaaggcatcggctagagaatagcaaaaagaggaagaattgaacggaaaaattgaaaacatatggaacaaagtggagcacttaaacatccacggtaatattagtatattagtcaccttcagactagggccagacatgaacaaaggattcgatgttagtgacaagtagcatatcagactaataaggatatatattaagcggtatgggtaacacattaatcctttctccaattacattctctttaaggttctaagatccgccactaggccattttattggtaaaagtaaaaccattttggtggtcgtctatgagtgttaagaattatgtaacaatttttttggattcacctgaaataaatctgttgatttgaaatatttggacgttacatttccatatataagcttaccatacaaacattataattaattggaaagtccagctagcactttttaccacatgcaaagggaattaatcctaacttaaaaaattaggagtaatcacatcttggtagtgtataccgatcaatttccgacagacgttttttttttccttgcccattgattgcatagttcaaaacttcaaagttggccaatccaaccaagtcgaagagataggagatgttttgaagtatgaaaacaaatagaggggctaaaatcaaaataacaagaaaaaacgcttctgccgtgttcgaatgtgtcctcgtgatcatctccgtatataatcaatcaatcaataaaaatccagagttacaaacactcttctcaaaattttcccattaaatcgcaaagttaattttgcgattttttttctctttttttctggttgggttatttattttccccttttaaaaaacttctgcaacttgtcttgaaatctggggtaaaatatttcttcattggtttctggaaatctcggggaacgatttgttgggttttcttctttgtactctctcctcacattagcttttgttggtgggattttttgaggatg

SEQ ID NO: 3168 - DNA, 3000 bp, Unknown
  misc_feature (1)..( 3000): cDNA_ID_3070801_gDNA_ID_1620629_Annot_ID_162612 3000 nt of promoter + ATG
attttaaacctcattaagggtgttcatgataattaagctttcatataatatacaatgataatagagaattgatatctagtaaaacgaagatcaaatgatactagattagcaccatttcttgtgacatggggtttgtatccagtatattatcccaaatcttatttacagatgaattttaagtaaatcaaaatttatatatgcatggtttaatctcaatgtcactttttcttttggtttttatactaatctcagtgacacttattttgaatagaatttttttttcatatgttgcatctatacacatgcacacatacccatacatatctgtgtgtgaagcactgaagctagagcgtgagaccatcacagaacggaggggcagatgataccaggagaaagaaatagaaacagaaaaggtggaagaaaatcaaatatgattttattggtgctttttcatattagagaaaaatatttatttatatgattggacatggcatcgacttttgtctttccaattactttgaggagagattctattttgaggttaacataactccaaagaaatacccacactcttttcccccatttcccaattttacccatgcaacctttcttacattagttaccactaaaatcgtatgtatacatccatatattcatggttttgacagtataaaaaatctcatcaattgagacctaacaaatctatttcactttaatgtttagatgctttgattggaagatcacaatcaatttcatcaagtggtttgttggtcaactaactagttatgataattttagtatcttacttccatttacaatattgacaacaacaacaaaatggaccacataacataagtaaattgtcagtgaaggtattttcattcaggtactcttttcttttatgaacagtggactttgataagagcagctctgttatcctctctcacttaatttttttgtttttgtttttcctcttttttcttgtcttttattttcaaccctctctttttgtctgcaacaatgtgctttaagtgaaatgtgtctttatctcctttcccatacctcctttgttttcttttttattcaattacttttcagaaaaccaaccaaaattaaaagatgaatttattactgttcttttaaaaaagaagagctacttgatcatatttctttttgtaagggtattcggttaattttctaatttttttttgtcgtttttaataaggactattttagataaaaaccaaaaactaccatatctgcgtgttatattaggtaaatgattttttgtttttgttttggaatacctgtttttttcgtttttttaaaagttatgattctatgtatttgaaaacaaaatgataatactcaattaattatagtattaagggacatgtaaacaaacatacgactggctacatttgtttatatctttcggtaaatcgtatgattggatacttcaaaaactattttgtataatataatcctccttatattagtataaaaagatattttactataatcaagtgggtttgcaatctaatagtgttcgttctatcaactgaactcaataccatataaaaaatatcacagataaagaaattactttcaaccgatcgatgcacttctcacaaggttagctataatgaaaatttccgtattttactaactataagcaattgtatatctctagactctagatatgtgcatgtggtttgacgaatattactagtacttttatattggtaataatgaaaccattaattaagaatttagtctcggaactcataacaaagggtacgttcacgttgggactaatgtgaaagacaaaatacgagagggatgggtttatgaattatgaggaaccccatacttacaaaaatttccttccaaaggagaagcaatcaatttggagatgaagtgtatgtccatcttctaaacattccatctctaaagtcaaaaccctaaatttcagttccaaaatcgataagttatttttcccgatgcatgcacatgcaacactgtaattaatttcattcacgtgtcaaggtggactggatggtgatcatctatgtctatgccaaaaacaagttattaattgtgtattaccttttatagaaagttttcttgagcacacgataacgctaaaacttgaagttgcaataattgtttacgagatattgtcaaaatattcgttgttacaaatttttgattcatgtggattctgaattcataatttcatatttactgatatagagctttgaaaacattctgaggaaattgtaattttattattcaaagcaacatttgaaatatcatctagctaacaacagtgataatttcattcataagtttagttaatcttctaaaaactattttgttctttcaaaacaaaccaaacaacataacagttcgtcatgtccccttgtgcaaaattgagttcccataaaaatctcagtatacatcataaaactaaaagtgtgatccgaaagttccagtctaaggcccaaattgatggtaaattgggccttataattctatttgtacaagtaaataatccagcccatattcagataaaacagattttgactcttaccttcatgagagctgacattacttcttttgatatcgatgccttagtcaggctaactatatgcgatgcgtcaaacataaaatgaaattcatcctaccgagagaatctcgcataaagcaatgggagtcatggctcggattatgatcggtccatcctcagacactgacgttaacgtcagtcacaagtcacaacacgtgtaagatattccagttcttagtttagtttagagatacgcaacagcaaaatctctaagccacaaagattcaagtaggcccacttacagaatcttccataatttgagtttaaatgtcgtaaactttttaaccacgtcattagattagcgatgataaaaggaaattcagattttttcactcaattcactgattgattcatactgattgcaaatg

SEQ ID NO: 3169 - DNA, 3000 bp, Unknown
  misc_feature (1)..( 3000): cDNA_ID_3070805_gDNA_ID_1620629_Annot_ID_162609 3000 nt of promoter + ATG
tagaccaaaaaaaaggagaagttgttgacttttgaagtgacctcgttgacttgatttgttcttgcgtctccgactctctttctttcttgtgtccctttcttcacaactcacaagacaatattcttttctgagtttagagatgttgcgtctgttcagaaagaagaagaagcagaagaaagaagaggagatcaatctccagaagaatgggagcttactgttggaagaactcattgcaacttcaggaggtatatacaatcccatccgtacgttttcttccgaccaaatcctacaagctacaaatcactttgactggaactacgtaatctctgaagacagattcgtgtggtacaaaggcatgattgaaaacagacccgtactgatcaagaaattccaagactgttctgttttcgacgctgacaacttttaccgtgacattgctgtttcatctttgatgagtagccataagaatgttctcaagctcttggggtgttgtctagagtttcctcgtccggttctcgtgtgtgaatatccagaacatggagctctaaactgtataagatgtggaaaagaaggcgtccggtcattcccttggaatgtaaggttgagaatcgccaaggagattgcagatgctgtagcgtatcttcatactgaattccccaggactataatccatagggatttaaagcttgcaaatattttccttgacgagaattggtccgctaagctctcttctttcagcctcagtatagtgcttccagagggtgaaactggcgtaaatgacatggtttgcaggacatcaagctatatcgagcctgattactttaatacaggtttggtcaccgagaatgtcgacatctatagtcttgggatcatcatgctaattattttgacaggaaagtctgaatacaattcagaagtcgctgtttatcttcctgtattgcctgtctatgttgggaagtttctggagcgaggtttgttgactgaactcatagacccgtcgatattggacagcacgagtgatgacattcccaagcattcaagactgcaaatggaagcgttcattgagcttgcttttagatgtgtaagattcagaccaggagagaacgtgcctcgcatgatagacgttgcaaaagagcttaagaagatagagaaacatatatgaccatgcaaccttttctaatgcgacttgaaacaggtctatctattatacaggcttagtagtgaaaattgcaatcactgtatcttgtttttgatcgagcttttattaaatatgttgtatgtaagaatctgagtttccttgctacacaatgcaagaattgtttacttagatttatatagtccaagcaactgatacctcttcttttgggcaccaaagatgctcctatcttcagtcatgttcttgtgatgcctactccgcgaagatatctcaatatccaaaaagttccttgcggatctctagctagaatttttcaatgatgcttcaatctgcttgagttctttagctacttggatcatctttggtctgtcttcatctctctccttacagcatctcaaagccagcaccacacatgcttccacttgcaacctttgaccacttgtgatatctttcatcaacctcggatctatcacttcatcaagcttcccattctcacataactctctcactaagctaagaataccttggagatctccatcagaaatagtcatgatagccggtttaccagtaataataaccagcaaacagattccaaagctgtagacatctgtatattcagtcacaaaacacgtcttatgatataatggatcgatgtacccaaatgttcctagaacccattcagcttctattctcgattttccctcaggtagagatattgagaaggataaatcagacaactttgcggtccaattcttgtccaagaaaacatgcatcggtttaacatctctatgtatgatgatcttagggaatgccgtgtgaagataagtcaccgcattagcaatctctttcccaatcttcaaccgtacactccacggcaataaagattcttcaccattaactataacacctcctcgctgattcatagctccatgttctgcaaattcaaacacaagaaccggaaaaggaaactcgagacaacatcctaaaagttgaagaaagttactgtgattactcatccgagcagacaagacaatgtcgttgtaaacctctttaactctatgtcgttttcctgtaatctcatcctctgagaatctcttgatcatgtaagatctatcttcaatttcacctctataccatttatagtatacatcttgcgagacaaaacagctagaatcgaaattgttggtggctttcaatatctgctcaggagaaaaactgcgaataggaatggatttaccgttacaatcagctacaagttctcttaagaagatgcttccgttatccaagaaccacctcttcgccttgtccttttccttccttgtcccagatccagatttcagatactgcttcttcattagttcctttaccaaagtatcaaccttttgttggcgagatgaataaagaggacacctttcttacctaaaagcttctgaagtgtcaaaagccatttcttttctgatcccaaacgactctcggttgaaaacggtgtgtcataagaaaggaagaagcaataaaaagtcttgggtcaagtttctgggcctatagaaaaataaagcccaactaaaagctcataaggtgggaaaacaatataagcccatccaaaagataataaggtgggaacacaaaataagcctaaccaaaaagttttctacgacaggctgatggataacagtttgtatgggatgtgaggagtccctatcaaaacacgtcaatggttggaatttgtttccaaatttcaaatcgggaagagtagtaactcaacatcttgtatgcattcagatattaagtctttcttgttcaaagaggaaaactgaaacaacagtatttgtttgatgaaatcgatg

SEQ ID NO: 3170 - DNA, 3000 bp, Unknown; identical to SEQ ID NO: 3165
  misc_feature (1)..( 3000): cDNA_ID_1819727_gDNA_ID_1620629_Annot_ID_162601 3000 nt of promoter + ATG

SEQ ID NO: 3171 - DNA, 1757 bp, Unknown
  misc_feature (1)..( 1757): cDNA_ID_2991013_gDNA_ID_1620629_Annot_ID_162599 3000 nt of promoter + ATG
gaattctttttccataagtgtgttcgttgagcttgaagattagtctataaatgacgagaatgaccttaggaagtgtgctagctgtaatatgccattaaggttttgggtttaggggacagattttggtggaaagatcaagatcaaagtgtgttttggggtccatcttttgatgataagtgggaaaaaagttgcaatctttctatggaaggtgaggaaggggtagtatcgtctctaacaagttcggtatctatcaaggaaaaatagaaaatgactcttagaaggacgattaaagcaaatgatcctttacaaaaattgatatgctttgagtcccacatacctaattagttggaaacatgatgtgacactcccccagacagctaattaatcatccctgatgttagaagttagcagcaattattggtgtgatagagatgatgatatggaacatcagtgtttgtttaaaatttggattctataggtgagctgtgaggacttgattgattgttcctttagcccccctagggtatactgattacttgtgattgtagtagataccatttattataatagctttagattagcacgtcattctcttgctgcttttttcactgtgtattttggaatcttggtattttctcgttgaaatattggatcatcttaacaatagttagctgtctagaaagaatttttggtatgtgaaagcagatctacctaatatgaatccgagcttatcagaaagtctttgacctgcagattcaaggtaccgcgctggtgctggatgaaatcattaaccatgtccagtcattacaacgtcaagtggaggtgagactttccgtggtccaatttttgttctttatacctatattttacaatagccctgggcacaataaaagggtcaactcaaaacaatttgaaaatgaatagaattatgtgccgcaatctcatgaaactgtgacttgtgtttccacagatgctatcaatgagacttgctgcggtaaaccccagaatcgacttcaatctcgacaccatattggcttcagaagtaagtatcaaaatctcaaacaataatttggtcattctgattagtcttctctaggaaaaatttaaccatttcatgtgtttctcatttaagttaaccatacctctttgagtagcttctagtttctatcacaaaaggagaaacttttggggtatttattgatacaaacattaatttagaccattttagtgtaaggcataggaagatcacaacgtctactctcatgaaggaaactcagggaaaaataaatacacaacacacacacacacccaatgcaaataacagtagtgggtcaaaactcggaccacctttgttctgtaaaacctttctgtgtcttctgtgacttatgtcggatgtgttacttgatgaaccttttaaaaaaaaagttaattcatccctcaataatttctgtgggtctcttccaaaatcttgttatttcaaagtgacctatctaatttcatgatcacctgtggattctcatcaaaagttttggaccaaactaaataaatgctccctctctctttcttcttacagcttgtaccaccattaaatagccagggaccctctcatcaaaccttgttcttttaggataataataacacagcaacaacagttgacttctttgactagatcaagatctctatgaatgatccctttgctgatatcttttccggttttggctctgtgtttttttctttgacagaacggttctttaatg

SEQ ID NO: 3172 - DNA, 3000 bp, Unknown; identical to SEQ ID NO: 3168
  misc_feature (1)..( 3000): cDNA_ID_1819695_gDNA_ID_1620629_Annot_ID_47210 3000 nt of promoter + ATG

SEQ ID NO: 3173 - DNA, 3000 bp, Unknown
  misc_feature (1)..( 3000): cDNA_ID_1819687_gDNA_ID_1620629_Annot_ID_47212 3000 nt of promoter + ATG
agcatgtatacttgcaatgggaccatgtattgcttccaagtatctacttaagaaagattatcttaggtagaaggtgacagtccctagtgatcatctgatgagatatgagagagtatagcatcatcatattttctcttaacacgctccctgttatgctgtttacatcttttaatctattgtttcatattttctttccttgcagcggtcaggttgcctgggaagcgcattagctgtaatgaagaagtcttccaaattccttccagtatgtgaatattttagcttactgctgtgtgcttgctagatttgagagaaaatagtagtaatctttaattctatttctgaatctcttctataagttagaaatttgatacctggctttgcgtttgagaaaaaatcattgttttaggttaatacacttctccgccttttttatctgttacatattcatagtactcataaacagaattttcacacacatacaggtcataggctggtcaatgtggttctcggagtatctctttctggaaagaaattgggccaaggatgaaagcactctaaaggtatgggtttatagtatccttgtgcaactcatttagtttttgctcctgtgtaaaatgcttattagcacgtgcagctacctcgttcatgaggggattagcctaaaaatgcagaatcttcatttccagaccatgagttatgtgtgtttgtctaaatttacagtcaggtcttcagcgcttgagcgacttccctcgacctttctggttagccctttttgtggagggaactcgctttacagaagccaaacttaaagccgcacaagagtatgcagcctcctctgaattgcctatccctcgaaatgtgttgattcctcgcaccaaagtaagttgtaatatttttcttttgttcattcctggggcaacttgatatcttctctgtgtcctttaaaaagcaaaatgattgctatgatgatccaaaatctcaatgcatgggtagcctttatacgtttcattttcatcagatcgacttggtggttgttattgtgatttctgccctaattactagacttgcttgtatttttgtttcagggtttcgtgtcagctgttagtaatatgcgttcatttgtcccagcaatttatgatatgacagtgactattccaaaaacctctccaccacccacgatgctaagactattcaaaggacaaccttcagtggtaagcaagcaaaaatatgaataggtcgtatagcagttgaatcttgcactcttctcacaacaaatttcaaagtatgcactggcttggatcacatcaccatccaatttactgaaacgaacataactctttatatcacctttacttttataatgtgtaagaaaccgtaggactcatcccatcccaagcctttttcttttaaaacctcctgcgccattaacgcaaaccattgctgctggtttcaaggtgcatgttcacatcaagtgtcactcgatgaaagacttacctgaatcagatgacgcaattgcacagtggtgcagagatcagtttgtggctaaggtaaaaattatggatgtactggtatttccacgtttcagttattggcaataatatatttggtcaagatttgatagagaaaagcttggaaaagctttcattttggtattctctcatctcgtctctgtgatacaggatgctctgttagacaaacacatagctgcagacactttccccggtcaacaagaacagaacattggccgtcccataaagtcccttgcggtgagtctataaaattcataacattctcttggttccatctataaactcacaaatctcttgatctttttctcaggtggttctatcatgggcatgcgtactaactcttggagcaataaagttcctacactgggcacaactcttttcttcatggaaaggtatcacgatatcggcgcttggtctaggtatcatcactctctgtatgcagatcctgatacgctcgtctcagtcagagcgttcgaccccagccaaagtcgtcccagccaagccaaaagacaatcaccacccagaatcatcctcccaaacagaaacggagaaggagaagtaaaaactggttctcacagatccaaacatcaaacacaacaagaagaagcgcgtgtcagttttgttataagaaacagaaaaccaaaaaaaaaagacatccaaatgaaaaatcccttaatattatcaactccgttttgttcagctactatattactactactactactacgcagcctatgtctcttagtcgattgatgtatagggtcatgatcaaatcaacgatttaatccctatagtcccttgggattttttttctcaagtgcataggccttgtataactttctatttttagattggaatttgggattgatattagacattttccttttattattaaactgttttgttccttggttctcattgctagtgtagaatttattaggcacaaaacatgttattacaagacgttttagaagaaaaaacagaatttattcatgtacataaattatctgactagactaatcctactgggacttaattgtgattagacaaaaaaaaattcattttgagaagaaaaaacagaaacccgttcatggaattaactgagattagacaaattcaactacagtatgacggtgattacagggagaatatcgtaaaagaacaggttttattttcttccatttttgatagaacacatttttttttttttaatgagtgtataatataataaacacaatttttattttagttttctcaaccctaaaactaaaaccctttcacgccgattcaaaagaaaaaaaaaaccttcacaagtccggttgctcgcgccgcttttctctctgttttcaaactccgattaaagtcccgacttgtatcaattgataaaccctaattgtctccgttcttgctgaaacactaatctcgccgcacagtttacacagcctccagaagcgacaccgacgacgcaatg

SEQ ID NO: 3174 - DNA, 3000 bp, Unknown
  misc_feature (1)..( 3000): cDNA_ID_1819675_gDNA_ID_1620629_Annot_ID_47215 3000 nt of promoter + ATG
acacggtgtgtggtcttcaactcgtcattcaatctttggtcattttatcctcaaaagtaaaagaaacttttttttcgttgttgtttgagatggagtggtggaagaagaagagtttacgagccataattaaaagggagagattggtccgaggacacgagagaggtgggacattgctagaagagatcatcaaatcttgcaatggcaaagcaaatcccatcaaaatattctccgctgatcaaatcctagaagccaccgacactttcagcgaatccaatcgtgtttctgaactattcgatgagattccatacgattggtattattcaggtaaaaacaataaccatcatcatcatcataaactgttactcatcaagaaatggagatatagatttagtgagcataacggaggaaacttttgccgtgacatagccatctcatcgattgttagtggtcataaaaacttcatgcaattggttggatgttgtcttgaatctgaacatccagttttggtttatcgtgcatcaaagaaacctactagtttagatctgaaaatggttgtgtcatggagacaaagattgaaaatagcagaggagattgcaactgctttagcttatcttcacactgcgtttccaagacctttcgtatataggattctgcgtttagaagatatcttattggatgatgaagatggtgttgctaagttgtgtaacttctcctactgtgtctctattccacaaggagaaacatttgtgaagcttggtaatggttgtataggtggagattatgattacatggatgataattatttgattaatggtattgtctcggagaaaactgatgcgtttggatttggtatttttatgcaaaagcttctgatgggagaagagagatttcatgagctttgttatgatcggagtgacttgacaacttttgaaaacagaagaaagtttgcaaaatgcattgatgagattgtcgattcaaacatgttagagaaaataggtgatgttacagaagaagagcgttgtcgaatggaagctttcattgtcctctcggaaagatgcattggtcttagaggggaagttccaaaaatggttgaagttgccaaagaactaaaaagattccttagagattcttcttcttcttgtggtgaaacaagtttatagattacatatcacatacttgttatagattatataaatggtttaaaaacagattttcaaggtttaaaacagattagcaagtccaagtttcatttttattctgtataaatttagaaattttcttttcaagatgttgcatatttttgtaggcttgtagccacgtttcttcttgtttacaaatcgttgacttcactttttaatttgacataaaaaaaaaaaaaaactaaaacactccataaaattaattaaaatcagaacatatggtagcatcgtccagtaacattacagtatcatgctcagagcagtttgtgcatcgccattacattcaaaagtctctcacgttttcaccacatcccttgagctgcctctctcactttttttttttttttcagtggaatctttctgtttcaatttagattccaaatattgacaacgatttgtggtggattgtgacaatttaacagattctaattagttttctaatggctgattgaaatagtggcacaattcgtcaatttcaatactattggggagcgatattaaataaaaattattgtagtacaaaaaataaaagtttgaatattcaaaggaaaatgtagacttttttttttgttggtaggaaggagagaatgtagactttttaattttacggagtcgtcgctgaaatcctaaccaatgataaagcgctacgttcacgtgagtctgattttcaattattaacataaaaaataaaataaagatttctggaaaaagcgaacacattgctatcaaacggggctagattggtaaattacgtaattgtctgttagaggagtgcgtcacccaccacggtctttctcaagacaatgaaacgataactaaaataaaaaggagacacgtacttaccgttttgcccacagccgtcacaaatcagattatttactggatttgaattagagatggtactgatccggttaaactcggtttggtcagagttgaagtcttgacttggttttgtttgaagaaaagtgaaaattgatgagaaaaccaaaagaaaccggttaagaagatcaaaccgggaatgggcggcgaatggtcagaaggttaagaaaggtagttaaaaatgagagaatcgaagcagaggaggaagatgacgcacacgagagagacgaccacttccataatcaatcaacaattgctttccttcccggccagccacagatctccgtggccatctctctctttctaattattacaaagaagcattattattattattttaattatataattattgtataatcaaatctctctctgtaagtaataattatcgtataaatcctccccattgttgagttaattagttcttgtaaacccatgacgttttccgtcaaagctggtgagtttttgtctctctctcagcttccttatgtttgtttgaatacgttctgtctctttctcgtgattcttcttgtaacttgtttaatactagctcaaatgtctgatttgtaatcatgtaaataattcttctaagtttggatcctttaatgtatgaaaacccatgattcaatgttacttactcctcttcattaatgtcttcgcatttcaactttgaaaactccattgtttctcggtcaaagctcactgctttttgtttatttatgtttcaataattgctcaattatggttgttgcccaaccttgtgggtctatctttcctttatttcagctcagtttctttgacgattccgtaaattccattactttgtgtttcgtgagcatgtgggttttatgtaatcaaactgcttcctttttctgattctcaggcggtcaactttgaaaactaacaacttcggatttccatc

SEQ ID NO: 3175 - DNA, 2815 bp, Unknown
  misc_feature (1)..( 2815): cDNA_ID_1819659_gDNA_ID_1620629_Annot_ID_47221 3000 nt of promoter + ATG
ttctttggatgtgatatcagaagtaatccttatgtcaaaagattcatttccttctcatataccctggtatgcaatcatttatgtttttcgtcccaattttctatttctagcttttctgtatcttctttatttgcattctcatcccctcagaagtcagaatcattttctgctcttatttcaggaaagagattgcggactgcttgttaaagtgccttgatgacgaggaaacatgtatctgtaaacaaacttcagagttgctgaagtcaatcggttggtcttcttttagcctttatccgctattcatttggaagcttttgtttgtggccattattaatttctggtattggcagtcttatgtctcttatgacctctaaatatggcctttcttcatttgataagatgaattttgctgataataatcagtgttttgttaaaaggaggatttctgttaattattcattattcagatgagaaaaacttataaagatccaatttatggggtccaaaacttgttattccatattgcaatggcagttatagttcatattggataacatttattttctgctttcctatataatgaagccaatcaactgaatgatttttgttatcgttttttcttccagagccatcatttgtgctaccgaatttagtaaacctcatttatgcacccaatggaaaagtacaatcatcagctacagaaaccttgcttggggtcctgaaacaccataaggaggattttgatgttatatgtatgttgctgaccagtcttaggtatcgtgctctgtctctttttctcctttccccattgtatacatagttgtttgtttattcccatttaccctaagtgagatgtgagaatacactggattcttaggtcaagtttgtaaaagtaaacttacgaatgctcatacgtgaaaatattgacctgactacctggtttggtttttaattttggttttgcattgtatcaagctaatattgaaaaaggctttctgcttttgatctccacttttctcttgtagtaatatccaagctttggatactgcagaaagtaatggacattccactgaaggtatttggcttcttatttcattaccataggctacatgcgatacagaatctgtgttaaaatttgtcttatatatgtacaatccgaacgtattatataaaattattacaacacttcaaatttaagctggataagaaataaaattactggaatgtgaaacttaaacgatgtgaaatatgaactagtctggctgaattacatagcggacactatcaagttattcttggtcaaggcatgctcatcatcttcttgtactgttacaggtttaacttttgacagtgatcgagtgctaaagctgatcccagagtgggctagaagtgtaagtacaagaatacgtcatgcttgctttgctatctttgaaatcaatccatttttgtttctaaagtgcatgtataggcaccatttacgaactgttggtgcactactgaatagaaaatggtaactgaactattaactctgaaccttcaacacaaactttttcaggcattggttgtcccttttttcccttccagtactatttccttttatctaattgttttcttgtgtatgtgctgggaaactcttcgcatgggaatgaccaaagtgaccaaagcttgtgccagctataattaggcaattagaatatatttctgcctgttgactgaaatcaaattcttacaggtacaaaactggaactcactgatcggacctttgcttgacaagatgttcttggagccatccaatgccatcatggttaggtttcttagttgcatcagtgaatctttggcagatacgtcggacttggtccttccgcatgtactttcacatatgaagaagcaaaacaagtaagtacaatacgtaccataattgtgatttctgtggtaagaaaaactttcaacgactcccaaagataaaacaatattgattatctataatgtcaattctaatttagggtggatgcgagcttcatatccagatctgatactaaaagttcagttgacaaaactaaatcggagaaatctctatttgaccacctttgcccactgcttatattaagactgcttccccaaagagtgtttgatgatattgattcttctacaatttatggtaaattcctcagcggggactctgtgaatggtaagtatgcttatgcctttggttttcttttcctgataagagaggattggatatttatcataaggtcgtttgatccttattctcaattagattcaacgctttagctatattttcctaagcggcatgatcaagagtagatactgacaatcttagacttgattcactacatctatttcttgtcatgtgttacttatcagactaccaagacatcaagtttgaggattgtcaatgcattgctactttcattttggaaaggttattttactctcagtgatcatcaaatacaatctaccctaatacttattttatatctagcgaactaactctagtaatacagggcattttctaagtttgaatttgaagaagttcggaaactctctgctgagttatgtggacgtctccatccccaggtgctaattgactaccttccttgctcttgtattgttggtcaatcttgtctaaatgtttatatatgttttaagcctttgtttcaaagtaaattttatataccaagaaacaatggtagattctccttaataagttttctgtcaagttcactgctatcttcatgcgaaagcaaagcacatgcaaaattttctcccgtcataactaggttctgttagtatg

SEQ ID NO: 3176 - DNA, 3000 bp, Unknown
  misc_feature (1)..( 3000): cDNA_ID_1819780_gDNA_ID_1620630_Annot_ID_47222 3000 nt of promoter + ATG
tattttttagttttggtgctaaatatagatatgcctgtcttcctaacaataaactgtcatgctgcaggccgttcctgggtctagtaatgctcgtgcaataccaatggacacaagcaatcatcgaggtcagctcgagttataaattttaattgtgtcactttctgattaattttgtaatagtatatgatgtgttttttgttttctctcgactttcacactggactcaactggcatagagtgtttggctgatttagtttcccgttgcaactgtttatttcaatatcttgatgctaactctccgtttggcaggaggaactaagatttcacatgaagcccaagtctctgaccgtgtcagaccggctaatgccagtggtccaagcccacagattaataccgctgtagggaggagtctgggttttgatcaagtccacaagaatgtacgtgcttattcatttgcctcttccaaataaatgttgtatcctgcaaccctcccccttgtgttagcatctcatgcctgcatctgtgttgcttcagagttctgcatggttctctgcttaaagcttttacctgttttgcatggtcaattgtcatcaacgagctctatattgtgatatgaactacatatagcataaatgattaaaacacgatactgatcatcacgaaatatgctcttgaccattattttactgaaaacccattgcagatgaacatgccatcatccacttcattatctcctgcgggtacctcaaaaagaaatgtcagacccgaaacctcaaattctgggtttgggagcgggaataaaaccggcggttggacttcaccattcatgtcaccggggaaatgatgcaaaaaaagttggagtatatcattcatctgatctgctgagcaagattatgtgtgcctttgggtctaaactgtgatttctgcagtgaaaagctctagactgaggttgaagatctgaatggagtttttccatgaacagcttactgtttgacaaaaggcatgaagattatgtttgctttccttcaagattctcacaaatgactgacttcaacctttgtataaaatcttgcaaccgggcgtgtaatttggttcttgtgattcattctcccaagttttcttctataaaactttgttcgtatttctgtacgtagttccctgtgttggggcataacctgggtttgctgtgtcatcaacattgtttgcagaaaatcaagagcaaagcatgagcagcttcagcagagatgccttcaaaggcttgagtcaagagttgcttgtggcagggacatgtcaccatcaagctaatgtgcagctgacgagaacgtaaaaggataagctatggctagcttctggaatgctccgagaaacacttccccctttttttttctctgaatttcctattcagtttaatggtattctgtgtttgatttttcttactcgattttgtgcattgaaaaaaattatatcaaaaagcttgacttgatccaaacatgcattttcaattgctattattaaaaaaaaaaaacgtataaaattgtagtctcaatattgaaatacaaacacctagaattgatcgatttggtagagaactagttagtggattaaatttgggttggctgattttcgagccataaactatttcgattctcagctttcacacccggacttttgggcctttaaatttccaccatcaactttcatattcccaaaattacatcatctatttttggattcatgcttaaacatacatttccaattgaaccattcatttaaccgggattaaccacaaatccgcgtttactgtaccgcgattgcgattaacccaactaatacccagacccgttaagaaaacgacgtcgttttcatttcgtttaactcatcaaaaagagaaagaaaacgacgtcgttttcattcttcttctttaactctcaaatcgatttagtcgttcttctttaatctcgacactgtgaaattagggttcttgagagagaaagacaaaaggggatttggggttttcttcttcggttcgaatttttgggtctcgatttgggtttcgaatagggagaaatgaagaattggtgggaggaaagattgatttaccaaagcgatccagatgaccccgatttcgaacctccagagagtgacattgaagccgacgatggaagtgatagtggtgatagcggagtcgaggaggacgaagccaccagaatcgagggagaggacgtcgggatagatggagacagagcttctgatggagaggaaaatagagaagacgatggtgacatagcgtctgatggagacgtcaatctagaagacgatggagacagagatgaaagtcaaaagaagaggactaccaaatcgatttgagagttaaagaagaagaatgaaaacgacgtcgttttcttaacgggtctgggtattagtcgggttaatcacaatcgcggtacagtaaacgcggatttgtggttaatcccggttaaatgaatggttcaattgaaaatgtatgtttaatcatgaattcgaaagtagatgatgtaattttgaggaatatgaaaattgatggtggaaatttaagggcccaaaaatccgggagtgaaaactaagaatcgaaatagtttatgactcgaaaatcagccaacccattaaattttcgaaccttcatcattttgcagaccccaaaaacggaaatcatcaaatcatccaccgtgccagcgtgacattacaaaatcacgtaaataccctcgtgtttgtttataaggtaaaaaaagattggcggacccaaaatggtgcagtagttaggtgtacaaatttttttttgaaggatcactactacggctcaaacaagcctgggtccatgtcactaccaccgatgtcagtcaaacaaaaataataatatatgtttttaagttcctctaatttcaatcttctaaacaacaaccctaaatccttatctctatccttgcgcttgatccagattcggttctgattggagctgccatg

SEQ ID NO: 3177 - DNA, 3000 bp, Unknown
  misc_feature (1)..( 3000): cDNA_ID_1819774_gDNA_ID_1620630_Annot_ID_47224 3000 nt of promoter + ATG
aaactttttctcgtacaatgtttgtctatttaccattgatccagatttattgtgaatataatatacaagaatatttcaacacccaccgaaagttattcttgactgatcactggatttccttgcttaaatcattaaataaaaaaaccttaaaacacgttttaatgatgtcttgcacttttagaacgaactttataaactaatctaaatggagaatcgttgtttacaatgtttcaccacttcatgagtgtccaatctctgttatgtgaacgaaaacaaaccaaattaaatataatctatctaaaagtaaaaccaaaatgtatcaaaatttattttttggttaagcatgatttattaaatttttttcatgaaatcctaaaacaatgtaacggattttttttatctaagccctatgcagtatgcaacgagacgaaaatacctgattaaaaatatggaaatcgtaaggaacaatagagtaataaaacagattgatgacaaacgaagttactattggtaaaatttctgatttggaagaggagaagttgacaagttcatcgaccccatttatttgtggagtcttccccacgtatattcctcggcctctaccacaaccgcgtgagccagctaacagtgtccatcttcttatattttagtttttttttttttttctatctaatatttatttatcaaacacatgttggtgattggaaactaagaaacatacatattcatagtacctttccaggatagcattttctttatattaaagaagttagttctttaattgttatgttgtctaattcatgcatacaaagttcattagatgcacgtcaattgtcaaaactctatactttttggactacgtcaaaatttcgatttcttagaagttatatataaagaaagccttactgacaaacaaatggtgatcgaatagagttccaatccaaaacattccaaacacaaatcaaattcgtaagatggcgggtcttcaagcgaagacgttaatgttcgttctggcagctgccttagcgactcttggtcgcacatttgtggaggcagacttcagtaagaattttattgttacatggggtaaagatcacatgttcatgaatggtaccaaccttcgacttgtcctagacaaatctgcaggtatatagtaatcttataacacaataactttaaaatcagtccatttaattttagtctattatttcatgagaaacttgatagataaacatgtataactgtttttatgtttttgtttgtttttgcaggatctgctattaaatcaaaggtggctcatttgtttggaagcgtagaaatgctcatcaaacttgtgccagggaattctgctggaaccgttgcagcctattacgtaaaattttcttttgaactcgatcgatagaattacaaaaaaaataaaaaaaaatagaatcaatacgcaattcttttatatatagaaaaattagattaatgttttcagatttttctttgtagttatcgtctacgggaagtacacacgatgagatagacttcgagttcctaggaaatgcgactggtcagccgtacacgatccacaccaacttatatgctcaagggaaaggaaaccgcgaacaacaattccggccatggttcaacccgaccaatggtttccacaactataccatccattggaacccatccgaagttgtgtaagtaattaacttatggctatggcggtttcttaagtactttataaaaactccaaacaaatgctaagaaatggtactttctatcaatgaaataccacatcaaaaaaacttaagtaagattaaatgttacttagatagtttagtttgttactgtaaaacaacattaaagtacaaacacttcatgatgaatttttcttttagttccttaatgttttcgaaccttcaaaccaaaaaaactttaggaatctcaaacgattatatgtttttatttcctttctataaataaacgtgtcgcacaccatgttgtatatcttatataggtggttcgtcgatggaactccgatcagagtttttagaaactacgaaagtgaaggaatcgcatacccgaacaagcaaggtatgaaagtgtttgcgagtctatggaacgcagaagactgggcaacacaaggaggtcgagtgaagactaactggacgctagcaccatttgtggccgagggtcgtaggtacaaggcaagagcttgtttgtggaagggatcagtcagcatcaagcaatgtgtagatccaactatacggtctaattggtggacatcaccatcatttagtcagctcactgcttcgcagctgacgaagatgcaaaagataagagatggtttcatgatctatgattattgcaaggacactaacagatttaaaggtgttatgcctccggaatgctcgaagaagcaattctaattcaagtttccggccagcgggcggaacgaggagaggctccggcaatcatagcaccgcggtcgaggttaatggggacggactgtaaattcgtttttcattattttttttaataatttatttttctgaattgtttttgtgaggatttttgtgtgtctttgattcattgataactcgaatgagcaatcatgatgaagaagaagaagtttttttttttccattttttctttgttaaaatcctatacaaaaaaaaacaaattcaaaagctaaaaccctagtaaaaagagacaaaatccaatacaaaattatccccaaaattatccatatttagacacattgcgttgactttagaactagtggattagaaactccaccggtcctacgtggcaactaaatttcagtccacgtcaccgacacacaaattttcttagccttactataccatacaatttacgttaatgcccctattgtctcatctattcgcaaatttcaactctcaaattcaacgaagtaaaaaagccctaaattgatatctctatcccttgcgcatgatccagattcggttgtgatcggagctgccatg

SEQ ID NO: 3178 - DNA, 3000 bp, Unknown
  misc_feature (1)..( 3000): cDNA_ID_1819770_gDNA_ID_1620630_Annot_ID_47225 3000 nt of promoter + ATG
gcatgcgtttgtttcttcttgttgatcgaaatgagtaatatgaataagtttcgtgtatgtgaatgttgaataatgtaggaggatgtgaggatccaaggaggatatccatccataccatcgtcatcaccatccttttcatatgcatcatcatcaccaccaccagctccttatggctttcatccgaacatgatggtatgtataaatatgctacattcaaagttgtgtacatacatatgcatgtgtatttttacatatactgtatctagcactatgctttccacaaactagtgatgtatacacatcacatgtttattcttaaatgcacatctttttagatttagaagaaatttaaatcagattcttaacttagctttagaagaaatcatttcggtttgaaatatctcatcttaattattcgcaagatcttcagttatatccgtcttaattatcttgttttctgcaaaagataaaagcattcttaacaaattgtatatcgtttaattactagtttccaatcgttgacgtgaaataataagatccatgtaattcaactcgatcggtggaataatcaagaataatcattttttatcaataattgtttcattgccctttttgtgatctcacagatgaatgcaaataatgatcaatacgagagaacaaccataagatacggagattctcagcctcacagagcaccaaggtcagtccgtacacattgttattgttaaagattatttgaataaacaatatttaacttaaattttatgttgtttatatatatgcacttaaatgtttgtgatatagttaaaaataaagctaataattttcttacaacagttggaacccgagctacggcatcttggagagccagcattttgtggaaccaaacacaaccagacacttcttacatgaggttattactttatatatacataaatatagtatacatacaaataattaatccatgtcttaagagatatagtggttagaatgtactaagatttgacatgataatttgtgttaattctttcaaaatcgtttctttacatgcggatctctctgaatgattttgttttccaatcttataggatcagagaaatatatcgttgggatcgggtattcagaacttcgaaaccagtgaagcaaacgagctagatttggaattgagattgtaactttgacttatgtatgaactcatattattggatataaggccatggagttgtttatacattcaaagcagttaagagaaataatatataggtcatttgatatgatttggggtatcagattttgatatcaagatgtttctatggtcaatagaccagtcataaagtattgtccatgcatgactccatatatagtactaatttggagtacaaagaaatatcattaattagaatctgcatgacgggaacggctaatactagatcgtagtgtggatattcgtataatacaagaataaaaaactatatacgtaaaggtttcgattggtaactcggggttttgggtaatcgcgtctgcttacctcacttttgtaaactttcttattgtccatttcatcgcctcctctattgaatatccttaatagttagttctttaaacttcatgtaacggcaaatacttgtaaatagagctgaccctcttatgtatacattaagaaaaaaactaagacaaaagttactttcggataaataaaaaagtaagccatatgcttttatatgattatatgttgtaagaagagccaacaatgttacgacatcatcgataaaatgatgttgattgattgcctttgtgattaagattaaatttaattgtcatgtaagaatataataattggttggcctcttcggtctcttttggattgtggtaagcgatacaataattttgactgatggtgattggtggcgttgatctaattatcacaaggaatgaaaatgaaactaaaggttttgaatatataattatgatttcttaacaagattaacaaaaacgcgatcaacatgaccttttactcattatcaaactttttctcgtacaatgtttgtctatttaccattgatccagatttattgtgaatataatatacaagaatatttcaacacccaccgaaagttattcttgactgatcactggatttccttgcttaaatcattaaataaaaaaaccttaaaacacgttttaatgatgtcttgcacttttagaacgaactttataaactaatctaaatggagaatcgttgtttacaatgtttcaccacttcatgagtgtccaatctctgttatgtgaacgaaaacaaaccaaattaaatataatctatctaaaagtaaaaccaaaatgtatcaaaatttattttttggttaagcatgatttattaaatttttttcatgaaatcctaaaacaatgtaacggattttttttatctaagccctatgcagtatgcaacgagacgaaaatacctgattaaaaatatggaaatcgtaaggaacaatagagtaataaaacagattgatgacaaacgaagttactattggtaaaatttctgatttggaagaggagaagttgacaagttcatcgaccccatttatttgtggagtcttccccacgtatattcctcggcctctaccacaaccgcgtgagccagctaacagtgtccatcttcttatattttagtttttttttttttttctatctaatatttatttatcaaacacatgttggtgattggaaactaagaaacatacatattcatagtacctttccaggatagcattttctttatattaaagaagttagttctttaattgttatgttgtctaattcatgcatacaaagttcattagatgcacgtcaattgtcaaaactctatactttttggactacgtcaaaatttcgatttcttagaagttatatataaagaaagccttactgacaaacaaatggtgatcgaatagagttccaatccaaaacattccaaacacaaatcaaattcgtaagatg

SEQ ID NO: 3179 - DNA, 3000 bp, Unknown
  misc_feature (1)..( 3000): cDNA_ID_1819755_gDNA_ID_1620630_Annot_ID_47230 3000 nt of promoter + ATG
cagcgactcacggcaccgagagtcgagcaacagtcactggcggagtatctcgtacttttgcagttcctggtcttggtccgaggggaaaggcggtggcgattgagacggcgggaacacaatcttgggggttgtgcaaggccgaaacagagccggttcagagacaaccagcgacggagacggatatcaccgatgaacggaagagaaaaacgagagaggaaacaaatgtcgaaaaccaggtgagtcagagctcccatatataggttaactttacgcaaacatgtcagcgcgtgttagtcacttgactcgtgcagtttagcagttgaagcttaatttgtatctttctgtttcttggcgtacagggaactgaagaagctcgtgattcgacgtctagtaagaggtcacgagctgcaataatgcataaactctccgaaagggttcttatgcttccattggaatttcaagattctgagtttgaataatggactatctgtttcatctcctttaaaacttgttttttttttgttaaacagagacggagacaaaagattaacgagatgatgaaggctttgcaagaactccttcctcgctgcacaaaggttattacagtttcttttttaattaactagttgttatttaactttaacgttgattctgattctgtgtctactctgatcagactgatagatcttccatgctggatgatgttatagagtacgtgaaatctctacagagccaaatacaggtatgtcctcaaaaacagaatgtgagtttgaacatggaaacagtttgaatgtccgcagattcatttcctggaagatttataaagtttagatgagatggcctaatagccctgttcttgaggtctttgcttcccaaattttgtagggtaaacatttaaggatctttaggtcatgagtgagatttcatatctgaatcgaggtttttatgccagatgttctcaatgggacatgttatgattccaccgatgatgtatgcggggaatatacaacaacagtacatgccccacatggccatgggtatgaatcggcctcctgcattcatacctttccctaggcaggctcatatggcggaaggtgtaggtcctgttgatttatttagagagaatgaagaaacagagcaagagacaatgtctcttctccttagagaagacaaaagaacaaaacagaaaatgttttcttgaactgaaacttgttagttcttttattaagacaagacacactcttatatacatgttcacataactactctacgttggtaacagttgtaacttctccaacaagttacgtctcttactcgcctcctttcgtagtcacatgacgtccgttgacttaacatacaaactataacatatatgatattacaagatttaatcatggactcaattctcaacaggtccatcatcatatccaccaccgcgctacccttttccaaacattcagacctttgacccatccagaattcgtttacaaagtccgcagcctaatctggtgtcgaaccaacctcagatgaatccctatagccagtttgttggtcaccaccggatccaacaacctcgtcctccattgcaggtaattcttcaccagtatcccattgtgcttattcctctctgtccctacgaacgcttacaagatccttttctaaaaaaaaatgtttttatagagtcaaacaagaccacaggtgagtttcagccaagcaagtagtagcaaagaacctgatgatcaggacaacaaaccaacaagttagtacgaatcagggaataaaggcttttcttgctagataagttaatagtcaagattgtgaatttcaatgggtaaagtcatcctacgttcacagtctcacagataaatttataacacatttaataatagattttttagaaatttgcaaaattaagggatagatttggcacaaactcattaacgtcacacaaaatatgtaaaaaaattaaaaggacgaggcagaaaaagatcatgttgttttctaacgtcgatacaaaaaactctgatcaagttctctttagatgtttttgtttattaaaaaaagaatgccaaaagagtcgacgcatagagtaatgacatcattgtggatgctgaaaacgtcatggtatgcataaagacacacttccgagagtgatagagagcttatcctatatatgctcctaaaatagactttctaaaagcacagaattttatcaatagaaggggaaagaaagaaatagcgactcaatgaatctggccctaaaagcaatttataaactctgttaactaagtggtttcttggaggtttctggggtatatagaagacaaaagtaactctttcttttttggtttttaataactcacaacaacaaaaacaaaacaaaaaaccttttcatgataaaaaggtaacatgtgtttggtttctctcatacatttgtttctaatctcagacataaataatttttgttcccgacttcaaaaccaacgatgattatatcattccacattcattttcttctacttcttccttctccttgatctcatttccctagaaaatccatctatcatgtaagttcctttgagattctctgctcttacttgcaagttttatcttgacatgtttgatgattaaggatttggtttgagattaggggtgaagatgatatagtggagctcttatggaagagtggccaagtcgttagaaccagtcaaacacagagaccctcctccaatacaccaccatctcttcctccaccacccattcttcgtggtagcggaagcggcaacggagaagaaaatgccccgcttccacttccacagccttcacctcccctccatcatcagaatcttttcattctggaagacgaaatgtcttcttggcttcaccattctcaccccggcgttacgtccaccccggcttcttctgtctccctgccaccaccacccaatgctccgtacagctccggttttttttttcctcttttaattctcttactttatg

SEQ ID NO: 3180 - DNA, 3000 bp, Unknown
  misc_feature (1)..( 3000): cDNA_ID_3070825_gDNA_ID_1620630_Annot_ID_162660 3000 nt of promoter + ATG
tgcgttaacttgtgctgctcgtttgggattgaattcgagactgattagtaaggtcattgctttctcttttctaaatcgaaaaatttgggcatgaacagattcaactttagtgtagtgatgctaattgatttagtaatgaacattttctttaggtagcgaatgactctcaaggaaaaggcatgttggaggagcttgaagctgatggtgtggatacttcttttattgtggtaatgctcagctttttgatcattgtgtcgagtcttatactctaaagtttgcagttttgtcttcagtttcctaatcttgactgtaattgatgtctttttatctcatctcatggcaggtctctaaagagggtaattcaccatttacctatatcttagttgacaaccaaacgtgagttttttgtgtgccctgatgctgtttgtgaatttgaggacctgtttcattgacttctgttgacttttattgtatcaaatctatttgttaagtattcaagcaaaaagttactctatcaactagaatgaaatggtagtcctatggcatggaattgttttgtttgtctagatcatcagatctttattggttattcttttcaggaaaacgcgtacttgtattcacacgcctggagacccacctatgttaccaactgacctttctcaatcgagtatgctatcagcgctagaccgagccagcattgtatactttgatgtaagattacacgaaacagctttggttattgcaaaagaggtaagcatgcatctctttaccttttagatgggttgtagatttcacatgtttctaaatttctcccaaatacatacaccaaaacaagtgtgtttttttaattgttatccgcagtcatgcaagtagtagattgattgtatgtatgtaagactagtctttgatgtttgaagatttcacaagattttctttttcttctgtgtttccaaaaacttaaaatgccacacaacctacatgttcatttcctcttgtgcttgttgcgtttatccagagcaggcaagtcgcaagaagatacctattttagttgatacagagaaaaaaagagatggtttagatgatctcttgccattcgccgactacgttgtctgtccagaaaatttccctcaggcaagttagtctcagtttctgttcttgtttttccagttttttttttttttttttgctttgaggctgaatattcttagtctctcacgtcttgcagacatggacagaagtgtcttcaactcctggtgcacttgtttccatgttgttgagattgcctaaactgaaatttgtgatcgtgacctcaggtgaacatgggtgcttaatggttcaaagagcttcaaaaggtacaaaacccaagactttatctctctctttaggattcaaaacttctacatgatcctttccccggttcataaacatcatctggctctgtcgacttcagcagaagtatttgaatctcaagagacagacattgaaagcttgttggagacactgaagcatagaaaagactcaacgacaacatttccaacatgtgtttcatcggtatttatgtgttctagctcctaaaagaaattttcaccgtatgaaaacaaacctaccatttacacacattttctcttgcaggagacaacaaagctgaaggccaacggggtaggaacaatgaccggaagattgtttctcggaacagcggagaaaattcctccagaagagcttgtagacaccactggtgctggcgatgcattcataggagctgttctatatggtaaacaatttgcaaaaattcttgtacacgctctgagaaatcagaacccaaaacccaaaactgacctgtctctacttgttttccttgatctgtagccatatgcgccggcatgcccccagagaaaatgttaccatttgctgctcaagtggtaactcttctaaactgaacctctttgttttgttttcaccaatgtatatgaatcttcaacataacctatagattatgtgaatcttgtaactgtgtttgcataaccgagctttgtaatcttaagccaaaaccagactaatcgtttagttttgacctcccacttgccactagtttgagactcatataagtggccattgatcccaatgtttttctagcttcaccaaaccgtcaccttcagtccaaaaatcattcatttccaaatggaacatacataaatcacttccatcctgatctttgtatttgcaggctggttgcagctgccgggctttgggagctcgcacgggtcttcctcaccgtacagatcctagacttgtaccctttctggtttgacactctctgtgttcctttgtcaacctttctgagtcactactttactccattgcccactttcatatattttgaatgttcttctacttattagatgaaataaaagacatggtggtatgcatcaaataatattctggttaggtttgacttttttcttattataaaaagtagtaacatatatgatgatgaagtggtgttattctaatctactaaaatgctagcaatttgtgaacgcttcaaccttgatcgcgtccgtaagatcaacggctaggatttcaccaatctgataatctcagccgttgactgctccaagtcaaaggtggatagctacgcccaacttgccgatgttaaacaataaacactagaaagacaaaatcataattgttgggtcgcctctcattggctaataatgtggaacccatttgctatgtctatcagaaaacttagtgacggcgagatgatcagccgtgtgaaccggtaaaagatgcaaaatggtaataacagtccaatggtaaatggacaacacttgagcaagcgaggtctctccttaggatacgtacacgtgattgtagaccgttctcttcaccttacagtcacatattttcaagtccttttgtgtgaaaacaaacattattacctcgaatgtggacaagtgacaattttcataagaccagtaccaattctttgtttgcatg

SEQ ID NO: 3181 - DNA, 3000 bp, Unknown
  misc_feature (1)..( 3000): cDNA_ID_2152568_gDNA_ID_1620630_Annot_ID_162658 3000 nt of promoter + ATG
acgttttattccatatatttcaacgaaattagtatacttcctcgtatagtaatgaaaccgaccaaattatacgtttcaaaccaaattttggtagcccaaaaaaaataaaatagaatttgtatctcaaacaaaatttacgtcacagactcacagttgtaatgcaataccatatttgattattcaaaatgcatgagtccacttggatctttccaggaccatattgatttttctaaccagagctctggaccatagaaagaaaacctttgtaatattttttcttgcgatatggtacgttaacaccatctccctcgtggtcgtggtacatttcaagtttacatttttgttttttcttctataaggataatcaatgtttttttacaaaaaaaaaggataatcaatgttcgttactcaaaatatggaccaatcttctcccagtataataaatattagttgacttttaagttgcaacgattattaaaagaaaaattaaaaaattaaaaattctgtcggaatttcattaataatacgcgggttcaattgatagatcaagtgtaaggaatatattaagatgaataaaatatttgttgactttaagcttctgttgtttagtttatcacctgactctacgaatatatttacatattcatacttgaatcattgaatattctttagagtcaaaactacaacgttgtggcggttaggagatttagagaaaaacggtctatataacaaaataatacaattatggttcggacaatttgaccacctagctacaacttgtgtcatgcatttattttgaaattatatataccaatagtgctataatgctatttattgacaaaggagaaaagaattgtcatccctattcatgcgtcgccacaaaaaagctgtcaatcccaaaaataagtatcgcatttcgtaagtcggttcgccaaccaaacgataaaatatggttttggaatgcttaatgttctgtttgaaaatatttatttagttattaatttattttgctccctatgacttgcatggacattttctaacaagaaaagaaacgtaacaaatttgagtttctagttatggaaagtccaaatttttttccccacatgtccaacttttagttacgggcataatcagatagactttttcattaattgtctttttcaaatcagatttaatatatgtttagttaaggacgatctaccgatgaactacttacgtaaatcttgcaaggttcgataataacatatagtttataaatacttacatagtttttttgttggttttttaaaaaaatactgacagagttatatatagcaaatgcagtcatgcagaatcacgtgataaaaagaaataccattacgcgggggacgtatagtatacgataatacgaatacgaagaatatgcatgtggcacattatcgtttgattaaatccatataacaattcatttttctaattaaaaaactaacaaaatgagattagtgaagtaaacaaatgtccctagagcaactcaagggttgatctaagggtgaaaggacgtggctcttcatgaatgttcatgcattatcctttttggacgtcgaattttttttgacgttacaaaacttcatctcgattctctaactaatagagccaaataaataattttttaagaaacagttttcagtttcattcggttcatgtccatccgcaattgttagtgttacgtatgttctcgaacgattataaaatcaatgcataatgaaaagaatattcctttcttagacataattatctctagagccgcaataatatcttgatataaaatccttgtgaaacgataatagaaactgaaatttaagtctctcggcttttgtaatgtatatgagtatactcattttaatattttttcggttgataaatagtcatatcatccgtagataaaaaagcaaaaaaaaaaacgattaaaaaccacaaatgataccgtaaacttttttttgacttaaatttctctgatacatgctgtcgtaaaatagccaaacaaaaaaaaatgacttaaattagctcaatttaattgttcatttcacgtaaactttgtttttgaaaaaacttgtcttgcgtctcacgagacatttcttatataagtttaattctaacatgtaaaatacaaataaagatgtaatcgtcatcccaaaacaatattggataataagagagcatacagccgaaatatggtataaaaaatgatcaaaattctaaagtaatctgcatgagtactgagtagctagtaattaagtgaatacattattaaaaatatatatataatcattagttggttaccataatatgggagtttaagaacatggttgatacttgatacccatctgaccacacttagttttattttataaaatatattaatatatacaaataatgttatgtgtacagcatgtggaattgtggatacaagtcatgtaccatgcaagaaaactcttccatggcctgaagttaatcaccatccaccacgtctcattaagtctaaccacatgtttccattatttaaataatctcttatgtaaatcaaactactttttatctttcttggtttcaccaaaaattaatcatactagtttttagatagtactgaagattaatgttttgcattttcttcatatgagaagttatcatatgtaaatatacattttttgatagataatatagggtatgcaacaatagttagatgctacatttgattaatgtgttgaatccatatttgaatcaaaccaaaaaatgaagtaatgcattggtccagctttcggtttttaacttaaattccggtttacagctaaatataataaaaaccaggaccacacttgggttcggagtttgttgatttatgtctcttcattcgaagttgggcggcacctagtttcaagttttttcataacctttttattctttcaacaaaaatatagtagtactttaattaattatatcaaacacagagtctaataaaatatg

SEQ ID NO: 3182 - DNA, 3000 bp, Unknown
  misc_feature (1)..( 3000): cDNA_ID_3092186_gDNA_ID_1620630_Annot_ID_162655 3000 nt of promoter + ATG
tggtaaaaaatgttaaatataatgtatatcatttctatattaattctctcaatttctagtgtattttttttaaaaaaatatatgatcgatgagaccacacgtaaaaaaaatcggcaaattttgaactaaatagatacaaaaattcacaaaacttcaaatattttaggcgtttaatagtttaaatttcatactataaaatgatacaaacttgattttttatcaatttaaactaaacatatcagatttgaattaatagaaaaatttcaaatgaaattatcgatacatttacataggtgttgagtcatatacgggattagaatgtcttctagtagcgtcaaaatcatattttagtgaggatatattgataaaagaaaagaaaaatagatagctagctccataaatagtaaattttaagttccaccaaagtacttgaactggacatgtctataatatcttggaagtagaacttctgatgattatgactatatatctactataacgcttgtatacaccgtgaaaagtctatttcaaaacccatggaggagtgatcatttagcctcatgtaccctcaccgcatgttacctatttagaaactacaaggtgagatgttgaatttgagtgaccattatctttttgctttcttctttgtttttgccatacttgtcacttgtcatctcacattcacacttattctcaatctattttcatcaccttggcaaaaatcctagctagataggcatcatcttggattctagttatgtggtctggttgtgaatatttagctagctagaaatctatcacataggtagatatgcgtcaatatacatttacagtgccatttacttttcttttttacgaaattgcgtaacaagatttcatacgactttgatttaaaagttgtcaatcacaccaattttacatatttcgaccaaattcttattgtttttcaaataaaatacggtctactttgactatcagattaacccaaaaaatacctcaaaaaattgattatatccgaaaaaataattactttttggattaaaaatttttatcgaaaatcgttatcgtgagagttagatttaggtcttatttgaatctacttttgattaattagtatatataaatgggtcaaaatgatttgagagctgctttgaagatattagtgacaaagagtaaatgggtaacacatgcgaatggtcacaaattctgcagtggagaaatcactcatgttcaagggtccacattgttcatcttacacattaccaaagtctgcaaaaactagggtttgttcctttcacatgcctatgtctgttagatgaactacctctcgtgaaaagaaaaaaaatatattcctctacactaaacacaagaaagaagaaaccaacaaacacttgtatttaccacaaacaattttcaaagatttcatttacgtataagtcaattttccaagtccaaagtttaggatagatacgtaatcaaataaataatagacaatgtatgttataaaagtaggaactagtacttctctatcaagtaactaactatacaagctcatcaagttttttttttctttaatgtaatttgtttatagtttatcaagttttagttcttatatatactcaaatatgtacgtaaagaaaaaataattcgaatgtactggatttaatcattgggatggtaaagtttcgaatggaacactactgtacccatatctctatatccctttttatgtacctgcaaccccacacacacatatatatatatagtatgggcattttagttccaatccggctagagattcattctgattatgtataatatttataatgtttctagtatttagaaatttgatatttctgtgtaaaatttcttacacaatattttttcttatcattagattttgtaagcaaatacaaaccttaactagctagcttaatacattatttttgagttgtgtagaagaattccgaaattccacatatgtaaatgcctaaaataattaaaaagaaatagatatttagatcattcgctcggatacagattggatacgaatatctgaattttcttaagtgtttgatttgtaccaatcgttagtatttactcatacacgcatggatggacacagacaacactaggaacttgtacaaatgagagtacttgccaattcttttagtcagttttataatataattgtttataattaaaatgagttatgttttgtgtggtgcatgtatataatatttaatacatgtatgtgtgcatatatttatgtatgtcaatgcaacaaagatttgggcttataaatgaatgaagaaaatgttggtgggatatggacaaaaacaaattggagaaacaatgaaataattcgaacccatgacgttacaactagtcaaaagtccccacatgatcttatcaaacgtaggtccatggatgagttgttttcgatatcataaatttctcacgaattttgttatatggcctttaagtgtaaaatgacaaaacttgccaaacaaatcatagacccaatgcaatttagatatcattggtgaatggttatagtaagtttaatagctttcaattcaaaatcaattgaaatgaatggcttgacttatgttacttagttattattattaatttcatgatatttcttatgtgagattcgtaacatgtttcttcaaaataattcatctttcatctcatcttgtatgatatcatgatgagtgagatatgatttgttttcaagtcttataaagcctattaggcccagaaccacgaatacttttcagagaagaaaacgcccattagtaatagtataggcccattaagtattagaataacaaaaattcagattttttttgttggtcacgaaaatttagctttttaatttaataaaagaaaaatgggaaaagaggacaagtcacgtcacgagacaaattagcatagcacgcaaagaagaagaagaagaagaagctccaagaatctgtcgcagaaatcgccatg

SEQ ID NO: 3183 - DNA, 3000 bp, Unknown
  misc_feature (1)..( 3000): cDNA_ID_1808354_gDNA_ID_1620630_Annot_ID_162653 3000 nt of promoter + ATG
ttactactaagtctactatagtagatatatcagtacatttttatttatatatatacattttcattttaatgcaaacaaaacaattactatatgtttcccactgacgagtaaaaaacttaattagattcacagagagcaaataaatataacttgtccttctaatgtatggccgagtgggcaatggcgaatgatgatccatttttgtgttgtcaaattatcgttggttatgaatatcggtttccccatgcaatttattgtttcgtatactaaattctttaatatgttaccaagaacgtgaaatcgaaatcgagataatgtgtaacacataggcaagccatgtaaattatgcagtcataaaagagacgatacgctaaccaagaatcaatatatggtttcgagccttcgattattagaaagataacgaccacactactattggttctacatgttttatgtacataaaatcaaatcgggaccaaataaaagaaaaactgaaatggaccagccaatataatgtatatattctttaatatcagttgataaaaaaaataacaggaaagagcaataaaaacatagagccatgacattatgtcttcatcattatcagccttaaacgataacaaaattataaagctctagaattcaccaaatatacccaattgaatttctactagtacctaaaatcatagttacgagggctaatggacttctcataagacttatcttacgcatcatttggatcctctaatatttcgcacactattaagtccctagacgaatcgaaccaaggaaatgcgtaattacctttttaagaagaattaatgcacctaacggatattgccgctcaacatagagtggttaatgttcttttttgccaacctgtatttccatttactgaagaaataaatttgacacaactaaatctttgaaaattacaatattttataaagatttacagtttttgggttttataaaataaataagatttgacaaagatagttatgaaaagaaggatgaaatacggatgtcttttcatgaagatttataaagagtactaataacttcatatcttatgattagaaatctaactttgaggcccttgtgtaccttcgaatatagctagtttatagtgacgggacccttagcataaccaaaatcactgacaagccatagcattccacgtggttaagtccatctatactctcattatcatcttccctccggttcgggttcacgatactggtttagcaactaaattatcaaactatcaccagtttcgtagaatttattcacactaaaaccaattatacgttaaatcattcgttagtcttgtaacttttgttattacttattaaacgccatggcgatgttgggtccactaaacagcgcagccaatcacataaataggggaacacgccagttagattgtatttttaataactgttgtccaaacgtgtaatctccaatattttatctgttccataatgctaatgacaaacagaatagaaaatgagagagctatagaagtcatatatacagatagatataattggactcagattctatgtatatagttgaagatataataaaagataaatctaaaataccatactttgaagaatcagagaagaaagaaaacagcatggccatttgttggcactaaataattagtttatggacacaagtaagacaataaactgtactgttatagtgttttgtagtcaaaagtgttccacacttcatgtgactacaccattacactcattacaataatcaatagaataccaaccaactctataatataacgtgttaaaaacatgaaggtgttaatatttaaataatagggcacgatgtttatatgcgttcttaagtttttctttcagtagttgtgtcttgtatatcgatatatatgtagtggtcttacaaagtaggtgtatgtatgaataaaacaatgttaacaatctaatcaaattattgtttactttggagtaaaacaagaaaaaaactcaggttgattatgattgaaaataggatcaaatgataatggataacgcatatatatgtgtatgagaatgagatatttgagaaattttattttcggtagaaatttgcacagaaacgtttagggaaaatgttatatgaaaaaatagttagaaaaaaaaatttagtgaaaattatttactttgtttgtgattatcttcattagatgtcatatataaatatggacatatccatgtttttctaaagtgttggcgctacatcaaccaataacacgttttattgtttgatctgtagtaattagtgagtagtaaacaacgaagcataaagcttcatctatttcatagtcgttggttgatcaattttttttaacaacacatttcaatgactagcgacttaaattgttaatcgctaaaagtaaggtttcaaattttgaattaacgattaattactaaaataagttgttgtcgtcaacaattacaaaatgaacacgattgctacaatatgttattgttatagatctttggcaactgcaaaacgaatataatttaatcacgtacgatacgactatgaaaaatcaaacttcatctaagatatatgttttggttttcattttaagattaattaaaacgagagtggttatgtattaaattgtttttaaatttataaagaaaaacaaaacattttttacatgtttcaagaaacacttaaatatttatccacaaaaaataaaataaaacaatgaatctttatttttcattcacaaaggaaatctgaaataagagtaacctaaaaaccacgtcaccacattatccttaagaatagatatgtaatgtacacgtggcagatctcaagtggagggaaacgattcgtttaacccaaaacatctcaaacaattcctcttttcttagccttacgaacatattactaccaacaaaacaatcaagaaccactctttcgtgtcgcaataacaataagaaagaaagaaaaagaaaaccagag

SEQ ID NO: 3184 - DNA, 3000 bp, Unknown
  misc_feature (1)..( 3000): cDNA_ID_3012928_gDNA_ID_1620630_Annot_ID_162649 3000 nt of promoter + ATG
tccgacccatttgcaaatatcgatgttttcttcgatgaaagctcgaagactattgagttctccagttggatcataaggaagatcctacagaaacaaaagtccagaccgttaaacagaacacacaagacacaagcttcaactgtaaaaaaaaaaacacctcaccttctcccagtgacggtcaatcactatgaatcccactagagctgcttcgataatgattaaaagagttttgagaattgaatactaagacctatcaaggattaaacatcacaactgaatagtattaacagaaacatataggtgcagtctatatataaaaggatacgaaacacaagcaacatccattgatagcttcagctgcaatgaaaccaatgatagtgacaatgcagaccaaaatcccaatcgccatgaaacagtagataaacctacattgaatttgaaaccaaaccaaatcaattcattggaacattccttcaaacatcaaacagtgtcttagcttaacgctttgtcctttttcaacaagattagtcaaactaggcatagatttgaatcgaaaaccataaaaatggaaactttttcaataccatggagcaggaagatctaaagaacggagattgaaacccgaatctccaccaccagacccgagaacgatacccgatacgaaatcgatcggattcttcaaagaatcagaaacactgttgatctcaattattgaattagagaaggaataagaagaatccggtgatgaagctgccggaggctgagacggaggagggtcaacgggaacgtgatgattgtattgatcgagcatccaaatcgagtagattatgattgatataccgatgaaagcttggagaaaattaaggatcttgagaatcgaagcgaacgagacatggcaacaattgtgtcgcattttttctatcacgattcttgatatcgaaatcaaacttctgagcagcgatcgccgaaggaagagtctttgatgatttcggacaaaacagaaaaatgttgttttgacagataggatatattccgaagcttactaattaatcattaacgaaaatttattaattaacgaaaattttcattatcattaatgtaatagttcaaaattttgatatagttgatgaggccaaacaaactaaatgggctagaattcgaataaatgggcttagggtcaggaaagctcattgtgaagagacttcccgcttcagaagttcaagttcaagtgatggggggactcaggttagagatatttgagacttgaagtgatgcaaaaggtacagctcatgatgattgtattgtgatgatgataatggtatgaatatgatgatgagaattaagtatgcatgtgaatgttagatgactgaaaaagatagacaaccacttatataactaaccaacaacattttaggctttcctctttctctctctctgtttttatttattgatttttgggtacactaatgtttaaatctgtctctttaattggacggcctagcattcttagatctctcgatactgttttaccaataaaaccatattcagaggtgtcattttgtcatgtgtatttgttgtttttccccatgtatcacgtaaatgaatggtacatttaggggtgattacttcaaactttcatttttttctgaacaaaatgaaaaccaaggaaatcatgagttcacacccggattaataggagtattttggaatcgaattgaaattgcagttgaatttgaactttggactatatccacaaaagtaaactaggtaccactaaaccattaaaattttgttgaatttgttggttttaggcaaatgtttgagttttatgatttcagtgcaacttttataaggacataaatatctatttaattagtccataactaaaagtagcaaagttgtaagatattacagattctaaaagtcattttgtaagacataaatatatcatacctttttaatatgctgaaacatgtcagaacaaaatttataagtatcaaaatggattatcaatctttaatttataaaattaactgaataaattggaactttattagactttcaattaagttgtccttttaaaaatattttcaattaaagatgattttttttttgtcaaacaaaatccatgcatgatggataatattaaatccaaaatcttttttttgattacccacgcctaatctaaaaattcctatatcccatatatatatgtgtgtatgttacataatatccatcagagaaatcaacataaaccaaaaagtgatggataacaaaacatctttgtggaagataaggaagatcttaacagagaaaagtgatggttggttggactttgataataacaacgatatcgagaatcatattttgagaagtttgggcgaatccataattagtagagtgaaaaaagactctataaagataaagatcgacgattatgatacagggagccagcacgaggtaaccttcgggtataatcatgaatctgatacatattacattggatcattatggagattgaaggagcttgctgctggagatgaaataggattgttttacgatcctatttcaaagaatttgtgtttctctgtgttgaaacaagcaaaatcctgcttgatcaaaaaatgaaataagcaaaaccctgatgatcacaacttgtttaattatggttaattatacagcatagtaattaataagatcttgtttgaaaggacatatataagaatatgtatcgacgataatcatttctatatattaataaatatacaagttttgacatttcacttttgttcctcttaaatatgacaccttgtttctcaccattagatcgaccgacgacataagtaataacatttattacatacaccaaaaaaacaagcaaatcattaatacaattttccattagtgtatataacaaacaagagactaatcttttctttaacatttcatagtattacaaaacaacgccaaaagtcaaaaggtttcgctttctagatcatg

SEQ ID NO: 3185 - DNA, 3000 bp, Unknown
  misc_feature (1)..( 3000): cDNA_ID_3070832_gDNA_ID_1620630_Annot_ID_162648 3000 nt of promoter + ATG
atgtatcgacgataatcatttctatatattaataaatatacaagttttgacatttcacttttgttcctcttaaatatgacaccttgtttctcaccattagatcgaccgacgacataagtaataacatttattacatacaccaaaaaaacaagcaaatcattaatacaattttccattagtgtatataacaaacaagagactaatcttttctttaacatttcatagtattacaaaacaacgccaaaagtcaaaaggtttcgctttctagatcatgtccacatttctcctaacatggattattatgaccgtcgcgttaagcgtaacgctttttcttatgccgcaacaaacaaatgcggctagagcgttcttcgtgtttggcgactcactcgtggacagtggtaataacaattacttagtcaccactgctcgtgccgattctccaccgtatggaatcgattatccgactggtcgaccaaccggtcgtttctccaacggcttgaacctccctgacatcatcagtacgatcacgttttcagttacttaattctctctttttctttatatatcttttggtgatattgcttggtggtttttttaggtgaacaaattggatctgagcctacattaccaattcttagccctgaactcactggagagaagctattgatcggagctaactttgcctctgccggcattggaattctcaacgatactggcgttcaatttgtaagtcgtttaccgcgtttaatttttatatgaaatttgactaaggtgtatacaattttacattcattcaaaaaaaaaaaaattgattaaactccaaagtaaagcttcattttaaaatataaatatttttagttgaaaaatgtctaaactattttggactccagtctaatcttttttttgtgtggtaatttattgcagttgaacatactaaggatcggtaggcaattcgagctgttccaagagtatcaagagagagtgagtgagattataggttcagacaaaacgcaacagcttgtaaatggggctctcgtcctcatgactctcggcggcaatgatttcgtcaacaactacttcttccccatctctactagaagacgccaatcatctctcggtgaatttagccagcttctcatctccgaatacaagaaaatcctgacggtatatatatatggtttcttggtttacacgttaggtttacacgttaggtttacacattaggtttatagagttatatttatcacgttcttctacttatgtgatacagagtctttatgagttgggagcaaggagggtgatggtgacgggaacaggacctttgggttgcgtaccagcggagcttgcctcatcgggaagtgtgaatggagaatgtgcacccgaggcgcaacaggctgcagcaatcttcaatcctcttttagttcaaatgcttcaaggacttaaccgtgagattggttctgatgttttcatcggggctaatgcctttaacacgaatgcggatttcatcaacaatccccaaagatttggtgagtactcttaattggtaaatttgtctcatgattcatttttagacctaatttgatacattttcataggttttgtgacgtcaaaagtagcatgttgtggacaaggagcatacaacgggcaaggcgtttgcaccccattgtcgactttatgctctgaccgcaatgcctatgctttctgggaccctttccacccgaccgagaaagccacccgactcatcgtccaacaaatcatgactggttcggttgagtacatgaaccccatgaaccttagtactattatggctttagactccagaatataattaaggatgcaatcttttacagaatctatttccagtttttctcgtatgataaaatatcgcgagtctgccaaacaatggtaaggaactaaggattctatttttccaaattatggttttcttagtttctctctaatgctaatggggagtctctgtctcggctctgtcttttctgttatgtttcaattttgtggttagttgccacttctttcttacgaaggctttataaaactttgtcaattttacactctattttctttataaatacttcgcacaaatatcagttgaagtgtttatattttctaagattatgagcctacgatataacgtaaaccgtaaggttttgaatggctaacatcactccatgtcgaaagaaatatttattacgtttaatatcattgctgaagtgtggacgttttcaatattcataatgacatcatcaccctcggcatcaactcttttgtcactattcatagcctacgtactccatttttggtgtctttgatggctccacatgagcatacatatgggagcaagcaaggaaatatcaattttttgtaatttttgttttgttttgtttcatctactatcattttcaaagaaatcgaaaagaaaaccactgcagagccaatatctaaatgtttattgatgttgtactacactcagagagatttgcttaagaatgaagtttacctcattcttctttttggatgcttttgtttaaacaaacgtaccagtttgctcgtacaaaatcatagatatgtccattgatgtactacattaagacaagaataacaacaaaaaaagccttcgtggtgagtgatgacgtctctaggaggctcgtagtagtatatcccactaaaggacgttttacttcaggtcagagcttatcttagcacaaaattcggagaaaaagtaatcagttgaagaaactaactcaccactataggccaaaacaccattataaaatattcagtttcttggagctttgtggtttaaacgagtcaaaaggctacgacaaatgtttagtttccttttcttttaagggacattttaacaaattcacaattatttttttctgatgaaagtggacaagtcacaaatgtccatatgagtttctgggcgacttctatcagaatttttgttcataattttttttattgtatcaagggatg

SEQ ID NO: 3186 - DNA, 3000 bp, Unknown
  misc_feature (1)..( 3000): cDNA_ID_3070836_gDNA_ID_1620630_Annot_ID_162647 3000 nt of promoter + ATG
gggaaaggcggtggcggttgaggcggccggaacaccatcttcaggagtgtgcaaggccgaaacagagccggttcagatacaaccagcaacggagtcgaagctaaaagcgagagaagaaacccatgtgagttagtactcccataggttaacctaagcacccatgtcggcgggtgttactcactttaccggtgcattttatcagtcaaggcttatttttttttctttgtttcgtggtgtacagggaactgaagaagctcgtggttcaacgtctagaaagagatcacgaactgcagaaatgcataacctcgccgaaagggtttttatatttccattggagtttcaacaatggactctctgtttcatttcctttaaaacgtacttttgtttgtaaaacttgtttttgtttaacagagaaggagagaaaagatcaacgagaagatgaagactctgcaacaactcattcctcgctgcaacaaggtctcccaaaatttcttatattcctcgttgttttattgaactgaaggttgaatctgattctgtttctactctgatcagtctactaaagtttcaacgctggatgatgctatcgagtacgtcaaatcgttacagagccaaatacaagtatgctcttcaaaacagaatgtgttttaaaccaatggttcaacatggaaagagttcatatgtatctagttttgttgaggttactagagttatttttggtctctatcaaccagcgtctccgaagagtttgaatgtttgatgtccgcagattcatcttcttggaagggttataaagtttcttgggagataaatgcaaatcttataagtctctacttcgaaacactggtacctcctttagatgggatggcctaatagctaattcctcttattatgcactgttcttgaggtcttactcttctgttttgcttcccagtttacaggaggattatgtataatatattaatatctgaatcgatattgttatgtcagatgatgtcgacgggacagggtatgatgtcgccaatgatgaatgccgggaatacgcaacagttcatgccccatatggccatggatatgaaccgacctcctccattcatacctttccccggcacatcttttcctatgccggctcaaatggcaggtgtaggtccatcatatccagcaccgcgctacccttttcccaacattcagacctttgacccatccagagtccgtttaccaagcccgcagcctaacccggtgtcgaaccagcctcagtttccggcttacatgaatccctatagccagtttgctggtccccaccagttgcaacaacctcctcctcctccatttcaggtaactctttaccatggtatccattgtgttgttgcaggtaatccttatgtatgatgatgctcacaagatccttttttaaatattctcttagggtcaaacaacatcacaactgagttccgggcaggcaagtagtagcaaggaacctgaggatcaggagaaccaaccaacagcttagtaagaatcagggaatgaagggtttccttgggatgtaagttaatggtcaagatactgacagatgcatctccattgtgtcgttgcaggttaaagtgtggagctgaaacggatcagttcttcaagcaaattacaactttgaagataaaccagagttgtaacatgtagattttgtctgttaagtttaatgtaagtactttttagttaatgggaaagatactgacaggttgcaaggtggtcagtatttgtgcatcacgcttaagattcctcgatgtggccagtatctcccttttctagcatgtgaggtccctactctctggttctacggagaccaaatgttcgactgattaaacacacaatgacttaccaaaagtacacgcggcccatcctcgtctttatgttccaagtgcgactgtttgtttatttgtaagcatttttcttataataataaaacagctctatcttcgttaatatcaacctttcttagaagcttttcactggagataaatgtgaggaaaaaatcccctacgttataagccaagtataagctattctgattggcttaacacctcctacgtcaaaactcaaaaagaaacacttagtagtattatatgaaaaaagaagagtgaattgcagctgcctcaaaagtaatatttactttattataagatttagtatgaacttatctacatgtattttgtttgaaagaaaagtaaacaaaaaaaaaacaatagaaaaagagaaagacgcaacatgactttttttttgtattgatattgtagagaggatggcgtaagaagaagtctgtttgtttcctaaggttaatctaatcattatatatttggaatgttttgtttcttacagagatatcttagcacaaaattctgaaaaaataatcagaagactgtggaaaaataaattcaacgaatgtgaccaaccactacaaaacaaaacaacattataaaatctaggtttcgaactcgcaaatcaaccaaatattatgcaggtcttttctactctgtgggtaaaccgacagaaacagcgacgacgtttgttttatttcttttaaactgttcacatttgtttattgttttcctcctgttgaaagttaacaattcaaaaatttccagtacatgtgtttctgttctcttctcttctcaaaattttttgtttctttttgtctcaagctatgaacttccatactttgaatcttctacttctctttcttcctcttacttgatcttcctatagcatacttccatcatgtaagttcctttttgtatttttatttctcttacttgctaaagttttatcttcacattttttgatgattagggttttggtttgagattaggggtgaagatgatatagtggagctcttatggaacggccaagtcgttcgaaccagccaaccacaaagaccttcctcgggtaaaccttctcctactccacccattctgcgtggtagcggaagcggcagcggagaagaaaatg

SEQ ID NO: 3187 - DNA, 3000 bp, Unknown; identical to SEQ ID NO: 3178
  misc_feature (1)..( 3000): cDNA_ID_1819770_gDNA_ID_1620630_Annot_ID_162642 3000 nt of promoter + ATG

SEQ ID NO: 3188 - DNA, 3000 bp, Unknown; identical to SEQ ID NO: 3176
  misc_feature (1)..( 3000): cDNA_ID_2152530_gDNA_ID_1620630_Annot_ID_162639 3000 nt of promoter + ATG

SEQ ID NO: 3189 - DNA, 3000 bp, Unknown; identical to SEQ ID NO: 3185
  misc_feature (1)..( 3000): cDNA_ID_1838422_gDNA_ID_1620630_Annot_ID_47231 3000 nt of promoter + ATG

SEQ ID NO: 3190 - DNA, 3000 bp, Unknown; identical to SEQ ID NO: 3184
  misc_feature (1)..( 3000): cDNA_ID_3012928_gDNA_ID_1620630_Annot_ID_47232 3000 nt of promoter + ATG

SEQ ID NO: 3191 - DNA, 3000 bp, Unknown
  misc_feature (1)..( 3000): cDNA_ID_1819751_gDNA_ID_1620630_Annot_ID_47234 3000 nt of promoter + ATG
ggtaattacgcatttccttggttcgattcgtctagggacttaatagtgtgcgaaatattagaggatccaaatgatgcgtaagataagtcttatgagaagtccattagccctcgtaactatgattttaggtactagtagaaattcaattgggtatatttggtgaattctagagctttataattttgttatcgtttaaggctgataatgatgaagacataatgtcatggctctatgtttttattgctctttcctgttattttttttatcaactgatattaaagaatatatacattatattggctggtccatttcagtttttcttttatttggtcccgatttgattttatgtacataaaacatgtagaaccaatagtagtgtggtcgttatctttctaataatcgaaggctcgaaaccatatattgattcttggttagcgtatcgtctcttttatgactgcataatttacatggcttgcctatgtgttacacattatctcgatttcgatttcacgttcttggtaacatattaaagaatttagtatacgaaacaataaattgcatggggaaaccgatattcataaccaacgataatttgacaacacaaaaatggatcatcattcgccattgcccactcggccatacattagaaggacaagttatatttatttgctctctgtgaatctaattaagttttttactcgtcagtgggaaacatatagtaattgttttgtttgcattaaaatgaaaatgtatatatataaataaaaatgtactgatatatctactatagtagacttagtagtaattgttgtgaaagtagcagaaacaaaggatatggttgttgtaacataccaaattttcatgaaagcattcattgtgaatgtgaagttgagcgtatctatccgtgcaaccaaaaatagaaagagatgaagtatatgatcataatctgatttcttttgcttttagcacactaatcattgaagtttaagcatcacatctcttttctattttcctttccttgacaaaacttgcgaatcgttttgatgttccatacgtcttttgccatcattcatacataagtaccaaccaactattattaaacttttatttgttaattatacacaatattgactatatatattattatttttaccacaaaaaaaatttaaaatttagactatatagtaccaaccaatatagtattaatttttttttattttttacaaaaaccaatgaataaatttgattttccgaatgtggtttcttaattaaatttatattatttcagttccaatatttatatatatagataataaaaacaaaagagataaaagaagagatattggaaacaaaagaaaatgaataattgagagaacacaaaagaggaagaaagagagtggagaagagaagagaagagaagagagcaacttcctccattttcttttggcttcctctctccttctcggtttgttttgtctgtacctgagagagtttcccctaacaaaaaaagactcttttttcctcaaaatccatttcgcttccgacgccattctcagtcggtgtgaacgcgtgagagaaagagagagatttggcttactttatctccggcgggcatctttttccggcggagtttccgatgtatctactctagctaagctcagctcttaactgttacaggtctctctctctctctctctctctcttcccccgagtaaaaaagccacaaaatgtctgaatcatttagctctgatctcactttccgatgctttttacctattttctcgtttcgatttctttgtttgcttttcactgttcttacttcaattagattctgatccctctttttaccctttctctctctctctttctctgcttttgcttttactgtttccttacaattgtgattgtattgagctaattttggtcggattcatttactcttctctttgtcaatttgcttgtttttgttaaagatgtgacatttattactaaaggtttcttctttttgggggaaacaaatttgagttcatagatagacttactagaggagtgttgtatcactgatgctggaatctggttaatgtaggcagatccacagtgcctgttgattgtttcttcctatcatcaatctcggaatttgagggggtcttattattaagggtgagtcaattttgatttgtaattttcacaaggagtttgtgttcagacttcagagcataaaaagtgactggcttgattgtgataggtcatgtgaaaaaatggtaactggttcatcttatcttttgttcagtcactataaagtgtccctctgattacagaatcttattctcctttctttttttccttacaaagttcttgttttgttatgcttgtcctgttcctctttgctgctagaaatattctcttcttctactctctcttcacttttcctggatcttttaggtttaaattttgaagcttgcagagctggaaagtttcttcattaggaatctttgcttgttagtttcgtgtcacctcagataataactaaatagctgtgaaactgcagggaccataatgaatgaactccgaggcagaaaggctcaaaagattgaaagtccagttccaggatgcttagggaagatggttaacctatttgatctaggaattgctgttaatgggaacaagttgcttacagataaaccacatcttgatggtaatcactagttccctctgtaattgctttgttcactagtcgaagctttctgttatgtttctgaactgagtaggatgtcctagtatccacctgtgttattgacacgaggtagtttcatggcaggatcctctctgtcaagaagtcgatctgatgtgactcgaatgccaggcccttcttataaaggccattcagaagctgaattggtacgtttggttaaataattagaaatagtatgcatgctagcaacagcgattttaatattcagaagctgaagtctattgcctgcactgtttgcacagattatg

SEQ ID NO: 3192 - DNA, 3000 bp, Unknown; identical to SEQ ID NO: 3183
  misc_feature (1)..( 3000): cDNA_ID_1808354_gDNA_ID_1620630_Annot_ID_47235 3000 nt of promoter + ATG

SEQ ID NO: 3193 - DNA, 3000 bp, Unknown; identical to SEQ ID NO: 3182
  misc_feature (1)..( 3000): cDNA_ID_1819747_gDNA_ID_1620630_Annot_ID_47237 3000 nt of promoter + ATG

SEQ ID NO: 3194 - DNA, 3000 bp, Unknown
  misc_feature (1)..( 3000): cDNA_ID_1807311_gDNA_ID_1620631_Annot_ID_47244 3000 nt of promoter + ATG
taattggtttatgaaagaatctacatatacaacattagcctcgcttttaacgaggactaacacacgtgaccgatacagaacaagaaaaagacatgctagtagacggaccacgctgcaatctatcagctaagggatttggcttgaatctgaccctaaagacaaatcctggtggttgaggcacatgtagagtaattgaagtatttgtgagcatatgaaagactgtagacatcgttggacgatcagcaggattttcttgaacacataacaatccaatgtgaatgcatctaatgacttcatttctatcataattctcccccatgggtgcgtctaccagttccaacaatggttcattgttccaaagcctccatacctattcaagtcatttatcaagaaactaatttaaatgttgagagctatgatcattttgctaagagaagtagaaaagtttgagatggcattggaaatatactaacatatgtgactaagttacttattgagccgtctgtctcgttgatgctactattctttttcccaccaataatctccagaatcaatactccaaagctatacacatcagatttcgtcgagaactgcccattcgtcacatattcgggtggcatgtaaccgctgaaaaatacaacgcataccagtttcaacttttatcaacaacaataagtacaaacagattatataactaaaatggaaaattacttacattgttccaactactcttgctgtggtagcttcagtttggtccactctaaaattcctagccacaccaaaatccacgattttcgggttcatatcggcatctaagagaatgttacccgctttgaggtcacggtgtatgattgtaagccgtgaatcttgatgaagatacacaatccctcgagtaattccattaataatgttgtatcttcttgtccaatctagttgacccttctttaccgggtctgcaaaaatcccatgtattaagcaattagactatgagatcaagaactaaggtttcagagaatataaccctatcatctgtttcttttcttaccaaagaggaagtggtcgagacttttgttaggcaaaaactcgtagactaatatcttttcgtctcctttgacagcatacccgagaagcttaacaagatttctatgttgaagctttgctacaagaaacacctcgttcttgaactcttcttcaccttgtcctgacgttttagacaacctcttcacagcaacttctgttccattcggaaatgttccctgccaagtcatatgatcttcacataattatcagaacatgttctgttttttctctctaacacaaaaaaagtactagagacaaacattataccttgtaaacttcaccaaaaccaccatgaccaagcttgttaacattatgaaaattacatgtggcagcttcaattgctttaaactcgaactgaagtgaacctgaagttgtaatatcatctgctactgcaaaacgaaatcataattatatagtgtatccagagagtttctaagggacattcaacatttatatctcaaattcttattcaagaccactatcaactttatgttttcaaaacatgagaaaacttacttttagttgtctttgttttatatgcttttctcctcttccaaagaccaactcctagagcaagcaataagatgggaacaacgataatcgccacaatagctcctgtagaaatgcttttgccatctgcacgaaccctaggaaaaatattagtctcaaactacgaacatagctataaaaaaaacttaaaacatggacccatggtcttacctttttgacgaggacgaatattatcaaaaagtcccaagaacggataaagctcccatcgaatgaaacagcttggcctcaaaataatacctccttgtctcccacggcaacatgacctatactcaaccacgttttgttgtagacacttggtgcagttttgaagagataagtctctactgcattgcacaaaaccgtaaatgcgtgagatagacgtctcaagctttcgtatcccggctgcatagtacaaatatgaagcttggtctatcatacgaatcatcaaagcctcccatgtaatttccaaatccgtcaagttagcttgaaaatctctggtatagttatcactcctcagaatctccataccaagggaactataaaacgagcggtttgagtaacgtacaagacaaactgttctatcaattctccagactatagcttctgtctgattagtacaattctgcaacaatctagcatttgaaggatgatacaatcagaacaagagtgtgcatcagtacctgggacacacatccctagaccatatgctctgtttggatgttccccgatccatgtcgtgtaaaagccgtcgatagctgtgacattagaggaagagaagaaagcaggactcggcggtttaagtcgtaagtactattgggtgtgaagaaaccagatctttcaaggcatacctgtgcagagacatgactaaagcttatgaccacaaaccagaagattactaaaaacttgaccattttatttactctttccttttttgttttgatgtctgaaattaaaacctcaaatcttggaagatgtaatatttatacaggcgtttcaatttcaacctcttgtgctgtacaaaatttgactaatcgtcattgaattttctaacgtagacttttgatgatgagtcaatgtctagtttaggtgacttatgtcttatacgagcctgattcacattttttaccactttgtaccatatgaattggtatttttcctccaatgtggtaacaaatcttgttgaagcttcatcaaagcaaaacagcaaatgcatgattcttgaaagggtattaaattgaaacttttaaaatgtttaagcatattatgaaaagttaaaatattagtggggtggatttgtagttttttaaaacttggagaacagatacatcttactgtcattactgaggcaacatcgagtacattcaccggaaa

SEQ ID NO: 3195 - DNA, 3000 bp, Unknown
  misc_feature (1)..( 3000): cDNA_ID_1821121_gDNA_ID_1620631_Annot_ID_47245 3000 nt of promoter + ATG
tctctgcattaagtttcctctgctttttcacttttatacatgttttcttaacattttcatttatgtttttttttaatctaaattacattaaaaaacaaaaatctcaaaagttgttaattttattgatatattaagaaaaataaatctggtggtaaagaggacgagatagagagagaatgagaaagaaaaaggagactccgtaatgaatctggcatgagttctggcaaagacagaagagaaattcaatgagaaagagttctggctaaagtttggtgacgaagaaggaaaaaagaaacacaaaaagaagaagtaagcaaaatggtaatatagaccaaaaagtcacagaagatctgtaacaaatggaaactattttggtcaaatgttattttgttaattatttgtcagtcaaggtcattagtccatattctttttatttgaatgaaagataataaatgatacaaaaatgcatgaactaattgtgtcaatgaatttagttttcatgtgattttctacattataaataaatcattttgattcatttcttgtttgtagaagaaagaataaagataagagcctctttcatagtatcaatggcttccttcaaccactttgtgttactgcttctgttaataatcactcttattctatccgctgaagcaactaaggaacgccgagcaataccatcaaaggcagaaaggaatgaaatgaagagacaactcaaagctatcaacaagcctgcaatcaagagtttcaaggttggtttagccttccttcttcttccatgcttatattgtttcatatctaacttttttttcttatgaacagactgaacatggtgatatattcgattgtatcgatattcacaaacaactagcatttgatcatcacctactaaaaaaccactctgttcaggtttgattttatacatatttaattctctctttatctactgtcttttcaattaaaagatgcctctccttagagaatgactgactttgtatatgcagctaaggccaacaacagtacctgaatatatcactggaaacaacatttcagagagttttagtcttttgcaagaaggtataagctgtccagatggcacagtaattgtaaaaaggactacaatgcaagatcttatgcatgcacaacgtttgaaatccatgggattcgagggcccgagaccttttctcacagagacaaacaacatgaattttaatggaaaattctacgtaagaacccttataagttgatagtatatatagcaaccaccatttttgttttccactttcattttctgagtttctttcttctttatggatattaggatgcaagagctgattatggaccgaacccttttgctggagttgcaggaaacattaacatatggaaaccaaaaatcttgcaagatcaagttagtattggatacatggcagttagtggggggcctattgaagaagatttcgccagcatttcagttggatggattgtaagttaattctggttccttagcaaaagtgaccatgttcgtcaactgtaagttgcatgaatttaaagttgacaaaagtttgaaatatgtatatacaacaggtgaatccatcgatgcaccatggtgatcatgttcgtttatacgcctactggactgtaagttttgaattatactagtaagagcttacaccaatagtttctttatcaacttgtctgtgtcttataagttctttatgtatatgtttccttataattgtgttaatagttacatggaagcagtactggcggctgctacggcatgtcatgtcctggatttgtgcaagttagcaagactataccagttggtgccgttcttcaaccattttccatctataatggtcgacaatatgaattgcgtttaggcttgtttcaggtaaagtctactcaactttttatcacttctcttaaagtcatttgaattcatatttcaaaattgggaacaggatagtggcacgggaaattggtggtttgtatttaaagaggagattattggatactggccagcatcattgttcaagtcctggatggaatctaacagcgcaaattatgcatcttggggagggcaagtgtatagccctatcagagagaagagtccacctatgggaagtggtcattggcctagtgagggctttcataaagctgcttttattagtggcctcaaactcttcgatggtcacgggaaagtttataatccaggacgcgggacagtgaaggtacatgagagcagaccaatctgttacaaagccagatatgttcatgatgttgataaaccttggttaaaatctgtttactttggaggtcctggagggtgcatagggtaattgatctacgagataaagagtaacaatatcataagattttaattttacacaggctataggaaaaatcaacagatttgaaatatatctaagcattacttgcgctctaataaataataataaagtattagaaattcacaactttcagcacaaatttctatagtttattgagcatagattgatagctaactcaccttaaagtacattaaaaataaaaatctcattctcaactgcaaaaaaatgttacaaagtcacatatgttcatgatgataaggatccttggttaagagctatttactgtggaggtcctgcaggatgcatttggacataatatatgatatgcagagttacaagataaatcttatatatgtttgtatgaataataaagtttccatgaatcctcccaacttttttgcaataagtttgatgtttatgcctaattgtaaaaatgtcacaatctaatcatcaatttacaatcctttctaatacagacataatgataaccaaaaatgtgggttctactgttactgcatttgtctgaaacatttctaaagcctcttttaatcatgtcttaaatatatatacccctatccatagcatagcttgcccctactcataacctctaaactctttagacaactaaatatataatataatg

SEQ ID NO: 3196 - DNA, 3000 bp, Unknown
  misc_feature (1)..( 3000): cDNA_ID_1819837_gDNA_ID_1620631_Annot_ID_47246 3000 nt of promoter + ATG
aggtcatttagtccatattctttttgtttgaatgaaagataataaatgatacaaaaatgcatgaactaattgtgtcaataaacttaagttttcatgtgattttcaacattataaataaatcattttgattcatttcttgtttgtagaagaaagaataaagataagagcctctttcatagtatcaatggcttccttcaaccactttgtgttactgattctgttaacagtcactcttgttttatccgctgaagcaactaaggaacgccgaccaataccatcaaaggcacaaaagaatgaaatgaagagacaactcaaagctatcaacaagcctgcaatcaagagttttaaggttggcttagccttccttaatcttacatgcttattgtttcatatctaacttctttttcttatgaacagactgaacatggtgatatatttgattgtatcgatattcacaaacaactagcattggatcatcatctactaaaaaaccactctgttcaggttttgttttatacataactaattctctctttatctactgtcttttgtattaaatgatgactctccttagagaatgacgaccaactttgtatatgtagctaaagccaacaacagtacctgaatggatcactgaaaacaacatttcagggagtattaatcttgtacaagaaggtataagctgtccaaatggaacagtaattgtaaaaaggactacaatgcaagatctgatgcatgcacaacgtttgaaatccatgggattcgacggcccgagaccttttctcacagagacaaacaacactaattcaaatggaaaattctatgtaagaacccttataagttgataccatatataccaaccactattttcttttcttgtctactttcgttttctgagtttctttgttctttatggatattaggttgcaaaaggtacctttggaccagatctttttgctggagtaagaggacacattaatgtatggaaaccgaatatcttgcaagatcaagttagtctggcatacatagcagttggtggaggggctaaagaaaatttcgccagcatttcagttggatggaaagtaagccacttctggtttcttagcaaaaactgaccatgttcgcaaatacgtctcatcaactataagttaataaaattttgaaaaatgtatatacaacaggtgaatccatccctgtactatggtgatcatgttcgtttatacgcctcttggactgtaagttttgagttataccagtaagagctagcttgcactaatagttcctttatcttctgagactcttatgtatatgtttgcttataattctgctaatagttacatggaagcaataccgggtgcaacgacatgtcatgtcctggatttgtgcaagttagcaagactatagcacttggtgccattattcaaccactttccatctataagggtccacaatatcaattgcatttgaccttgtatcaggtaaagtctactcatctctttgatcacttatcttaaaagtcatttggatttatctttcaaacattgggaacaggatcaaatcaagggagattggtggatttcatgtaatgatgaagacgttggatactggccagcatcattgttcaagtcctggagagaatctaacgccgcaagttatgcatcttggggaggtcaagtgtatagccctgtgacagagaagagtccacctatgggaagtggtcattggcctagtgagggctaccagaaatctgcttattttagacacgtccaaatgagccttggtgatggaagagtttttaatccacaaacgggtacagtgaagttatatgagaccagtcgaaactgttacaaagccagattagttcatgatcattataagccttggttaaaatctatttactatggaggtcctggaggatgcatagggtaattattgatctacaaaataaagagtagaaatatcttaaaacttttaaataggctataggaaaaaaaccacagatttgtaatatatgtaagcattacccgcgctctaatgaataatcaagaatttgaaattcacaacattcagcacaaaaactaatatgtttactgagcatagattgagtgcaaaatcacctcaaagtacaagaaaaaaacatctccttcttaactgcaaaatagtgtaattataagattaaggaacattgctatattattacgacatatatattattaactagaagctctaagttaataacacgattaaagaactgcgaactgtggtatgatgcacattctagttaacatgatgtatttcaagttatttcaagttaataacacgattaaggaactacaactttatctgaagctatcttctacagaggaccaggaaatgatgcacattttagttaacatgttcttaaatctctctgcattaagtttcctctgctttttcacttttatacatgttttcttaacattttcatttatgtttttttttaatctaaattacattaaaaaacaaaaatctcaaaagttgttaattttattgatatattaagaaaaataaatctggtggtaaagaggacgagatagagagagaatgagaaagaaaaaggagactccgtaatgaatctggcatgagttctggcaaagacagaagagaaattcaatgagaaagagttctggctaaagtttggtgacgaagaaggaaaaaagaaacacaaaaagaagaagtaagcaaaatggtaatatagaccaaaaagtcacagaagatctgtaacaaatggaaactattttggtcaaatgttattttgttaattatttgtcagtcaaggtcattagtccatattctttttatttgaatgaaagataataaatgatacaaaaatgcatgaactaattgtgtcaatgaatttagttttcatgtgattttctacattataaataaatcattttgattcatttcttgtttgtagaagaaagaataaagataagagcctctttcatagtatcaatg

SEQ ID NO: 3197 - DNA, 3000 bp, Unknown
  misc_feature (1)..( 3000): cDNA_ID_1819833_gDNA_ID_1620631_Annot_ID_47247 3000 nt of promoter + ATG
ctctttatctcctttcttttcaataaaagatgaatatttccttagagaatgatgtaatttgtgaacacattgacgtatatatacagctaaagcctacaagtgtacctgaatggatcaatagaaacatttcagggagatcatttggtcttctacaagaaggtataagctgtccagatggaacagtaattgtaaaaaggactacaatgcaagatcttatgcatgcacaacgtttgaaatccatgggattcgacggcccgagaccttttctcacagagacaaacaacactaatttcaatagaaaattctacgtaagtaacccttataaattgagagtataccaaccaccatttttagtttctactttcattttctgagttttttggtctttgtggatattaggttgcaaaagctaactatggaccagatctttttgctggagtaagaggaaacattaacatatggtcaccaaaaatcttgcaagatcaagttagtgttgcatacatagcagttggtggaggtgctaaagaaaattttgccagcatttcagttggatggaaagtaagtcacttctcgttccttagcaaaaagtgaccatgttcgctaatacgcctcatcaactataagatgcatgagtttaaagttaacaaaagttgaaaatatgtatatacaacaggtgaatccatctctataccatggtgatcatgttcgtttatacgcctcttggactgtaagttttgagttataccagtaagcgcttgcactaatattttctttatcttctgagggtcttataagttctatatgtatatgtttgcttataattgtgctaatagttacatggaagcaataccggctgcaacgacatgtcatgtcctggatttgtgcaagttagcaagactatagcacttggtgccattattcaaccaatttccatctataagggtccacagtatgaattgcgtttgaccttgtatcaggtaaagtctactcatctttttgatcacttcttttaaaagtcatttggattcatctttcaaaaattgggaacagaatcaaatcaagggagattggtggtttgcatgtaatgatgaggacgttggatactggccagcatcattgttcaagtcctggagagaatctaacgccgcaagttatgcatcttggggtggccaagtgtatagcccagtgacagagaagagtccacctatgggaagtggtcattggcctagtgagggcttccataaatctgcttatgttagcaacctccaaatcattaatgttaatggaagagtttttaatccacaaacgggtacagtgaagttacatgagaccatgcgaagctgttacaaagccagatttgttcatgatgctaagaagccttggttaaaatctttttactatggaggtcctggaggatgcatagtgtaattattgatctacgaaataaagagtagcaatatcttaaaagttttaaataggctataggaaaaaaaccacatatttgaaatatatctaagcattacttgcgctctgtacgaataataaagtttccatgaatcttcacaactttttttgcaatatgtttgatgtttatgcctaagtcaaatcatcataaattaccatcctttataaaaccaacatggtgataaccaaaaatgtgggttctactgtgcttttgtctgaaattcatctaaaagcttcttttaatcatgtcttaaatatgatgacaaaaaaaaaaatcatgtcttaaatatatatacccatatacatagcctagcttgcccctactctttacctctaaaccccttaagactaaagagtcataaagattgtcttgatgataatagcatagcttgcccctaccctactctttcacgagagtatatcaattgattcaccagttcaaaagactcataaagattctcttgatgagggaaaagattctaccaaagtgtgtttagcaactgtcatggatacttaaggctagtgaactacacacctccacacgacgtagagaagcaagaagagctcgttgaaggtctttgaaagcataaggatatgagctgcataacaatagtctatcaagattccgttggtgggcttcaaatgaggtctaaagaagggaaatggatcgatataaatccgtgtgaggatcaccttgttgttaacattggagatctaatgcaagcatggagtaacggtcggctgcgattgtctgaacatcgagttgtattgagaaagttggtgaacagagtctctctatcgtttcttctctgttttgtgggcaagaaagtgatacttgcgccacaagtatcatcaagatattgaatgcttaagtaaagcagcttatgtgagaggcatcaaaatcatcgatggttcgggaacagttttcgatccagaagtggatataatgatggtacatgaaaggagaccaaaatgttacaaagccatatatgttcatgaggatgatgagccttggttaagagctttttactttggaggatgcatagggtaataatgatctacgaaataaagagttgcaagatcgtaagacttttagatagggtataatagaaaattgacataattgatatatatatctaagcattacttgcgctctaatgaatactcataagttcacaattcagcacaaaatatcgaatgaacatagattgagtgcaaactcacccttcaagaaaaaacaaaaaaagaagaggaaagcaaaatggtaatatagactaaaaactcacagaagatctgtaacaaatggaaactattatggtcaaatattattttgttaactattcataagtcaatatcatttagtccatattctttaaatttgcataaagataataaatgatacaaaaatgcatgaactaattgtgtcaataaatttagttttcatgtgattttctacattataaataaatcattttgattcatttctggtttgtagaagaaagaataaagataagagcctctttcatagtatcaatg

SEQ ID NO: 3198 - DNA, 3000 bp, Unknown
  misc_feature (1)..( 3000): cDNA_ID_1819822_gDNA_ID_1620631_Annot_ID_47250 3000 nt of promoter + ATG
agaagatgaagaaatacttgcgatgatggtgttagaccagttcagttcggcttagatgttgttctatcaaattctacacattttacaattatgttgctaatgtttggtattggaaacacttattgacaatgttagcaacttagcatacctatgtccagttcagttatgtctctgtgatattcaaacaagattctgagcttacacatgtacacaatgtattcttccattgacataattaatgttacaagatacaatgccattgatacataatagattacacatttacactgttacaagatcaaagctctagtggtacatatagagatcatcacacatgacataggaaacaagaagaaagcatatagaattaaagattgatatattcttagcttgatgatgatcagagaatatgtaggaaactttatgtcttggacttgaaaggaatagctctgatgactatctgatggtacagagcagcaagcgcagcaccaatgaatggaccgacccagaagatccactgcagacacataaaacaaaagagacaacagataagagcagaattatcaaaaattctgagttgctatttagatgcaattcataacttatcatacttagcacaaccgttgatgtaattaaagaggaaaacttacatggtcatcccaagcatgatccttgttgtagatgatggcagctccgagactcctggccgggttaatgccagttccagtaattgggatggtagccaagtgcaccaagaagacagcaaacccaattggaagcggagccaagatctgcaaaatgttcgataaccaaaaaacacatgagctctatgtgaagaatatgaactcaacacaactcaaggatactagagaattagcaacatacagggacatgagagtctctggcacttctcttagcatcagtagctgagaaaacagtgtaaaccagaacaaaagttccaacaatctctgcaccaagacctgaaccctttgtgtaaccatgagccaccacattagctccaccgccattcgtctggtacagccctggttgaaaccctttaaccacaccagcaccacatatagctccaaggcactgcattactatgtagaacagagctctggttaaagatagcttcctcgccaagaacaaaccaaaagtcaccgccggattaatatgtcctcctgctcattaccaaaccaattcgccacacacaagtcaaaatcagattatgatcttcacacagaagaaacaaagtggggcaaactaaccaaagtttcaaactttaagaagaaaattactcaaagtttcaatctttaaatgtgaaattacttttaagtatcaaactttcttcattatatccaagtttctcacaaccaagtaaccctaattccagattccttcaacctaaattcgaaaactttaaacaaaattcagagcaagaacagatcctgaacctgagattccagcagtacagtaaacaagagcaaagatcatgccaccaaaagcccaagcgatgccttggattccaacagaggcacacatattgggagctctcttaacacccatgactgtcaaaacggtgacgtagaggaaaaggaaagtggctatgaactcagctatccctgctctgtagaaagaccaagatttgagctcgccgggttcgaaaaacggcgccggtggtggttccttatagtccttgctctccgtctgagccgccgtaccgatcggctgtctctctgggaacttgttggctccaacattgacgtcttcttctttgccttccatgtttctctctcactctatcaccaccaactttagtttgttgtctctgtaaatttgatgactggtgtatgtggaggttttatagtttggttcatttaggcaaaaataattattaattaaatttgctactaatttccaaaatcttatatttgttattcatgcaaatttctaaattatcagaaaatgtgtaaataaataaatatagttaattactaattatagaaaataaattagtgaatttagactaaattaacttaatctgtctaaaatttttgtgatagataattttaattgcaatggttgatatagagtcgcactcaagtctcttttgattgatgatttgcattttttttattgtcaatcataactcgtggtttataaacctacattttccatgtaagacttttaattcgtttaatgtttaataacggttttctatctagttagtctttgagcataatacttaaattaaaaaatgttgttttaagataagaattagaggtaggtagttgaaatggactggacaactaggcgcgaaaacgatgcatagaagaagatggacataagattaagcaactaccatataatttgttaaaacagaatatattacagctcaaatgatgtggacaattctaacataatgtttctatcaattatgtgaatgatattatagaggaaattattggatgtcaaaaatattatagatgaaagaagacacttcacatggaaaatgttcgccttatcgatctctactgtttatagatcaattcatggtttatttaagttcctttgtgtcactactgtgttttttttttatattgggctttgatctaaaaactttttttggggtcaattgatccataaacaagcttttcctttttcttatggaatatactttatacaaaaaaaagtacattaaaaaaaagagaaatcttactttagcatctacatatgggcaatagagatagagggagatacatttgtcatttactgtgtataggttctttggtggttataaatgatctcagatttatgtgacacaataaatatagttgttctgcttcattttttcttttgaaaaatatagattaagatccttgattcatcatgaggtattccaataaactaattatcttgctaactttatcaacaatagctctcattttagttggagagagtcacaaaacaataccttcgaaagaggagaaagaagagatg

SEQ ID NO: 3199 - DNA, 3000 bp, Unknown
  misc_feature (1)..( 3000): cDNA_ID_3070844_gDNA_ID_1620631_Annot_ID_47251 3000 nt of promoter + ATG
aaaaaaaaataattatctaaaaatcaagataattataagattaaaaatccattttattgtttaactaaaactaagcagaggacatatacactaagtgtataaagttcttaagacaagtaaactaaaatatgcatcctccaggtcctccaaataaaatagctcttgaccaaaattcaccaacacctaatattttttggacattataacagtttggactgcttgcgaatgtctttaaagctgaagctaacggactcgaaacttcttttgttatatcagtgattatttttaaaccattcacataggctgctttcttgaaaccctcttgtgggaaatgtccacttcccatgcttgggctcttctctttcactgaactgtacacttctcctccccaaaacacggcactcgctccatcagctaaaccttgacgtgtgaacaatgattttggccagtatccaattggctcgttatttagcacaaaccaccaatctcttgtaacatgatcctgcttaaatcaaaagttgttaacataatcttgacttttcgatattagtttgaagaaagctaatgttgtatatttatatatatacctgatatatgctgacttctagttgatattgttgaccatcataaatggaaactggttgggcgagcattccaattgcatacttggtgctcacgtgtacaaacccaggacgtagtgtattgtagcaatgagtcttattatttccatccgcctatttaaatcaaagatagtagccataatatgaatgccacatttaagagtcaagactttaagaagttttgaaaaacttacagtccagtaagtgaacaagtgactttgattattctgatttagccctggatacacctaaaaacatattttggaatgttagttccaaatttttgatttagaaaataagtaaaaatagggtctagcttgacttacaatccatccagcagaaatgctttgaaatcctttgttgcctgatacagccatagccgcaagactaaattgatcaggtgagacgtttggattccatacgttaatgtttccttttgctccatagtggtcatctttgtaactaattgtggcaaactaaaatccgaagagaaaaagaatagataatcaaaaaatattataagcattgtggacaagttacaaggcgatctcaattcaactacgtgtaataagaaatgattcttacatgatgaccagttaaatcaattttcttgtcctttgcagacacttgtcctggatagttgaatcgtaaggattgcaaacgttgagctcgtataagatcttcaagtataattcttttgacaatgactgtcccaactggacaacttatgtcatcttgtcgaaatggcagagaactagttttatgagaagcgttgttatctttggtccatttaggtatagttgtgggtttcaactgcatttatatttcaatccatccaaacattaataagaattttatttatagatattttttcgtggtttgtaggataaaccttaatagaatggttcttgagcaaaggatgatcaaaagctagctgtttttgaatgtcgatgcagtcaaatatataaccatgttcagtctgtcgaaatcaaaagcaagaaaaaattggtgtggtctgaaaataaatgtaacttgatgatagttgtaatattgttacaatagtcaacaatttttgtaatgttttatgaaaatttaagaaaagaaaggctaaatttacttggaaacttttgactgcaggtttattgagataggtaagtagcttcttcatctcttctttctcctctttcgaaggtattgttttgtgactctctccaactaaaatgagagctattgttgataaagttagcaagataattagtttattggaatacctcatgatgaatcaaggatcttaatctatatttttcaaaagaaaaaatgaagcagaacaactatatttattgtgtcacataaatctgagatcatttataaccaccaaagaacctatacacagtaaatgacaaatgtatctccctctatctctattgcccatatgtagatgctaaagtaagatttctcttttttttaatgtacttttttttgtataaagtatattccataagaaaaaggaaaagcttgtttatggatcaattgaccccaaaaaaagtttttagatcaaagcccaatataaaaaaaaaacacagtagtgacacaaaggaacttaaataaaccatgaattgatctataaacagtagagatcgataaggcgaacattttccatgtgaagtgtcttctttcatctataatatttttgacatccaataatttcctctataatatcattcacataattgatagaaacattatgttagaattgtccacatcatttgagctgtaatatattctgttttaacaaattatatggtagttgcttaatcttatgtccatcttcttctatgcatcgttttcgcgcctagttgtccagtccatttcaactacctacctctaattcttatcttaaaacaacattttttaatttaagtattatgctcaaagactaactagatagaaaaccgttattaaacattaaacgaattaaaagtcttacatggaaaatgtaggtttataaaccacgagttatgattgacaataaaaaaaatgcaaatcatcaatcaaaagagacttgagtgcgactctatatcaaccattgcaattaaaattatctatcacaaaaattttagacagattaagttaatttagtctaaattcactaatttattttctataattagtaattaactatatttatttatttacacattttctgataatttagaaatttgcatgaataacaaatataagattttggaaattagtagcaaatttaattaataattatttttgcctaaatgaaccaaactataaaacctccacatacaccagtcatcaaatttacagagacaacaaactaaagttggtggtgatagagtgagagagaaac

SEQ ID NO: 3200 - DNA, 3000 bp, Unknown
  misc_feature (1)..( 3000): cDNA_ID_2990323_gDNA_ID_1620631_Annot_ID_47252 3000 nt of promoter + ATG
ctgtactgctggaatctcaggttcaggatctgttcttgctctgaattttgtttaaagttttcgaatttaggttgaaggaatctggaattagggttacttggttgtgagaaacttggatataatgaagaaagtttgatacttaaaagtaatttcacatttaaagattgaaactttgagtaattttcttcttaaagtttgaaactttggttagtttgccccactttgtttcttctgtgtgaagatcataatctgattttgacttgtgtgtggcgaattggtttggtaatgagcaggaggacatattaatccggcggtgacttttggtttgttcttggcgaggaagctatctttaaccagagctctgttctacatagtaatgcagtgccttggagctatatgtggtgctggtgtggttaaagggtttcaaccagggctgtaccagacgaatggcggtggagctaatgtggtggctcatggttacacaaagggttcaggtcttggtgcagagattgttggaacttttgttctggtttacactgttttctcagctactgatgctaagagaagtgccagagactctcatgtccctgtatgttgctaattctctagtatccttgagttgtgttgagttcatattcttcacatagagctcatgtgttttttggttatcgaacattttgcagatcttggctccgcttccaattgggtttgctgtcttcttggtgcacttggctaccatcccaattactggaactggcattaacccggccaggagtctcggagctgccatcatctacaacaaggatcatgcttgggatgaccatgtaagttttcctctttaattacatcaacggttgtgctaagtatgataagttatgaattgcatctaaatagcaactcagaatttttgataattctgctcttatctgttgtctcttttgttttatgtgtctgcagtggatcttctgggtcggtccattcattggtgctgcgcttgctgctctgtaccatcagatagtcatcagagctattcctttcaagtccaagacataaagtttcctacatattctctgatcatcatcaagctaagaatatatcaatctttaattctatatgctttcttcttgtttcctatgtcatgtgtgatgatctctatatgtaccactagagctttgatcttgtaacagtgtaaatgtgtaatctattatgtatcaatggcattgtatcttgtaacattaattatgtcaatggaagaatacattgtgtacatgtgtaagctcagaatcttgtttgaatatcacagagacataactgaactggacataggtatgctaagttgctaacattgtcaataagtgtttccaataccaaacattagcaacataattgtaaaatgtgtagaatttgatagaacaacatctaagccgaactgaactggtctaacaccatcatcgcaagtatttcttcatcttctttcttctataagagtctttcattttccactttttataacatgcttataactgaattttcaacttttgaatcacagtttcagttatagatattcttggatgatgttcagttcggggttttggttttggttttggttttggttgatagtcatgaaaatgcatgttctgttccacatggtagggttccagtaaaataataaaagaaccagatttagtaacatctttcacatgaatgataacatatttcacatgtttgatgcagcaacttgtaatatggatgatagtcatgaaagaatctaatgggccaagaaatgtgaaagagtctacatgactatcatccaaaaaagagttgtagcaatatggatgggccaagaaagtgcaagacttcagcttgagcttgactttaagagaataagtaatttgcatttgccctttggtcatgtagtactcgggttgtttacatttatcaaacaaatatcagagttgtttattgttatttgggaaaatctttaaactttctacataatctttgagactagtgggaattaagagtggtgatgtagtggatcaagattaaaaaaagttgattgtttaaaacatcgagtatcttgcaatacaaaacaaaacccttaaaccaatcaatacgaaaaagatgaagatgtcaactttccttttcaaaaatatgcaagtttgaatccggatggtaacatactgatgttactagttacacaaatatctaggctagatgtcctaatcatcttcaaaatattttgttgatgttttatcttaaataatcaaagtttttcaattattgtgggtgttgtatatatttaacataatcttaatccataaacaaaaagtaatataaaggtgttgcgggaaaaggttacttaatggttaagaagtttggcttatgatcatcccactttgtgaagtatggcatgaactttctttttaccgatattagagccaaatgaaagcggtttcttaatcgccaagttccaaccaaaaaacaaaaagcccacatttacgaaaaatactcttaaaccaacattttgaattcatatgatacaaagcttcaaatatccaaatcgaggaaattattttttaaaaaaaacaatacataacttttaaatataaattgcgaaaaaaggtaaagccactcatcaaaattcaaaagtgatgagattaaagcaagtgaagacgcatacattatcacattaaaagtagcaaacacaccaagaaattagataaaaagataacaaaataattccatccactttctttttcttttgttttgtcaagattttgttttttgtatttcagtcatacgtgtgaatgtatatcaacaacattgtttttaatgtataaaaatctcaactactataaagtagctgaatgatatgtgattaagatatatatcgagagagacaagccagcaagaattttcagcacacatacacacacaaaagattcaaagaatcatctagtaacaaataaaaaaggagagagaaggaaaatgaacaga

SEQ ID NO: 3201 - DNA, 3000 bp, Unknown
  misc_feature (1)..( 3000): cDNA_ID_1819804_gDNA_ID_1620631_Annot_ID_47257 3000 nt of promoter + ATG
acggttagcgaatacacgatacaccgtgtttcacatccttcttgccgatggaagatgacaaacccagctgagattaataccatcgtcgtctacaagaaacccgaccctcatctatgggaaagggtaagtaaaatatcatcacttttagcatatgatttatatgtgattaatgttatgtacttaatagtttttgtgtgtgttttatgtacagtcacctaggaggaattgttgcagagtattacaaacaaagaggaataatacgttatggatcaatgttggtgtatgtagagcaggtgaagtcactgaagttaagtaattttttaatatagtttatttttgtgaaagggaaggaaattagagtttttttaggctgttttaccgctcttaatttcttgccacgttatttaaaatttttattcattgagatcccgccctagttcttctctcagtatatgatcgttcataaaagaactgctctcaaatacaatttaccgatcagaatctaaaagtcatcacttcaagctctttatcaggacaaaatgtttttcctgtatatacggtgcgtgaattgtattggactctgtagtctgtactttcgaaaaagagagaatttaaaaggaaaggaaaaagtcatgaaatctcttagtccaagagggacgtttcagaaaacaacaacaacatgcgaggtcaaaatctcatacaaacaacgacctcaaaacaatcagcgaacgttcaattcttgacccgtaacaagacagcattaaaaaaagatgaaataaaattttccaatcgggagagaaaacaggcaaagagtgatcactttgggtaagcgggaggaggaggataagccccaggagggtattgagaataagctgagggaggagggttttgaggatagccagaaggtggataaccttgtggagggtgttgaggataaccagaaggtggataaccttgttgtggaggataaccgactgcgggtggggtggcttgatcaaaccgtgacatttgctgagccggaggcactgccattggctgtggcccgaacttaccgtccctcttgtccatttccatcttgtgttgtgtctacaaaagtattatagatattaccgtaagtgtaggatttaagtaaggagagattggaatgggttgatatgatatcatcactgctcgtacctgcatacatgcgcaaaccctgcagaccaagcaaagtacgatatatcaggacaataggttaaaattgggttttgatcgaaacttataagaatggcactttggatgggggattcttacgtgcagtacaccatgtcagagcaacatgtgagtatctgagaagcttctgaaagctcatccataccgacaatacatgcaactatggagaatatgcaagccacttggctgaggcaaaccatgaaaccctacacagccaaaaagccagcacagattacgaaacttgtttatcgtgtttgtaattgcttgtgagtgtcagtaacaggcatggtctgggcaatgaggatacttacaatgatgcagttgtcacattttgtcgtttgaatttggaactcatcttgcagaagaaagcgagttgaggccacagagtttgcaaagcagcagaagacctgcgattgatctgctatttagaagaccagaaatttgctaaaatttcgcgaggttgcctcacaagtcacacctaggtatgactgagattgtatgcatatgctacaggaagcattcagatgctgaaatcgaaatttctagactagctgtgtctatagaaaagacttcatttttgttgtccaaaaaaaaaaaagacttcatttgaagataatagctaacaaaatcaagtttcttacctcagtggcaagacaaagttgaggacatttggcttctccacacctaccactacaaggcatgtaaccggcacagcagacgtacctgcgagacaaaaaaaacaatcttcttaaactaagaagatggaattggaatggagctatatgaaagtgactgaatgtgtgatataccttgacatatcatcgtaaagcgcacgcttgcgaagcaagtatgatgcacaaggggcactgcaatgagaagaagaagaaacaagacatttccatatgtatgctaaacatatcagacccaaagagatacacaaatcatacaatgtcaaactcctaatgcactgaaattatcacatacaatgatcagagaaactcatattatctgtgaaattcagatcactccatacacatttcttgatgaaatgaaaatcaagccgatctaagaatttaaatcgaagtcaactcttggtcaattcaaataaaccaagatccgactactacaaatatccaaattccaaatacagagagaacaagcaacgaaaaatctcagatcaatcgaaacttaccaccacaacgcgaagcaacaatctgcgaacaacacagaaatcgatcaaatcaacaaccaaaaccaatccaacccacaaatttcaaaaagagagagtgagaaattacaaggagtatcgttctggatactgtgggtaagatcggtatgccaaacattacggaagttcttacgaagctccatcttctccatatcctgtttcggcattttcacaaggatctgatttcgacgacgaaatgaggtcaagcgagagagaagcgatttaaggatcagagactcttcgcgaaaagtctttgagaatctgatccacaatcacatctaaaagctgttctctcacaaacgtgtttctgacttcatctctctcatatcgacaacttgagaatacaaattcttcttctcccctcccctggatggcaactggcgttgactagacgaagtcacgaggcaatttcgtcaaatatcaataatactagggttaaactgtaattagttttattttaaccccgacctattactttttgcaatttcgtgtctttgtgtctcttgtcactgatcgtctcggaggagaagaagtgtggaggttgaagaagggagaaaatg

SEQ ID NO: 3202 - DNA, 3000 bp, Unknown
  misc_feature (1)..( 3000): cDNA_ID_1819796_gDNA_ID_1620631_Annot_ID_47260 3000 nt of promoter + ATG
tagggattttacatggaccgatttagttaaaggctcgtccgatccaacaactataatgttaggccatactaattacaaaaaaaaggcccagttctgcagctagtccgtgcaaaatcatattaaaatcatatactactcgaaatttcataaacaacactgaaggaaaacataatttccctaggagattgaagctaaagacgaccacagtcaaccatgcggttcaaaaacggattggactgaaacacaaccttttaaacagaaaactaaaataaatccaacataaaaccatagaccatgcttgcaagagatccaaatacatgaagactttttgagaacaataaacctaaaccaaacggagaccaacacaatggagatagattccttttacgacgaatagatactatctcacgaatcatataatcataggtttgtaagactgacaagatagaccaactagagatcatccagttttatgaaaacagcgatgtcgttgagatacgacaaatgaaaacgcctctgcaaaagactattgaacagtccaacactctggacagtattagctccatacatttgcattgcattcaaatcatctaaaaacataaatatgacatgatatatggtttgactcttgatttgagcaattaggtgtataaagtggctttaataaagattaattaggtgtaattaagtacataatctacctacaaaatgttaattatattaaatattaacgtattaataatgtagttaatggaatggctccttcgtatagtctatagctgtcctaccagtgcccttcccacccaactaattctagtggacaaaacgtatgctcctgtgtactgttccatgattccatcatattttcttaataaccttttttgttaattttatgcggacgagttttggttgcttttctagatcacaatgagcagtctagagttggagatatttatatgattgatatttatcttgctatagtatatatatgattctgactggtacgtggatgtgaaccatctcctcgaatttttcatgcaaatacatatgtagataaaaccgaacgaggtagttgaaatgaacgatttacaaattgttaaaaaatggagttaaaagataaaatgataattatgaatatttacaaacagaatctgaacaataaacccaaacacaatcattaaaataaactatgaaggtcctaataagaaatgatggtttggtacaaacatatatatttaggaaattttctctagttagactttcccatttatggataatctggaaatgtcatttttgtgaggaattaatctttaattagttagccatttcccatttaaagagaaacaaggcaatttcatttttcttttagttgcaatcatagtactcttcgatttaaccccactatttacgatactttaattttctagtcccttcactaaatgataaaaagactgatatgaaaattaaataatttaataaaggttcggcccaacccacctggttctgtcgattaattaatagcctataatttgttcagaagatgtgttcgtaagctagctgctcaattttaatcatcttcatgcatattttatgttgtatattaacaaattataacaaatttgtaaactaaaacatttaaaatcatctctaaaagcttatcaaaatcataagttcgaacatttgaatatatatttatgagattgtatatatatcactcttacaagttacaatctctactaccatctctatttagacattagagtaaatgtacttacgagattatacctcttacactacgtctacaatcgctaccgccacctctatttaagcttctctgtcttacaatatcttgcttagtactcagcattgtctgattaagctgtcgtacaaaacaagtcagctatttagttagggtttggtcggcaattaaataatctatcaacctaattggctctcaatcggaaaatgagccgaggtgggagctttggaggcggacaaagctcgttaggttatctttttgggtcagacaatgagattccaaaaactcccgctccaccggtagccccaaagcctgcaccaccgtacggtgtagattccacagaggaggaccatgaagctgaccaaaaacccaagatctctaacaacaactaccaaagagttcagggccaaaactccggcaacttcgtcaccgtaagtctttattaattaaactccactttctttctttttccgaaaagaaaattaaacaaataagggttataattaaaatttcaggatcgtccaacgacgaaggtgaaatcggttcctggtggaggctcatctctaggatacttgttcggagataagtgaagaaatgaaaatgaagttaaaaaactagggtttgtatctctctagtgaggcttttactctatatcatacgtacgtaatgtaatgtggagatccctatctagatctctacacatcacttatttatatttacgtatgaaaatgtgtgttttgagttaacagttaattactttcaacttgtggaaaaagggtttctagtcaatattttcagcaatatatatgtactatataagtattgaacattggacattaactgatctgtccttgcattacgtgattaagtgaagtttcttcactctttagtatatcggaaagtgaagcttcttcttttgcacatgggtgatgggtatacattttataactcggatcattcgtgaaacctagatattaacagaaaagaaaaaaaaaaaaaaaaaagacatagataactttcaaaaatgtaacgaattaattttcttgtcatatttacaataccaaatgtagaaacactagatgagggcttgatctcttatcccgactaacaaaacaaatttttacttattagctcactatgtttgctaaattgtataaaaccgaaaaaaaaagcagaattttataaattacactttgtttattttgatgtttttatcataaataattacgtcatgtaccatg

SEQ ID NO: 3203 - DNA, 3000 bp, Unknown
  misc_feature (1)..( 3000): cDNA_ID_4254584_gDNA_ID_1620631_Annot_ID_47261 3000 nt of promoter + ATG
tttattatccatatatatatatatatttgttttattttaaaatcataatattatttttagatagtttattttcttttttaatttatccaatcatatactttatgcatattaaccggatttttaataaacttgccaccttctttcttctttaaataaatttcattttctcttgctctccaatcccatacgtctccatgatcttccataccgaaaagcttgaatgctgtaaaattctgataatgtctgtaattaggcccttgtttcaaagtacacataaaacgcgttgtacgccaaatgttaacactaaaataagttacaaaatgccctccgattggtattatttttggacctaatacatcatctttggaataacacctcatccagaggagtttttggaatttaagttcgttcccgatcctaattccggctcccgatacatgatcaaacatgcaaagactaaaaacaaatataaaaactaaaagatttttcatttattttttacttttttgtaatgtttggatttttgggtttgttaacttggtttttgtgtttctcgtactttatatacacacacatttgtattggtattggtacacaatttgtttcagtattagtttccaagtttcaacatagaatgacataatcaatcatgtatatcgtgattgatatccttaatatatatggcataagattttatatagttacatgtgaagatatctataataatcatacttggtaatgaagatatccttaatattagtatattataaaaatctatagaaattgaattttgaaagaaaagatgaaatcaagaacccaattttggataatactggaaagattatacggggagatcaaatgataatcaattaaccaattgtgcataatcaattgataatactggaagttcaaacgtattcaattatacatcacctattacaattttacaacataatcaaatgataatatctttttttatctggaaacaaaaaatctttccaaaatttatttatcaaatttcattcctttttaatcagttaattataccgatttttttttttaaacgtgaatatattaattagtattaacatagttttacataataaaagcaaaagtgggaagggaaaatccgttttataccataaaaacaaaagtgcgtaggaaaaatccacaaaggtaataattttttcttcaaaatatccttattaaataaataaaaacaatttaatcgaaaatctattattgtgttttacgaattaatgaaagataacaaaaaaaaaaaaaactatttccgaagattatgaatcataatgataaatcgtctgatgattatgatttattatgatcaaaaatctatttttggacctaatacataatcttttcacattgttgttcactttaagaattgtaaatataaaacacatcaatatgttactgtaatattttggctgttataattgcttaaaatatagttattaagtacaagtgtacaactaaaatcatagtaataatttatatttctattactataaatgtaaaaatattacaaacacactaatatagtattataaatacatacacatctgtatatatatttttctgaatgcaaatttattaataaaataaagtacatatgtacaaatgttaagtggaaataggcaaagctagagaaacagagcaaccaacgaaacatcattagagaagccgtccctatgagaattaacgctattggatatacatcatagtttctcaattctcataacattatttttctacaatttacattatttactgttagaagtttgtgtgtatacgtatgtgtgtgagttttttttaaattataaattcgttggttccaccgcgttggttttgttagatcccttcagattgattaggttaatttagccctattaggtttagtttggtgttctttttgactttaggtttttgataggtagcttggaagggtttagttagagattttgactacgaattctttagcaagagatgaaaagtctcaactaccaataactaatcttttcatttaacatattctcatagaccccatgtgcatgtatatacgtaataagctaagatatttttaaccgttacagaatttgactaacgatactgaacgattagggtaagtatttttttgacatgtataaattaatacttattaacggcatcattatatgttattatgttaagttccgaaatagaggcaaggttcaattaggtgggtgggagtgactcagtaaaccattgtggctctagttgtatataactttttcttcactatataatttcactaaaattttgttgatttatgacatggctatacaattttgttgatttatctaagagttgtatagccatgtgatatatatacatttataaacaaggttacattatttagttttgaaatttatttatgtgatatacactaacaaacattttctttatttgatgacattctcacataatttaatagatgaggataacaaaatcttcaacgcaattgctcaaatgggggaagtctcatcctacaatgctggtttcaaagtcaaagaagttagcggttgcatttccaattttttttgttgctcaatcaattgaaactttacccatagcatttccttgtaaggcattgttgtatttaagtttttctttttataaaagtatataagtttaaaaaaaaaaatcaaatcccttagaaatacaaaaattattgataaagttttttttttcgtttctaaatgattcaaaactattccagtcttcttataagttagaagtattatattacttagactcaaattccgcaatgatcgaataacattctctaaaatatataaaccgtatcctataaaaaacaaacaaaattaatgctattacaattcgaactatttatgttgttcccttatataaagaaactcttcctttcataccaaaaaaaaaaaaaaaatccattttcatttctcctcttaaaaaaccgcc

SEQ ID NO: 3204 - DNA, 3000 bp, Unknown
  misc_feature (1)..( 3000): cDNA_ID_2105430_gDNA_ID_1620631_Annot_ID_162696 3000 nt of promoter + ATG
tacaattttcgaagtgggatttaagtattggctgaaaagggaccgtatgtgatacaagctaatgatgtgtgcttttttatgtcggcttgcacgccacgattactctgcccattatccgtgagctagcctcagcaatagcatgaacccattacccatgatatatcttctcccacttcttataatttgtttttattctattttgtttgtagttattttatctttcttcatagactcatatgcaagaataagtataatagtattttctattttgataaaggtataactaacggaaataagcggaaatatcaacatgcttcatctttaccgtttacatattgtatagtgcaaggctatgcatattgcttgatattttcaacaactttttagaaagagtttacgtttctttaagcattttccatcattttgtttgtatttttcttccttttgttatatggtctatacgtgcatattaaacgtacacaacaaacaggatagaactatatcatattactataacggattagtgtaacataactttttagtgatatagaatctttgatcctttagtgaaaaaatgtattattttgtaccacgaaagtggggttgttgtaataataattgggaaaagggaacttctcaagtcacgggaaattgcgaagcaaccgaccaagcattttgatcgatagtggtggagtgcacgagagataaagagagagaattattttcatattgtatttaataataatacccgaaaaaagtaacaaaaaaggaattaaacaaatatcagtttgacagttttttttttcttttttttttttttgacaatgttcgacagtttatatacaatccattatgccaaacttagctcgaaactttttttttttttttttttctgttttctccttcttactcagttaaaagaatttgtatattgtagacatgttttgcattgcaaagtcaatcctgaatttaccgtgaaccatttttctaatctaaaatgtgaaaatgtttttgcaataaacaaacaatggatagggattttacatggaccgatttagttaaaggctcgtccgatccaacaactataatgttaggccatactaattacaaaaaaaaggcccagttctgcagctagtccgtgcaaaatcatattaaaatcatatactactcgaaatttcataaacaacactgaaggaaaacataatttccctaggagattgaagctaaagacgaccacagtcaaccatgcggttcaaaaacggattggactgaaacacaaccttttaaacagaaaactaaaataaatccaacataaaaccatagaccatgcttgcaagagatccaaatacatgaagactttttgagaacaataaacctaaaccaaacggagaccaacacaatggagatagattccttttacgacgaatagatactatctcacgaatcatataatcataggtttgtaagactgacaagatagaccaactagagatcatccagttttatgaaaacagcgatgtcgttgagatacgacaaatgaaaacgcctctgcaaaagactattgaacagtccaacactctggacagtattagctccatacatttgcattgcattcaaatcatctaaaaacataaatatgacatgatatatggtttgactcttgatttgagcaattaggtgtataaagtggctttaataaagattaattaggtgtaattaagtacataatctacctacaaaatgttaattatattaaatattaacgtattaataatgtagttaatggaatggctccttcgtatagtctatagctgtcctaccagtgcccttcccacccaactaattctagtggacaaaacgtatgctcctgtgtactgttccatgattccatcatattttcttaataaccttttttgttaattttatgcggacgagttttggttgcttttctagatcacaatgagcagtctagagttggagatatttatatgattgatatttatcttgctatagtatatatatgattctgactggtacgtggatgtgaaccatctcctcgaatttttcatgcaaatacatatgtagataaaaccgaacgaggtagttgaaatgaacgatttacaaattgttaaaaaatggagttaaaagataaaatgataattatgaatatttacaaacagaatctgaacaataaacccaaacacaatcattaaaataaactatgaaggtcctaataagaaatgatggtttggtacaaacatatatatttaggaaattttctctagttagactttcccatttatggataatctggaaatgtcatttttgtgaggaattaatctttaattagttagccatttcccatttaaagagaaacaaggcaatttcatttttcttttagttgcaatcatagtactcttcgatttaaccccactatttacgatactttaattttctagtcccttcactaaatgataaaaagactgatatgaaaattaaataatttaataaaggttcggcccaacccacctggttctgtcgattaattaatagcctataatttgttcagaagatgtgttcgtaagctagctgctcaattttaatcatcttcatgcatattttatgttgtatattaacaaattataacaaatttgtaaactaaaacatttaaaatcatctctaaaagcttatcaaaatcataagttcgaacatttgaatatatatttatgagattgtatatatatcactcttacaagttacaatctctactaccatctctatttagacattagagtaaatgtacttacgagattatacctcttacactacgtctacaatcgctaccgccacctctatttaagcttctctgtcttacaatatcttgcttagtactcagcattgtctgattaagctgtcgtacaaaacaagtcagctatttagttagggtttggtcggcaattaaataatctatcaacctaattggctctcaatcggaaaatg

SEQ ID NO: 3205 - DNA, 3000 bp, Unknown
  misc_feature (1)..( 3000): cDNA_ID_3434600_gDNA_ID_1620631_Annot_ID_162694 3000 nt of promoter + ATG
gcattgcattcaaatcatctaaaaacataaatatgacatgatatatggtttgactcttgatttgagcaattaggtgtataaagtggctttaataaagattaattaggtgtaattaagtacataatctacctacaaaatgttaattatattaaatattaacgtattaataatgtagttaatggaatggctccttcgtatagtctatagctgtcctaccagtgcccttcccacccaactaattctagtggacaaaacgtatgctcctgtgtactgttccatgattccatcatattttcttaataaccttttttgttaattttatgcggacgagttttggttgcttttctagatcacaatgagcagtctagagttggagatatttatatgattgatatttatcttgctatagtatatatatgattctgactggtacgtggatgtgaaccatctcctcgaatttttcatgcaaatacatatgtagataaaaccgaacgaggtagttgaaatgaacgatttacaaattgttaaaaaatggagttaaaagataaaatgataattatgaatatttacaaacagaatctgaacaataaacccaaacacaatcattaaaataaactatgaaggtcctaataagaaatgatggtttggtacaaacatatatatttaggaaattttctctagttagactttcccatttatggataatctggaaatgtcatttttgtgaggaattaatctttaattagttagccatttcccatttaaagagaaacaaggcaatttcatttttcttttagttgcaatcatagtactcttcgatttaaccccactatttacgatactttaattttctagtcccttcactaaatgataaaaagactgatatgaaaattaaataatttaataaaggttcggcccaacccacctggttctgtcgattaattaatagcctataatttgttcagaagatgtgttcgtaagctagctgctcaattttaatcatcttcatgcatattttatgttgtatattaacaaattataacaaatttgtaaactaaaacatttaaaatcatctctaaaagcttatcaaaatcataagttcgaacatttgaatatatatttatgagattgtatatatatcactcttacaagttacaatctctactaccatctctatttagacattagagtaaatgtacttacgagattatacctcttacactacgtctacaatcgctaccgccacctctatttaagcttctctgtcttacaatatcttgcttagtactcagcattgtctgattaagctgtcgtacaaaacaagtcagctatttagttagggtttggtcggcaattaaataatctatcaacctaattggctctcaatcggaaaatgagccgaggtgggagctttggaggcggacaaagctcgttaggttatctttttgggtcagacaatgagattccaaaaactcccgctccaccggtagccccaaagcctgcaccaccgtacggtgtagattccacagaggaggaccatgaagctgaccaaaaacccaagatctctaacaacaactaccaaagagttcagggccaaaactccggcaacttcgtcaccgtaagtctttattaattaaactccactttctttctttttccgaaaagaaaattaaacaaataagggttataattaaaatttcaggatcgtccaacgacgaaggtgaaatcggttcctggtggaggctcatctctaggatacttgttcggagataagtgaagaaatgaaaatgaagttaaaaaactagggtttgtatctctctagtgaggcttttactctatatcatacgtacgtaatgtaatgtggagatccctatctagatctctacacatcacttatttatatttacgtatgaaaatgtgtgttttgagttaacagttaattactttcaacttgtggaaaaagggtttctagtcaatattttcagcaatatatatgtactatataagtattgaacattggacattaactgatctgtccttgcattacgtgattaagtgaagtttcttcactctttagtatatcggaaagtgaagcttcttcttttgcacatgggtgatgggtatacattttataactcggatcattcgtgaaacctagatattaacagaaaagaaaaaaaaaaaaaaaaaagacatagataactttcaaaaatgtaacgaattaattttcttgtcatatttacaataccaaatgtagaaacactagatgagggcttgatctcttatcccgactaacaaaacaaatttttacttattagctcactatgtttgctaaattgtataaaaccgaaaaaaaaagcagaattttataaattacactttgtttattttgatgtttttatcataaataattacgtcatgtaccatgtttaatacaagttgttttaagaaaaaaaaaatcttcggtacgttttcattcaaatgtatttgtcaaagacgcaaaccagctaaatcaatggactatatctctggacctgaatgaaattatatattaaatatgcggcaaatatgaaataatgaaaaagtacgaggctattttataaaattatttaattaaaccaagagtcccggaccttctcaaaccttcctctgcctttgaaattatccaaactaaaaacaaatctgcgatcagtcttcactgaagaaaagctttcgcaaaagaagaaaccgagacactcatttgaatttgctcagactttgaaatctggtaattatttccatcttcctcttgtacgttaataatctctgttttctcatttaatactacgattcttgaagttcttgatcattcaattccttgtaatttaagaataattatttgattgtagttggtggtttatagtctctcaagtgttgcaagagatctgatcatatgttactctactgttcttgtttgcttgatagatatatattgagatcaacgtagaacctaacctcatg

SEQ ID NO: 3206 - DNA, 3000 bp, Unknown; identical to SEQ ID NO: 3201
  misc_feature (1)..( 3000): cDNA_ID_3070840_gDNA_ID_1620631_Annot_ID_162690 3000 nt of promoter + ATG

SEQ ID NO: 3207 - DNA, 3000 bp, Unknown
  misc_feature (1)..( 3000): cDNA_ID_2142850_gDNA_ID_1620631_Annot_ID_162689 3000 nt of promoter + ATG
tcaacaaaaactcattcggccttgcagctgtcggatcacttcaggtaatagtagttggatatgctctacatctacgcctattatatatcctggattcctgaaactgatgtccaggttttgtactattataggttccgcctctgcaacccggagcatctgccaggacaatgatgccaatggtattgtcccaaaacatgtctactggctccaccagctcggtattgcaagttgccgtcaaaaacaaccagcagcctgtctggtacttcgaggataagattgtacttaacgctcttttctcagaagatggtcggatggagcgcggaaccttcctcgaggtaaaagactaatatatgataaagagttcattaacaatacagcaccatgttagtcattgactaatagtggagagggcttatgatattaagatgggcgagtaattagtgacagattttgtgccttaagaagcctgggggagttagggtgctgtagatcttaacatatgatatggttttcatcgatttaagtttctagactcagtaagaactgaaggaagatattgatttctgatcataactatataccacagtcttaaaaaccagttcttctgagttataaaacatttgtttttttgattagacatggaaatcgttaccggattcaaacgaggtgcagaaagaattccccgggataaccatcacgagcgtggagtcaacacttgatttactcgccgcatcaaacatgttcttcatagcaaagcgtaagaatgggaaccaagacgtcctctatctttcggccaaggtaccaagaggcataccgttcctgatcgaactaacggccatagtgggtcaacctggtctgaaatgtgcagtcaagactccaacccctgagatcgctcctctcttctttgaagcagtcgaaattctcttcaaggcttgatttgattttacactgccctaaggtaagcaaatttcttcttttagtgtatgtagtaagtgaattgttgccgacttcttgtttctaatttttgtgttggaacccactcgtttttttattctcgtaagagctttgatttttgatgttgtcgttgcgtatatgccccaaaaggtttttgattaaactagtgtgataatgacttattatcagcaaatgctatttttagtgttcagtgaccgacatgaaatcaaaaagtttcctaagtggagcgaagagattcgtacacgtaaaccagttgagaatttggtaccttcttcacaacagataggcgtagatagatagatactgggcccgtaatgcgacgtagcaatttcctaatatcaatatcaatcatgatttcctgtaacatgcggttacaaaatagcttcgtcgaaactaatcttcttttaattatcgattgattattaaatcaattcaaaaccaaaactaattgaaaattttaaagcttgagggggactaatagtaacgtgagattgaagtaatgccaccgaatataagggttgagtaagggcgctacacgccatcacataaaagggattatactatcaatcaactaatatttttgtaacttaaaatgaaataccaaagtttcgacattattggtttatgaaagctcaccattgtattttaatttgatcaaaactatacattttagttgagaccgtaagtacaacaaaggtccaagcttgaaaatacttttttagacaattttatcatttactaaatagaataattattatttgtccccaccaagggtttatactttatatcagtttatctgtagataatgttttaaatctgttcatatccaatattttactaaatataaaaaaattgtttttctggttaatcagtttttaattttattttgaaccaaaagtatgaatcataatttttagatttaagatactataagtagtgcaatcattaatttaaaacttgcttatatagttataacttatatggttaatattgtatatcccataaaataatactaattaccttggtggtcaaatcatgaaaatcttattataaaagggctaatgggaaatattcttaagaaaatccagagtttccttgtacgatatggtttgtgattaatgaatataaatacaaaaaagtttgattaacaaccaaaataacaattaaagtaaagaaaattgtgatcccttgattttatctctctgataaagtcgcctctttcgtcgcagctagtcttcttcgtcgccatcagaaaattctcattcaacacaaaacctcaaaaagttttcccagaaatcctatcaaaagaaggactatatcaagcttctgtttctgttttttaggtaactaatgatttttttcttctccgttacaaaagtcactttatatttttgttttgtaggatcactaactctgtttgtgaggttcttcttttctgttttcgtttgttctgtttggttgttctgagattttttttttttttttttttacttctgtttcagcccacttttttagtttccaggttttactgttttttatttttttaaccactctgttttcagttcttcgtctattagggtttggtaactaatagtatctctgttatggtaaaccaagttttttttttcatttgaaagctcaagatgttcttaggatcatatgattttccatgagtattcaacatgaaatttactttcttcataatgaacctcataagtacacgagagtctttaatcttatatttgtcatcacaatggatacacatatttgtattgctttaatctctgtgactattattctctcattgttagtgtatagttagctatgttacattgaagtacttgtggtgtttgagtttggttttccagttacttagtatgatcacagagctagattttgcctcccattagagtttcaattaggagtcttatgaattttttctggatactacaggtcttttggtaacctaaagagctgctatacactgatctgagaactgtcaaaactttatcataccaaagaatg

SEQ ID NO: 3208 - DNA, 3000 bp, Unknown
  misc_feature (1)..( 3000): cDNA_ID_2142838_gDNA_ID_1620631_Annot_ID_162685 3000 nt of promoter + ATG
tcttgtttactgtactgctggaatctcaggttcaggatctgttcttgctctgaattttgtttaaagttttcgaatttaggttgaaggaatctggaattagggttacttggttgtgagaaacttggatataatgaagaaagtttgatacttaaaagtaatttcacatttaaagattgaaactttgagtaattttcttcttaaagtttgaaactttggttagtttgccccactttgtttcttctgtgtgaagatcataatctgattttgacttgtgtgtggcgaattggtttggtaatgagcaggaggacatattaatccggcggtgacttttggtttgttcttggcgaggaagctatctttaaccagagctctgttctacatagtaatgcagtgccttggagctatatgtggtgctggtgtggttaaagggtttcaaccagggctgtaccagacgaatggcggtggagctaatgtggtggctcatggttacacaaagggttcaggtcttggtgcagagattgttggaacttttgttctggtttacactgttttctcagctactgatgctaagagaagtgccagagactctcatgtccctgtatgttgctaattctctagtatccttgagttgtgttgagttcatattcttcacatagagctcatgtgttttttggttatcgaacattttgcagatcttggctccgcttccaattgggtttgctgtcttcttggtgcacttggctaccatcccaattactggaactggcattaacccggccaggagtctcggagctgccatcatctacaacaaggatcatgcttgggatgaccatgtaagttttcctctttaattacatcaacggttgtgctaagtatgataagttatgaattgcatctaaatagcaactcagaatttttgataattctgctcttatctgttgtctcttttgttttatgtgtctgcagtggatcttctgggtcggtccattcattggtgctgcgcttgctgctctgtaccatcagatagtcatcagagctattcctttcaagtccaagacataaagtttcctacatattctctgatcatcatcaagctaagaatatatcaatctttaattctatatgctttcttcttgtttcctatgtcatgtgtgatgatctctatatgtaccactagagctttgatcttgtaacagtgtaaatgtgtaatctattatgtatcaatggcattgtatcttgtaacattaattatgtcaatggaagaatacattgtgtacatgtgtaagctcagaatcttgtttgaatatcacagagacataactgaactggacataggtatgctaagttgctaacattgtcaataagtgtttccaataccaaacattagcaacataattgtaaaatgtgtagaatttgatagaacaacatctaagccgaactgaactggtctaacaccatcatcgcaagtatttcttcatcttctttcttctataagagtctttcattttccactttttataacatgcttataactgaattttcaacttttgaatcacagtttcagttatagatattcttggatgatgttcagttcggggttttggttttggttttggttttggttgatagtcatgaaaatgcatgttctgttccacatggtagggttccagtaaaataataaaagaaccagatttagtaacatctttcacatgaatgataacatatttcacatgtttgatgcagcaacttgtaatatggatgatagtcatgaaagaatctaatgggccaagaaatgtgaaagagtctacatgactatcatccaaaaaagagttgtagcaatatggatgggccaagaaagtgcaagacttcagcttgagcttgactttaagagaataagtaatttgcatttgccctttggtcatgtagtactcgggttgtttacatttatcaaacaaatatcagagttgtttattgttatttgggaaaatctttaaactttctacataatctttgagactagtgggaattaagagtggtgatgtagtggatcaagattaaaaaaagttgattgtttaaaacatcgagtatcttgcaatacaaaacaaaacccttaaaccaatcaatacgaaaaagatgaagatgtcaactttccttttcaaaaatatgcaagtttgaatccggatggtaacatactgatgttactagttacacaaatatctaggctagatgtcctaatcatcttcaaaatattttgttgatgttttatcttaaataatcaaagtttttcaattattgtgggtgttgtatatatttaacataatcttaatccataaacaaaaagtaatataaaggtgttgcgggaaaaggttacttaatggttaagaagtttggcttatgatcatcccactttgtgaagtatggcatgaactttctttttaccgatattagagccaaatgaaagcggtttcttaatcgccaagttccaaccaaaaaacaaaaagcccacatttacgaaaaatactcttaaaccaacattttgaattcatatgatacaaagcttcaaatatccaaatcgaggaaattattttttaaaaaaaacaatacataacttttaaatataaattgcgaaaaaaggtaaagccactcatcaaaattcaaaagtgatgagattaaagcaagtgaagacgcatacattatcacattaaaagtagcaaacacaccaagaaattagataaaaagataacaaaataattccatccactttctttttcttttgttttgtcaagattttgttttttgtatttcagtcatacgtgtgaatgtatatcaacaacattgtttttaatgtataaaaatctcaactactataaagtagctgaatgatatgtgattaagatatatatcgagagagacaagccagcaagaattttcagcacacatacacacacaaaagattcaaagaatcatctagtaacaaataaaaaaggagagagaaggaaa

SEQ ID NO: 3209 - DNA, 3000 bp, Unknown; identical to SEQ ID NO: 3199
  misc_feature (1)..( 3000): cDNA_ID_3070844_gDNA_ID_1620631_Annot_ID_162684 3000 nt of promoter + ATG

SEQ ID NO: 3210 - DNA, 3000 bp, Unknown; identical to SEQ ID NO: 3197
  misc_feature (1)..( 3000): cDNA_ID_2142817_gDNA_ID_1620631_Annot_ID_162677 3000 nt of promoter + ATG

SEQ ID NO: 3211 - DNA, 3000 bp, Unknown; identical to SEQ ID NO: 3195
  misc_feature (1)..( 3000): cDNA_ID_2134230_gDNA_ID_1620631_Annot_ID_162675 3000 nt of promoter + ATG

SEQ ID NO: 3212 - DNA, 3000 bp, Unknown
  misc_feature (1)..( 3000): cDNA_ID_1819788_gDNA_ID_1620631_Annot_ID_162701 3000 nt of promoter + ATG
tgattcgactcaggaatgagccttgaaattccgtcgcacgagccattagagtgtagtgtgttgtgatatgaatcaaaagcaacagtgagtgaatttttccggagataaaggagaggtttttttgaagaattggggaaaaaagaggttttggggattttagaagaaagaaggaggaagtgatgatattaaggaaggaaccgaattggtggtaaacatgtcttgtcggagagagagacaagacttgttttcaatgttttaagtttatttttaggttttgtttctttgggactcgggaagtgaagaatattcgtctttggtcacttggcgactttttctttcttttatacatcctcatgacgtcattttatctcaaaatgaaaagaaacttgtcaatattttatctttttgggactaacaagtcatactataggccaaaaaaaaacactatttctatttttgaagttatctgaaaactaattttgctaggtcatatttgctaggtcataaaaagccaaataaaaatatgcagaatagtttcacaatgaaataatattctactttttcaattaggcttgtgagaggtatcaatgaagaaaaagcaatggtaggttagtttttaagaaggaaaaagaagcatgtgaggttagtattttctctcttcattaatttactctcgttctatctaatgtatatgtcactaaagcggtagatatatcattacaacatagttttatttggaccgaatttaataggtactttatgtttcaccaaacagatctcgtggacataattttcgctttcgcatgtggcaaagttagccatgaccttgacaaaagtaggaaagaaaatttgttaatctcaagaatactgttatagtgagcaactactgattaggttctggcaaaaatgatcatatatttataattggttcttatatggatagagttagtgtatgatcacgtttatgaaaagacgttcaagcgccagaagaaacctgattgatatgtaaagaatgatgacttaatcatcgcttttttagtaaaaggtactcagacccagctagatctcatatggttcggtgacgtagaggaagcgtgtatgataaaaataaggatacatcacaaatttgctcgtataatttttttttaaaccaaattttttttgaagtctcaaatcacagaaaaggataagcattagaagttaaaaaacatgaaaactatttgaaaaacgaaacatataaaaatcaacttttgaaaactatatatttatttggggagaactaatttgttgatgcaaaagtaaatagaagtgagaacaaacggatcggatactttgaccaagtgacgtctccctttgtagttatttggagtcatttgtatttgtataatttgtttatttttgttttgaaagttttttaattattaaccatttagtttatatcaaatatacttgcatagattaactgatcaagtaacatataatctagaaaaatgatattggttatgaaaaaatgttatactctgattttacagatttattaatgaaaaatcaagaatgttgatagtttttacaaaaattatttttcgtcagaagtgacatcaatcagttaaaaaatcgattctttactaaattactttactctgaatatcaaactgcccggataattataaaagtaaaaagacaaaatctcaaattttaaaatgtaaacagacagaaaaagaattagagatgccgatgcatgcggagaatattatacaattttcaggatatatatttgtcagatatcaatgtactttttctttcaaaatctcaaattcaacacaaacctatgactccactgaattttacgagaccatccgatactatggcgaaaatgaatgcggtcagataaatggatgcggtaattgcgggcatcaggactttggtctttcacaatcagtttaaagtcatttcttatggtcggttaaattaaccgttaatgacggttataaaagaacatcaaatagtcttataacattgtcggtccaattttgtattatattattgtgtaattcgttatttcaaaaactttctttgcatcacctttctttaacacgagagagcaatgatgagaatgccgtggcaataaagtgatcattaccttttatattttgtagaaatatgtaaaatagtcaacgtatattgtttatattacgctctacaaagtttataattatttaaaactttgaaaattgttttacttatgtaaacagttatttaaagaagcttttttctcactaagatcttcgactatacactaacacctctttctaaattatggggtttatcaaacactaacattcattttgcattgttgaaaaaataaggtatcttcttatcaaagattttttttatcttttagtttatttaaaaattataaaattaagagaaaagtaggattaacattatataaaaatattgctggacaatgctaatcaataaaggtatagttggaaataaaagatttttttttccggatatttttccatctatacttattactatattatcaattatgactcaattactcttttaatagactaaaccaaattttcctctaagtatccttttgaaattgtctaaaatttggtgtaatctagtaaaaagggtaattttagacaattatgttaatttagtaataaaggtacagctgggaaaatctccaaataaatttctttcatttccaagtttccccttgtaaaattaaaaggattttcttaaactttatatatagaaagattgaaaacgaattctaatagtaattttgactcaagattctgaatatatatcgaataggtacaatatatagaagtagctgtaggtcaagaatttaaaaatcaggattaaattcatatatatccaaacacaaacacacgtaattggctacgataaaacccatcattcatttgtttcggaccaatttgcaatatctcatagtcactaagaagaatatacaaaatg

SEQ ID NO: 3213 - DNA, 3000 bp, Unknown
  misc_feature (1)..( 3000): cDNA_ID_2142875_gDNA_ID_1620631_Annot_ID_162700 3000 nt of promoter + ATG
actcgccggagatcagctcccagagtcagttgactggaggcaagaaggtgcagtgtcggaaattaaagaccaaggcacttgcagtgagtacttttactagtcttcacattcataccctaatattcgtacggtgatttatttaggtccgaattttttatttttttttcgcttattcaacaaattcttgcctttgtttttcttagataaatttaggttttttatttccgaatatcgaaatttgacttcgtgacctaaattaagtttgttattccctttagaatgcctttatatgtagtatagtagagtttcatacttattttttggcgtgctagttacttttgttaaattatttgatatttttagtatcttttcggtaattttctttttttatatatatatttttcttttaaaattttttgttttgtttgaagaattagcaaaacattttaactactttatgcaactacgtacatgcctttgaaacaatcagattttttttttatattaagaattttgaaaggcatcacgattagtactttaatatcttttttttttgtatattaatttaaataaaagacagctgctgggcgttctccacagtggcagcagtagagggattaaacaagattgtgacaggagagttaatctcattgtccgagcaagaattggtcgactgcaacctagtcaacaacggttgttatggatcaggactaatggacacagctttccagttccttatcaataacaatggtcttgattccgaaaaagattatccataccagggcactcaaggctcctgtaaccgcaaacaggttcacctattagtgctgccgtaattaaacactcacatatatgtgcatatatttataagtagctaatttcaatttttgtttttggtacgttggtcgcagtctacctcaaacaaggtcatcacgattgatagctacgaggatgtgccagcgaatgatgagatttccttacaaaaggcggttgctcaccagcccgtgagtgttggcgttgacaaaaaatcccaagaatttatgctctatcgatcggtatctatcataccttataaaattcatttttttgttgcatccaagtatatacaattaataaactcatatggtctatgtttacatgattgatgtcattaagtgtatatataatggaccatgcggaacaaatcttgaccatgcacttgttatcgtcgggtacggtagtgagaacggtcaggactattggatcgtgagaaactcatggggaacgacttggggagatgctggctacattaagattgctcgtaactttgaagatccaaaaggtctctgtggaattgcgatgcttgcttcatatcctattaagaattcggcttccaatgcatgagagttatcatgtgtttgtttcagtatgtctaaaggaatctgccctagtactttgaaaagagactgttatgagtgtctggatttttaagatgttttaggcttttagccatggttgctgactcaataaaatgtttctacgttcgctttattcaaatttaatgtgaaaacgtatcgtattatgtgtatgacttggaattttagtttttttttttagggccattagggttttactcgcgtctcgactacatgatatttcaaggatatgacaaaagaattcaaaaatttgtaactggtgtcagttgatggaattttggtagtgtttttccaacaaaatgtcgaaaatatttgattttttttagacaagttttacaggattttttctgttgtcaactacatactaattagaactcaactctctatgatattggtagcccaatatatttaagagtttacaaacaaatcttaaaattaaaattttgttgaaatgtgctaagcattcgattttcatatgacaaaaacgagaaataatatacaacgaggaaaggaaaacgagaaagcagttttttttttttttttttttattaaacgagaaagcagttgtggaacaaccaatctcttttagtagattagagaaaaatgtgtcaatcatcatacacaccactaagactaactctgtataatatattacgaacatttgtcaatctgtctttcttaaaaacatatatttatagttcataataaagtttacattttctgaaactctcaaaatcgatcaaaacttttagagcaaatcaatgttttcttttgtcaaacaattatatatataaatctgaattgtttttgtatccaattgaaatctgagtttacatatctctgttatatgaatttaagatttccatttgcatgctcgtaaaatgagaccagtggcctaagtagattaggacgtaatatccttagttactaaacacatggatcgttaatgtccattattggaacgcgttaatatatatatatatatatatatatatatatatatatatatatatatatatatcatttggtcaaaatgactaaggcgattggttgacaaaatgacatattgtaaagaaagactcaactgatggccaaactattgtttatgaacaaaatcattgattaaatacttggtacatagtaacactgaacccatatactagtatccatcagcataattatggcagtgacactatgataccctcttaaatcatttttaaatatttggtacgtatagttaaataacggaatttatttaaatttgtcttcgctcccacgttagcttgtttgatcagggatagcatgtgtaccatttatatattgtgagagaaaaaccccatagaattgatgtttcctaggaaagttagatggtgaaaactgaaacgcgtaatgtgagacgcgtcaaagtttcattggatcaattttgatatactatttagtaaccaaggtttagtacttattagtagtataagtaagtatagacccttagattgtttggttgacttttctttatcactctcaaactttgtattctctctagtctctaactagcaaaacaaagatcaaactctgtgtttgagatatg

SEQ ID NO: 3214 - DNA, 3000 bp, Unknown; identical to SEQ ID NO: 3203
  misc_feature (1)..( 3000): cDNA_ID_4255208_gDNA_ID_1620631_Annot_ID_162698 3000 nt of promoter + ATG

SEQ ID NO: 3215 - DNA, 3000 bp, Unknown
  misc_feature (1)..( 3000): cDNA_ID_2134228_gDNA_ID_1620631_Annot_ID_162674 3000 nt of promoter + ATG
tgttgtagacacttggtgcagttttgaagagataagtctctactgcattgcacaaaaccgtaaatgcgtgagatagacgtctcaagctttcgtatcccggctgcatagtacaaatatgaagcttggtctatcatacgaatcatcaaagcctcccatgtaatttccaaatccgtcaagttagcttgaaaatctctggtatagttatcactcctcagaatctccataccaagggaactataaaacgagcggtttgagtaacgtacaagacaaactgttctatcaattctccagactatagcttctgtctgattagtacaattctgcaacaatctagcatttgaaggatgatacaatcagaacaagagtgtgcatcagtacctgggacacacatccctagaccatatgctctgtttggatgttccccgatccatgtcgtgtaaaagccgtcgatagctgtgacattagaggaagagaagaaagcaggactcggcggtttaagtcgtaagtactattgggtgtgaagaaaccagatctttcaaggcatacctgtgcagagacatgactaaagcttatgaccacaaaccagaagattactaaaaacttgaccattttatttactctttccttttttgttttgatgtctgaaattaaaacctcaaatcttggaagatgtaatatttatacaggcgtttcaatttcaacctcttgtgctgtacaaaatttgactaatcgtcattgaattttctaacgtagacttttgatgatgagtcaatgtctagtttaggtgacttatgtcttatacgagcctgattcacattttttaccactttgtaccatatgaattggtatttttcctccaatgtggtaacaaatcttgttgaagcttcatcaaagcaaaacagcaaatgcatgattcttgaaagggtattaaattgaaacttttaaaatgtttaagcatattatgaaaagttaaaatattagtggggtggatttgtagttttttaaaacttggagaacagatacatcttactgtcattactgaggcaacatcgagtacattcaccggaaaatggatgccggagctgaaattgatgtggttcggccggtggaggcagattcggcggcggaaattagtccggaacaagaccacgaaggaagatcggagccttcgtcgttgaaccaaggggagattttaaaaacacttgctacggtggagaaggattcgcaggcaatcgcggagagcttttcgtctctctttgtttccctccgatcaactctttctgaggttagaagacgcttctgtgaatcgatttttgtttcttcggttacattgcctagaaaatttgacatttggggaaaactaaagtctagggttcaaaatccatcaattttgtgaatttctcttttcatgtcataaattaagaaactttaggagctagcagagctcaaattatgagatttcatcaataaatggaaaaccaatttcaatgtttatgttttgagctgtggaatgatcataatcttttgctgcattgaaaccattgctaagtttgttcaatgtcctatgactgtttgttttcatgaaaactgtttcttttccttgtgtgtgtgttgtttatgagacttccttgatggtgttttaggctactggtagctcggttgatcacatggcttgctttggagaggcagcgggacggcttcaggaaaatggtaataacactacctgttttgagcaatagattcagttttccatttatatatgagcaatcaacttgagccacctttctttgttctatgaatttttttagctctagatgcagccaccaaagggaaccggtacatcaactcttgcctcaggtactttcataacggtctcgttattactctacgtaatcgcatagtccagtgagtcaatgtccaaatatgttgcttattagtttaagacagagatatctcacactttgtttcatctgaagttttaataagattcctgagcttgacctctaactttcaagatgcgtttctcctgcgtctttttgcttccggtatgatttcttttttggttcaacatgtagattaaacgaggaaattaaaggcgttgagaatttggcggctcggttgtatccttatatgtgtgtcaacctgtttgtgtctgaatgttgaacacagacacacatgtctgctcaaagctttcattatcgtattttagacagaaatttgttctagaatccttaataaatcaatctgcagaaagcacctgaggaaaaacgtggatgttcttgacacggctgtaaacaagcttctccggcctccatgagaagtcgtcagtttttcacagacttggatcacttttttattttttctttcagactttggattacgtatttctcgtacataaagattttgattataaaactgatgttaaatttcaacattacatattttctagggtttctggtttaagaaaaacaaaacactctgttttttaaactgttttcggtaaaccgactcgaaaagggattatttgtaatttattattgtttgtataaataggatgccaaaaaattctaaacttacgtttcgctccctctctaagtccctctcgctctttggttcttcttctcccgcaagattgaatctttggtttctttggattggtttcgtaagtgttcgcaccgaatcatcaaccatttcaccgctgggtatgttttctacactcgctcaaaagttttgatagtatgaactgaattatgggttttggagaattagttgtttaattgtaaaatagaaaactttatgattctgcttccattgattttagctggtgggtttgtcaaaatttcaatcttttctttgatttgatgattaatatttcattgaaatcatcgttgtttcaggttagtaggagtttgctggttattaagactttagtctgaatccaggcctggctcttggggtttgctctgttgctagtgcacagggtccaaccctgtctgaatc

SEQ ID NO: 3216 - DNA, 3000 bp, Unknown; identical to SEQ ID NO: 3213
  misc_feature (1)..( 3000): cDNA_ID_1819792_gDNA_ID_1620631_Annot_ID_47262 3000 nt of promoter + ATG

SEQ ID NO: 3217 - DNA, 3000 bp, Unknown; identical to SEQ ID NO: 3212
  misc_feature (1)..( 3000): cDNA_ID_1819788_gDNA_ID_1620631_Annot_ID_47263 3000 nt of promoter + ATG

SEQ ID NO: 3218 - DNA, 3000 bp, Unknown
  misc_feature (1)..( 3000): cDNA_ID_1819913_gDNA_ID_1620632_Annot_ID_47268 3000 nt of promoter + ATG
ataacaattcaaaagaactagtatcaaattaaattctgaaacccatttcttcctctattgactgtgccccataaccaaacagaacccattgaacagccaacaaattacagtgtgagaatatgaacaacatagaacagtacagttaccagtagaagaaaaaaacgaaccttggattatcaaaagcttttgggataacgaatgagaaagaacacaagtgaagaagaaaattctatttaaaaatccaagaaagccctaatctttctctgttcgcttcttctctgtgttttgtattcttattttgtttcttcttcttcttcttcgtctctctctctctctggacttgggctctgacaatggtagggttacgtgtaggtgaggaaagatgaaaattgaacggacaagatgcgattagtgatataatctaacggtacaggatttggctgttaaagggttaagtgaaccgctggtggtgtattgttaagtaaagataaatgggctaccttcaaatttcttttgacgtcgaggcctacttcattattaggcccactcacatacgatcaattaccaaatacctaatatgactttatttaaaaactagttgagaagttaaatttgtactaaacaaaatatatactttgggtgcctaaaaacttaaaatctttgaaaatttaagctatccaatcaaaatagtacatattgaaggggttgtataatactcagtccacaattcatttggttttattatattatagaaacaaaaataataattaaccaagataggagaaaaaaaactttgaaaataaaatagaaaagcaaagagttcaaagtaaactctaaccaaattaaaagataaaaaaagatataaaagcattttatatttggttagttcaccaaataaaatctcaaattcatcgagtacatccaagatttggggagatttatgttgattagtccatttaaagtaaaaaaaaaatgttagtctattctgacaaactattaatgttagtagatgaataatcatgctatgcatgagttgttgttttgaaaattgttaaaaatatgttgtatgttctttgttgctagtttgtgtagttacataaatatttagattcatcttatatagttacaatttttatgctttgattcatcttttgacgtaaaatatcaagtatatatttttcatgtgtaatataattatctatatacataagatcttaatcttttttttgctatcataaatacatagaataacaatataagatatattgatataatagttgtaattataattgagttatacattagcatgattttgtatttttcaatttttttgaagaaataagttaatagtattgatggaagatttaatgatgtggaggacttttgattttcttaacttaattttgctaaaatttttattgaataatataaaaacacatgtaattttcttgtatgataatgtgacattcatatggagagagttaaccaactttcatatatatatttttttcgattcaaagtaattctatgacataaattttgtgaattatttgtgcattataaacttaaaaatttatttggttatttacatgggacacccgtgtatcgaaaagtagagagaagattgaacaaaaaagctaacaaactttatttatctcaacaaaatattgttacaagcgttagttagaactgtgtatcattaagcttatatatatttgaacttaagctcacttaatcaaagttaaccaaatattaaaccaacattaaaccagcgaaccatacatcataatacgcctctctcaagtctttatcttcgaagtgtctggtttccgaagataaaaacatcttcttgagtaaatgatgaaatgaccccggatgtagtggctttgtgaagtacaactatccacaattttcatttataatatctaatgagagcatatccgacaatgttataaacattttctatcgatttgttagtggtttacaaaccaccaatgacaatttatttcatgatagattcattgtgttttaacttatggacaaccagcatcacaatgattgtttttgtctatggtttgagtcacaagtccgattcataattgtttgtaaataaatatttttttgttgactaataaatattatattacaactttttcttgcaaattactaaaactcaagattctttttcattttttcaaacatatatatatatatatatatatatatatatatatattacaacaaaattctcttataaattattaaaattcaaatttttttatcgcaattagttccttaagagaacttataaataaattaagtcttacatacaaaatatgttttcaaaagagtacaatgtgtttgttggttttgctttcgtgcaatatcatgaaatatgtttatggtttcttaattatttataccaataggtgattcaccacatgatgatgcatatgtacaatttatctattataatgagtttactatcttgactcccacaaatcaaaacccttatttttctttaccgttgtccgttgagatgataaaataataaactaaaaatgattgtacatatttttgttatgatttgagttagagtttttttttttcgtttatttcaattctacgtaaaaaaaattatataaagaattcattttatttgtgactaataatatctaaatattataatacaatatttgtttttggtaatttaccaaaattcaagattttattcttatttttttcaaaatcatgacgtggaacgctagacgatccaacttcgcttatctcctcctaattttccctccaattacacgttgaaacaaaacaaaacaaaaaaatcagaaggaacctgaaactatctcacacagtaaaaaacatcaccatctcaattctcaaccacacaaatccaaagcttctaacttttttttttgttcttcgtcccggacaagagaaaacaacgatctcactcaatcatcggcgtgagggataaagacgatg

SEQ ID NO: 3219 - DNA, 3000 bp, Unknown
  misc_feature (1)..( 3000): cDNA_ID_1819901_gDNA_ID_1620632_Annot_ID_47271 3000 nt of promoter + ATG
attctgcttgaaaattcacactagaaaatgaagtgcttctgcgagtcatttgtctcttgcataagatacaaagtggaattgaaataactttatgtgaaatatatataattctaaaatatgaagctaaatataaaccaattttctacataagctttttcaaattttaaagatatacttacaagaatcgatcaataattgattcagtttttttatttttttttatttttatactggtgcatttgaagctctcctaagtcctataacacaacaaatatgttcaactactctcatcccgaaataaatgttgtcttaattcccttcaaaaatgcttttggtccaaaacccaatatcctttgaaacacttttgtctaaaagtatatgtaaagccatttacattttgtcctacctatgaaccacaaaattaaatatttgtcttattctctaaatatttcttttagattaaagtatgtgtattcaatcagcagtaaaaaagttacatgtcaagacttaatgtagtttgcattttctgaatattctggtttgaattaaactatatatgcttctgactcggtaccactttcaacagtctatctatgtgtctttttcatgcgaataaaatccattgctcattaatggtaatttgtcatctggtgaaacacatgcttttctataggaaaatgactttcaaattcagttacacattcaagagattttaaatgttacacattacattcaatgtcttaaaagttttaggctttaattaggatatttgggtggacaccaaataacaaaatatttcgttaaattttaaataacagtgtaaaccatacaccgtaaaaaaagatctcacattagaaagttaaaaaaatgaaaaatgatttgagtagtatataagtaacttaccaatcaactcattgtcaattaatttgtagttgaaatcctataaaacttaaaataatattagagcccgaacacaattaccctattaatctggtcatgaaaatggttcgattatcaccactaattaatggttaaaaaaaaaggttcaattctgtccgcatatttagaaagagcattatcttctgatggattctatcaaaatacagtagaaactctataaattaatactcgataaattaataaacacgataaattaataaattttgtcggtttcaagtcgggccaatgtaaaaattaacaaattgataagataataagataataattttttaaaaatccttatgtaaaattatagtcccaataatattataaattaataatcatagatcttaagtatatattttaagactcatttttatatgaaatttttgttcaagttacaattacaatttttttaaaaatacaactagtatgatatctgttttactcacataactatttgcatatttgatcggtcataattgattttgtaaaatcttttatttgagaaatcattgctaagatttgtgtaaagagaaattggattaagcttcatgtttacgttcacgttaatgtcatagacatacagacacaatatcttgccgaaaaataaattaaaaaaataaaaataaaataaaaatctaacataagtatatatgcaaacaacaaaacatatagaaaattaaattaataatatttttaaaagaatatagtattgtatttacgtaaatatatctataaattaatatcactataaattaataaaattgcatggtcccaacattattaatttatagagtttctactgtaagtagctaaaagaaccggataaattcactcattgtcaattagttttgatttagaagagcatgaaactttaatatagacataactcattttagttatagtagataaaataaattaaaacgcgcatttggccggtttggataactttaaacaatttcgacttgtttttttataacatgttttatttatctatgaatattcgaattattgaatgaactttcatctccaacatatcctcattcgaatatcattgattattcgaatatgtcacttgtacttatatgaggaaaattgatgttcatttcatagggtatgactgattagtatagatatataaaaagaaatgcaaagtaaaataaatattttcaattattctacttttaatttgttgtccaaataaaacaattaaagaaaaatctcaattcatctacttttagtagaaacaagtgacaatattcaccccacaaatacatgaaagaattttgtttcctctaactttcattttcatttttttcctgttttcttttcatttctttcctttcattttcttctaattactcccaatcacatgcatagttttcttatccacatgtaaataaacttatccaacaagatttagaaaaataccaaattaaaaaggttctaaatcaaatagtcaaagactagatttattaccatagtacaaaattagaataatttgtaaaatagagatttcttagcaaaaatagataaagccaggtcaaaacgtgacaaacgaatgcaactgttggtggcagaatcgaaaataatccacaattccctcgattccccgccgaaaatttcagtctcatcgaaagcacaaaataccccttacgtcacttcctgcgaaagttacggaaaaacccctacactctgtctcagacaggggtattattgtacccctctcaacagtccaatcaaattcaaattcatttgttgacataataatccacgtcaggaactgcacgcttcttacggtgtcgttttgtggttctgtataaggaaaaaataaataaatttgccgttttgtcgctctggagaaaaaaaacagtgacgtttatttccttctctgcaattcttcttctccttctgttcactcatcaaatccaatgatgttaaaatcacacataaattagggtttcttgttggtgagtgacgttaaaaacccaccagtgaattctctctgtttctgtgttactgtgtacagtggagattttaaagagagatatggagatg

SEQ ID NO: 3220 - DNA, 3000 bp, Unknown
  misc_feature (1)..( 3000): cDNA_ID_1819893_gDNA_ID_1620632_Annot_ID_47273 3000 nt of promoter + ATG
ttacgacatcataatctttagaggaggaaaacctaagggtcaaaaagagaatattagcaagaatgttttgagacataaagctatattgatcaccgatttccgctattcaaagagtttcataggaataccgatcgatgatttttttgtgtattaccttggataaggattccctttaacaactttctgtccatatttccgccacctatatccatcatctaaattatcaacttcactcgttgtttggaaaataaccctaggctctctcacggttctatctgaagcatcagctagttccgaaacctgaacttctgtaattctgcagattccatgatctctccactcaaaaaaccaaaaatatggattatcaatcatcaacaaagcttataactttaccttctctttggttcaggctcgtcttcatctttctctccctcactagtttctccattactgtcttcttcattgtcacttgcctcagacatgtactctattgtcgtagctagacttgctgcttcctgttgctctatcttagtcttgttggagctaaactgtgatgctgtcaattcagagctcatgcaattgatgtgtgtcgaactcccacttagatatgtggtgctaccatcttttccttggttaggaggttcgtgattgtgtcgatctttgtagacgatttctgctacttgtccatcaagagatctctcaaccttcctcttggaaggacatcctagatatgtgcacttgtaatagcttagaggaaacttgctgcctttaactttcttttgcccatacttttgccagttatagccatcattaacttgtttgtcaacatttagaggctgttgtgacatgtgctcgatgatagttatacctgaggtattacttttagctagtagtgaagaatccggagctgaggtggggatctgaggttgacccgatgaaaatgattgaaccgcagaggaagaagggtactcagtttgaggttgcatattggcattggcttgaactgtttgagcttgctgatatgtcatttcataaggtccctgcacattgttacatatcgagttaaaacaagaaccgggaaaacaaatccaagcacacatccgacttggtaagcttagatacagagtcaagataaagaagagcaatagaagggaaaccggctagttaccttgagttgaaaactaaatccccctattaaaagaaaataggaaagacctatctaaaataaccaagtctacctgatcaaaaggcaccgagaaaaaaattgtagatgaatcttaaacctgatcatgatgaaataggtatcgggtttactacattatatacatacctcaaccttgtcaagaaaatcgatagggaaatcatcctcgggcagaatggttatttggtactcctttgacaagtaggtattaaaacccaaaagtaagtcgtcatggcccttgaacaaatcttttaatctggctatgacgccactagtgtcaactctacatccaacatgagtcaccacaaaaaattaatatatttcctgctgtaagaagagagacataatggaaagatagaagagagtacccctgatgtttacagtcattcaagacttcaaggaaagtgtcatatttctcactgtcttcaaacttgtccttcacagctttgagatagttcaaggcatcacctgttgttacccctcccatatttcctcctccatcaatcgttagaggccttttagttatgcatgctttgcagaacattttgctccctttcgctccttttgtgcatccaatagattgacatcgccgaccaccaccatgggatatgcagagtcccgaaagaccttcagcgcttttagtgcagttctctctttggcatctctttcccccaccgtgcatgagacagagtcctgatcttcccctagcaaatcctgtgcaatcttcatggctgcattttttaccaccaccatgggctcggcagaatggcaaaggaccactagcgctttttccgcagccgtatgttttgcatctcgctcctccaccgtgcttgacacagaattctgttcttccccaagcagatcgtgtgcaatcttcatggttgcatcttcgaccacctccatgagctatacaaaaatcagtactgccttctgcgcctttggtgcatccaagatattcacatctgcgaccacctccgtgggctttacagtacactgttttaccttcagctcccttctggcaatcaggtttctggcatctacgtccaccgccatgggaaatgcaacgaccagatgcatctcttgctcctttttgacatccttccacttgacataacttggaactagaagaattattaagctgctgagataaaccggaacctgagcttattggtggtgttgctgccatgctagatgacagttccagtacacaagcagcatcaagaacacaatttttttatcagatcaggaaaattcatattcacacaagaaagaaaaaaagaatgtttatcatcctgcaattcacatcccaatcatcattcataaccggaactaacccaggcggtacggtgcacatcgacgacgattgggaaatcatcaaacccgtggggctattctgcatgaacctcgggtcaacatcactactcgagctactaatcccttcaccggaacttcctactctctgatgataatcactagtcgcggtggccgctccgatggacgtcaatgtcaacggaagttcttccttctccgacatcgatccttaaaattaacaaacgaagaatgaggaagaaaacttttaaaaccccaataatcaaaaacacaaatttactttgctcacatatcgatttgttgacttttcgtgttttttttttcgtgccactaattaagtattttatattggataaattgtttttgtccggtctcgcaattatgagagaaaccaaaccacaagccttgtttttctcagctcatcgttgactttaaaactggacaaattggatcagagcttttctcccatg

SEQ ID NO: 3221 - DNA, 3000 bp, Unknown
  misc_feature (1)..( 3000): cDNA_ID_1819889_gDNA_ID_1620632_Annot_ID_47274 3000 nt of promoter + ATG
ttctggaaaaacctctagttgtgagcaacctgagagtattagctcttgaagacatttcagcttataaagatcagaagaaagatgcttcagctttttgcagttcttcagattcagcaaagcaagtcttctaaaggtttgaatggattcgggaaggctctttataacagtgccatctaaaagtagaacttcaacattttccgagatcagtgggaatttctttaagctggagcagccactgagaataagagtttgcaaggattgagttttgattccttttggaagactcctaaggcttgtgcaatccctgagattgaggtatataagcttctccaaacaatttatcgttgacggcaattttttcaaacttgtacatccttctagattcaacctctcaagattatgagcattagccaaacccaaacactgacgtaaatttatagaatgactaaggtcgacccatttgagcattccaacatcctgtgaaaaaaaatacaaccacaagtcaaatttttgatgcaaatcaaaattcactttagcttaggactgatcaaactgacgtaaaacataccttttcatcatcccaaatttcttctaattgactatgtggcaatttaaggtctacaagattcttagggtcaaagtctagagggatactctgtagtggataaccatgccagtgtagatatgtaagctcgttaggaaggaaactaagtcccctccgcaagtgtagtttaaactctgcttcgcatccacgggaacaatgagaatcataaattttcaagtatttgagattgtacatcccttggaaggctttggcacttagacgcattgctcttagttttgatgtgtcgagaaaaatgcctcttatcttatcagttccctatcaatcaagtagtaaatgtacagtttttaattcaaagcatgatactgtaacataatacaaaattgtagacaatagaatatcatcaagatatgtcattactcattaccaggccttcggttagcaggtcacaaatatcttcactgtcccataatctgatatgccattggcactggttaccatgtcgtgatagccacctacagtctcttatacctattgtttctacttttaaactaatctccttggccatcgtttgcaacatgtcatgcatctcgatgcgattatcagaaagagtgatcagacatttgtcaacgagatcctttaccacgccagagacgtccacaccatgactgttgagaaggcttgtcacgtaatccacattctctgatctgaagaaacatgcaatatccagaaaaacattcttctgttcagtggtaagctcctcatagcttgtttctagaacttcgtagatatctccatgtgatctacttttcagtctatccagtttagcttcccagtacagatcatccctctcacaaagatcagatcctaacaccttaagagccaaagggtggcctttagcgtaatcaagaaccatatttgtcaaaccttcgaactctttcaaagggaaagagttactaaaagcattcaagctaaagagcttcaaggcttctctatcattcaatttcgggagcacgtattttcggcctttgatcgtctcaatcagtttactatctctagtagtaatgataattctacttcctccttgataccatttgcaatgccccataagatatctgatttgcttttcatcattcacatcatcaagcacaataagtagcctcttgctcttaagccgccgctcaaatctctcatgtgcatttccaggagctccaatctccaaatctctatcattaagtacagtggaaaagagtttctgcagcaaagattctaacccgcttctacctgaattttcgcggatattagtaaggaagcagctaccgtcgaactgaccacgcatacgtccatacaaacaatcagcaagagtcgttttcccaatcccaaccattccaacaatgcctatgatatgaacggtatccaaatcctcccatgataacaacttttcaagattcttcagacgcgattctatccccacgagaccttcgttcccgcttggagccaaatcattcaacttcttgaatgtgtcaacggctatttcatcaacaagtttggcctcagacgtgctaacaaaatgacaaaaaagctggatttagcataaactttaatagcatctctaagaagataaatgtagaactttgacacaaagacttggtaagtttttttgtgtgacattgatgacatcgatctagattttgcaaagttacctaatttccttgactacataacctaggatgttggatgctgaggcaagagcagccttccacgatgaaatttcttccggcgtaactccgggaaaagtcaattctggtaacttgaacggcaccgcaaaactattcctctgtttctcgacgtccgatttgtcaactttgtagaagattggtaccactagctgttggttgctgttcctacattcgaggatcttcactaactctcgaagacaccacgcagaatttgcatagttcgtggagaagacgatgattgcaatcttggatttctcgattctatcgaaaagcgcagtgagattgtctcctcgacggagtctgtcgtcgatgaatgagtcgattcctcttagacgaagtgctttttggagatgaccggtgaagttgttgcgtgtgtcaaagcctctgaaactgagaaacacatcgaactctgctgaagatggagaagatgattccatgggagaaaagctctgatccaatttgtccagttttaaagtcaacgatgagctgagaaaaacaaggcttgtggtttggtttctctcataattgcgagaccggacaaaaacaatttatccaatataaaatacttaattagtggcacgaaaaaaaaaacacgaaaagtcaacaaatcgatatgtgagcaaagtaaatttgtgtttttgattattggggttttaaaagttttcttcctcattcttcgtttgttaattttaaggatcg

SEQ ID NO: 3222 - DNA, 3000 bp, Unknown
  misc_feature (1)..( 3000): cDNA_ID_1819873_gDNA_ID_1620632_Annot_ID_47279 3000 nt of promoter + ATG
gcagaagataagtttcacaaagttatagagacagatcaagctagaacagagacaaacctgcttttagattctgatccagagcagagtcaagtgctctttgagcatcttcagttaaaggaggatgttccgggctaaagaaatacatatctgcctttcctagtaacttgaccgtttcttcacgcactttgtaaagcataatcttattcgcccgcaaaaactttgaagtaaaactagttcctgctcatcaaaatcaaacactatctcattccaaatatcactcactaccaagatcctagtaaccttttgtatcatctcaagcaataaaccagaagtaaagtaagtaagtaccttcaatcaaaatacccatgagaagtgcttcagttccagtatttggatacttgagcttcctagcttcaagctctcccattgcaaatgatttaattgccctccatgaccatctacattcacaacattaccctctaactttctttaaaaacctaaatcaacccaggaactttaaaaacaagcaattcaattcaatcttaggtctacaagaaacaacacttacttgggctttttcgcatcagaaaccactaaatctggattcctgcaacaaattaaagcacataattgaacaaaatcaaccacaattgcgaaaatggagcaacataaaattgatcaaaatcaactaaaatccgatcaaaactttagaaatttacgcggtgggtaagctggagatggcggatttatggattcttcttgggcgattagtttgtagagcggagactggagaagtgagagagagggatgaatcaacaacgcctaaccaaggattcgtcaatgcttttcttgtagagaagaagtataatggaacagatagtttcttcttagagaaagaatcgatttgtgagatgatcggattcgtcaaagcaaagttgcaagaagagtgagccgccattttcgcgagtgtgtctggataacgggaaaaatgaaagaacgtcaaattgggaaaggagaagaagagtcctggagaatgacgattgtcgaaacgatatcgtattcgttttataaatcttaaaactttcttatatgggcttaaaagatgtgaataaacccaacacaaaataagtttagttttgggcttattgcttatcattaaacgggcctatcaacgagtgaaagagtcaaaaacaaattttatcacaagacaaaaaattcaaatagtcaaaaagaaagtgaatgctgaaacctaatttattttctcacatatgtttgaatacgaatggtggatttcatgttttcactctgccttttaaaattctacctttcattttctaatagacacgagttaatgacaaccattagctttatcattaactaagttgattttttactactccgtttaaaagtttaatgccaacacaaattcaacacagttttcagaaaagtaaatccactatcatagtaaaccattgttagcttggaacaattatatatctttttagagaaattagtctcaaatatgattgggagtgagacaatctcggatggttgtatctatttttcttttactgaaaaatagagatttttttttttatgtcaatgctttttcaaaagtaaaaatctctatttgttagaaaaaatagaaatttttattttttattctatatataaaaaaactctattttagagataaaactatagatgagttagaatgaaataaatacaaaaataaagtatagagataaaaatagagatgagttggaaatgatatgaaggaatagattagaaagaatctatatatacatttttgcagccattttcgcaaataaatcctagacttgtacttatttacaatctaatgccattagcattaaatcttttttccaaaataattaattttactttaaatttttgatttaaattgtcaatcacattatcaatcaaatttaatcccaacaaacttcaaatcaatctcttaaaattagcataaacatatttgttaacaatattttaaaacaaagttttttgttaaaataaatattattcttactaaacgttttttgtttaaataaataaattttgtatttgaacttatttacaatgtcatgtcactgacattaattatttattaatgaaaatatttaattaaagatttaaatcttctaaatccttacttttagagttattatgtcattactttgtaagcaaaaatattattttttaaatattattatttatatatttaaaatttataaaacattattaatatttaaacttataaaaattttgatatatcataattttttaacatcagtttaaaaaaatcttaatttttgccgtcatattttatgattcaaaattttaaaaatgaacatatattaaccaattggcaaaaaatgtgtgggttcaacgtcccgcatcgacaaaaatatttagacaataatttataaacatatcataaataagatcaacattaatataaataaatgggttttttacaggacgaatttgacgggacgagtttggcaggacgttacttaataacaattgtaaattataaaataaaaatatattatagatatacaatttgcaaaaaaaaaattatactaactttaaaaagataaattgtctccgcagtgtaccgcggattaaaatctagttagaaaacaaaagcgttgtcattgattttattctattttaatttatatcgaatttttttgatatttcaacactaagattttttcacattttttaatttaagaatcttgaaattacttattaaagaaccaaatcaaaatttctaaagctctagttccttgacaagtggcgttgtttaagattttaaataatcctaatatctctagtaaaataaaataacagccaagtacgacttttttgtattcactctctctctcaaagattccgtctatagaatcattttcacaattagaaatccgaacccaaactcatcaattttacaaattctctcttatctct

SEQ ID NO: 3223 - DNA, 3000 bp, Unknown; identical to SEQ ID NO: 3222
  misc_feature (1)..( 3000): cDNA_ID_3070862_gDNA_ID_1620632_Annot_ID_162731 3000 nt of promoter + ATG

SEQ ID NO: 3224 - DNA, 3000 bp, Unknown; identical to SEQ ID NO: 3221
  misc_feature (1)..( 3000): cDNA_ID_3089720_gDNA_ID_1620632_Annot_ID_162722 3000 nt of promoter + ATG

SEQ ID NO: 3225 - DNA, 3000 bp, Unknown
  misc_feature (1)..( 3000): cDNA_ID_2161566_gDNA_ID_1620632_Annot_ID_162719 3000 nt of promoter + ATG
atctatattctgcttgaaaattcacactagaaaatgaagtgcttctgcgagtcatttgtctcttgcataagatacaaagtggaattgaaataactttatgtgaaatatatataattctaaaatatgaagctaaatataaaccaattttctacataagctttttcaaattttaaagatatacttacaagaatcgatcaataattgattcagtttttttatttttttttatttttatactggtgcatttgaagctctcctaagtcctataacacaacaaatatgttcaactactctcatcccgaaataaatgttgtcttaattcccttcaaaaatgcttttggtccaaaacccaatatcctttgaaacacttttgtctaaaagtatatgtaaagccatttacattttgtcctacctatgaaccacaaaattaaatatttgtcttattctctaaatatttcttttagattaaagtatgtgtattcaatcagcagtaaaaaagttacatgtcaagacttaatgtagtttgcattttctgaatattctggtttgaattaaactatatatgcttctgactcggtaccactttcaacagtctatctatgtgtctttttcatgcgaataaaatccattgctcattaatggtaatttgtcatctggtgaaacacatgcttttctataggaaaatgactttcaaattcagttacacattcaagagattttaaatgttacacattacattcaatgtcttaaaagttttaggctttaattaggatatttgggtggacaccaaataacaaaatatttcgttaaattttaaataacagtgtaaaccatacaccgtaaaaaaagatctcacattagaaagttaaaaaaatgaaaaatgatttgagtagtatataagtaacttaccaatcaactcattgtcaattaatttgtagttgaaatcctataaaacttaaaataatattagagcccgaacacaattaccctattaatctggtcatgaaaatggttcgattatcaccactaattaatggttaaaaaaaaaggttcaattctgtccgcatatttagaaagagcattatcttctgatggattctatcaaaatacagtagaaactctataaattaatactcgataaattaataaacacgataaattaataaattttgtcggtttcaagtcgggccaatgtaaaaattaacaaattgataagataataagataataattttttaaaaatccttatgtaaaattatagtcccaataatattataaattaataatcatagatcttaagtatatattttaagactcatttttatatgaaatttttgttcaagttacaattacaatttttttaaaaatacaactagtatgatatctgttttactcacataactatttgcatatttgatcggtcataattgattttgtaaaatcttttatttgagaaatcattgctaagatttgtgtaaagagaaattggattaagcttcatgtttacgttcacgttaatgtcatagacatacagacacaatatcttgccgaaaaataaattaaaaaaataaaaataaaataaaaatctaacataagtatatatgcaaacaacaaaacatatagaaaattaaattaataatatttttaaaagaatatagtattgtatttacgtaaatatatctataaattaatatcactataaattaataaaattgcatggtcccaacattattaatttatagagtttctactgtaagtagctaaaagaaccggataaattcactcattgtcaattagttttgatttagaagagcatgaaactttaatatagacataactcattttagttatagtagataaaataaattaaaacgcgcatttggccggtttggataactttaaacaatttcgacttgtttttttataacatgttttatttatctatgaatattcgaattattgaatgaactttcatctccaacatatcctcattcgaatatcattgattattcgaatatgtcacttgtacttatatgaggaaaattgatgttcatttcatagggtatgactgattagtatagatatataaaaagaaatgcaaagtaaaataaatattttcaattattctacttttaatttgttgtccaaataaaacaattaaagaaaaatctcaattcatctacttttagtagaaacaagtgacaatattcaccccacaaatacatgaaagaattttgtttcctctaactttcattttcatttttttcctgttttcttttcatttctttcctttcattttcttctaattactcccaatcacatgcatagttttcttatccacatgtaaataaacttatccaacaagatttagaaaaataccaaattaaaaaggttctaaatcaaatagtcaaagactagatttattaccatagtacaaaattagaataatttgtaaaatagagatttcttagcaaaaatagataaagccaggtcaaaacgtgacaaacgaatgcaactgttggtggcagaatcgaaaataatccacaattccctcgattccccgccgaaaatttcagtctcatcgaaagcacaaaataccccttacgtcacttcctgcgaaagttacggaaaaacccctacactctgtctcagacaggggtattattgtacccctctcaacagtccaatcaaattcaaattcatttgttgacataataatccacgtcaggaactgcacgcttcttacggtgtcgttttgtggttctgtataaggaaaaaataaataaatttgccgttttgtcgctctggagaaaaaaaacagtgacgtttatttccttctctgcaattcttcttctccttctgttcactcatcaaatccaatgatgttaaaatcacacataaattagggtttcttgttggtgagtgacgttaaaaacccaccagtgaattctctctgtttctgtgttactgtgtacagtggagattttaaagagagatatg

SEQ ID NO: 3226 - DNA, 2764 bp, Unknown
  misc_feature (1)..( 2764): cDNA_ID_1819983_gDNA_ID_1620633_Annot_ID_47289 3000 nt of promoter + ATG
gaattcgaatagtatgtttgcggattatgcgttttggggaatggttttactgttaaattgcggttaatctcggttgaatagagtagtggcaatgtcaacttattgcattgatgaaggaacatgaatgaagaagaactttgaactgttacattgtgaagaaagtgtaaatctatgtatgaatgtttggtttgttgattgatgttggactggattggtaggatatacgtgcaagccgaaatatgaaatttatacaaattttgagaccaaaacattttaatgatcttatgaaaacactagaacccccatctcacatacttgtacgatctacaccaacgatctctttgatcttgcatatacggcaagtcggcaaacaataactcttaccatacattacaaaggaggtgtgatcatttagttttggggattgctttgattagcctgggtaaaatacccgaacccgaagaaccaaaccgaactcaacccgaaaaaacctgatccgaatctaaacctaaaattttaaaatactcaaacagatcttaaacttcaaaacccgaacccgaacccatccgaacctgaacccgatcaaatatccgaacatattcgaaatatatatatatatacatagaaataatttattagtaagaatcatttttacatcaacttaagtgtctaaaatattaggattttaggatattttgtatagttttagatattttacctacttttcgatagattcggataaaaaatactcgtttaagaattttttgtgtattttcaagtaatttgaatttattttgatacaaaattttgaattttggatactccgagtaaacccaaatctcaacccaaaaaatccgattcaaacccgacccaaatccgaaatcttaaaatacctgaacggatcttagatttctaaatctgaatatccaaacccgaaaaactcgatccgaacccaattcaaataccggtacacctaagcctagttttgatagtcaaagttccatttggtttacattccattagttattttaatctaaactaaaaccattaattgtaaccgtataaaggattttcagcaaaacaataaataaatataaaaaacctgtctccaagtcatttttcttactgaaattcatttttctatagttaactaaaagggggtgctattcaatcatggatttgaggaaattcatttttcagtgttaattgttatcctatttttcagtgttaattgaatgaggtaaagaaagaaaacaaaaatttattttgtgatttgaatttttttaaaaaccaaatgttcggacatattttaagactgaacaagctttgattttacaaaaacgacgtgtccaacaacaaaatcatgatcaagaaactccttttccatctacttcatttagacaatattttaactattttggcagatttacaaacagtttaccaaaatattaaattattaatttatgttatagttttattattcctttcaaatttagtactttgtttgcttgttaattttataaaactacttttccattttcgtaataataatatatgttttcggttaatccgatgaacgttacattacatacttctagttttctatatatcatacacattcatcgtagtacccatactattagatcaatagaataaatacgtcgattctaattcgacatacgttacataccatgcaaaataatctcatttaatattgagaaagtgtcttttgtggaaaagaaaaaaccaacttttaaacgattgtattttgtgttgtagttgttgttcgtaaaataataatatgtattaaataaaaattaaatttaaaggagtaaagtataaataaaaagtgaaattctaaagtgtaaaaaagttagatttactcctctattttaaagtcgagtatagagtagagttgaaaatgtttttagagcttttacaaatagagtaaggttagagatgtcctcactaaagttacgaggtgtgggagggacggagccaatgaagaattataggggtcaaatgatcccagtgaacttttaaaaaataattgaatttttattaaaaaatatttattgaccccagtcaaacaaaagtattgtcccctatgaatgatttgttgaggtacaagtaaaacaaagtccaatataattttgtgaattataaatacaaaagctcaataattttattgaattatactaatgttaggtccaataaaaatctgtcaaaattaagaaagtaaaaacctaaataattgaacatgtatcgtggtagcctaaaacagttgagcttcttcctcttttgttttttttcatacaatcatcacatctttgaaaatcagattaaggctcgagactatagatttcaaggtaaactcttttatatatatatatatttttttatataaagtttaatttactatcaaccaatttcaatttgatcacttaagcaaaattcgtttgtgattaatttagtttttggtgttgttattctgtcattgaaaactcaattcgtcattatttcatgagttttctttgtaacgttagtcgtcaatatactcttttcttcttaatttttgatgtaatttgttttagtttctaatttaatctcacagtaatttttactaatgacaaaaattaaagttgtcatgaatcatgataaggccacggagaaaacaatttttatgtttgatttaagtttcaactcatgatttttatattgtttcttatttttgtatgtaggcaaggcaacaacaaaaataatg

SEQ ID NO: 3227 - DNA, 3000 bp, Unknown
  misc_feature (1)..( 3000): cDNA_ID_1819979_gDNA_ID_1620633_Annot_ID_47291 3000 nt of promoter + ATG
ctcttttatcctttttaattttctatttaatttttgctaccaaacaatctattaaaatcaaccaatcatatgcattctctttcttatatcattaatcacttaaacctacaaaaaacgctggacaactgaaaccaataggtacaactatgttgatggacttctacgaaaaacatataattacatatcgttttctttttctctttcattttcaagttataataaaaaagacttcagtcatacgtgttgcttataatggatactattaattttcttgtcgtatttatacaaattaatatgttttgtattggtacaactaagtacaacccgcacaactaaggtctattcacttggctagttttcagaatattataaaatatgaaaatttaaaaccaaactaagaaaacttaaataatgcatacacaattgtaatgaaattacataattagtttttgacaaaaatcatattttctaaattaatgaaactcttatcacaaaatctaacattcatacattaacaaccttatactttcatggttactttgtatattttaacaaaacaaattaaaaaatttaaatacttgtaattagataaatataaatacactgatacaaagtaatggtattttgatgggggaataccatatgttccatccataaaatttaattttgagttgataacaactagatttattatattctcgatattgtacaactatgacaaaaaatgtgcaaccgaatacaactgtacaactatgggcaatatatttttcagatatttatagatattttttagatatttgtagatattttataataaaaattagctttattcttttgtgataaaaatatttatttattttttgtcatcaaaaatatttaattttatagttaaataaactattttgttccctttcaaactttttttttccttttcaaaacactgttgtttaataaaataaaatactaacattcataattttttgtgttttgttttggatcaaaatacgttgatgtgttgattcatatttattttggagttttttttgacaaaaaatcttagattcatacataaacccagatacatagttgtacatgagcgtaccagttgtacctaaacgcttagatctattatcttagaaaccgaaagacagccgaacaattgtatctaaaccaaaaacccaacataattatatctaaaaatttagccacaattatacctaaaaccaaaaacacaatactatctaaagactcaaacacgaagtcttattgttctcgttgtcattctccttctcaatttctttctccttagctttctccttcttcccttttcttctagtttttatcattcaaaagcaatctcataatattttgttttaatgcatttcacaaactatctctaaggaacaaaattcaaattcattcgaatcccaattgtaatcctaaaaactaagtcataacagctattacaagaggcttttaagggacaatttcgattttaaatcgataattaactcaaatttgaatctatatatacatttttgcagcaattttgtgaaataaatgttatagttggaacttatttacaatggctgccactggattttaatgtttgtttttgataattagaaaaaaaatcttcaaattaaatatttgacttttaacaatcttccctaaatctctccacattaactacacgattagttactgaaataaaacttccaaaatatttaatatcatttatttactacaaaattatcattttttatattgtttttctccatgactataacaatttaattataatcgtcaaaccgcagagatatttgatagcatttaattattacaaaattacaaaatatttagacaataattcataaacatatcataaataagattaacattaataaaataaatgttttttttatgggacgggttggcgggacgggtttggcaggacgttacttaataacaattgtaaactataaaataaaaatatttatagatagatacaatttgcaaacttttatgtatactaactttaaaaaataaattgtttccgcggtgtaccgcggattaaaatctagttgtactcataaaaatccaaattataatcgaaattttatccaaaatccatcatttttaaacaaaatcaaagagaaaaagagatcaaactatcaaatctaataagaaataaaaccctaattaaacacaacaccatcaatcatcatatatggaatagagatggatctttggattgatagaaacaaatgaaaaggtaaaaaagatggatctttggattgatagaaagaatgaaaaggcaaaaagaagacgaaagattatacatggaatagagagaagagagtaaagagaagaagaagaagaaacaaatcaaaagttttgtttttgttgaattgagagaaaaataaattgaagatgaaaaaaatttgatatgagaaattagatttttttttgttgagaataaaagatccaaaattgttatggatctagatccaacatagaggttgggttgtaaataagtaaaaaactctagttttacttgtcttttactattattctgaattaaaataaataaataaacatatgttttttataaaggggctaactagagaatctttgaagctaagggggtggactagataaaaatccaaaatgaagcaaatgacctaactgctgtttgcaacatcatttggttcatttgctgttagctaaccttagtttttgataaccatagtccataggctaaatatcacagaatggtaaagtgtaagccatttcgtcaacgctacacctaaacggcatgaagttggagcttctaattaagaagaacccggtcgggtcaaaattcgggtcactcttctcgggttccccctctaattcaccctctttttttcattcactccacaattacaattacagtcgatggacgacagagccaccgaaccatcacggcgagtctaaaaatactcagagctcctataa

SEQ ID NO: 3228 - DNA, 3000 bp, Unknown
  misc_feature (1)..( 3000): cDNA_ID_1838672_gDNA_ID_1620633_Annot_ID_47295 3000 nt of promoter + ATG
tgtgtaatgtacagtacaaaattgtggctaagatcctaactagacgtttgcaaccttggttgtcagagttgatctctttgcaccaatctgcttttgtaccaggccgagcaatagccgataatgtgttgattacacatgagattcttcactttcttcgtgtttcgggtgctaaaaagtattgttctatggccataaagaccgacatgagtaaggcgtatgatcgcattaaatggaattttctccaagaggtccttatgaggctgggttttcatgataaatggataaggtgggtgatgcaatgtgtttgcactgtctcatattcattcctcattaatggatcgcctcagggaagtgtagtgccatctcgaggactgcggcaaggtgatcccctctccccgtatttgttcattctatgtacggaagttctttcgggattatgtcggaaagctcaagaaaaaggagtaatggtgggcattcgcgttgctcgaggaagtcctcaagttaatcaccttctatttgcggatgatacaatgtttttttgtaaaacaaatcccacgtgctgtggtgctcttagcaacatcctaaagaagtatgaattagcttcgggtcagagcataaacctagcaaagtcagctataaccttctcttctaaaacccctcaagatatcaaacgcagagtgaagctttcgctgcgtatagacaatgaagggggaatagggaaatacctcgggttaccagaacactttgggaggcggaagcgagatatcttctcgtcaattgtggatagaattaggcaacgctctcatagttggagtatacgctttctgtcaagtgctggaaaacaaatcctgctcaaggctgttctctcgtcaatgccatcttatgctatgatgtgctttaagctgcctgcctctttgtgtaaacagatccaatcagttctcacccgtttctggtgggattcgaaaccagataaaaggaagatggcgtgggtctcttgggacaaacttactttgcctataaatgaaggaggactaggtttcagagaaattgaggagttcaacgatgctctctaggcgaaacttagttggcggatacttaaagaaccacattcccttctctctcgtgtcttgttggggaagtattgtaatacatcctctttcatggactgctctgcttctccttcctttgcctctcatgggtggagaggaatccttgcagggagggacttactacgaaaaggccttgggtggtctatcggacagggtgatagcatcaatgtttggactgaagcgtggctatcaccgtcctctccgcaaactcccataggacctcccacagagacgaataaagacctttctgtccatgatcttatctgtcatgatgtgaagagttggaatgttgaagctattaggaaacacctacctcagtatgaggatcagattcgaaaaattaccatcaatgccttgcccttgcaggatagtttggtttggttacctgtgaaatcaggggagtataccaccaagacgggttatgctcttgcaaagttaaactcattcccagcgtctcagttggatttcaactggcaaaagaatatctggaaaatccatacttcccctaaagtgaagcacttcctctggaaagcaatgaaaggagccctacccgtgggagaagcgctttcacggagaaacattgaggcagaggtgacctgcaaaagatgtggtcagactgaatcttcgctacatctgatgctcctctgtccatacgctaagaaggtctgggaacttgctcctgttttgttcaatccttctgaggctacccactcttctgtagcactcctcttggtggatgctaagcgaatggttgctctcccaccaacaggattgggttctgctcccctgtatccgtggttgctttggcatctatggaaagcacgtaaccggttgatctttgataatcatagctgttcggaagaaggtcttgttctaaaggccattttggatgctcgtgcttggatggaagcccagttgctgatacatcacccttccccgatttcagattacccttctcccactccaaatctgaaagttacaagttgttttgttgatgcagcttggactacttcaggttattgtggtatgggttggtttttgcaggatccatacaaagtgaagattaaggagaaccaatcttcgagtagctttgtcggctctgcgcttatggctgagactctcgctgtgcatttggctttggtggatgcgttatctaccggtgtgcgacagctgaacgtcttctcggactgtaaagagttaatctctcttctcaactcaggaaaaagtatcgttgaactgcgaggactgcttcatgacattagagaattgagtgtttcctttactcacctttgttttttctttatccctcgtttaagtaatgttgtggctgattctttagctaaatcagccttgtctgttattctctcttcctccgttagtggtgggtaaaactcgtttgcattttttataatgaagtttgataaaaaaaaaaaaaaacatattccaaaaaaatttaaaaaatctatacccaaaccgatccgaattcgattagatctaaatcaaaaccgaaccgatattttagatttactttttgatcctaaacttttctacccaaaagattcgtaccggatcgggtttaatcctaactcttccaacttacccgaatacccactcctaaattctgattctgttttttttttttttttaacacggcaaatcaaaattctgattctgttattgtagtaaaatcagattcatctctttggaaaaaaacgataagggatctctctctaattggcgctcctttactaattgccctttaattccatccatcttcggattcttttcaaatcaacaaaaaaagtacaaatcggatccctacaatatcctctccactcttcacaaatccttctccgagatctacaaacgctgtttcattcttccgattaca

SEQ ID NO: 3229 - DNA, 3000 bp, Unknown
  misc_feature (1)..( 3000): cDNA_ID_1819964_gDNA_ID_1620633_Annot_ID_47296 3000 nt of promoter + ATG
tcgtgtattgattatgtgattatgtgaagtctttaattggtgaattttagatatgtgcataagaagtttagtatgcagtataaagcaacgattggtgctgattttgtaaccaaggagcttcagattggggaaaagcttgttactttacaggtttggggcctttttcttttggttttgaaattacttttcttcgagatttgtgtgttttactttttttttttttttttttgtggtttttagatttgggatactgctggacaagagagattccagagtcttggtgctgctttttatagaggagctgattgttgtgctttggtttatgatgttaatgtgttgaggtcttttgataatctcgaaacttggcatgaggagtttcttaaacaggttcgtatgacaatttccttctttctgtcacactttgttttggtatgatccatttgttatatgttttgctttgtgtgttatgttataggcatggaacataggaatgtggtagtttttgttttaataggaattgttagcttttgagtatttagagtcacaatcttcagatttttggttaacatttcgtttaaacaaaacccagagtcaaactctcttttttgatgatgttgtgggaagagtttttgattatcgtcgtatgtcttttggttctcaggactatagctgaagttttgttttcccgtgagtaacaagatgattgagcaatggaacatgttttttatgtttgaatgatcatttgcgtttttttacctagcggtttactggttaagccaagtatattactaacttgctttcgtgttcataacagttttagaattcatgactctataaaccctgttctctaatcagtgtgttttcctgcactcacactttcaatccttttaacaatgtataacatgctaacttgtattgactcccttttccatggcatcgttttgggactgtccaggcaagtccatcagatccaaagacatttccgtttatagtgcttggaaacaagattgacgtagatggagggagcagtagagtggtaagaggaagatcaagatatgtcttccatcgtgctttaactcttttactcagtcttgtttaattcctctctaactacaggtctctgataagaaagcagctgactggtgtgcttcaaatggtaacataccctatttcgagacatcagcaaaagatgacttcaatgtcgatgaggcattcttaaccattgccaaaaccgcccttgctaacgaacatgaacaggatatgtaagttttctttttggtttagctctactaaatgagagctcgaaagtgtctaattgttaaaccggagagtctgaatattgtagaatctcaatctaaatctgaatatgacgtttaaatgtagaaggcagatagtgtagcttaaagacagtgacattcttacatgtctatctgcgatttgtctacttctgaattccaaactcttgtgtgatccgaattggaaactaagaatgcattaaaaataaccgctgaatacttatacagtatgtacctcatacacaatggcttgggttaattgcagatacttccaaggcataccagatgcagtgactgaaaacgagccaaaaggcggtggttgcgcttgctgaaccacagatttgaggattcaatgacattcgtttttttgatgcattcatttgaaggttggtgtactcttgagttgcagaacgataagcttgtagaagcaattttttgtcattccatcatatattaattgattggagaagtctgtgtatgatcaatcgattctgctggatacaaattttatttttgtaagaagaaccattattgctcttaatccctatggcgatataaagttgcatgctacactatttcagtttggtttgactcaactgtcggatatgttactacatctatagttagaccatatgttcattttgcatgtatagtttttttcatagaaatattgtaaaactttgaagtcaaactttaacctagatcatgtgatattttaaaaaactttgtgaatgtaatacactcgaatagctattcaggtgacaaaacctaaacagagattgtcttaaacaattcagagaggatatagcatggtcgtctattttctttagttctcaggctgtattattacccggacgtgatctgattctagctgctacagtgtactatctccaacctggaggctacatccctgcagaagaaggtggtggactcagtgaatctgcaattatactttcaatgcaatcattacagctttgaagaactaagagagatatcattgtccttgcttttcttttgctatagcctaagtggttattgcctattggtcatgttggtgggtattgtactattgggtattgtactattgttcactcaagtatatgtatatgaccataaaaaaaaaaaaatggttattgcctattggtcagttttttcttttaagtttgacccaaatctttccataaattgtgataaaacttaattcataaaatatataaaatatattttatatgtcttttaaatagaagtattattagttaatcatgcagtgtatcattcatccagtgtattatatgttttttaaataaaagtattattaaaaaaaatgtcattttacgagacatggttatatggtaggacgggtttcgatcgatattaatacacaacgatatactagagataaaattgttgaattaacaatcgaaatacaattatacgatcttaaatactaaacaaaaaattaaaatttaaaaattagtttaaaaaatcgaccggtatatccaaattcaaacataagttttaccttaatgggccaacatatgggccttaaaaggctttggatctgttactattacactccacttgcaaaaacctatcttcttcttcttcttcgctgaacaacaaacaacgcttcacaaaaccttccgataaacctcacaaccctcttcctcctcacactacagtaagaaaaacacgcgcgaaagct

SEQ ID NO: 3230 - DNA, 3000 bp, Unknown
  misc_feature (1)..( 3000): cDNA_ID_1819960_gDNA_ID_1620633_Annot_ID_47297 3000 nt of promoter + ATG
gcgaagtgtacattccaccagaggcaactgtaatgactttggcgtctggtgttgctttctccaacaatggaagcatcaactctgtcattgtgtatgtcccaagtacattcaccgcaaaacttaactcgaatctggtatgacagaagatcataggagtgtaaaattaaatcaagatgaaatgatactggaacgttcaagaaagataaatgagaccaacccttcaggtgtagtagtacgtttgttctcaagcaaaccagcattattaacctacaatttgaaaaccagaatcaaacaagtgaaatgttattctaagaattagtaaaagaaaagaccacataccagcacatgaaccggaacatccttggaagcgaaactcgaagcaaatgatttgatttcattaacggaagacaaatcacatacctaagaaagaagcaaagctaaaatggttgataaagagtatggaaacttgcaaaaaatgaatttgaaagtagaaaatgatcatacttccaagtacacattttggtttcctgttgaggtttgaatcttagaaagagcctcttgtcctctttccttgttccggcacaccatgtaaacagttgctccactagaaaaacataagcagacattataaaatttggtaacactcttccaacacaagaattcaattggttccctcaattccataacttaagtaacctaccgtgaagcaagaccctctgcagcagcaaaaccaatacctgaattagctccagtaactacacaattctttccttcaatttgtaactgcatatcttcaggtttaaacttctttgaatgatctctgccacacaaaaaaaaaaaaccacaagtactacatcaaccacttctccataacagagttcctcaaggtatcaaaattttcatgtgaagcaaatgttgaatcaaaagattgaatctttctatgttaatccaaagaacactaaacagcctgaatcgtataagtctccaaaatccataaaaattcaaactttataattccacaggattgaaaatgtagaaatacgcaaattcaacttacaagaaaccactcttggtgaaattcatgtagccataaaccccaaaagcggttgatctccatgtctacagatcaaaatcagacaaaagtaatcatttttaatccgacataagacagaaacaaacaaacgatggtaattagaggacataaaaaagaacgtacctttaagagaaacattttcgtgagttgtggaagatagttcgagttcctgagtttttggagaatgagatgttagattagcaatggtgcagagttacaagtcatgcgacgacgtttggaatccttaagtcaagtttgtcgattgagagaatagagaggttcccggtaagggttgtgccacgtagaagagagactcaccgtgaaaaggatttgatgacgtggctttttgttgagaatttgcaaataaatcctttttgtttttcatatttcagttttggccaaactattaccgtgaaaagaatttgagattctcacgtctgcttttctttggccttgtccggatcttaaccagaaaaagcaaagattgcttggagtgacatttgtaaaccaaaccaagaggcaggtttggaattacatttgctatctgaaacaaatactataagtatcttgaagctaatatggagaccggtctcggaaaatgactcattatgggttttatggagacacaaaaacctgcttcggaacggttctctcttgtcagtttgtggtaacacttactctggttccttgatgtggaaacaaatcttaaaatactgagacttagctcgaccactgcacaaaatggaggtaaagtctagaagggaaacttatttttggcatgtctccttgtgccctctggggaatctatatgcactcttaggctcacgaggaagtattgacatgggagtagttgttggttattttgttgctgatgtccttgtgttgcggtatgattttcaactcacaattcatagcttattgtgagagcgcaatgaacggcgtcatggaaaggcaccaactcctgcccccatacatgctcataaaattcattgatatgtccgaaatagactaagcgcaaatgacgggttcctctgactatgatggtacggtggcctacgtttctggtttcaaactcgcactcaataatctctccttagtgtaacactttaaatttttcgaaactttcaaacattcatatttcatgtcgcattcatagtaacactatcttcttttatcaataaattttacattctacaaaaaaaaagtaataaaaaaaatcttctcatattttcatatattttaaagtcaagttttcagatgcataactatacacaactttggatcgttaattacgaagtatttttacattactacagcaatatatttgcgtcagaccttccaaatttatggaaattacatgacgtaaagtatttgtttcttaagaagccgatttaaattgatataggttttacatattgtttattagttttaaaaaaaacaacgataacaataaataaccatttacaaaaattaagtagtgtgattcaatatttgttttgttttgctgtaaatgagccaaaacagcctttataatggaatatattacaactccttcattaagtaacgatttataaacgttcagagatggaagagaaaaaaataaagtatggtggttagaaaaaaaaagatacgatgtgaataactacaacttgctatatcaaaaatattttattgtaattccgttatcatctaaacttaatttttgttagagaacataataacagtacatccaaagttaccctaaaattacgtgaaacatctcatgcaatgaatttacgtacccaactttacttgcatggggtatctataaataccctctaaaacacatttcatgcaaaatcaagcaacacttaaaaacccatttcgaaagagaaacatttctaaaaacagtctagtaataaaaaatg

SEQ ID NO: 3231 - DNA, 3000 bp, Unknown
  misc_feature (1)..( 3000): cDNA_ID_1819956_gDNA_ID_1620633_Annot_ID_47298 3000 nt of promoter + ATG
aaatattttaaaacataaaatgtcttgttaagtaactcatttacgtcaacgtgaaaatatatctatgtatatcagtttgattacctggtagcctgagtgtgagcagtagaaggggcaagaagcttggtaagaacctctgtacttatcagcaaattcaaatagctaccacaaaatagataatttatacgttaccttatgattgaactgatgtaatgatatttatagacttaattaattaatatgaatttacactcacggatttagcattgtttagtaatttggatgaatatgtagaatcaaccagtttgaaaacaagtgaggccgcggcaagagcggctgcggcttcacctgcggcttcggaaccgggggaagaggaagagatactatagagagttctaggtgtgtccatatcttctggtctctcccaacaactatgatctgaatttccatctcctacctatttacatccattaccaaaacagaaccaaaaataattaattgaatttcgatagtgaatttgttgaatattgtagaagtatatagtatataagatacgagatatatactatttgggacatttaacatgaaatgaaatatttgaataattctctatactagtatacctcaaaacaaaccaaaatgtgacagttcggcttggtttagacgtgtaaaccgaggggaaaagttagtttacctgtgtatatagcatgttggtcgacgtatgagcacggaggataaaattagttccccatttgatagtagaccggagataaccaagctggttaacgaaagtaatctcattctggtattcaagtgcagcccaactcaacaaggttgtggtaaatgacattggccacacaaattttacattgtcaccagcatcgtaatatcctccaatcaaattcacctgagaaatcaaacacccgaaaatttggttaagtctataagagataacataatgccaaaacttatgaaataaggttccatttcggaagacatatatgcatagatatagagatgtttatgaatatagtcggtttacattagctgatgcaccgtcagacaggccagaatcagctcgccatttaaccctttgattagtcgggagtttaccagatctttggccttcaaagaacaaaattgatttgttcagtgcatctccatagtcaagagcttccaagctttcgaaagccaagaacatcccaattaacattacaaccaagagtttgcccattttttattactagactgtttttagaaatgtttctctttcgaaatgggtttttaagtgttgcttgattttgcatgaaatgtgttttagagggtatttatagataccccatgcaagtaaagttgggtacgtaaattcattgcatgagatgtttcacgtaattttagggtaactttggatgtactgttattatgttctctaacaaaaattaagtttagatgataacggaattacaataaaatatttttgatatagcaagttgtagttattcacatcgtatctttttttttctaaccaccatactttatttttttctcttccatctctgaacgtttataaatcgttacttaatgaaggagttgtaatatattccattataaaggctgttttggctcatttacagcaaaacaaaacaaatattgaatcacactacttaatttttgtaaatggttatttattgttatcgttgttttttttaaaactaataaacaatatgtaaaacctatatcaatttaaatcggcttcttaagaaacaaatactttacgtcatgtaatttccataaatttggaaggtctgacgcaaatatattgctgtagtaatgtaaaaatacttcgtaattaacgatccaaagttgtgtatagttatgcatctgaaaacttgactttaaaatatatgaaaatatgagaagattttttttattactttttttttgtagaatgtaaaatttattgataaaagaagatagtgttactatgaatgcgacatgaaatatgaatgtttgaaagtttcgaaaaatttaaagtgttacactaaggagagattattgagtgcgagtttgaaaccagaaacgtaggccaccgtaccatcatagtcagaggaacccgtcatttgcgcttagtctatttcggacatatcaatgaattttatgagcatgtatgggggcaggagttggtgcctttccatgacgccgttcattgcgctctcacaataagctatgaattgtgagttgaaaatcataccgcaacacaaggacatcagcaacaaaataaccaacaactactcccatgtcaatacttcctcgtgagcctaagagtgcatatagattccccagagggcacaaggagacatgccaaaaataagtttcccttctagactttacctccattttgtgcagtggtcgagctaagtctcagtattttaagatttgtttccacatcaaggaaccagagtaagtgttaccacaaactgacaagagagaaccgttccgaagcaggtttttgtgtctccataaaacccataatgagtcattttccgagaccggtctccatattagcttcaagatacttatagtatttgtttcagatagcaaatgtaattccaaacctgcctcttggtttggtttacaaatgtcactccaagcaatctttgctttttctggttaagatccggacaaggccaaagaaaagcagacgtgagaatctcaaattcttttcacggtaatagtttggccaaaactgaaatatgaaaaacaaaaaggatttatttgcaaattctcaacaaaaagccacgtcatcaaatccttttcacggtgagtctctcttctacgtggcacaacccttaccgggaacctctctattctctcaatcgacaaacttgacttaaggattccaaacgtcgtcgcatgacttgtaactctgcaccattgctaatctaacatctcattctccaaaaactcaggaactcgaactatcttccacaactcacgaaa

SEQ ID NO: 3232 - DNA, 3000 bp, Unknown
  misc_feature (1)..( 3000): cDNA_ID_1024126_gDNA_ID_1620633_Annot_ID_47303 3000 nt of promoter + ATG
atagttttattggttttctcatatcgttttgggattttctcggtaatgttttgtagttctaactgaaaatatgagtagacaataatgtggttggttagctaatggtgtaagtaatttttttgtttgaatctttgtctacataatatatcacaatggctgatggtacctaagaggaatttcatcattaaatacttgaggttttaaaaaccgatgaaacttaggaggagtaccatcattaaatacttaaagaatttttttttttagtataaaaaagttcttgagttttacactcacacacgatacaaaatcatttgatattacttgccaatgataaaatatgattaacataacgataaacccaaatcacacctccaattgtaaaacaatatgataatataacgattgaaaacggtagaattttgtaggcacacatctgttgtgctagcatgggagcatcggttctctcgccggttaccccttcttgttacatggcttcataccatcggttaaaccatccccggttttgacctcatattttcattcttagtcggaattttgatcttacgataatgaaatcgggagaaaacccttttgaagacatgtctcaatagattcaataaacatttcctcgagactatacttgaagttaaaccccatctctgtgagcttcttggaactgaactcaatactctttagattctcatcaacaccttcaaacctgttatatagagttttgtttaggacaaaacaattatgggccaaaacattttaaataatagtcaacacacttttcagtattttgtttagtaattttctaaaaaaaccaaattttaatcttacacattctattttgctatataatttaactatctatttcattataataatcccgattttgattatgcacacgttattttaatggataaatgttaaattttctatcaaaataatatgtataccatatcaaatgaatataattacttcatactaaaataattaccaaataacaaaacataatgaaccaaaaaaaaagaaaaccacaaaaatgttttagaaaagaaaaattgcttaagatatagttttgctatattctataatttcacaaattaattttacctaatgtcaaactcatattaaatgacttaaaatttataaataaaacactaaaattttatattaactttttttttatatcaaataataaaaacaaatcaatccctttaagccctaatttcctaatttttggttttttcactaatggctacatgcattaaaattgttagactaaaaaataggtataactatacaaatattctcattaagtatagaaataaaatactatattacattgaaaaatacaattttaaccaattcaatttatgttaaataaattattttgttattttaaataaatcattagttattattcatactaatgatttttttttaaaattaatacatgctagatttatttaattgaccaataacacatgtaaaatcaaatttgttaattttccttttgatgaataaaaatgattatatatgtatatatatatatatatagacataaaaattagtatatgtcaatttgtttacttttttaggttttttattttgtaagagaataaaaaaattaaatctttaatgacatatgtaaacatcttatcgttagacttgccacatgtcatgatctcgtgagttactaactttcaaaaccgtactttatataataagatatattgaaagtacaaaaatgggaaaacatcttattattgatttggaaaataaggaaaacatattattatagatatgagatttcgtcatggccgacgacgacgtgagacaaaaaaaggatggcaatttcatttgagaccctttctatccaaatctccacctaaaacctaagaaattgttctttacattttacactagaatttctattaaattcttgccaaatcattttgtcatacaaaaatacaataacttgaataacacttgcttttaatagaattcagaaatccggaaattgaataacactaaattttaatagaactagatgatcacccgcgctacaccgcggttttttcggattttttttattgtttaatttaaatataatcttttttatctactcattcactcatgcaatgagcaattacttttagtattaaaaatatttttttctaacaacgttctcaacaatgcatcatacacataattcataaacaacgtttgtctttaaccaatttaacaaagggtagtgttggattctaaaaacttaagaatttgatgatggaaatccttacgtattatataaatatcaatttaaaagaatataaatatcaatttaagagaataacttactcaaatcattaagtaatccacgactattaaacactcatactttgagtttggattacgaaaaaaaatcttcgaatatgagaaaactattaaaatagttttattgaaaaatcatgtaatattaaaataaatttagtaatagtacagataaatatataaaataaaataatatgtaaaattaaataagaaatatatcattaacctataaattagaagttgaagagcttacattaattattttaatagacacatggcaaatgctaagtgatgatgtgtcaatcatacggaaagagttagccatgattaataaaatacctcaatgacactagaatttgaattctattaaactctgtcaaattccacggtttaataaccccctttataaaagttgatcaactctgatataaactttttgttatttatataagtgttccatcgaaaataatattttaataaatattcatgaagggtaaaatggtctttaactatttcagtattacgataaccctactaatgtgtaatatatataaatcattgaaaaaccctagcagacctcttttgtgttcttcactctccagcgatcgtttattgcttgaagacggcttcttcttctcacaaacctcatctctgctaatcaaa

SEQ ID NO: 3233 - DNA, 3000 bp, Unknown
  misc_feature (1)..( 3000): cDNA_ID_1819936_gDNA_ID_1620633_Annot_ID_47305 3000 nt of promoter + ATG
atttctggaccaatcggatatccacgggtttactaaaactctacccaataaggaaatttcctaaaattttaacccgccctaacccggttttttggttcgggtattgggttggttatcgggtccgtattttgtcagccctatcaaagataatctaatatatgctccaattaggtccacaaatataaccaaaatactatacaaagactaattctaagttaggccaaaaattagatccactaatacaaaggaaacatgtttcttaccaaaacaacttgtatacaaattttacacatttacttaaaactatatatgttatatttattataaaaataacatttttaaacaaagtcaatccaatgcagcattatatgctaatagtaaaaacattgaaaaatattatgacatcgcttttatactatactatttcttatgtaattgaaacaaagtatacaatttaatttatacaaaatattaatgctcgtgctgtatagcacgggttatgatctagtaacacttcatttccaaaggacaaatcataccattatatccaccttaggatcatggactcatggtgccagatattttgcatcattgccaagcagaatgaaagattttcctccacaagagatttgagtttataaatatttggtgagatttaacaaaaaaaaaaaatatatatatatatatatatatatatatatatatatatatttggtgagataagtcttaacttgctacattcaaagaaactaattaaaccaaaaaccaaacactaaaagaatagtaaatcgtcaatttcatattagatgagctaataaagcatcacagcaataaattttgtctatctccatcacttacaccctttttttgtagataatgtaatttcttcctcaagatctgaagaatcataaatcacatagtttagtcaatgttacaatacacacgactaaaagaaaaattacaaaattttattgatagaatttaaaatataccactagacactagacttttgtcttttcattagtcattaccgcttgatatttttactatcttacgcatgttatgaaagattataaagcttaggttttgggtagcaaaaaagggttaggaaaaagaaaaccatactatttgttatccgaaaatgtcaaactaattcctctaactgtggtaaaaggttataaaatcaaatcctctagattgatgtaagtgatttttaaatcgttattcggtcagatcacaagttaatgatgaacttttcagggttcaatacatggcgattttagccatggatccccaacgggatcatgggattacggtccaactgaccggtttggaccgggtcttaatatattgaacaaaatacaagaaatctctcattcacacgaatgattacatttcagaaaaagaaagaaaaaataactcaaaaaacttcacaccaatttgcatcacactatattacccattatttttctacaattatgtggtccacttttcaaatagttcactctcatcataaaccggccggggtccttcaaagctcatgcagttgtgcgttgtaaagatatattgtattccaacaactaattcttgccaaaacacttttggctaatgtcattttcattgaaaacaaagcattataaataggaatgatttgtcatttctggaatggaagaacttgggttttagttaacatttgtgcctaaccaacctctcgtttatgtactaaagcattgtccttgtgattgtgaataaccaatcgctcatttctgtgttagaacagtattgtttattttctgttatttgaatcatttccaatgagaaatgagttacataacacctttatttataaacacaaagatgcacacaaggagaagcaaaatcaataagaagaaaccactccacgtggcccgtcgtcagagttacataattggtgaacgactaaactcagaagaaacaacatgtaataagaaacacagaagcagaagcaaaagccaagcaacatttattttgtcgacaaaaaagccaagaaacattcaatgttgattttgtctaagtaaccaggtgtacatacattacccttaaccatacccaaaatcgtatgtactacgatatgtgtacgtaacagtatctatctacatttatattttataagacattattaaatgggaaacttatagtggctagtggctgctacttggctagcaattaacatcaataatttaataactcaaatgtgaaacatctcattcttctcctttattacaccaaaccatttctcattctttacttaccggtcaggtcaacaattctaccattccccatctttggttaagtttatcttttcattttaaagaaaatatatatgaatgttcatccaataattccaacttcttaaaattgttaatgaacattttaatcaatatataattttaatatcaattttataaataatagaaatgtgaaaaacgcaatttctttgctccttgtagcagtaacacaagtcaaagcaacatttgttttcatttgtttgtcagttagctattttatctacaataatatgttatgctttctgaacaataaataaatatagcattattagatatattcattctgtattttgatttgtccaattagtatatgacacgtctacaagatacatagatctttcattatttcactttctcatccaacgtctggtgaaccaaccattcaaaaatcaaaagtcaacttttaatgcacttgagttttggtcatgcattcatatacatacatatatacatagaagtcattacatgcattatactttacttatgtcaacatgttgcaaaagcactaagatgatatacgtatacatgcatattgcaaaaatcagtggtcccataccattttaagtcatcatgagcgtatgagagtaaattcttctcacatattaataacaacccttcaaagttataagatttttagagagagagctaccacgttttcgtatctccgggaacg

SEQ ID NO: 3234 - DNA, 3000 bp, Unknown; identical to SEQ ID NO: 3232
  misc_feature (1)..( 3000): cDNA_ID_1024126_gDNA_ID_1620633_Annot_ID_162773 3000 nt of promoter + ATG

SEQ ID NO: 3235 - DNA, 3000 bp, Unknown; identical to SEQ ID NO: 3231
  misc_feature (1)..( 3000): cDNA_ID_1819956_gDNA_ID_1620633_Annot_ID_162765 3000 nt of promoter + ATG

SEQ ID NO: 3236 - DNA, 3000 bp, Unknown; identical to SEQ ID NO: 3230
  misc_feature (1)..( 3000): cDNA_ID_1819960_gDNA_ID_1620633_Annot_ID_162764 3000 nt of promoter + ATG

SEQ ID NO: 3237 - DNA, 3000 bp, Unknown; identical to SEQ ID NO: 3229
  misc_feature (1)..( 3000): cDNA_ID_2158039_gDNA_ID_1620633_Annot_ID_162762 3000 nt of promoter + ATG

SEQ ID NO: 3238 - DNA, 3000 bp, Unknown; identical to SEQ ID NO: 3228
  misc_feature (1)..( 3000): cDNA_ID_3089318_gDNA_ID_1620633_Annot_ID_162761 3000 nt of promoter + ATG

SEQ ID NO: 3239 - DNA, 3000 bp, Unknown; identical to SEQ ID NO: 3227
  misc_feature (1)..( 3000): cDNA_ID_3089325_gDNA_ID_1620633_Annot_ID_162758 3000 nt of promoter + ATG

SEQ ID NO: 3240 - DNA, 3000 bp, Unknown
  misc_feature (1)..( 3000): cDNA_ID_1820040_gDNA_ID_1620634_Annot_ID_47312 3000 nt of promoter + ATG
attctaatgtttttttttttacgtgtaaacgtttacacttttcagggtgtgaagaacaatccgtcccttatgattactcggcaacaatagaggtaagcaatgctctgttcgttcagacattttttttttttttttttttaatgttcattaagacatggtcatttgaaattctgattacattttttgtcttggtgcagtgtctagagaacccttataaaccacagtacaatggagggatcatcgtgaatcctgacttgcaaaatggttcacaaggctggtcacagtttggaaacgccaaagtcgatttcagagaatttggaggcaataagtttgttgttgccacacaaaggaatcaatcttctgacagcatctcgcagaaggtgtacttggaaaaaggaattctctacactttctctggtaaaaacaattttgaatttgtgtttcttgaagcgcactctttataacttcatctgatgtattttatgttatacttgtagcttggttacaagtgagcataggaaaatctcccgtgagcgctgttttcaagaagaatggtgaatataagcatgccggttcggttgttgctgaatccaaatgttggtccatgctgaaaggtggtctcactgttgatgaatctggtcctgctgaactcttcttcgaggtatatctctgtacacaaacatactcattgtctccattgtttgtctacatttctgcattttgcaagctactttatacacctatatatggtgatccattatccctttttcatgtgtagagcgagaacacaatggttgagatttgggttgatagcgtctctttgcaacctttcacacaagaagagtggaactctcaccacgaacagagcattggcaaagtaagaaaaggtaccgtgagaatcagagtcatgaataacaaaggcgagacgatacctaatgcaaccatatccatagaacagaagaaactcggatacccattcgggtgcgcggtagaaaacaacatacttgggaatcaagcataccaaaactggttcactcaaagatttaccgtgacaactttcgggaacgagatgaaatggtacagcacagaaagaataagagggcaagaggattactcgacagctgacgcgatgttaagtttcttcaagagccacgggattgctgtacgtgggcacaatgttttatgggatgatcctaagtaccaacctggatgggtgaattctctgtctggtaacgacctctacaacgctgtgaaacgaagggtttactcggttgtctcgcgatacaaaggacagcttttgggttgggatgttgtgaatgagaatcttcatttctccttctttgagagcaagttcggtcctaaagcctcttataacacctacacaatggcccatgccgtcgatccaaggacaccaatgttcatgaatgaatataatacgttagagcaacctaaggatttaacttctagtccagcaaggtatttgggaaagcttagggagcttcaatctattcgggttgccggaaagattccgttagcgataggtcttgagtctcatttcagcactcctaacattccgtatatgagatcagctcttgatacttttggtgccactggtttgcctatttggctcactgagattgacgttgatgcgcctcccaatgtccgggtaacttaattattctcttatacaagtaggaaaaaaatcatcatttcagaattttcatttccttctctgatgttttgtttttcttgcaggccaactatttcgagcaagttctaagggaaggccatgcacatccgaaagtgaatggaatggtgatgtggacaggttattctccatcaggttgctaccgaatgtgcctcaccgatggaaactttaagaacctacccactggagacgtcgtggacaagcttttacgtgaatggggagggcttcgcagccaaaccacaggtgtcactgatgctaatgggttatttgaagctccactctttcatggtgactatgatctccgtatatcccatcctctcaccaattcaaaggcttcttacaactttacgttgacttccgatgacgactcctcacagaaacaaccatctctatatgtctttcgtgtttgagaagctaagtttacaactactttgtatttgagtagtttgattcttattggcagattagtgtgttttccattataactttgtgtgaggaaactcccatgggatatccatgagcatcgttgggttggtttcttatactttaattaagccgtgatattgtaataaaattatcaatgatattgaacttcctttaactatttcgtcaagtattttgagctcttgaatcattacattttctttattcgagttaattaaaatagtaaaattattcatttttccaaagctaattcatatatcattcatttgtttattgatttttgctattgtggaatatacttgcattatataaaaacaattctataaaatgaagatattaattaatcctttaacaaaaaatatacattgtataaaacatcatttttcctaaaaaaaacacccagggagaacatattagggaaatatttcaatacaaacttgtagttttgaccaatatttactgtcaaaacgcaggaagtttggccaaattcgtagaaaatgtaagattccatcagattttttatgtggtgtacgccggaatatcaatggaaacagccatcttctatataattttacaatataaaataaaatcgtttacaaaagtaataaaaaaagtcaattaaaagataaacaaaataatatttaaggtgatacaaaaaaattatagtgttgcctttttttgttttaactctgaccaaacgtatctgttgactattgactagaatttaagctattgatggcattttctttccatatttggcctccgcgcaaaaaatgagattttcccaagagttaatatgcagatgtaaacggaggttaatatcttctttttttctgaaaacaaatatg

SEQ ID NO: 3241 - DNA, 3000 bp, Unknown
  misc_feature (1)..( 3000): cDNA_ID_1819997_gDNA_ID_1620634_Annot_ID_162821 3000 nt of promoter + ATG
catttatctggttaggttcttgcaagttcttcatctggttttgctgtaaacaggatgaaatatgtaaatctattgctgaatccggtggaatagatacacttcttcggtgtattgatgatagcggtgagcaaggcaacaaaactgctgctaagacatgttgttccctgttgtctaaggtgagtagcttctaatatgccctgcaggctgcctctgttgtcttcattgcctttggttattcaaaatccttctttaaaactcaggctttcaagtattttccgcaccatattaaggagtagcttatgttcatgtgcttctaataaatgcatgttctcaaattttaagcttttccaaagcctattactgatttagattagcattgtaaccacgcatgataaatgtttatctaaaatttgtattttgatctctagttggcaggaagtgactctaacaagagtaccatagttgagaagcaaggtctggacaagctaatcacactcgcactacgattctctgatgatcctctagtcatacaagaggtaagtatataaaccaaacgaaaaccctcttatgacactatgtcccatgcgcaattttaaatcttcctgtctagagaagatacttgtgactacaggtcacgtctttggcagttttccactagatagaacgtaatgtcgtgtgaagaatgtttcttgtagcattagggtctgagtgcataatccttgtggttgatccaagatatacttgattggttcaggtgatgttgataatctctataatctgtctgagatcaccagaccacgcagccaaggctatagaagctggagctggtgatctagcggtccaagcaatgaagaggttcccagtagctgctcaaatgcagagaaacgcttgcaacatgatacggaacattgctgtcagaagtgcagagaacaggtttttgctctgtttccaattcttgtcatccaacaatatgcacatatcgcaaactcttttataatatcaagttctgtctgcatgcacactacagaactattctgcttgctaatggaatcgagaagctgataagaactgctaaagccaacaatgagacatgcagagccgctgcaactgatgcactgagagaccttggccttgataactacaataactaaggtcaatctttctccattggttggtactcgcaacaaccggaatgaatccagttttttttttcaaaaatttcataaacagtttgcattgagttctctcttttgggtagaaggcattccgatctagtcttttttgcaacgattgcttttgttcgaatgcttgaacatgtagtaaaattgaaaggaattgattgaaaatttcggtgaaaggtactctaaatagtaaaaaagtaaatagagaaacagaggcttcacaatgagaaattttcattcattcactaaaatcattcgtttagtcaatgaatttcctttatttagaagaaatcgattttagtttgaaacaaggacaaaatgtttgtttgactaaagggaagagaaacaaagacaaaatgttcacgtccatggaatgatcgagctctagaagagtgtattgggaatattaagtacggatatatgtttttaaaagatgattaaaaaaaaagtttgcagcaaaatcgtcatgtggatgcgcataaacaaaaactttagatagtaaaaatgatgggctatagtgatgatgagtgcaactctatcggtttcagcttttaggtgaagatctgacaagctagccaacaatatctcgacatttgtggtaacttgtttttcttttattttccgtttttaaatgcggaaaccctttttatataccgaaatagaaagtaaatctttttagtggtcattaatacatggaggttcccatgattagccataagcttgtttaatgcgagtatatgtttcatcagctccgtttcaggacatatttaaggggcaaaattaatccagtagccaaaaatgtacatatgtaagggacatattacgatattaatatatagatccactaacagaaaaactaattgttaatttaaattatttctatttcatttttcactgtgtttgattaaattaaattgggatataaaatcaattcaaaatctgttattttaaatctcataccattctagtgctatatttttgaaaacttagatatttttagtaactgttctaggcataaatttaatcaattaatattttcatattttttgctatactatttacaataagacatataataaatcggaaaaaattaatgcataatattatggagagataaaacttactgaaaaataaagagtaacaaatcacatagtttatactaatactttgccaataaaaagaaagtttatactaattaaaatattattttctatactagtcacggtaaaaaaaaacatttctaaaaactacaggccccattgtttgtcagaacgttgtaagtagaaagggtaaatccgtcatttcaaactatctcccatgctttgacaaatcacaattcaacagttcacagaaaaagcgaaaacttcttctatctctctcatctttctgttttgtatagcttacttcaagctgtggtttaaacagaacagagaaagctgtttcctttttatattgacagagaaaaggaaagctgatagagagagagacagagagagagaaacagagttcaagatcacgagccttccttcttcttcttcttcttcatcgagagcgatcaaaggaacaaaaaggatctcaagaaacccacttgtgttgttggttagatacttcacgggtctctgaaaacgtctctttctcacaaccataacttgatcacccaatactccttttctcatcttaaaggctcaaattcatccacgtcacaccgttgttcatttcctctgatgtcttggtgtcgttagatattgtctcccaaaaaagaaatcttcttgacacagagattgaagtcgcaaagagacagaggaaagagggggagaaa

SEQ ID NO: 3242 - DNA, 3000 bp, Unknown
  misc_feature (1)..( 3000): cDNA_ID_3070924_gDNA_ID_1620634_Annot_ID_162804 3000 nt of promoter + ATG
tatatatacactactttttcttaatactttttttcttttagttgtgtgtttaaaacttttattggaccaaccaactagttcacagtatactccaatcgtgatgtaggagacaagtacaccaaagattaacatcatcaatacaaagttacaaactatatgtgatcaccttcatgactataatgctttaaccaattttctcttttgatttctagaatctagacccttcatcgtttggttcaattgttgaatcataagctcgtgaaattctagaaatgttttgactgatcctatagactaaaggtgaaagtgattgtacttaaacaaaaaaattaaaaaaaaaacctctaatattaactagtacttttttttgttgctttgttattaaaaaaatataactctttatttgggaaaaaaatatctgtaaccaaaaaaatatacgaaacaacttaaccgtctgtaacaaattgccgaaccgactaattgaggagcaagggcaaattggtaatttcgtttagatttcccgcttctttcatcatctccaatttctcacttctcgagtgttaacaaattacaatcccagacgaactagatcagaagaaggagagaagaagagaagaggatgaggttcctcggagactacaagttcgctttacttacttgctccgttatcgctctcagcatctacttcgcgattaacgtcgaatttcgtttcgcgtacgattcaccgggaactcgtaccggagttaaggtttccgagaaatctcccttcgacgacgaattcatgtacatgtcaatcgctgaagatatcgatcgatcttacctccactacgattactaccgtgaatcttgccctaccgccgagaaaatcatcgcgaaagctatcagagatatctacaatgtcacacccagcgtagctccgcctattatccgtctcctctttcacgattgcttcatcgaggtcagattttctgatttctggctttccctttcttgtaattttgatttcgctaagctagatctatggaagattgtttgggatcttgtttcgggaatgtttgattgtgatgtctctgtatcggatttgaattcatctctgttagtgtaattatgcttggtcagtagatttttaagtgtgaatctctcaatcttggctacggatatgcagaactcatgtgtttgatactcagatttgatgttattagcatactttgtgaatcaaatacggatatgcacaagttatttgtttgatcctcagatttgctcagtttttaatatcaaattctatgttttctttagcacttcttgtagtttgctcatgatgctatttggggaactgtgtttttgctgcagggatgtgatgcatcagtccttctagacgcagatgaagcacatacttctgagaaagatgcatctccaaacctatccttgaaagggtttgatgtgattgacgccgttaagtctgagctagagaatgtctgtcccggagttgtttcctgtgctgacctacttgtattggcagctagagaagccgtcctagttgtaaatttcccctctctcactctctcttctggtttgtgcatgttaatagtgctgcaacgcttgatcatgtctttgaaactatcaggctggtggtccattctatcccctagaaactggaaggaaggatagtgcagcagcctacagggattttgcagaacacgagcttcctgcaccagacgctactctgtcggtgattcttcaacgtttttctttcagaggattcaacgagagagaaaccgtcagcttattcggtaatttctcacttttagatgtcagcatctctctttgtttagctaaatcttctccgtattggggtatatcacttcttgggagtggctctctttgtgacatgattcttttcttctgaatgatcttaatgcaggagcacacagcattggcatcacgcattgcacattttttaagaaccgcctctacaacttctcagcaaccgggaagcctgatcctgaactcaatccagggttcctccaagaactgaaaacgaaatgccccttctctgtctcgacttcatctccatctgctccccctgacattggtttaccaccgtccttacctgcatcagattccgaaaacagctacggtatgagctcaggaaacaggaatgatgaagtgatcgacttgagctacaacaatgaaggaggtgatgaaaattttggaacacgatacttccgaagactaatgcagaataaagggttgatgtcttctgaccagcaactaatgggtagtgaagtgactgagatgtgggtgagggcatatgcttctgatccgttgttgttccgcagagaatttgctatgtcaatgatgaaactttcaagctataatgtcttgactggtcctctaggacaagtgagaacaagctgctcaaaggccctccccaggaactgatctctcttttaccactttagcggactcctgttgataagatttgattttgttttcgaatatatgtagtaactgaattgaggattttgagtttgatttcagaaggctgataaataagttgagagttcaatccctcattgtgtatgataaccatcaccaatttttctactacattttttggctctgacctcatttatcaaattttgataggaaaatgtcactttggtttgtgccaaaaaagggcaggctctgttatattattgacggcagaaaatggtaggcatgcttaaacgtatgagttagtgttaaattaggtagaaaaatgacaagcttggtatataacgttcaataatataaggaagatgtggcagagttagtgttgagaatgggctagtctacttgtgtttaggcccatatatataaggcccatatatatttgaagaccacaaataactagggtttacaaatttggttatatagctctctctctcgagccgcacatatttcgtcttcttgatctaatcgctttgagctgttagcagagagcagtcgacaatcatg

SEQ ID NO: 3243 - DNA, 3000 bp, Unknown
  misc_feature (1)..( 3000): cDNA_ID_2992361_gDNA_ID_1620634_Annot_ID_162835 3000 nt of promoter + ATG
gtaaacatcaagtttagcatcaacatctggtaatccaactgggcgtacaaaattagatacacatactaaattggcaaaattcttgcagatagcatcccgcttcaggataaggtgcatcaacgttgaacagatgatacttgtgaaaagtctctggagttgaggtggtttgataccatcggaccgttatacttcggtttaagatcagtaatgagacatcttctaactgtgtttcttgaacaagatgctttcaaacggttactgccttggatactcatgcacaagcccttctgaaacactccttgctctagcatgtccgaacagcttgctaacaatagccagggaaaatttggtaacagttgcgagccccaaacttgtaatcacgtttccatctataacaacttcggctccttcgatcatttgttgattcataggctcgtctgactctgaaggatacacagtcgttctcttctcctaaaataggattccaattgtttatggcgtttgtccatgtatatgacaaagaaaagaacaatagttgtcttcaccttaccttgagtaaaccatgtttatgcaaaacggtagatgaagagttggtagctccatatattcgcccagattcatgttgttccctgagcagtttcttgagaattttggacttctgcagacgttctgagccagtatggcctcccttgggaatttccatcaaagaaaagaaatcatattactcaccatggaacaaccaacagttgtagtttgtctaaaagcttttcctaagcgcattgatttgacatggcatataagttatactgaaacatgtacatagcaagatttatttaagaagaagtaaactagcgaaatggtatgagtttattatgagactaggacatgcagggttttgcttaaagccttaccggaagaatgattagatcatatgatgactcagcagcttcaccaatcaatttgtcagtgataattttggtgccttggaatgccgtaatccgcaaagatcgttcaactgatgaaaccgtgacatctactttggctcttctaagaacatctgcaattgagaccagttcaaccgcttcagacccgttggctaccgggataagaacctggatttagatgcatcattaaaacaagtttctcagctttcaaactaaaatgaaatgttcttagaatcagctaactttttcatctttcaaaactaactgagcgtgaaaggagaaggaatggataaaagaaaaaactccataggtatagaagataaaaccaagatcagttctcatcatatatcatgagattacatggaaatgcattgatcatagcttcatgcgacttacacgaggtgtgtggtctaaagaccagtcaatgctattgaactctttgttcttaggattctggtaaccatcacgcagaagctggagaaatgattggaaaagaagactatgagaagattgttgcatatcgagaaggataaagaaaagcatgatccagaaaagtataagtgaataggatatagaccagaaactcttcaattgacttggctgtggtttctccgaagagctgctccgccaaggaaagagcaaactggaaagaagtgccgggtccacggctagttgtaagctcccctgaaatctgaatgtttgtcttaacagcccagaatgtaggaagcttcccgaaaaaagcaggatgtcccgttgtcttgcacgatgaactacaccaagtttagaaatcaaaacatgaagagaaaagattagttactagatgacatcaaagattttgatttataccctctttcttgtcaaaagtccccatggaagaagagtaatagctggagccatggatatagccccgtataaccgcttatcttcagcttgtctcttcatgatcttctcgagaatttcacagtctcttaacctaacagcaccaggcatgcctcccttcacaatttgtatttccagaccatccagaaacaaatacacaaaaccattaaagtaaagctcaaagactgtcctcacttatagtttatgaatcagcaaaagaggaacttaccggcaaagcaactaaatcataaacttgatcagcacatttcgagataagaacatcagcaagcaatctggtccctgaggatccttcaacctctagcttctgctccacagaagcaacagtaacatcagcaccagctcgccgtaaaacatcaactaacacaacagcttctatttcctccgtcccatatccaattggaacaagcacctacatagtttctcagttatctccaatctcaatctctctacacaaacaagctggacaattttagttatagataacaagaaaaaaggagaaacctttttagtagttgcagaagacccgacgccaacatcggaatctagcgttgttaccatacccggagacatggaagatctaagctttaaagttcggtccctccttgttgtccctagtgaagaagaaactacagagactgaagaaaaactaggagcaacagtcatcgagacacaacccatcgaagagataagccttgactccatcaaagttggactcagcgaagctatcattgaaatcgaatatcctaaagaccccattgacgatagctaatgcagcagtctgataatcccgccgctagacggagagtgagttgcgtcttatctactagtatacacttcttgaagaaagctaaaaacgtcgtcgtatcgttgtcttattgcttgattggataaagcttcaattttttcctccaatttttgtcgaaaatgtaacattttttttgctttccactgtgagattgtcacacacgattctctaaagaaatgagacgaattttgaaaacgatttataaaaatagtatttttgtttccttgagcttatctcctcttttctctttggtttgagatatgaattacagacaatcaagtagtcagtcacaacagtgtgtataaatatgtcttttaagtgaaatcggtttcgagagacagtgagacgaaa

SEQ ID NO: 3244 - DNA, 3000 bp, Unknown
  misc_feature (1)..( 3000): cDNA_ID_1008767_gDNA_ID_1620634_Annot_ID_162826 3000 nt of promoter + ATG
tgaatcatatcactagagtgtacgcgtcaaatttatgtaaccatcgtgagaggtttaggatgtgtatattcaagtattacaatgatgttccaaaagtacaagtatgagcacttcttagttctttttgttatgtcaagctatcaagcaagtattacaattatgttgctaagtgtttcagttatgatgtcattatgtattgcggtgaccagttgtatatgtgggcggttggtttgctctttcatgaagttcacaaaatggtagcattactatgactaaagacgaaaagtcgagacgtaacaaaccaaaaatagtcgcagatagaagacatgacaaatatgtctcaaattattaactggagattaagcaaaacgagaaaaatggaacctgtgtgtgtacacagtgcaaaaacttacaactacaaggattatacgatgaggatgtcatgcttaatttatttactagtaatattcccaaaacatggtataaaaaaagttcaaatgatcctttctagaacaatgacgtacaaatatcatggttaaccgttttcaagtcaattgacatgtcttgcaattttatattgaacagatttaagaaagaaaaaaacagggggtacacacacacaaaaaaaaaaaaaaaaaaatcaatatccacaaacaagattacgtgaaatttggtcatgcatgtatacgtacgagtgagtagatatcacatttttaaaggaattagataatgttagctaggtttaacaacattccagaacataggattttaagaaaaacatctttgttaagagattcaaacccaccagaacattgttagtgttagactgcagagaagaaaaaaccagtaatctacttatatacatatacatcatttactctaccccaactagatatatgcattaggatttaggcataggcacatagccccataggattacaaaaaaaataaaaaaatttatatcaatatggctgtattataacaataatgtcgtatgttgtaatagctatcaagagcttatagagttgtatattattcgtaacaatgtacataggaagactttaaggagataggaagactttaaggagaatgatctcgatggacatgtacacatatatgttatacctaaagactaaaatagagaatctagaaaaacataattggctccacatgagattattgatatttattaattggctccacatgagatgattaattattgctaattggttgatgtttgacatgttcaccgaaatgagagaatccgcggttggtgacggtggaggcaatataattatttccaaactttggaaaatcgatctatctttagttttttttcttttctttttcatatagactctgattctactacagaacttgtaaatttttatattatgattatcattcataagaatgtacaaaatttatatagagttcaagaaaggaggatctcaaaaagaaaatctcgatggatttgtacatatctctaaagatggagtctatatgattataaaaagataatacatttcatccaaccattagcaaagtggtctacattaggatatgaagaagtggtctacattagaaaactattattatccgcgagatattttgttttaggttgtaaaaagaaaagggcagatattttcgtttgtaacgaacgaagcggcagatattttgaagcaaccactgtcccacgtcagcaaaatgtctcttagcgcaaatggatatttgcgaaaccaatggctaattttttaattagttgtttattcgaatttatcctatcaacattttatattttagataatgatacttaatttctcttggactaatctcattatccaaattcaaatgatatttaatgaaagttaagtaactgttttattaatatttttttgttgtttttttctctttaattcgagttgacaaaaataatattagagatgttacaaaattatccagataccatggtttgtaccatctgcattggaagaaaatgaggaaaaaaactcataatttgaccataaaaattagcttaacatgtttgcatttcattttcatttttcatattacttgtactttttagttaaatagtggcaattgtgacaaaaatgacacgtgaagtaaactatatcatgttgagaccgcatcttcagactcttcttcattctatccattttataacttaacctacataatttgtgacgagtatattgcgtgcttgaccaactaatgttaaatacattttctcgagaatctcttatgtttgagctgacgaagttgtctcatctccaataattcactgataaggaaggatgtacttaaccttaaaactctgaaatttgtaagcatccatcattctttaataaaatttgttacaaaatccgtatgaagccaatttgatccatcatccatatatatgtatattctagaaaatgtaagaccaaaccctagagaggctcacacgaattctggtctttctttacaaaaaaaaaaaacaaaaaaatattcatgtgatcataccacttgctaaagaggcctcgtgtaaatctgatcttaatttaacttataaaaaatctacaagtcaaaaaaaaaacaacgaaataatgacataaaagacaagaaaccaaaactaccaaaataaaaaagagcatccattatctatatatcatcagaagttgacaaaagaaaagatcatttttatttttatttaacacaacctcccttctccttgagctccaaaaaaaaatatctggctgatatttgtcggagatattattagcgacccagatgacgtggcaatactatgacacgtgtaaaagcgacgccatgtggaccttttgtctctctctttttttccttttcatctccttcttctctcattcctctctctcttaaagctctcttctttggctctttcgaagaagaaccatttttatttcctaagagagacgacgcagttcttttctaaagcaccggagaggaggagaagcaacgatg

SEQ ID NO: 3245 - DNA, 3000 bp, Unknown
  misc_feature (1)..( 3000): cDNA_ID_1820013_gDNA_ID_1620634_Annot_ID_47319 3000 nt of promoter + ATG
ggaggaagaagctagggttagccacagttatcgtcttctgttctctctgtttcctcttcggtttctatggctccactctactttctcaggtgtggaaactctctgatcttttactctgtactctttagatgtgattggagtctttagcttggttttgtgactaatcgagggttctatgtttgggatcagaatgtgcctcgtgttaaacccaggttgagaatgttggatatggttgagaatggggaagaagaagctagctcgatgcctcatggtgttactggagaagaatctattggatcgattccttttcaggtctgattttgttgctaattttttgacttttaagatgtttggattggcaaattaggtgaaatcgattagttagggcaagattgtgcatttgattatctaattgaactttgtttttttgttcatgtgtggtgaccatgagtgtgagtgagagtattgtgttttttagcaattagtcaactagtgaaatttagtacttcatctttatggattatttggtttaaaattggcaggtacttagttggagacctagggctatatattttccgaattttgcaactgcagaacaatgccaagctattattgagagagcaaaggttaatctgaaaccttctgctttggctctccggaaaggagaaactgctgagaacactaagggcactagaacaaggtctttctttctttctagtttcatgtttcgaacattcatcagtagcctcagtgtttttgcctggtgtgttgttgttatacagctcaggaacttttatcagtgcttcagaagagagtactggtgctctggattttgttgaaaggaaaatcgcaagagctacgatgatcccaaggtcccatggagaggtatgattctctacttcccaaatctatgtgaatcgtaaaactaaggcatgttgaaagtggcaaacgtaggcttgatggcctttggtttagtgcttatcacccctttaattgtacgagatttgatgtttttggcagtcattcaatattttacggtatgaacttggccaaaagtatgattcccactatgatgttttcaacccaacagaatatggaccacaatcaagccaaagggtaaaatccttaaatctgtcatatttatagctttctttagaacccgagacctcatttgaatttacgcagattgcctccttcctgttgtacttatctgatgttgaagaaggcggtgaaaccatgttcccatttgaggtcagtttataatatattatttgcttacttattatacagaccctttcgttagttttgattccatttaaacgctttctatttaacagaacggttctaatatgggcatcggatacgattacaagcaatgtattgggttgaaagtaaagcctcggaaaggagatggtcttcttttttattccgtgtttccaaatggaacgattgatcaggtaaacaaagtttgaacacatttcatttcttctcttgactcctattccttggattagttcatgctaataggagctctttgctgtggttccaatgcttctgcagacttcgcttcacgggagctgcccggtgaccaaaggagagaaatgggtggcaaccaaatggatcagagaccaagaccaggaagaataagttaggtttttttccatatatctatctcagtctcacagcttctatcttttgactaaaaatctgctgctggatccctcgtgtacagttcttcgctgaaacagtgtaactatttagctttcttataatgcgaatgatacaaaaattaaaacctgataatgaaaacttggttcgaaatatcatttgaacaatagaagtttcttgttgtttgatatttcagtaaaagaaatataagaacttataagattaacacagaagtgatgacaagtgtggatcgatttgggtgttctgattacttggtattgagtatttactgctcgtttgagtccgtcaagtctcttgttaatttgcaatgtgtactaattttttcccttataacttaacaaaatgtgttgtatgattgtatttgtatctattaaatggaaaattattttgtccatgttatatatataaaaaatgtatctgagcttacacaccagggaccatctttttattcgagtttttgtggacacatgagtcatgagtgataccgataataatttttgtttttttttgtgtgtgtgacatcatctacgtttagtttggtttagaatcttcgaaaaattgccgacagaaaataagagaatcttctcttccaatgatctacgttctttttgactaaatatataaaaataaaagagttcataaaaagtggctaaaagtcggaacttgggacacgaacgcaacacgtggcttctactaaaggttagcgtcactgaattaagttttacgtgtcagaagtgatgacgtcgacactaaccaatgtgaacaggacgtgtaaacaaccctagaacactacagaacagaaacagtttggggatgtttggtttttgaaccgtccacctttgacggtcacgcgctcttcagccttcaggcactctttcctccgcctaacatagaaattggaaaggttattttctccaataatttggcttggcttttgagtttattgagtgattagctaataataaataataatcaatttgttggcttatatataatcaatgtgctaagtaacactatagctttcacaaaaacttcggttattaggaaagatctcgacaattctgtatctagaaaaggcatgattaattaatttattaagaacaaaactaatttatgaagaacgattgcaatggtacgagacgcgagtagaaaaacctttatactcgcgaaatatacaaattgtgtgtttcattatttattggcatttaaactttttaaaaaaacagagctctgtttcttcttctccaccgccgttatatataaaacccttccctgaacccccaaaactctcggagccatcacacgacaatg

SEQ ID NO: 3246 - DNA, 3000 bp, Unknown
  misc_feature (1)..( 3000): cDNA_ID_1820001_gDNA_ID_1620634_Annot_ID_47323 3000 nt of promoter + ATG
gcctaaattttggaaaatatgcatgacagacattcgaaacttcagatccaaatcaaaccgaaattgaaatttgtcaaatatctaaaccgaattgaacacgagcggtttttgagaatatgaaattgggcagagcaattcaaactcaaaaattcaacaattccagaagaactttctcagaaaagtttcgacggaagaaaaagcaaaacgatgaacgtcactcttttggtcgcagacgccgtttggtcgaacattgaatcaaccggttcaggtacttcaccattttactacttctctctttccttttccttgtttacgacattttattccgttgaattttccatctttttctgcagtaaccgaagaacagctctcaatgtcagttctctcttatacatagctgggattctttatttttcccgaaaatatttattgatttttcttcagtcgtttggtatgattagggtttatcgatttaattttgcaaatacagcttgcagctgttgtttggtaagaatcttgagaaagccaccagaataatcgacaagagaggcgtcaagaaaatatctggcttacccagtggaagatccatctttcaggtttcaacagttctctctggttaataaaagcaatcatatttgattatctaagaagatttgtttttttgtttgggttttcaggttgtgggggaatctcagaagagagaagagtatctctgcttcccaggagattactgtggatgttattctttcttctatgatgttgtaagcagaggagagcaccaatgtgtaagattcttaatcagaatgcttccttttctgtttagagattttgtatcaatgttactgacttgttatattctacttttctcttttggctagtgtaaacatcaattggctgcgaggttggcttcttctttgggtacatacaacgaaatcgaggtttctgatgaccatcttgccttgatgctctcaaagatctgaagctttcaatacaactacatgtcttaggcttataagtgccagtaacctgggaatgatctgtgtctttgagaattatatggatcaagattcttcacatgtttgatgaacaatgttgcttcaccttttatgtttaacttgctgtatataagtcttgaactgctatattttcaacttcttaattcagtggaagaaaactatgaactttgtaaaagtagtattcatgcataaaacttttagtgactcgtatacaaagattaattaatcaaaaaagcgtagaatggaaacaaactcaatgatcaaagaaaggaacaagtggatttagagttagtgtgaagaagggcggggaatggggtggacagagaatttcatgttgtggttgcattcgttgtggtctccactggcgaagtagtaagtctgaaccttacggagaagcaacttgaagcctcttgatgatgaacctcctcgtgcaaccagcttcttgcctctggccacattgcatctcttgaagctcttcatgtctgggagcaagtagacgtcgttcttcttcttgttacggtgcttcgtcttggattgggtttgatcatcgttgttgtacttgaaaacaagaacatcgctgacgtagaatggggcatgctttgctgtccattctgtgtaaccgtatccgtttttccatacagtaaccgcaatctttcttccagccggtattggagccgtgtggttgtgtgtagagccagtgatgctggagtggtttgagccagagctgtgattgttgtgtgtagaaccaacgatgcttgagtgatttgagccagagctgtgattcttgtgtgtagaaccaagtatgcttgagtggtttgagccagagctgtgattgttatgtgtagagccagtgctgcttgagtggtttgagccagtgctgcttgagtggtttgagccagagctgtaaccgttgtgtctagagccattgccgcttgaatggttcgagccagtagaggtgtgaccgttgtgtgtagagccagtggcacttgaatgattcgagccagagctgtgaccgttgtgtgtagaaccagtgccgcttgaatggtttgagccagagctgcttccccaaccccagtttgtatctgttccgtcggagctccatccccaaccccagcttgaaccacccgagttggagtctgaaccacctgaacccgagccagaagaaccgccagagttgccggatctccatccccaacccccgttcgaaccggactggccagaaccccaactccagctccatgcttcagcactcccggagaacacgaacgcagtaaccatgaggacgacgagtaacttacgtccacaataaagaaccatcatcgtgtcttcttcttcgttttttttctctctcttttttttttatggcttttgtgagctcttcagagtttagagtttcggtatttatagagtaatgagagtcggttcccattatttagtgaatataattttatttgtttttttagtaacagtaataggatttttttctttttcttggatcaaatagtaataggattttaaaagtggataaatctagctttagttattattgtttgaattttgatgagtcttttttttttttttttttgcatatacgattaacattgcttaaggatattgtatatatctttaacacacaaaaaaaaagatatagtatacatagttttgtttgatattctttttattttcgcacaaaaaaaaaaaaaaaatcttatttatactataatgaatctaaacatctgtccacctttaatccaagtacctctcccaactactgcgactaaatgacccatttgcctaaatgtagtcctttaccttactgaaaatagcgaggacaaatcagtcattcaccgccctaaaacacgctttgacatgtatttatccatttactgttattttatctgtaagaaatccaaataaactcatttctgtaaattaggaaacttctgagaaagtgacgaaagcgaagaaggtttcggaagtaaat

SEQ ID NO: 3247 - DNA, 3000 bp, Unknown; identical to SEQ ID NO: 3241
  misc_feature (1)..( 3000): cDNA_ID_1819997_gDNA_ID_1620634_Annot_ID_47324 3000 nt of promoter + ATG

SEQ ID NO: 3248 - DNA, 3000 bp, Unknown; identical to SEQ ID NO: 3240
  misc_feature (1)..( 3000): cDNA_ID_1820040_gDNA_ID_1620634_Annot_ID_162801 3000 nt of promoter + ATG

SEQ ID NO: 3249 - DNA, 3000 bp, Unknown; identical to SEQ ID NO: 3243
  misc_feature (1)..( 3000): cDNA_ID_2992361_gDNA_ID_1620634_Annot_ID_47332 3000 nt of promoter + ATG

SEQ ID NO: 3250 - DNA, 3000 bp, Unknown
  misc_feature (1)..( 3000): cDNA_ID_1820382_gDNA_ID_1620635_Annot_ID_47338 3000 nt of promoter + ATG
aacaaatatttatgaacgtggtgacaaaataaaaactattatttttttgtttgttgctattccaccataatgaatacatagtaccatcaatggaagtataagactatactccatggagtagaaaaaggaaaaattcaaggctctttggcttcttctttcttctctgcacttgaatcaggttctcattgtttatacactaaaaaaaccttttttgcttactcggtgttgaaaaactgcttctctgtttttaactttggaaagaaaaaagtagaagcttttctcagaatgggttggtcgttgagaatgtggattgtgagtatactcgtgcttacacagctcgttaatggagctctctgttggggagacgctggtcattacgctgtctgcaaaatagctcaggttaaaatttccttaacttactttctaaagcgtagctctaaatttatcttagtaaatgatctatgtgagtatagatctgagagatttcgtacttgagtgagtgttgtaagatacttgaatatcaatttaatactctattgttaagactgagaggaaaaaagggaggctttttgttttgttttgttttactgtttcattgaatctactaaaaactcttctttggacctttgtgtgatatcttgattaataccatttttcaatctttagagttattttgaggaagatactgtagttgctgtgaagaaacttctgcctgaatctgcaaatggtgagctagcagctgtttgctcatggcctgatgaaatcaaaaagctcccgcaatggcgatggactagtgctttgcattttgctgatacgcctgattacaaatgcaactatgagtactctcgtgggtcttttattgatcttttctttcaaatttcactcatgtttctgtttgacgttggtataaaagtatatgtgctttgttgtctttctgtgaaggggactgtcctaaagactggtgtgtgacaggggcaatcttcaattacactaaccaactaatgtctacttctgaaaactcacagagtatagtccactgtgagttagagttctagtgaattctgatacttttgtgtgtgagttatatgaagcatcataatagtgtgacttggtgtttttttttgctttgcagataacttaacagaggctctcatgttcttatcacattatatgggagatatccatcaggttaattgatccctttttgcaagtttagactaatcatattagacaccaagtgatgttctgaattatatgcatttgagactactctgattattgcagctgagattaatgtataggaaacaacataatatatatgcctaatccttattgtggatttggatgttttcacagcctttacatgaaggttttattggagatctaggtggtaacaagataaaagttcactggtacaatcaggaaactaatttgcaccgtgtaagcgttttgttgtcgattatattgatgctaaaacgttaaatttcttctgattgtcttgaaagatctaaactttggaagttaccaagataaagaaaatgttttcttcaatagttctagtaatccaacttgtcaatccctttgaatatgaaggtgtgggatgatatgataattgagtctgctctagaaacatactacaattcaagccttccacgcatgattcatgaacttcaagccaaactcaaggtacaatcttactttctttaatcagcttcagcaagttatagtcatatccaagataaaactctactcacatttgtaactgccatcttcatatagaacggctggtcaaacgatgtaccttcatgggagtcatgtcaacttaaccaaacggcctgcccaaatccgtaagcatacataaattgctcatataaattttcctttccattgattttaattgcaagatttcgcggttgaagatctgtaaaagttgctgatcattaacagagtaaaatggttttagttatcatatcttttttcttatatatcactattgttgattctgtatgttcttgttgtgttaaggtatgcttctgaaagcattgatcttgcctgcaagtatgcttacaggaacgccaccgcagggactactttaggaggtatacttactctctgaggtttacaagatcaatagtcactctgaaacaaaatcttctttagctttctaatatgcaacaatgctttaaagttctttttctctcatatgtctttctacagattactatttcgtctctcggttaccggtggtagagaagagacttgcacaaggcggaattcgcttggcagggactcttaaccgaatattttctgcaaaacggaagcttgctagagcatgaaaaaagatccaggagaatcacttgaacatccatgaacactcttatgtattaataatgtgtaatggtagtagttaaggttatggtttggtattgttcctgcgttttaactataataagtatgaaacgaaaactgtacgtctacaagaaaacatagcatttgacttgaaaaatcaaacttaactaaaccaaaaccaagatgtttgaatttgaatcgaaaaatgaactaaaactagcataaaatcttacttgttttatcattcataaacctgaaaaaaatagaacctaagtgaaactatagtttgagtgcaaaaacaaaaatctgatcattcaaatcgaaaaaccgtaagccaaaaaattcgcatcaagaaaaacacatttcaatgaaattacaaagtttgatcacgattcatgatgatagatatcttggagtctgacatccaaaagaagagaaggaaacagagccaaggtcaacttgccggacaccagaatcagttaattagattcattggtaaaaaaacccggcaagtcatccttggctcaacctcattctctattcttccatgcaagaccctctgatacaactagagactctcatcatcgtaatcatcattatcatgttttctctacctttcttttcttgtcttgtgatcttgtcatactcgtg

SEQ ID NO: 3251 - DNA, 3000 bp, Unknown
  misc_feature (1)..( 3000): cDNA_ID_1820101_gDNA_ID_1620635_Annot_ID_47341 3000 nt of promoter + ATG
tcaattgcagggagaggtgtagtagcagtcatcttagccaaaaagcctgatgatcgtcctgccccagacaattcttacattttcacagattatgagattggaactcacattttacaatacatacgtactaccaggtctctctatcttgatgccaaaacactctgttacatacttatataagttcatatacatttctggaatatatacattattgatccgtcaaaccaacagatctcccactgtgagaattagtgcggccacaacactaaccggccagcctgcaacgcctaaggttgctgcattctcatctagagggcctaactcggtttcaccagccattctcaaggttataaagcctcttatctatatttactttaaaagttgaatcctttttgtgtaaacttgttagagtatgcacatagttggtactcatagagtatcatcaacaattttttattattaattttaatgcttgtttattgtttgagattttttatgatactcataataatctctttccagtggtaagaccagtattggtatcatcaaaaaacaaaatttatttgtaaaatcgaaattacatgctagcatcggctactggagcgatagtcgagagcaaataatttttttttctctcattttccacaaaaacgcgttttttcgactaattacaagccgccacgtcattagagactggtatcagaaattatcactccagtgatacttctcaagtccaaatcagttgctttgtctattaatttaatatttttaggcttatgatacccacaaaaaatctcctatgtacatggtcttatatatctggtcatgtttttactttgtagcctgatatagcagcaccgggtgttagcatactcgcggcagtgagtccgcttgatcctggtgcgttcaacggatttaaacttcattcagggacatcgatgtcgactcctgttgtttctggaatcatagttctcctaaaatctctacaccctaagtggtctcctgctgcaatgagatcagctttggtcacaacaggttcttgcttcttcttattcttctttttcataaacaaaccatcacgaaccaatcgatctgtttcttttgtagcttggagaacaagtccatctggagaacccatttttgctcaaggatcaaacaagaagcttgcagatccatttgactatggaggaggacttgtaaaccctgaaaaagctgctaaaccaggacttgtctacgatatggggatcaaagattacatcaattatatgtgttctgcgggttacaacgactcctcaatctctcgtgtgctcggtaaaaagactaaatgcccaattcctaagccatcaatgcttgatatcaacttaccttcaatcacaattccaaatcttgagaaagaagtcacactcacaagaactgtaaccaatgttggacccatcaagtcagtctatagagccgtgatcgagtctcctctgggtataactctcaccgtgaacccgaccatactcgtgtttaagtctgcagcaaagagagtactcactttctcggttaaggctaaaacgagtcataaagtcaacagtggctacttctttggaagcttaacatggactgatggtgttcatgatgttacaatccctgtctcagtgaagacaacgatttcgatgtaataaaaagagccatatatatgatgctcattgtgtttgttcttatgtaactactcttgcaactctaagttcaaagtgtcaaatcaagattcaagatcatcatcataataaaatatcaaatcacaaacttagaatctcttacacaaacatacaaatagagataacagtaatctttcctcatctattcatcacaaccatatattatccatataataaaaactactaaaaccgaatcgagacaaaaggatcctcatgatctcataatctatagctataacataacatagcaaatatataatcatcataatgactatatattattaagatcaagaatcaagatgtgatcttaattatatcttaacaataagcaatacactccttcttacaatccatagtgaaagtcttaaaaggcttaacaatgattaatgtttgccattttaatctcccttgaccgagttttttcatgttgagtctatatactttaataactaatttatagccaaattaacataatgtggcgaatcatgtaatgtacgtgaaaacgtaattctgttttaagcaaaatttgcacatatacattacgattgtttgatttatcatataatttttgattctgtattttgttaaatagttagttatatattaagcaaagattgcacacattacgattctttgattgccatataattagtttcatcgtactacctttggaatattccactatctatcaaagagattcaactatccgtggtcaccattttataatctataaagtataaagtgtgtaaaaaaaacaaattcaaaacgatatacacattaaaaaaaaatccggaattggtttgctgtcctgtgatcctatatttcggtgtagagtcttctatatttcaaaagttcagaatataatcattctatactaaattgagtaattcagtcaatcatgatctaccaacttcttaattacagttacctaacctactcatttagttagaaattattgatatcctcttatagtcttatactcatttgaattataattaggtaatatatataattaggtacactattcgtatatctataataagaaagacgacaattgtaagagttaaaactgagccaaaaagttatggtgggaatatcagtaacgctacacgagagataaaaccggtctgattcggaattaccataataagttgaataaaccaataattgaatccgaaccaaattcgaatctaaccccaaattttattgcttaagacgaattatttactatttatatgtatataaaaaagcttctataccacacagtcacacatgcacacacttctcacttcagacaatg

SEQ ID NO: 3252 - DNA, 3000 bp, Unknown
  misc_feature (1)..( 3000): cDNA_ID_3074273_gDNA_ID_1620635_Annot_ID_162875 3000 nt of promoter + ATG
ttgtatagtttgattgattgtttctgtagtttatttctgggtttagttagttgtgttgcaatttctgaccttttgtttgaaatgggattatgattggtaggttcaactgataaggatccaaatgagagtgcctgagtatggttggactactcagaaggtgtttcatcttatgaactttgtcgtcaatggaggtgattattgtgtgtttctattgaccaattgatagggtttttgtgtttgtcagcacctttgggattatgttttgttgaatttctctgttgtgtgtgtgcagttcgtgcggttctgtttggatttcacatgcaagtatttcttgttcatcccaaggtgagagtgttctcaacttagttctggtttttgcatgtttgatttggaaatggtggattttgaaagctgcatctttttaagtatctaatgtttctgtgaggtaatgcaggctctttgctgggtactattggatcttcctggccttctctttttctcggcatacacgctgcttgtgctgttctgggcagagatatatcaccaggtacctaaaaagaaatttttgatgtgtgttgactgtcttttaaacctgccaacaagctctgagtatatattttgttgccactaatgagcaggctagaagcttacctacagataagctgcggataacctatatttctgtcaacgtggctgtatatttggctcaggttcatatctgatttttagcttcttttttttttaattcccgtttatgttgtagttgctgagtttcctgagatccatttatatacatcttttgcaattattggtgtttcgaaactgtagattgtgcgtgtttcctaccttgtccttctttcattaactctgtaaccattctttgctaccaagaatctgtgtgaccttagtcactagacattttaggtgaatcaaaagatgtagaataagtttgacatgtatttgatgtctctatcagattggtatctgggcatacatctgggtacatgataacagcactgtggagttagttggaaagatatttatcgcaggtaggttctttgtctggtcaagcaagtttgctaaaacctttactgcttaatctataatattccctctcttatctaaaatctatattgacctattcttttggttaatcttcttcttctagttgtgtctttcatcgccgcattaggcttcttgctgtatggaggaaggtctgtgtttttgttattttcatatgtctcatcatcaaaatgtctgcaagttcttcattggctttactgggccgtcttttcttatgtgtttttttttatgccatagattgtttttcatgctaagaaggttccctatcgagtcaaaaggaagaaggaagaaactccacgaggtacttagattcatatatctgtatgtgaataatttgtcttatatagttccataaaactttgaacccaaacatttctaccttcaaatattcgtctcttttcattgcaggttggatctgtgacagctatatgcttcacctgcttcctcataagatgcgttgtggtaagctcaaaattaaatctttagcttccgtcattgttttagttatcctgtgatgtgttatttaatgtattccatgcaaacatcaggtggctgtatcagcttttgacaaggatttaacacttgatgttcttgatcatccggttctgaacttaatctactatatggtaagtaacactacatcttcattctttctctttcttattctcattcattaactcgaaaaaaaaaaaactacaggtggtagaagtacttccatcggcactagtcctcttcattctccgaaagctacctccaaagagagtatcagctcaataccatccgatccagtagaaacctttgtcactgaaccatctcacacggtgagtatgatgctgtttaagagaagagtaaagattaaaaaaaaaattggggcaaaaaatgaaaggtgaagaagaaatcggtgtggaatctgcgtgagtttttggaatgcacgttcatataaatgattttacagcttttagttgttgtagcccgccgtgacttttggtttggtagtttatgtctgttaaaattataaattgctcttctgctactttgaaaaatctggtcagtagtacaagaggtttaacatttgttgcgtcgatggttgattgttatgttatgtttggtaaaaaataaacgaatgctcttctccagtttcctttatgcttttgtcaactgttacatcttcttctcctaatgatttgtatatacttaagcttttccataaaactaagtcccagtgaagaaagaaactacgtaaaccgagaaaaccaagcaaaaagagggtttacacaacataaaatgattaaattgagaatcatttgcattacctcggtattacatgggctggaaataacttattgggccttggacctgattttccaaaaatggtcgctcacattaatatttatatgtgattttacagtgacaactccacaaatcagccctaactctgtttttgttttcttcgacgactgaggtcttttctctctcgctctcgtcttcctcttgattctcttcttcttttctggagtttcgctgcttttttagcctgtaaaaatgacgaaaattttgtatgaatttgtgtgctgatatgctcgaatccacatgttacgcttgtgttgaataatcatatcatttggttatcgaatcaattctagttccaatttacaaaaatctatcaaactctttacgttttctggagtatgttgagcttgaaactagtgacatagatgaaacattaaaaaaacatggaattgttaagtttgtgaaaattggattcgtctttgtgattctttattctttgtctttgctgtgatatataaagattttgtatagaacaacaatttgggagatggagacactgaaattgctgtatttgggattattggcagataaaagattcatacaagaaaaaagcaaatttcgccactg

SEQ ID NO: 3253 - DNA, 3000 bp, Unknown
  misc_feature (1)..( 3000): cDNA_ID_2156487_gDNA_ID_1620635_Annot_ID_47343 3000 nt of promoter + ATG
tattctccttagtaattgcatattgtgctacgaggtagataccacaaaatacaaagtaaaagcgtcctattgaatatttagagatcatacaatttggtgatagagtatgacggttgtattttatcattatcttaggaggagccaattgataagagcaagcactggggtgatttagaggaagaggaagaagaagaggaggaggaagaagaggaacaagaagaggagatggatgaagaggaactagaagacggcactgaatctgttgatacactgtcaaggtattgttatcattatgcatttatgaggtgtatactatttatttgtttccttatcagtataatctaagtataaagctgatttgtgattttccccttctttcagcactcctactggtatagagacaccggatgcaattgaacttcgtaaggatcagagaaaggaacctgatagggctctataccaggtttgaaacctaattttgatgatcttacacgccttgtaggcttttctattagtttgatataaaccaataattcactgtttctggtcgttaatgcctttttttttttgacttgtgaaggtactcgaggaaaagggagagagtgttgctcctggaacattgctgggaacctcacacacatacgttattaagactggtactcaagaaaagacgggagccaaaagggtaagcagtctgttgttacatgctcagagatttgttgttttgcttgatgacaagtgggctaacgtatgcaattgtgtcaaattgagcaggttgatttgctgagagggcagaagacagacagagtggatgtcagcttacagccagaagagctggatgctatggaaaatgttttacctgccaagtatgaggaggcaagagaagaggagaaattgcgcaataagccagtggacttgagtgacatggtcgtcgaggtaatgactttctttatatttatatctctatttttttcaacactattgatatgaatgcggatgaataatcaaacgtttacttggtggaatgtttaacagcatgtgcagcagaatagtaggaagaggaaaatgcatgacaaggaagggaagaagaagaaagatttcaaattctgaggtgttctggaagagacacggaaaaggattctggattctggacatgagagagatagggagagattcttgttccagagttattagtctttgagtcagagatcttgagttttagtcttaatgcttatgagattctatactatgttgttatctgaaggcttaagtaaaactttgtttttggaatttgaacaaattcaaagcctgagacttggaacaaaaaaagtggggaaaaaaggctttgttttgtaagcgacgtcttgtttttcaaattgtccgagtactttcagcgtttatggtttttaaaagattgatcattcggtctacagaataaaccgtcgatgtgatctatttcagtgcaccttgttatctttaagcgaggcaaaaatatgtacattttcacgacattcgctcctgaaaccaaattatgttcatatgttactgtcatatgcatagtgtgaactaattcataggcatgatccttgggttgttcaatccctgcatgtgatgaaaaaaacttaacatactgtggattttttcaatgatgtattctattacttttccaatattaggcgacaaatgattcgaccacacctcattccgggagagtaatgaaacagcgacaaatggccaattatgccactcattgtcctaccgggctaccaccattcttcacctttctttcaacattatcatgagcatgatgactcgtagagtcgtagggttcctaaatcgcctttcttcacctttctttcaacattatctatttatcttcttttcaaatctcgcttattaatcattatacataggcctctacatggtagacacatttagaaacaacaagaagtctctccaaatatgaatggttattcagcctacaagcgatgtcagaatttttttaacacgtagttaaaagtttaactttgctagacaaatgaaatctaagattaatataaacataagaaagtatatatgcttgaaatgagacaaatttagctttaccacttaaaggttttaagctaagtggattccgcttctacaatgattaatgtttgtcattttggtttctgtttacaatgagtttcacatacatactaattaaactactaagtactagccattataaaacatgctgaaaaacgagtcacatatggttcatcgtaccataacacctttggattcccactactaaagagattcaactatgggtggtcactatctattttatctataaagtgtgaaatcctatttttcattcaaatcttaataattataacaaaagtaccattacgagaggattggttttagtttggtaagttttttttgaaccaaccaaaattgaatacaatgtacttcagtgataaaaccaaatattaacccgaaagaaaaactgaaacaaagtgagattgttttgagtttgacactactctcaattattaaaccgaaccaaaccaaatccgagccgaaattcgaatttaacccaaaagttcatcccaaatggtggtggagtcatgaaacgtgaattgaaagatgaataatagatgaattatttactatatatacaaccatagaggcttctatgccaccacacacttctcacttaagaaaatgaataactctttacaaagttctaaacttgtgcttctattggctattgctttggtcctatttcttaacacggagctggattttcttacagctgctggagccttagacagtgatagcaaagtattcaactaaaaatacctttctctatttgcaaaaatctctaagagttaacggattttaaattttgttggtactcttgtttcgcggattttataggtttatatagtgtatcttggcgaaagagaacacgatgatcctgaacttgtcacagcttctcatcaccagatg

SEQ ID NO: 3254 - DNA, 3000 bp, Unknown
  misc_feature (1)..( 3000): cDNA_ID_1820089_gDNA_ID_1620635_Annot_ID_47344 3000 nt of promoter + ATG
tgtgtgtaaatataggaatgcagattcagccacaagaattcagaaaaatctaggtgctccagaaaggagcaaatgaaaaataaaaggttataccacaagtattcaaggaaatccaccacacagcacaccaccacttattgtcttttaaatgtgtagtaagcactaaacatatatgtatacggggaacagaaactaacagacatatactgattcaagacttgcataccattgggttaatgcgagtcagaataatattcttctcttgcaaccttatcagagggcgaacaagaggctgatggttgtcagacaaggcaggaacaatttcagattgcacctttatcacctccccgttttcaacaacctggtcactttcaatatattgcttcaatagatttttgtcatcttgataacgcttcatctcagccactataacggcaaggcgttgagggtccatctcgttgtttattctccgctgaaacccgtcaatcttatcctcaaatgagcgcatggtattcgccactacaagggtttcatcaagatcaaagacaatacccagacatctaagattcaacataacaagacaggaatcgtaaattccaggagcaacactaaatgcccagaaacaaggacggtcattcttgatattttccgagtacatagcaaccaaatggagctcttctccacccaagagcattactgctgtctgcaagaagcaaaaatccaaaactcacaaatatgaggacaatttgtaacataacaaacaacacaagattcaaacccccactctactaaaagtttctaaagccccaaacttgatgcagctctgacattaaggaagttaaataatgacacaaaatcctatttatcattaagtgtttttgagttttagttgataaaatctaagtctgagtaaggcttaaaggttcgtaaggtttagataccttgttgtccctgagacaggacgagtagaataaactgagtgactcctgagctggagaaggtgaagcttctaatttgaaacaaaggccacaagatgaaattgtagtaagtattgcaagaggaggacacctctcgccagattgagaaaagtggcttattctgattcccatcttggctagctccattacttccctctgtttcttcttcctctgcttcatcacatcatcttgttgctgattcaattcccttgaagggtatatctccaattctccaagtcttccatcaccatgaaacacttctactctattattactatacatactttcttttctccttctccttcttaaagtttacagatcaatggatgtctattgtctcatctcaaaattggttcatcaaaatctaaactttttgttgtcccttggccagaattgatagattgatcaccagtccacactagtttatgaattggatccgagtttttttctttagcaagaatcaggaaaacaaaaggaagatttttgataaatgggtaaataagagaaagaatgaaaatttagtgtttgttccttaagattttgttccctttgaatatagatctgtaaaataccgatgatgaatccacaaaaaaaaaccctagtttctttcttcttccttggttgatgatgagtttgtttgtgtatctgggaaaagtttattaggttttgtggcgttctaaaaatcgagagaaaccctagatccagataacgaagagtcaagattgtgaatacggcattatgcctttgtccttggtttttttaagggaaaacaaaacacgaagggccccttcattttctttaaccgttcttttttttatttatgtcttattttaaaaacaattaatactatttttaaaaattaataaaagcctgaaatagtttttatcagctcaaaacctgtcaaattctgtttttttttcgattcataccgtacttgtaatgtacttttatacttgtgtttctgatctcatgttttgatttttacagtgtcaaggattcatataccacaagatatttatagttcatctaattctttttttttagaagattatttattcaaaagacatgatatttttgacatatacttgtctctttatttgtgaaatattttttatctaccaagcatgaatattttttcacatatatctttcccctactcttttcaatcttttccttataaaataatagtttagtaaataaaaaatgatttattttgttttctaaaatacacaactacgtaaagataatttttttttatagacagtatttttttccttgtttaaaaataaccgttacgtacaaaagccgttacaaaattctttcctaatgtcttttttttccgtgttctttcctaatgtcttatgaaaacaattttgaaactaaaaaggcacaatgtatattgttctaattgcataataaacaaccgataacatacaccgggagtcgtgctcacattaataaaatctcaaagtgaataaaaattacctcaattcatgtaaaaactaaatttttacgaataataaactaaaacatttaaattttattaaaagttttgttgttagtcagagaattttatttaaatctcaaatacccacatatatacaattttgatacttataactttcttcaaaatttcaagacattgtgtaaactgtaattttataattttaaaagttcaatagaacatttttacgaataatgtagagttaactcgtgccaacatttatagtagtgtttgaatattgttccatacatttcctttgaaattttctattagttactagtagatggtcttctacaaaacaattcttacactcgaagaaaaatataaagtgttgggcctattggcagatatattcgtcttctacttatatgggccttatgccaaaccggaaatagaatcagagagaatttcagcaaaccgactcttgttcatatacgtatatcctcgatttccgtcgttcttccttctcctctcaatctctcttttcacatcaccgattcagagagaacaccgaatatg

SEQ ID NO: 3255 - DNA, 3000 bp, Unknown
  misc_feature (1)..( 3000): cDNA_ID_1820085_gDNA_ID_1620635_Annot_ID_47345 3000 nt of promoter + ATG
tacagtttcagaaagggaatatcccaaactgattcattaaacagtttactccaaaacctaagcaccacagatttcatatatagacagaaaaaaaaaattaagagtcctctccggttacacctacaagtccaggctccatggttatcacagatgttctcctgcaagaagcatatataggtataaggaaacttaattgacatggttatcacagacgtttctatccctcttgatataattcccctatgtaccagtaccacacccacaaatcacagaaacatatagttaactacagtacattactagaattatcacaaacctgcaaatattttctcttctgcgaccaatgtcttggaacaggaactgtattccggtacgacttcaaaaacactaacagctttggatctgctgaagtcgcgtcccagacctgaaaattgtaaaacagaacttatgaatatacaatagatatctacacaacgagataaaccttggtactatgaacacaatagagaagcatccatacctcaacaacatcaggcctagcggaaacctgcttcagctcagcaatcttcattctccgttgaagctgaggaaacagaaattcagaatattcagaatctaaagaatgcaataaaacaaattgagaggtaataataaggtttgagctatacctttttcttcttattagagatgcctttctctttgttctgattatcctgctcgtcgtcgtctgaatcagaatcagagttaaccttctttttgacatcttctttctcctcagactcatctttcgtaccgtcttcttcagaggcaagaggttcgcggaagttgaacttctcgaagatttccttaaactcatcgttaaaaccatcttcaaattcagcttgctctggaacatactctatcacaatctgctcacaaacctatcaaagagaaacatataccaaaaatcatcagcaaacgataaacaatcacaaaccctaagaaaaaccctagaacacctctccatgaatcgagtacgagaagatgagcacaaagttaacctgtggctggggatctgtattctctttggattcagaagcagcagaaacgtccgatgcatctacatcggcttgggatgctttgttgttcttcttctgcttccgtctgcggcggcgacggtcaatctcacgagatttcttagaggaagcggaggtgtttccgttggagacatcaccgttagaaacgacgctatgaacgagtgcgacggttgaatcggcggtcatattcggtgttctctctgaatcggtgatgtgaaaagagagattgagaggagaaggaagaacgacggaaatcgaggatatacgtatatgaacaagagtcggtttgctgaaattctctctgattctatttccggtttggcataaggcccatataagtagaagacgaatatatctgccaataggcccaacactttatatttttcttcgagtgtaagaattgttttgtagaagaccatctactagtaactaatagaaaatttcaaaggaaatgtatggaacaatattcaaacactactataaatgttggcacgagttaactctacattattcgtaaaaatgttctattgaacttttaaaattataaaattacagtttacacaatgtcttgaaattttgaagaaagttataagtatcaaaattgtatatatgtgggtatttgagatttaaataaaattctctgactaacaacaaaacttttaataaaatttaaatgttttagtttattattcgtaaaaatttagtttttacatgaattgaggtaatttttattcactttgagattttattaatgtgagcacgactcccggtgtatgttatcggttgtttattatgcaattagaacaatatacattgtgcctttttagtttcaaaattgttttcataagacattaggaaagaacacggaaaaaaaagacattaggaaagaattttgtaacggcttttgtacgtaacggttatttttaaacaaggaaaaaaatactgtctataaaaaaaaattatctttacgtagttgtgtattttagaaaacaaaataaatcattttttatttactaaactattattttataaggaaaagattgaaaagagtaggggaaagatatatgtgaaaaaatattcatgcttggtagataaaaaatatttcacaaataaagagacaagtatatgtcaaaaatatcatgtcttttgaataaataatcttctaaaaaaaaagaattagatgaactataaatatcttgtggtatatgaatccttgacactgtaaaaatcaaaacatgagatcagaaacacaagtataaaagtacattacaagtacggtatgaatcgaaaaaaaaacagaatttgacaggttttgagctgataaaaactatttcaggcttttattaatttttaaaaatagtattaattgtttttaaaataagacataaataaaaaaaagaacggttaaagaaaatgaaggggcccttcgtgttttgttttcccttaaaaaaaccaaggacaaaggcataatgccgtattcacaatcttgactcttcgttatctggatctagggtttctctcgatttttagaacgccacaaaacctaataaacttttcccagatacacaaacaaactcatcatcaaccaaggaagaagaaagaaactagggtttttttttgtggattcatcatcggtattttacagatctatattcaaagggaacaaaatcttaaggaacaaacactaaattttcattctttctcttatttacccatttatcaaaaatcttccttttgttttcctgattcttgctaaagaaaaaaactcggatccaattcataaactagtgtggactggtgatcaatctatcaattctggccaagggacaacaaaaagtttagattttgatgaaccaattttgagatgagacaatagacatccattgatctgtaaactttaagaaggagaaggagaaaagaaagt

SEQ ID NO: 3256 - DNA, 3000 bp, Unknown
  misc_feature (1)..( 3000): cDNA_ID_1820081_gDNA_ID_1620635_Annot_ID_47346 3000 nt of promoter + ATG
aaaaaggtttacattaaaaatgaaaaccatattaacactatataaaaacttagcctattactagcttaactttttagccacaacattagtcaattgaggaatattttttttgcaaaaaggttagtctatagaaatttgatttttgaaggtcgttttcgttggaagacataaagcttcttggttgggtgaatttaaaaaatattcaacgtatttttggagaacagcttgcagacgacaacatccttcaagttgccacttgaatcctcctcaaattggctgcttaattagcatacctcaaaatatatatcaattaaaaaagaacgtcacttgttagtctttttcacgaaataatatattactatttttgtcgttatatataagttggtggttggcattttgtcttatggtccacgttaatttcgtgagaagcctttagcgtgtttcttttgagttttttctttcatttgtcagctcgaaaacaggcggaaattaaaccaaattattattacgtgttccttaatatcgtgttttgtttgtttacaagatatcgtatatgtgatcaacttattcttgctaacttgtaataatctgttctagttatactacccactttatatcattgcattgaagcgatgatgaatatgtcttacatgagcttatgatatagattatatatatccggtatctaactaaccattttgaataaatttccttactgatgtggtgggcaaaaagtttacgagtcggattggttggatccgtgttgggttatattacattatatcatattcgcattttaaaaaaaatttattggttaggcgtaaattaacttttgatatatgatataatcgcatagttattcaaatggtatagtccaaactttccttccaatacagcacaaccatttaccatgttcacatacaagtatacgcatcacatactttacgtgatgatttagagatatttagatattagtctgattttaagttcaaagacacgataaaccaaatagttatattacatcattgagacttgtaaagatttcatgaactaattctaatcatgagagtaaatagactttaaattgaaaagtactctaatgagaagagtaaataaacttaagtgaaatatttcatatatatactgtaactctaaatcctcagggaatcaggaatttataactcatatttgagtcctattaaaataaggtgttggattttgattatatatttttatttgttgttatgattgaattttgatttatgcaacacaaatatatatataaagagaacgactttgtattgcttagtaaattgtcgtggacaaattggattttaatcaggcgatattaacacttcaactgccgatcatccatatcaaaacctaaatcaaggtatgtccgttcaaaactaccactgttctacatttagtatttaaacctaaacattttttttttttaaacctaaacttgttcttaaccaagatgcacgtagtatcttgtgaatggttaattaacttaatttagtaggacgtaacaaagttataggacattactagaagtctagaacatagttctttcgtgatcattaaaacttcgatccaaatttttttgacacaatgtgtattaatttagattgttcgattcagatttaggtctaactttcttaggtaaaaaagctggaatttgtaaatatccccaagcttcaatgaatctagacattaattcgacagataagatttgcgtaaaatactatagaagatttagatgtatttcatattttcacttatctaggtttcataattaaccaatcagcgaattggtataaattaaagtttggattgccaaataccaaacatgtttgtatttatccatccaaatatgaaatcaaatataatcctatttttgaaagataaacaattctgttcacaaaaaaaaatcagaaagaaagataaaaacatagtatatgtgagacacagaaaaggatctaacacaacaaaaagaaaattaccaaaacgtatcaaagatttagacttaaattagggcttaaacatggattaagaatagaaccaattataatataagttaggagtgaggaaagtcgtaatcgaatacagctacacacgagcgtagcgtgcttgaaagagacaccaaatcctgttttagtggggaactttcttactttcactttttcccctcttttttttttcctatttaagaacaattatttggggtttttactctttttattttccctcatgttttttgattttatcagtctcttccagcagccctccaggtgtaactggtcacacattcgcttggcttacctttaaccaggtgtttctccttcttcatagattttagggatgccaattttcaatactacgttttaagttcctataccgtaatttatggttttattcgcatataacagtggcatttccgtttttttcccacaaagtcagattctcttcaaattaaaatttttacataactacttttcgtattaaataaatattttagaacgaaaaagatcatttagatttatctcttttaatttttattcataaaaactagttaaaaaattaaaatagcatatgattattattgagataacaaaattctgtcgagaaaaatccaccgaacatatattttagcagcccgtttcaaaacctttacaattaaattgattaaattaaacaccatagaaagaaagagacgtcaaagaaaggatctcttctgagttctctgactcaatttctgagctctctataaatataagctctcttcttcacacttttaatgcaactctcaatatcactattaaatatctttctcttttcacttcttcactttcctcgattcctgagttttcgatccttttgttctctaaccaccggtttcctctttaaccggtctctggataatcatcataatcattaggatcatcaagataaggaatctttttgagtatatctctacaccaaatcgaatctatg

SEQ ID NO: 3257 - DNA, 3000 bp, Unknown
  misc_feature (1)..( 3000): cDNA_ID_1820069_gDNA_ID_1620635_Annot_ID_47349 3000 nt of promoter + ATG
tgtttagaaacgacgataattaataaagaaaagtgtgaataagatcaaaattgtaagtgaataaaaaaaggatatgagattgatagaacaaaaacttctccgacgttagcgaggaagagatcggcggtttcgggaacggcgaaacgatggagatcaaacggagaacaataggcgaggtttgttaaagctaaatctgacgccggtgtggtcttcactgtcatcttcatgacaaaagaataggaagaatcagccatgattgttttttggtttccttcgttacaaagattattggtttatttgtggagtaagctagaattgtatatatttatagtaagtctactacaaaatattcccgacaattgaaaaagggaaataagtcatctgacaaatagtataacgacacgtacacaaatgttatggcaagtaaaatcgtgaaattgaaaactttctttacttaaatacggttttcccgggtaataagtaatttactactaattagttacaacggtcaaggatgtttgtgaaaactttctcctcattctctgattggctagactctttgtcactctttcttatttggaaattttgtgccgttcaaatattattggatctaatgaaaggaaattctacatttgtttttcttttgataagaatgaaaattctacatattaagaaaacaaaaaattcaatggaatttaggaacttgagctttttggatgctctaactttcatcacgggacgagtcccactaatatctactctccaatctctattgcaaaaactatcaaaagaaaaagaaaaaaaaaagtttatggaccaatcctttgagttggctactctgaaaagtaatactccctcatatgtttagataccaaaaaattgaggagttccaagtgttagcctttgatgggggttgagatacgtcaagcggaagttgcaagaacatcctcagtaggaggctgcattggtttttgagaacgtggtggtggtggtggtggttgtggctttggcggtggtggtggaggtctctttggtttcaccttattgactatctcagcttcaacatcaaactgcatgatgacaaaaaaatacagccacacgggttcagagaagtagagtgtatttccaaacgcatcaaattattgaggttgaagcaaggaaacaaaccttgtaaccacagcctgctacacatgcgtgaaagcattcctgaatttaaaaacagagttacatgtacaacaattagatacggttcagtccatttctcttttttgaagaaaaagattcattgtgtgaattacctcagagtatttggcatctccaggagaacgatctataacagcagtccatggtctgtcttttagcacaggatctttgtagcaaatttcactgcagtctcctacacctatagagagtacactactattacaccaattcattaacttggaaacttaaacctgaaaagcagaagatactcttcatgaacatgtaatttcgttatgtaggagacaagcttggtttttatgatgttccatagtgaggacaaatctaaccgctcatcatttcatcaacagtttcgttacagattacaaagaattaaaaagaaatgcttacaatcttcccatgagtcactatcggcatcacatccctttttgcagaatactctccctacacagattcaggaattacattagtgctatggaaaaaatgtcatacaacaacatggaggataaacactgatgctaaagctgaaaaaaaacccagattgctatggaaaaaatgtcataccaagcataagttcagctagcttttgtgcccatgaatgaaattcagagatcagagaatgaaaagctttcatcagaaagacagaaacagccaaaccaagccctttaactagcttaagcatacatatatgtcaatagttcatagaagcaacatggatacagaagcatctttgataccgttactttgactctctccctttaaatttctttcagttcataaactacaacttattatcttccactttctcctactaatttaaccattttcttaattacatgatagaaaagctctaagaactctgcataatctcccttacttgtaatcaatataaatgttgccgattcttcaatctacattattcaattacgagtcaagatggatgttcttaaatacttgcaactacaactataagttgtctctggaccaatctaaccaaagaagcgattcttgaccaaaatgtttagtataatcgtaatgaagtagagtgcaccaacaaataattagggtttatgaatcaagaaatcaatcaacaatccaatttacagatcccaatttcaattccaaacaacaacaaaaagaagaaacactcggaagactaaattgacttttgaatcaagaaatcaatcaccaatccaaatcagaacccaatctatcagctccaacaacagattcttatcatcatcatcgaaaactaaaccatcaaaaaacaacggaccacgaacatcaaaactcaaaaacgaatccgattcacacaaattaagagtccagatattacatacatggaagctgcgtaaatgctgagtacttattcgtgcatttgctcccacacggcggcgtccattgctgcggtatcatctctctctcccttcctccgccttcactctccgtctctctctctcttcttccgaaaatatcgctgacgccacaaaaatgtagccggagacttttctttatatagtaagggtgtttccgtcatttaacaatccaagctctctaacaaccaaaccgatcctttttataatcccatttaatcaaaccggttattgatacaaaccggttatttccataaacttaagccgacttctctctctcgagcctttataaactcacaatctcacaaagccgtctcattctctgcgtcctgtctctctctttgtctccgagagctcgagtagtgaagtttgctgtgctctaatcttcagagagtgagaataaatg

SEQ ID NO: 3258 - DNA, 3000 bp, Unknown
  misc_feature (1)..( 3000): cDNA_ID_1820056_gDNA_ID_1620635_Annot_ID_47353 3000 nt of promoter + ATG
taattaacatcagtgtatactataattactactctagccaacaagataaattcattttgacatcagccaaaagataaaaatttggttaaaaactattggattagcttttagtatttaatattttatgtactgattaaatacgaatttagaaatctaggatataagtgagggtgtataataagggaggggtggaccattaatagcgatgtgcaattaaaaattatgattaagaatctaggaaatttgtagattgcttagttatttttatggcgatcgtcgtgtcaatgtcatggattttgaaactttaaattaatctcttaaattagcacctacctttgaattttatagaatctttttattttatatgtttaattttatagaatctaactagcttattttgagattaaattgtttagttacttttataacagtataaatgtataatgaggacctaagaatgtagtcctgtaatgttcttgctattctacttaatctcatcaccaatcaaccatcaaaagaagctagtactaataaaacctgcaggtattcgaataataattaagctcaaacactatactaatttatggaggattatatattcaatgaattaggaacctcatgatggacattattgactgatataatgtgtatactaattgtgagtatttaaaaaccatacaaagcatttatatgtccacatatattggacacacatgcaatcaatgttcaatatgctccacacacagaaataaaaatactctttctgatcatatgatacatcatacatatactaaaaaaatctaaaatgaactataaccacaagcatatataataacaatgaaatggtaatgtttcttcatttttatttgttcaaattcttattcggttgttttttcttaccctacgagaatccgtgaggtcaaagggaaacagtgattttttttttgtattttgttttttaaattgatgaactgtaaaactctctctctagaaaaatatataagtagtagtatgaattttctctcactaaaagcattaatggacctttcgataatcataaatgcaatgcaccctctctatgcatttcgcaataactccttttccttctgccacatcctcttcctcacctctttctcttcttccctttctcctaagttcctcctccaccaaattctccatttatttcgttaactatcctccatttgttttcttctgaagagtgatatattctacctttctctggttaaagaaactccctgaatccaccggttatgtcttgaccggctataagcctataaactgatgccctaagacacctttttaggtttctcaataattctccgcatctatcttttcttctccacaagtaagagaaccagaaaaccagagaagaagccgagctagctagggtttcattgtgtgcacaaaagtaagatctctctctctaaccaatacttgtgtaatttgtctttgtttctttgagcaaatattgcatgtttgttcatattagccggatccgttttatattttttcatgatctacattttatctttattttgtttgtaaattaatgagttttttttttttttttctgtttttgtcacgatctaaaaaacaagcgttacaaagaagaagaaaaacctttttggagttagaagtgtaaaaggggtttcagtttgacgaattttccttagtagttgtgtaaaaaaaggccattgacttaatgtcaactctatatatctacacatttttttattaattagtttttgtttttttcccacttcatttacctttagtcaatgaatttttactgaaaacgttttttcaaggtcaatttcactgagttaaaaaaaaaagttttatttttaaccaaaaattacgttttttcctaggcttcggtaacctgtgaattcctctatctcactagcttttatgtagaagagagagaaggcaacattaaattcgatctaaaacttcaagaaaccaaaacaacacttcaaaaaaaaaaagagatctgttctatagagttttaatcttttctttcgactcgagtttggctcaacaaagtttatatcgatttggcactctaaaatgtaagtagaaccaaatgaatcttgtattttatgtacgttaataaaaaattagggtttcctagacgacaatctcgtcatccgtttcttctttgtctacctctgcgttttcttgtagatccgatgatgtgctcagtcttgtgactttcaagattgattttatcgttattgtttgaagatatgtggtttgattattttctcaacacattgtgtccttttagcgctttacttcagtttctctctaattttcataatattattattgaacattatgcttaattattcatccgaatattcgtgtcccattttttaaattgaatttcaggataacttgtattttatatgcaacgaggttatgtcacgtagtgggtgcatttatattcataccctttttgataagatgaatgcatatgcttatataagcgtataggtataaataaccatcaaaaatagagaaaaagaccaatattttgcttttcggttacttatgaaatgtgaaaaagaccatataaatatatctattaaagggaagtatagtttcataaaatcttgaggattacattccataaaccaagattaccttccgtttttgctttgatcctcttcttatcaaatatataaacatgaccatttgatctttcattttggatagtgggatatacaggcagaagaaaatcgagataaatcaactaaatgatttggataatcatcttgaagatttgaaggaaaatccaagagcttcaaaaactccaaaaattgataggcatccatcatcatcatgtatcatccaaacatgttcgaatctcatcatcatatgttcgatatgacgccgaaaaactccgaaaacgatttgggtatcaccgggagccacgaagaggatttcgagactaagtccggcgcagaagtcacc

SEQ ID NO: 3259 - DNA, 3000 bp, Unknown
  misc_feature (1)..( 3000): cDNA_ID_1838524_gDNA_ID_1620635_Annot_ID_47355 3000 nt of promoter + ATG
tgatagagatgtgatgagaaagagaactgtgagctcgtttagtcaaaaaagaagtttcaaaacgtcttttaatttgatttgtcaccatataataattatgaattatttatctatttccataaaaatatattatagacatattttagatgttattctagatggaaaatgcgaaaagagtagagttgggtttaatacaaatgttcgaactaaaacttagtggtaccagcagcttttaattggtaggtctatctaatctttaaggaattctccatatatatttcgatattcttatagtagaattattgtcattgtgaccaaaaaaaaaacgaatacaaatgaaggataatatatattttcattcaatctgttaaaacgagttaatttcagtaatatgaagatttaagaattataaattattcatatacatatttgaaatcgtgtaacacatgccataagatattgttttgtaacaaggtgagttaggtaggcggcttgaccgtgtatgagtgttggagacgtgttgatgatacttgcttgatatatccggaattttgtagacataaaaacgtgtgtgcgtcaataagggcttgttcggacacttttagttgttatataaggttcataaaatcatagtattattccgtttaaaattacgacaaaaggaacaaaagaatgaaacgaacaaaaactgatgaattcatcaaagaatctaatgaaagaaacgtagaacgtgtattataaacaaaaatttcaatcatttcgattttgaccgtccatgtggcttcatcatcactttccacctcaaatttcgtcagaactagacaaatctttagcattccgaaaacggccaagccatgacataattttgtagaccaccgcagcgcaaactacgggttcttgttgtatagagacagcaagagtttgctgtagttgaactcaacagccatcaaaatacgttcgctccattctcttattgatctctggattctatgtgttgtacatgactgtgtgaagattattaagtatccaacactatgatctcggaatcgaagcaatggttcttctctccttgtatcgagctccataagcgtgttgaagtcattaaccaactgagaaacccacaaaattcaacaagatcttttataaccagaattcaagagctaaggaacttttcattagtggtccatattggagttgtgtgctctcaaactctagttgatgaattaatcaggtggctactacgtacagagccaagagcaaaatcttagtcacctgtgacaaatatgataacatcgtctcttttttggaattcaagatgtgagctcttgtccaagttttgtataacgtcaccttcaaatccatgttcactgttccaacaagaccagtttcagagtaaaaaatatatacaagcacaattttgttttagcatcaacaaagttgaggcctgaaaataaagtactcgagcatttgaagattgacttttgacttgtgctacgtaggatccatatatatgtggaatataaaggtattcgacgatataccacgtttaaaccgggaatagaaccgaatccaaatttgaatatagaccagaccggatcaaacgaaaaaggaattccttgagcataaacttttttttcttttttcattttaaaagttcgaatatatgctcattgacattgtaacttgtaagtatgtaacacaatgagacattattttaaatttgaaaaactgtatgtagatctcattgtctttaccgtaatccacataaatgatgactcctttctacacacgcaagcccttctgatgatcactcttcaagatcctatagttgaaacccggaactcgattctcgccggaaacctccaccgccgagcacatactcggaaaaaacttgccaccgccaccacgagtctgccgcttcttctttctccatttagttttagagaaccaagaacccaaccgtgatgatgaccgatctctttgtttaaatgtatttttgttttcttccgaattgcctctccgtggatcgaattggggatgacatgtagagaagtttttgaagtagtcgatttctttacgtacaagcgatccgatggttcctcgtgttcctatggcgattggagcagccattgatagagagtttttatgaacagcttttctttttgtttctcttgatcaagtggtaacgaagtgttattaagatccttgaagctaaagtagtagaaaatgtattatctttttatatgataggtgatggcttttgttggttggtcatcccatttctttatctattttcttccttttactgtatttaagattatttatgttcaaatataatctcactgttaacttttatatttttctaataaaaaagactactaggatcggtccatcaacattttagacgtaatatgtatagataaatgcatattattttggacattttaacaaagacatgtcgaagattgaggattttaagcgaatatagaagtagagatgttgttccaaaatgaacagccgaacaacgcaaatacaatgacacaaggttgttagagaaatgacaaaatatgattcggttgataaattacataaaactatttttaaattagactacaatattcgaacaacctacattttctttttggctacacccaactttttatttaaatccattatacagtaatctgacctttctctaacatttaaatcatgatgggctaattcaactatttttccttctatcatgccgtagattatttttcacttagattagtatgtttctccttttaccataaagtcagggaacataataatttcgatcaatcccacaaacaaactagagacggccaacaaaccggaattaaccaccaaaccaaccaaatttatcactgaaccaagtttctcaaatgggcccaatacaaagattcagttcggcccaaatagtagattggcgctataacgataacgattcttagggcatttaccacagcatcaacaatg

SEQ ID NO: 3260 - DNA, 3000 bp, Unknown
  misc_feature (1)..( 3000): cDNA_ID_1820048_gDNA_ID_1620635_Annot_ID_47357 3000 nt of promoter + ATG
ctatacatattacgtctaaaatgttgatggaccgatcctagtagtcttttttattagaaaaatataaaagttaacagtgagattatatttgaacataaataatcttaaatacagtaaaaggaagaaaatagataaagaaatgggatgaccaaccaacaaaagccatcacctatcatataaaaagataatacattttctactactttagcttcaaggatcttaataacacttcgttaccacttgatcaagagaaacaaaaagaaaagctgttcataaaaactctctatcaatggctgctccaatcgccataggaacacgaggaaccatcggatcgcttgtacgtaaagaaatcgactacttcaaaaacttctctacatgtcatccccaattcgatccacggagaggcaattcggaagaaaacaaaaatacatttaaacaaagagatcggtcatcatcacggttgggttcttggttctctaaaactaaatggagaaagaagaagcggcagactcgtggtggcggtggcaagttttttccgagtatgtgctcggcggtggaggtttccggcgagaatcgagttccgggtttcaactataggatcttgaagagtgatcatcagaagggcttgcgtgtgtagaaaggagtcatcatttatgtggattacggtaaagacaatgagatctacatacagtttttcaaatttaaaataatgtctcattgtgttacatacttacaagttacaatgtcaatgagcatatattcgaacttttaaaatgaaaaaagaaaaaaaagtttatgctcaaggaattcctttttcgtttgatccggtctggtctatattcaaatttggattcggttctattcccggtttaaacgtggtatatcgtcgaatacctttatattccacatatatatggatcctacgtagcacaagtcaaaagtcaatcttcaaatgctcgagtactttattttcaggcctcaactttgttgatgctaaaacaaaattgtgcttgtatatattttttactctgaaactggtcttgttggaacagtgaacatggatttgaaggtgacgttatacaaaacttggacaagagctcacatcttgaattccaaaaaagagacgatgttatcatatttgtcacaggtgactaagattttgctcttggctctgtacgtagtagccacctgattaattcatcaactagagtttgagagcacacaactccaatatggaccactaatgaaaagttccttagctcttgaattctggttataaaagatcttgttgaattttgtgggtttctcagttggttaatgacttcaacacgcttatggagctcgatacaaggagagaagaaccattgcttcgattccgagatcatagtgttggatacttaataatcttcacacagtcatgtacaacacatagaatccagagatcaataagagaatggagcgaacgtattttgatggctgttgagttcaactacagcaaactcttgctgtctctatacaacaagaacccgtagtttgcgctgcggtggtctacaaaattatgtcatggcttggccgttttcggaatgctaaagatttgtctagttctgacgaaatttgaggtggaaagtgatgatgaagccacatggacggtcaaaatcgaaatgattgaaatttttgtttataatacacgttctacgtttctttcattagattctttgatgaattcatcagtttttgttcgtttcattcttttgttccttttgtcgtaattttaaacggaataatactatgattttatgaaccttatataacaactaaaagtgtccgaacaagcccttattgacgcacacacgtttttatgtctacaaaattccggatatatcaagcaagtatcatcaacacgtctccaacactcatacacggtcaagccgcctacctaactcaccttgttacaaaacaatatcttatggcatgtgttacacgatttcaaatatgtatatgaataatttataattcttaaatcttcatattactgaaattaactcgttttaacagattgaatgaaaatatatattatccttcatttgtattcgttttttttttggtcacaatgacaataattctactataagaatatcgaaatatatatggagaattccttaaagattagatagacctaccaattaaaagctgctggtaccactaagttttagttcgaacatttgtattaaacccaactctactcttttcgcattttccatctagaataacatctaaaatatgtctataatatatttttatggaaatagataaataattcataattattatatggtgacaaatcaaattaaaagacgttttgaaacttcttttttgactaaacgagctcacagttctctttctcatcacatctctatcattagaaaaaaatattgttaataatgtacatgtttttttttctttttttggggtcaaatttggattcactcaaaatagttaaaacatagaatcccatgtatcaaaaaagaaaaaaataacacctaaccctataaataaaagattttatacaataaagatcttatgtttttttatcagagaaaaacatgtcttgtttttataattctgacttcttagtaacaaatcatgcatatatgaaattcaacaaatttgaacccaaaaatagagaggtgaaatattaaatgaccaaaacaaatgataaaataattcagaggacgtgtgagggaacaagccagaagctacactatcgaaaagatcgcatcaatctcaaccgttggatctttccttcatcatcatctctctctctctctttctcttccatctgacctgtgatgtgagtttgcagatattcaaacaactcaatcctcattccctttgtttcgcctctctggatttcgaagagctgagagattagggtttctcgattttcgagattagagtctaatccccaccaccagcatagctgatatcctggaggagaga

SEQ ID NO: 3261 - DNA, 3000 bp, Unknown; identical to SEQ ID NO: 3258
  misc_feature (1)..( 3000): cDNA_ID_1820056_gDNA_ID_1620635_Annot_ID_162870 3000 nt of promoter + ATG

SEQ ID NO: 3262 - DNA, 3000 bp, Unknown
  misc_feature (1)..( 3000): cDNA_ID_3091265_gDNA_ID_1620635_Annot_ID_162866 3000 nt of promoter + ATG
taagataccttttgaacataagatctcacatcccttgttaactttcggaaaagctgcatgtagagaagatgttaggtcagtaagagataaaaaaaacactgatactcaacaatccccaagagtgtataattgtgtgccgggaacaaaccattctaaatagccctccaagtaaaggaccagcaagatccagccttttgttaccataatgatccctatcatcttctggccttcggccaagtgcacaaagcagcagccggtgtatgatatacctacggatcatagcataatatgagcaacacagaaacatgttaagtctataaacattacaagtgagttaaatacctacccaaaatagtaagctttctttgtctcgcaatgctccccaattcctacatgaggaagcatttctttctgaaggatatctctagcatacctgcaatgataatattgcaatcgcaaacctccagtgtgaacatctcaatagttgacatcttagatcataatgtccaacttaattggtttagattatcacatactttatccttttttccttggttacaccaacagttgcaccacgttttccaatatagtcaagtgcaacctgaagtaatatgaaagttatcaagtgattgcaagatcaattcctcaagcataataaaatgtcattaaccaagtgaaaaaaaagtggataccagctgattttgaataacgaaagcttcttccaaggaaggcctgagcaactccatcatctgggtatcggcaaaatcatagcagatgtgttccaatatgtccttatcggcaacaaatcccagtgcacgaaatactatgataataggaatttctgttctgatgtatggaagagtacatcgaatatactgtccagatgaaccctgcatccatttgcaacatagaatgtaatttatttaccattatctagaatttaaagaataaatttcgaggaaggatatagtagagttaagactaattagctttctcttaccccttttgcactagcacgagcaagcatacgcacaaacattgtgcttggaggcctattttggttttcagccatagaacggacttcaccaacataagcatacttatttggctgccttttcttgaacacataaacatgattcgtactcatcttctcctgagcaatcagaaccttttcactgccattaataatgaagtatccaccctgatcataaggacattctccaagctctgtcaggtctttctccgagttctgaaacaaggtacagtaactagaccggagcatgatgggaacctagcaaataatcaaacaagaagaaaacatttctactatcagaacagtagagtacatggaaacacctaaataaatgtgacacaatgaactgagttcggacacctttccaatgaaaactttagtaaaatcctgtgtctccgtaacttcttcaccatcatgccctttcttaataactctcttagtaacatcgacatacaaaggcgcagagtatgtgagatttctcaaccttgcagccttagggaacagggtggcagtctctccatcagactctgtcatcataggtttactcagataaatctgtccaaagctaatcttgtagattgtctgcaggaaaacagctatatcagacatacagaaaaacagatagcaaaacagctatatctcagctcacacaaagtcaaaaatgatttgagcttcaaccgataataaagaccactgaaaggacactttgaaaaaagcgaagagctcaagcattaaatggaaagataatctcggaaaatcaatgagcttagctactcgacaaaggcagaccctaattgcaacaaaacttaaaaactgatttaagctttaaccaatattcaaaaccactgaaaatacacctcaaaaaagcgaagagctcaagcatcgaatacaaagataatcatgggaaatcattgagataagcttctcagataagggctaacaatagactgtctgcaggaaaacagaccaaagggacagcaaaaaaagataccaaactcatttttatagtgccaaaactgatttgagtttcaaccaatactataaatcctcctcgaaagagatgagctcaagcattaactcaaagataatctcgggacattaataagattaccagctcaaagtcaatatccggacatcaatagtcaaaatcattttttgactcttgaacagcatatagctcaagcattgaataacaagacaatctcgggacatcaataagattcaggtaaaccctaatcgcacccaaacggtagaagctcaaatcgaaacactttaaaaccgccacaaacacgataaacccgcacataatttcgaattcccatagaaaccctagaaaaaaacaaaaacgaggaaacaacctccgcaaaatcggactgatggccaggattatgctgagattcaggtcggatctcgatatcagcagactcatcaacgatttcttgcatagtattttgaataaactcatcaaacgaatccagctgttgacgaacgagacctttctcttcgaaataagcagatataacagcccacgcgtcctcctgggtaatctcctcatcgtcatcgtcttctacatattgaggttcaggttcgtattcgttgtactccatttattctcactctctgaagattagagcacagcaaacttcactactcgagctctcggagacaaagagagagacaggacgcagagaatgagacggctttgtgagattgtgagtttataaaggctcgagagagagaagtcggcttaagtttatggaaataaccggtttgtatcaataaccggtttgattaaatgggattataaaaaggatcggtttggttgttagagagcttggattgttaaatgacggaaacacccttactatataaagaaaagtctccggctacatttttgtggcgtcagcgatattttcggaagaagagagagagagacggagagtgaaggcggaggaagggagagagag

SEQ ID NO: 3263 - DNA, 3000 bp, Unknown; identical to SEQ ID NO: 3257
  misc_feature (1)..( 3000): cDNA_ID_1820069_gDNA_ID_1620635_Annot_ID_162865 3000 nt of promoter + ATG

SEQ ID NO: 3264 - DNA, 3000 bp, Unknown; identical to SEQ ID NO: 3256
  misc_feature (1)..( 3000): cDNA_ID_3091277_gDNA_ID_1620635_Annot_ID_162859 3000 nt of promoter + ATG

SEQ ID NO: 3265 - DNA, 3000 bp, Unknown; identical to SEQ ID NO: 3255
  misc_feature (1)..( 3000): cDNA_ID_2156491_gDNA_ID_1620635_Annot_ID_162858 3000 nt of promoter + ATG

SEQ ID NO: 3266 - DNA, 3000 bp, Unknown; identical to SEQ ID NO: 3254
  misc_feature (1)..( 3000): cDNA_ID_3070958_gDNA_ID_1620635_Annot_ID_162857 3000 nt of promoter + ATG

SEQ ID NO: 3267 - DNA, 3000 bp, Unknown
  misc_feature (1)..( 3000): cDNA_ID_2156487_gDNA_ID_1620635_Annot_ID_162856 3000 nt of promoter + ATG
ttacccacatctgaaaattcctggtttgaatgctcctattccaattggagctagctttggttttcatgctggcggctgggggaaacctccagttgacgaagtaagcatttttttttatctacattcttcttttttattatttctatgccatctactaacttttatttttttcccgttcttatcgtttgtgttacatagtatgggcgtccattgtatggagatgtttttggtgtccagcaacaagatcagcctaactacgaggtaactgttttcatctctctctgttattctccttagtaattgcatattgtgctacgaggtagataccacaaaatacaaagtaaaagcgtcctattgaatatttagagatcatacaatttggtgatagagtatgacggttgtattttatcattatcttaggaggagccaattgataagagcaagcactggggtgatttagaggaagaggaagaagaagaggaggaggaagaagaggaacaagaagaggagatggatgaagaggaactagaagacggcactgaatctgttgatacactgtcaaggtattgttatcattatgcatttatgaggtgtatactatttatttgtttccttatcagtataatctaagtataaagctgatttgtgattttccccttctttcagcactcctactggtatagagacaccggatgcaattgaacttcgtaaggatcagagaaaggaacctgatagggctctataccaggtttgaaacctaattttgatgatcttacacgccttgtaggcttttctattagtttgatataaaccaataattcactgtttctggtcgttaatgcctttttttttttgacttgtgaaggtactcgaggaaaagggagagagtgttgctcctggaacattgctgggaacctcacacacatacgttattaagactggtactcaagaaaagacgggagccaaaagggtaagcagtctgttgttacatgctcagagatttgttgttttgcttgatgacaagtgggctaacgtatgcaattgtgtcaaattgagcaggttgatttgctgagagggcagaagacagacagagtggatgtcagcttacagccagaagagctggatgctatggaaaatgttttacctgccaagtatgaggaggcaagagaagaggagaaattgcgcaataagccagtggacttgagtgacatggtcgtcgaggtaatgactttctttatatttatatctctatttttttcaacactattgatatgaatgcggatgaataatcaaacgtttacttggtggaatgtttaacagcatgtgcagcagaatagtaggaagaggaaaatgcatgacaaggaagggaagaagaagaaagatttcaaattctgaggtgttctggaagagacacggaaaaggattctggattctggacatgagagagatagggagagattcttgttccagagttattagtctttgagtcagagatcttgagttttagtcttaatgcttatgagattctatactatgttgttatctgaaggcttaagtaaaactttgtttttggaatttgaacaaattcaaagcctgagacttggaacaaaaaaagtggggaaaaaaggctttgttttgtaagcgacgtcttgtttttcaaattgtccgagtactttcagcgtttatggtttttaaaagattgatcattcggtctacagaataaaccgtcgatgtgatctatttcagtgcaccttgttatctttaagcgaggcaaaaatatgtacattttcacgacattcgctcctgaaaccaaattatgttcatatgttactgtcatatgcatagtgtgaactaattcataggcatgatccttgggttgttcaatccctgcatgtgatgaaaaaaacttaacatactgtggattttttcaatgatgtattctattacttttccaatattaggcgacaaatgattcgaccacacctcattccgggagagtaatgaaacagcgacaaatggccaattatgccactcattgtcctaccgggctaccaccattcttcacctttctttcaacattatcatgagcatgatgactcgtagagtcgtagggttcctaaatcgcctttcttcacctttctttcaacattatctatttatcttcttttcaaatctcgcttattaatcattatacataggcctctacatggtagacacatttagaaacaacaagaagtctctccaaatatgaatggttattcagcctacaagcgatgtcagaatttttttaacacgtagttaaaagtttaactttgctagacaaatgaaatctaagattaatataaacataagaaagtatatatgcttgaaatgagacaaatttagctttaccacttaaaggttttaagctaagtggattccgcttctacaatgattaatgtttgtcattttggtttctgtttacaatgagtttcacatacatactaattaaactactaagtactagccattataaaacatgctgaaaaacgagtcacatatggttcatcgtaccataacacctttggattcccactactaaagagattcaactatgggtggtcactatctattttatctataaagtgtgaaatcctatttttcattcaaatcttaataattataacaaaagtaccattacgagaggattggttttagtttggtaagttttttttgaaccaaccaaaattgaatacaatgtacttcagtgataaaaccaaatattaacccgaaagaaaaactgaaacaaagtgagattgttttgagtttgacactactctcaattattaaaccgaaccaaaccaaatccgagccgaaattcgaatttaacccaaaagttcatcccaaatggtggtggagtcatgaaacgtgaattgaaagatgaataatagatgaattatttactatatatacaaccatagaggcttctatgccaccacacacttctcacttaagaaaatg

SEQ ID NO: 3268 - DNA, 3000 bp, Unknown; identical to SEQ ID NO: 3251
  misc_feature (1)..( 3000): cDNA_ID_1820101_gDNA_ID_1620635_Annot_ID_162854 3000 nt of promoter + ATG

SEQ ID NO: 3269 - DNA, 3000 bp, Unknown
  misc_feature (1)..( 3000): cDNA_ID_3070966_gDNA_ID_1620635_Annot_ID_162849 3000 nt of promoter + ATG
tttactaaccgggggaccgtatatatacggacagctcatatgaattaaagttttatgggtgagtgatcctaaaaagaaaaagaagatgtaaagtttatgtactgaaaacacacatatatagatagactcattattgtaattaattattacatgatatccgttgacttggatggaatgcatcctaatgattcatctattaccttcaatgaggttgaagtatatatgctcaacgacaaaatgaatctgatcaacatcccgaacgattgtttctcctcccaaattatagctgtcaccataatgaacttattcatagtaattctgtagccacaccgacaatatatttcgatgtaaaaatctttgatccatcatatttgtcctaaaattatttctaatttatttcttatttttatttgttatctaaatatacctaatctcatagctctattaatattttgacgttaaatcattgtataataaataaattgatgtacgtaacatgttcaaatatatacatttattttcagtagacttttagacacacaatttatatgattagagtcgaatgcataaaatctcaaacgcgaaaaataagcggttaaacttttaaacacaaaataatataaaaattgagcggttaaatcccaattgcggcggttgaatagtaccgatcaaaccaaagattttggaatttgacggaacaaataaaccgtggagcattggtcaataacaacactctttactctttcttccgtttgctcgaaccatctagtctaagagaaagaaaaaatactaaagagaaagaagaagaggacttgaatacggaagcttgagagaatgaaagcgatcgtgatctcggagccaggtaagccggaggttctgcaactccgtgatgtggcagacccagaagttaaagacgatgaggttctcatcagagttctcgctactgctttgaatcgtgcagatactctccaaagacttggcctttataatccaccacctggctcaagcccttaccttggtctcgaatgttctgggaccattgaatccgtcggtaaaggcgtctctcgatggaaagtcggagaccaggtagatatatattcctgtgatttcgtttctggaaattagggactaatcctcaattttggttttagggtttggtgtctctgtgttaagttatccgagcttggatttaggatacagaacatttgaatacactgctcagtgctcacactcatgttcttaatgatttaggattcataacatctgaatttgaatgacttggtttctgtctagttgcaattcgtttacatttgtttagctgttgaggcttcttatatttttgtgttggattggatttagttttactctaggcttaagcaagtaaattacttttgaagtataaagttattgtcttggattacttctgactgtctttgtctcaggtgtgtgctcttctttctggaggaggttatgcagagaaagtttctgttcctgctggacaaattttcccaattcccgctggtatctctctaaaggatgcagcggctttccctgaagtggcatgcactgtttggtctactgtcttcatgatgggccgtctctctgttggtgaatcattcttggtatttcaacttctcttctctttttatgtataaaaacagtttctatggtctggtaaaagccaatccttttacggtcaattctagaggcttttatctattactttgctttgcatttgtcttctctcttgggctgttttgttttctttcttgtctatgtccttgctaatgtttgatagtatctgaaattttagattcatggaggttcaagtgggattgggacatttgctattcagatagctaaacatctgggagtgagagtatttgtcacagctggttggtctgagcttcaatatattgataacctttatgtacttttttccgaaattgttcaaattttcttttaactaacagggagtgatgaaaagctagctgcgtgcaaagaactcggggctgatgtttgtataaattacaaaaccgaggattttgttgcaaaggtaaaagcggaaaccgatgggaaaggagtggatgttatcttggactgcattggggcaccgtatttgcagaaaaatctcgacagcttaaactttgatggaaggttatgtattatcggtttaatgggaggagccaatgcagaaataaaactaagtagtctgcttccaaagcgtctcactgtcttaggtacttaacacaatcaatcaatcatctctcaaaatcaatactgagagtctgagacctattgataattcttgatctgttttgttcctacaggagctgcattaagaccaagaagccctgaaaacaaagcagttgttgtaagggaagtcgagaagaatgtctggccagcgatagaagcagggaaggtaaaaccagtgatttacaagtatttaccattgtcacaagcagcagaaggtcatagccttatggagagtagcaaccatattggtaagattctccttgagacttgattctctgcaaagggagaaatgttcagagacaagagtcatggtcaataatcaataaaatctggtcgattctgttcatagatatctctttacaagagttctgtttgttggcttttatgtatctctgatttggtcaaaaagacactgtaactatggaacatatatagtatcaaataagctgttgtataccaaacattgatttcgaagtagaatatgattttgtaagaagtttttatttattttgggcttaaaaagtgtatttatttttgttaattgtttgatttaataaggatttttaccacctgaggcaaagaccatgaatatcaaaggcaacaacagttttgacttctctcgttttcatcggtccgtttgtacttcttctgataaaaacaaaaattttgcaaaatctaacaacaaaatctttgattcgacaaactttgtaacaaaaaaaatcgaaactttgcaatttttacaga

SEQ ID NO: 3270 - DNA, 3000 bp, Unknown
  misc_feature (1)..( 3000): cDNA_ID_2999575_gDNA_ID_1620636_Annot_ID_47360 3000 nt of promoter + ATG
ctgtttttgtctaatagacaaatgttaaaatgagacataaaaaagctaattgtttcagggaaagagggcattttccgtaattgatcaacggctctctcagaaatatagccgttaccgactttccgattatagaaattagagtcctccaaaaccctaaattggctctacccctttataagcaacccaaaatttcgtaccttttcactcacttcatcaatctgctctctcatctctcatcaatcatcagccaccaacaattcttcgctctctctgctctgatctctctgctcgaatttactaacgatcccttctctgcaggctcatctttatctaatttcgtttactcattatatcttctaatccgtttcgtatactatcgctattcttgttttctgtttgtttgtattttgggattttctttgtgtttagtgataatggatgcaggtttgaatcggtgcccacttcaagaacactttcttcccagaaaaaattccaaggaaaatgtaagtatccttcttcaatcattcagatttgacctgtttccgtactctgttgagaatcaggattcgaattgtgtgggtgctctttaatttttcagattcaataccatgtttatgatacagaattagtgttttgattaacaacttgttcatctgaatccaaaattgtttgacccatatcattgatgaatctttattcagatactgtatgaacgaattgttggttttgttataagaaaaatcatgtctttccaattgattgattgtttcttgcataaattggatttgtgatatcgaatgaattgtactgatttgcttttatcttctaccagctggacaggttcataccgaatagatcagcgatgaattttgactatgctcactttgccctcactgaagaaagaaaaggtaaggatcaatctgcaacggtaagttcaccatccaaagaggcctacaggaagcaattggctgagaccatgaacttgaaccacacaaggattctcgccttcagaaacaaacctcaggctcctgtcgaactgcttccgagcaatcactctgcttctcttcaccaacaacccaaatctgtaaagcctcgtcgatacattcctcaggtatgtactgtatttattgcgtttgatccttaaagctcacttactggttgctgcattagagttgtattgatctgttgctaaactttctgttgtgattaacagacttctgagagaaccttggatgcacctgacattgttgacgatttctacctcaacttgctggactggggaagtgcaaatgtcttagccatagcgttggaccacactgtctacttgtgggatgcttccactggttctacatctgagcttgtgaccattgatgaggagaagggacctgtcacaagtatcaactgggctcctgatggtcgtcatgttgcagttggactcaacaactctgaagtccagctgtgggattctgcatccaaccgtcaagtaattactactctctctcttttatgttgagatataatatccggtgttcttagtctgatgtgtttctcatatttctgcagctgagaacattaaagggtggtcaccagtcaagagtaggatcactggcatggaacaatcatatccttactactggaggaatggatggactgatcatcaacaatgatgtgaggatcagatcacccattgtggaaacttacagaggtcacactcaagaagtttgtgggctcaagtggtcaggatctggacaacaactagcaagtggtggcaacgacaatgtggtacacatctgggatcgttctgtcgcttcctcaaactcaaccacacaatggctgcacaggcttgaggaacatacatctgctgtgaaggctcttgcgtggtgccctttccaagcgaatttgcttgcaactggtggtggtggaggagacaggacgataaagttctggaatactcacactggggcttgcttgaattcagtagacactggttcccaagtttgttcgttgttatggagcaagaatgaaagagagttgcttagctcacatgggtttacacagaatcagcttacactttggaagtacccatccatggtgaaaatggctgagctcactggtcatacatcaagagttctatatatggcccaggtaacgtcatcaatttctttaagtggtgaagtagtttgagtctttgaggtcattcagtccttaaacttgtgttgtttgttgtgttttctacagagtccagatggttgtactgtagcttcagcagcaggagacgagaccctgaggttttggaacgtttttggagtaccagagactgcaaaaaaagctgcaccaaaagcagttgccgagccattttctcatgtgaatcgtattcgatgaagctgttgaagactaaaacaacaaggaaaacccattgattgttacaaaaagaaactatatatttttatttttattttattaccaaaggattcattcttcgtgaatataaagattacttgtatatattgaaatttgaaaaaagaaagattatgattttatactcttgaaggatatccacatttattattctactggaaacaaagtgagacttcatgaagttgtgatcagagaactcgtagatgctgacagttttgtttgaaaagatgttcactggtgaacttttggaccatggttaatcgaatgcaaactctagtgtagtatcaatctttaaaagcaaactgagaaaatatttatttaccgagtctgtggcatcaaaatggcttaaaaatagttatttactaaacaaccctttgtagtttctctgtcatcctaatttaacccaaacgttttgtcaattgcaccattagcccaaacgacaaagctttgtcgttttggcttttaaaccctagattcgtcttatcagcgaatctcctctgcacattcctcagtgatctatcaaagttcgaagagaccgacgcaaaagggacagaaacggagaaggagaaagaggcagagatg

SEQ ID NO: 3271 - DNA, 3000 bp, Unknown
  misc_feature (1)..( 3000): cDNA_ID_1820185_gDNA_ID_1620636_Annot_ID_47361 3000 nt of promoter + ATG
gtttcttgcatagatttgatttgtgatattgaatacgttgtactgattgccttgcttttctcttccaccagctggacaggttcataccgaacagatcagcgatgaattttgactatgctcactttgccctcactgaaggaagaaaaggtaaggatcagactgcagcggtaagttcaccatccaaagaggcctacaggaagcaattggctgagaccatgaacttgaaccacacaaggattctcgccttcagaaacaaacctcaggctcctgtcgaactgcttcccagcaatcactctgcttctcttcaccaacagcccaaatctgtaaagcctcgtcgatacattcctcaggtatgtactgtatttaatgcgtttgatccttaaagctcacttactggttgctgcttttgagttgtattgatctgttgctaaactttctgttgtgattaacagacttctgagaggaccttggatgcacctgacattgttgacgatttctacctcaacttgctggactggggaagtgcaaatgtcttagccatagcgttggaccacactgtctacttgtgggatgcttccactggttctacatctgagcttgtgaccattgatgaggagaagggacctgtcacaagtatcaactgggctcctgatggtcgtcatgttgcagttggactcaacaactctgaagtccagctgtgggattctgcatccaaccgtcaagtaattactactctctctcttttatgttgagatataatatccggtgttcttagtctcatgtgttttatcatatacttgcagctgagaacattgaagggtggtcaccagtcacgagtaggatcactggcatggaacaatcacatccttactactggaggaatggatggactgatcatcaacaatgatgtgaggatcagatcacccattgtggaaacttacagaggtcacactcaagaagtttgtgggctcaagtggtcaggatctggacaacaactagcaagtggtggcaacgacaatgtggtacacatctgggatcgttctgtcgcttcctcaaactcaaccacacaatggctgcacaggcttgaggaacatacatctgctgtgaaggctcttgcgtggtgccctttccaagcgaatttgcttgcaactggtggtggtggaggagacaggacgatcaagttctggaatactcacactggggcttgcttgaattcagtagacactggttcccaagtttgttcgttgttatggagcaagaatgaaagagagttgcttagctcacacgggtttacacagaatcagctcacactttggaagtatccatccatggtgaaaatggctgagctcactggtcatacatcaagagttctatatatggcccaggtaaaggaaaacaactaaatcaatttttaactgttgaaagtagttggagatgtttgaggtctttagtcctaaaacttgtgttgtttgtgttgtatttcttacagagtccagatggttgtaccgtagcttcagcagcaggagatgagactctgaggttctggaatgtttttggagtaccagagaccgccaaaaaagctgctccaaaagcagtttccgagccattttctcacgtgaatcgtattcgttgaagctgtgaagactgacggacaaggaaacccatgatacagatgcaaaatattcattttttttgcatctgattcattcttcatgaattgtagtgacaagaaaagtgcatattgtacaattatatatatgtaaatgatatatattgttgagtcaaacttatttgcttgcatttgaatagaaagaaagatcttgattatatatgtcagatgatacaagaagcaggagcattaagtactgtaaactgtaagatgataattgtaactacatcaaaatagacattgaaaccacactaacctaatcacattagtgtgtagaaacatgtgttcgattagggattttggaagattttattttttccgctagcttatgtaatttcagggattttagaagattttggttttatgtttttaaaccacttgttatgttttcaggttaatgaattgattaacaaatgctttttttggatataaattttttatatgattaaaataatactaaaacaatattataggtgaaaaataccgatcacacaataaccattatttaaccataaagcaaatattcaatcacacaataacctaaccaaatattatcgaggttaatacaaaaattattatttacaaggaccatacatcgaaatacgttggatggttctcgtatacaatttgaaactaattttggatggtattaggtagatgataaattgttattatggtctatttaccgtatgaaactttttcactattgtatttgttttttttcagtaataattctagattaaaggtaattgtggtatttatgtgagtgttaacctcttttttgtaccaatagttatttcagtatcttttttgagtgagtggtaagcagtgttttatttgttttgtataatatctataagtattttaatgtttttttatttttgttacatgtctctgtttttgtctaatagacaaatgttaaaatgagacataaaaaagctaattgtttcagggaaagagggcattttccgtaattgatcaacggctctctcagaaatatagccgttaccgactttccgattatagaaattagagtcctccaaaaccctaaattggctctacccctttataagcaacccaaaatttcgtaccttttcactcacttcatcaatctgctctctcatctctcatcaatcatcagccaccaacaattcttcgctctctctgctctgatctctctgctcgaatttactaacgatcccttctctgcaggctcatctttatctaatttcgtttactcattatatcttctaatccgtttcgtatactatcgctattcttgttttctgtttgtttgtattttgggattttctttgtgtttagtgataatg

SEQ ID NO: 3272 - DNA, 3000 bp, Unknown
  misc_feature (1)..( 3000): cDNA_ID_1820181_gDNA_ID_1620636_Annot_ID_47362 3000 nt of promoter + ATG
aagatcggtgatcatcgtcgacgtcgtcattagtttcaaattgcaacaagggtttgactatttacattcaaaaaaacgctttttgttttcctcaagtgtacaccatatataacagttgaagatacaaaagccctaaacaaatctgggccgatagtgggcttcagaatgtagtcggtcttttaatgatattttggtgtcaacccaataactccagtttcatctcaattctcaacatacaagtatctcggtggcaagagcagggagaggaagagagaagatggaagagaattgcgaggattgcatgaaatgggaagaagaactctactggactcattttcaaactctccatttcactcagctcctccttcctggtttccacaatcgcctcgtatgtctctatcactttctctaagaaccttcttcttcatgcatctttatcagcaattcatgttactctttcaatttcttcatgtattcactttcctttgttttccaccggcttttaatttggagatttacactcaaatgtatcaaaggggtttaagcaatttttgtttttttctctcaaaatcagttctttgcggatttaagagtcctaagattgccaattctagcataaaaattaccactttttgcaatttattacaggtcatacctcgaaagttttcaacacactgcaaaaggaagctgcctcagattgtgactctcaaaagtccaagtggcgttacatataatgtgggagtagaggaagatgatgaaaagacaatggcttttcgttttgggtgggacaagtttgtgaaagatcattcgctagaggagaatgatctattggtcttcaagttccatggagtgtctgagtttgaagtgcttgttttcgatggacagactttatgtgagaaacctacttcttatttcgtcaggaaatgtgggcatgcagagaagactaaaggtattattgattttaatgcaacctcttcgaggtctcctaagagacactttaaccctgatgatgttgaaactacaccaaaccagcaacttgttatatctcctccagttgataatgagctagaagacctcattgacattgatcttgattttgatattgataaaatactaaatccgcttcttgtagcatctcacaccggttatgagcaagaagaacatattaactctgacattgatacagcatctgcccagcttcctgttatatctccaactagtacagtacgagtcagtgaagggaagtatccccttagcggttttaagaagatgcgaagagaattaagtaatgacaatctcgatcaaaaagctggtatgaaaatcttcttacttagtgattacacagtgcacttgtttcttggtattcatctgataagccctgtctgtactctgtagactctgttttgcatgcaactgttgggattaaagtttcaggttttgagaatgttgctaacagcttggagtaactgattccttagtcttggatattatatgattctggatattaggtgtggagattatagaattgtctcatctttctcattcagtagagaaagtttcttgttccgaaactttattaacttcttactacccataggctttgatccatttgtcttcaaagtttataactttatataatggagtgagtccatatatttatcagtttctatctcatttatcatgcatctaaaatactaatataccttatcaactgtcgtaagacgtggagatgatttcagctggaagcaataagaaagccttatctctggccaagagagccatttcgccggatggtttcttggtgttcatgaaacgctctcatgtggtatcaaagtgttttctggtaagacttttgcatcgctttgtgtatagtccttgaagcttcgattattgaaaaaaatagaagaggtcacatttttcttttgatacagacaatcccatacaaatggtgcgtgaagaacatgcttatcacacgtcaagaagtggtgatgcaggtggatcaaacgaaatgggagatgaagtttaacattttcggagctcgtggtagtggtgggatttcaaccgggtggaagaaatttgtacaagacaacaacttgcgcgaaggtgatgtctgtgtgtttgagccagccaattctgaaacaaaaccgcttcatctcaatgtctatatattccgtggtgaagaaacggaaagaaccaacaatgttgacccggtttacacaataagtgaataactaagcaaggctacaacgttttcctcaaccctgtagtgtaaagtatatgtagcgtagatgaaaacttgtatataaaggtaaacgtaagaatgtgtgtaatctatctctcactcacgatgcctcttttttttgggtgcatataacggaactcttctggttctggtaatgcctattttcttgtgttggggcttgccacaatatttaaaccaactctttttttgtcttttggtttagtcttgttaaatcatataagtaataccaagtgtttttttgctttggtttgtaagatttgagaggagtataaccagtaattttattagtatttactagtctgtgtgtaaaattggtctgatctgttgctatacttagcctaagaattgcagatttattccgcaaataaacgaagagtgtacattagcgccaggggcattaccgtaaaaccaaattttacaacgtctctctccgaaatatagccgttacagtttccaattgtaagatttagagcaaaccctaaaaattgactccactgctttataagatccctaatttcgtacattctcgatcacccaatctactctcgattctcatcatctgcgacgaaattcatcactcgctctctctctgctcggaacgattccctcttcgctagctttatttgattcgtatttgtctgatttcgtttaatcttctagatcttttaatattcgtttcttttatcatcgcttttgtgtgttttgctctgttttcttgtttttgtttggtgataatg

SEQ ID NO: 3273 - DNA, 3000 bp, Unknown
  misc_feature (1)..( 3000): cDNA_ID_1820169_gDNA_ID_1620636_Annot_ID_47365 3000 nt of promoter + ATG
tttatcgccttaggtagtttttcttcgtgaacaactttggctactttggaggagatattaaaccttttattagtgaaatagtattaagaaataagaattgttttgtaaatgccagagacacaaaaaaaagaaagagaaaaatacatctccatatactatagttttctctgtgaatatttaagcgaaataggcgaaaggttggaacccacgtcacaactagatatcatccatatatttattttcaatcaaaaagctattatgtctcttgataatatattgttttatgtggaattatctgacccaaaaaagacttggcaatgtgtacaccacttaaattctagggaaatttgggaaactaacgcaaaaaaaaactttaattaagaaactatcacttgccaaaaaaggagatattttctgtattttctgtatatatgacaattttgccctcatatattcttccatctcttttgtttctctcgtcttcttctcaaattattttttctttcacgttgacttctcctccgccatagtccgaaacagaggcatcacagcaacccaactcgaaccctcgatctcctcatcactctcaccaccaccaccaccgccactctttttcgactccctcttccacagaatcttcaaatcctaccgccggagctcgccgtaatccatttcggagatgtcgtatgggttgtagatcactagatctatcatgggtatgtcgtttcaattccatattctgatcatcctcaacatcaaaatccataatagagagctgcatgagaacacggcggcttgctcttcctctccaagcattagtagttgatttgttaccatgttcattcataacttcgtaatctccaaattcatcagctcatgtttcaataattcactcaattaatttatgatcaactttgagaacttgattttttttcttttcttattattgtctgtttcaaatctccactcatggcagcaatactatactattttataaatgcaaagtcttttgtttttattgaatttgatattttcttataacaataaatgttagcttcttattcttgatttaatacttaaacttgagttaaactgtccaactctctaatttcatgtttatcatatagaacacaaaatcattattagtttgaggataaaagaattagagtttaattgattggatcatgtctataattagtttccttgggttccctaaattctcttagggtttatattttttctatcaaaactcttgtttaattcaatcaaaacataatattatgtatgttcctagttatgttttctattgtccaatttattctttacatactaaatgaatttgttatgaacaattaaagtatcttattatataaagtatagttttcaaagttgctaattcataggatcgtgccacgtgtcaagtcaaacgatcagatgtttacatgtgtcattcaaaatttaacttttttattctctaaaaaaatagaaaatcttaaaaagtaaacaaatttacatatactaatttatatcttattatataaagtatagttttcaaagttgctaattcataggatcgtgccacgtgtcaagtcaaacgatcagatgtttacatgtgtcattcaaaatttaacttttttattctctaaaaaaatagaaaatcttaaaaagtaaacaaatttacatatactaatttatatgtctatatatttataaataattaacatttattcaacaaaaggaaaattaacaaatttgtctttaactcatgtaatcataagtgaaaaataaaacattttgagaaaaatagcttagcttataggatttaacttttcaattattttcatttattaattttaaatcatttaatataaatttgcatgatgtaaaattaacttacgagattacgacatatatacaaaatatattttcaacaatgtttggtttctaaatatttttgtggatttctttttttttattaattattagccctaagcgtttgggtattcggatcgggtatttcgggttcggttttttgggtttagaagtttaggacccgttgaggtaatttatgattttaggtcgggttcgggttcgagtttatttatatattgaaatatcaaattttgtgtgcaaatctattaaattacttgaaaatttcaaaaattcccaaaacaacacgagtagttttgtttgaatatatctaaaaatacacaaaataactaaaatatccaaaacatcctaatattttctatatataagtataaagtggtagagcggtcggctgttaactgattggtcgtagtctttaccgattaaccaatttctaaacgctggagagtatgttaccgattaaaatatacttatatttgagatatgtttggatacctattcgggttcgggttcgagatttttcgggttttaaagtttagacccgttcgagtatttgaaaatttcgagtacacctgcctaaatagacgggccttatctagtataatatgatacacttctatatagtatagtccaattgttttgtatacagcaaaacactaaaatggttttttccattgtcccacatgctagtttctttattattacacttatcgtgctatattttaattcatttttcaaatatagctattcttgcaaatcaccctaaattctatcaacttcatgtgaacacataaaaatactttcaaaaattctcgatagagatatttgcaacccttttctttccagtctccattaactttatggtaatattagaatgaccaattggatagtcttcttcttcttctttggagtttctattttaaaatagttttaaaaagtcttgtcgcgtgcttgttgctttaggaagctgatgatgttgtcagtgtcactgcgaattgctaggaaattttcaagtggggtcctccactactacttgctcctcgttgcttatttagtcttctctctatctctctctcgagctccattgacttgacttggtggtatccaatg

SEQ ID NO: 3274 - DNA, 3000 bp, Unknown
  misc_feature (1)..( 3000): cDNA_ID_1820147_gDNA_ID_1620636_Annot_ID_47372 3000 nt of promoter + ATG
tatgtgtacgaggtaagttcttacgtatttaagccaacactcctgatgtttatgctcataaatatctggagagaaacaaccaaactcagatgggcaataaacccaaatattgcatctcgtttctccaggtttcgcacgctttgcctggtctaagcaagcctggcaacaatcagctgcactctctttatgatgtgtaagcccccatctcactgcagcaccaccataatctgtgtgaagctctgcattacatacagctggcactggtctgcctgccaatatttcctctacggaaaaaatgcacaacttcatgagatttgaattcgccagtgtcaccacacttttccacccaaataaatgcaaaagcagagatcaagaatgtagaaaattttgaaaacattaccaggctcttcctctccttcaggtttatcatcatgttctacattggtaacctcagcaggtaaccagaaaccgatttcttcagacagcacatcccactccaactccaaagctcttacaagcatccctagataattacagaacaaaaattagttttctctctaattatacaaaacaaggatagagtatcgggaggactccataaatgaatctttgctcaaggtgagaaactcagtaatctttctaaaggagtaatacctgcttcctccactataagggtggaatttactccattttgcccttgaattagctctttagcttcctccagcttctcattgcgccacgtttctacaacttctgtttgccaaatgaagataagaaggtattaaaggtcactacagagataacatgaatgtgtcaaaaggaaaactattgtaggcgaaaacattaacaagtctacgtgcattacgaatactacaagggaaaacaatagaactcagtttgaagcatcaaaaagaaatccagtgtcttcaaagtctggattattagaattttgtcacctctctctaaccaaataaattaacccattcctaccttccacctttttccaataactcttgtaaataactaagaattaacgcacattgcgcattagcctagtcagcacataataaatgttaagagttgttcaagtgaagtgaatagaatgaaaaatctacttttaacaagtcaaaaaggtaaatatcatgactttttggaattcttgagcatactttttctgatgcagtagaaaggaattagagaagcatgttgagacatacgaacatgttaggtaagctactgagaatctaaagaacatcgaaaagattatgtatacaatggcaccaccgctagagtttctgtggctcaaatgtttcatgtacatagcatatgatcatcaatgcatagattataacagaacttaagtgggtgttagagcttatgttccatagacctgatgaacttatacaagaagaatagaaaaactaggcatgaaaaaatctccattgaaaatcccgctaaaatcaattgttctgtctagtatgtgatagtgcatgcagaaaggtctgaaatttgtgagcctattttactatcctgataaccatatgcattattgagcaaaaatccacttctacatgaatgataatgaaatatttactaaactgagctattgataccaacaaaatcttacacaggttaggtaataagacaaatcaccatgacattccaaagaggtaataagacaaatcctaagcagctagatcaggaaaagtcatgaaatgcaagtttgtggcagtttgaaaaataaatgtcatgaagctaatgggcatagtagagtagcacaaacctctaagctgagtaacattagatttgtcctcaaagcttttcaaacgctggaggatctcatcaactagtttgtgtttaacattaggagatagttcagtactagattctgcagtggaaacctcatgcttgagcttcttcacctaacaaggaaatcaaacattgtgagaagagccaatgtgcatcttcgagttccattttaaaaagccactaaccaattgaagaatcagagtaggttccttcgatcttcgaatccgaatagattcctccattttcctaatctcatcagctgtgtacttaacaactgaataacaaaaaaccaacagagctgcttcagatacgaattatcatgaatcagagagcaaaaatgaaaaggaaaataaaaagtaggaaccattatcgttattggaatagatgtggagagaagaagcatagagaaagcgaagaacaaagagagcaatgagaatgttgaaaaagcaaacaagtagagtgattcttttgaaagagagaactccggttccggcgatccctccggtccattctcctcctcccctcgccatctccctccgccgtcatcccaccatttctcaagatctcgcttccgattataattacacttttgctttaaatcgaacacttgaaagagagattcgatttcttttttttttgcttcttcttccggcggaaaaaggaaatcgtgggagatagagagagagagcttttaattattactctattaatttatttttcactcgacagagacagagatatataccaatctcatcaatgcgtgtggataaaaacgtcgtatgtatttctttggcagcgtctatactagataggaagttttgtagtattatttcttgcaattgttatgtaaatactacatctttaaatgtggtgataatcctatgattcatgtcattgccatttttcaatccaatatatgaaaaaaatggaaattaaatttttgaaaaactaccttttacctagctccttgtcaacatacgaattctaattgagactctcttcttgtagcttttcttttctttgcttataatcagaaaacacaacacacccgatcattccccaaccccggtttaaccaaaactccgtgtcggtcatatctatctgcgtgatcttccttgaaagtcgagagatctgctgattagggtttggattcgatctttgaaaaagttggcgagtggattttgaatcatg

SEQ ID NO: 3275 - DNA, 3000 bp, Unknown
  misc_feature (1)..( 3000): cDNA_ID_3409023_gDNA_ID_1620636_Annot_ID_47373 3000 nt of promoter + ATG
accaaaagaaagcttactgagatgaatcgagatgggtcaggaagccaaggctcaactaaagctgcggcgtggaaaacgatatcgcaaccggagcaagcatccgttagagaacggtaatccgttacgtctccataggcgagctcaacttctggaggtaagtcagagagatcgctggtgcggcggaccaatgcacgtacggagtggccacgacggaggagaacgtggcagagtcgtgcgcctaagtaaccagtagagccggtgactaatattttcatattttctgtttctgtgttgggcatctttgggcccatcgttgcttttctaagccaagaaacctctaattggttgagagggtttaattaattaatatttaatacaaacatcattgtctgaaagctggatcaaccaatagcaagattcttttgtgttttgttttgtcacatactacagataacaaagaactagtaagtttctcatttgagtgaaacaaaatttcaaattacagacagatccacgaaaatacaagatgacataatgagtaaagaaatctcaattcggtgatagctagttcgaaacaagattagagcacgaaccttgaaacaagattacacctctcctctgtatccatcagagccaaaatggtctttcctagaactagatatagctacactcttctgatgttcaaattttggacactgtagaatccgatgcccgagaccaccacaataagcacaacccttgacaccgcttgcattagcaatggtttctgtttcttccattggaccattaagctcagcaaggacaggtggaatcctctgtttagcttcttgcaacaagtgtttcaaatcgagcagcgtgatttcgctttggttcttgtttataaacgtagttgctatcccagttttcccacagcgacctgttcttcctatcctatgcacgtagttctcaatctccccaggcatgtcgtagttgattacatgttgtatatcagggaaatctaaaccctttgaagcaacatcggtcgcgaccaaaacgtcttttttcccagctttgaacaaagatattgcgtaatctctgtcttcttgatcttttcctccatggatagccactgcttccactcctttcagtaacaagtactcgtgaatatcatcaacatcagctttgttctcacagaatattaaaaccggtggagtggttttctgcagacactccagaaggtaaacaatctttgcttcttgcttgacgtattcaacctcctgtatgacatcgagattcgcagctccagctcttcctacattaacagttacaggtttcaccagagcacttgtggcaaagatttggatttttgcaggcattgtggcagaaaacaaaagtgtttgacgctgagacttaaagtggtcaaagacatgtcttatgtcatcttcgaaacccaaatcaaccaacctatctgcttcatccagtgtcaacaacctgcaagcatctaagctcatctttttcttggcgaggatatccttcaaccttccaggagtagcaacaacgatgtgaacacctttcttaacaacgtccaactgtgatctcatatccactcctccaatgcatagcaacgacctcaaccgcgggtatccatcctcgactaaagatgccacaaactgttcaaccacatcgtaagtctgcttagcaagctctctagacggacaaataacaagcgcaatgggaccttctccagcagctataggcatcattatctcctcctgcagagctaatatgatcataggaagcacgaaaaccaacgtctttccggaaccagtgaacgcaatcccaatcatatctctgccagacaaaacaacaggaagaccctgaacttggataggagtagggtgcattattcctttatccttgagcatacggagaagtggactcggaaatttcatatccatgaagtttttgattggaggaggaatatcttcaccgttaactgtaatatgccattgcttcctaatcaaatccatctgtttggttgacatcttcctaacgtgcagagggggtttccaccatgttgagagaggctctgtataagtgatacctctggctaattcaccaacagacataagcttcttcttgtcagataaatgctccatcatccccttctcttgtaaaataatggcctcggtagcactgacttaaggtacatgtcgcttgagctgagttgcttgaacaagtaagctaggtttagcttcttcagtgagctttaccttgccaggttcttccaccacctttcgcttcatctgcgctagacgctcctctactggaacatactccacgtaaccatcatctacttccatgattcaaaatccactcgccaactttttcaaagatcgaatccaaaccctaatcagcagatctctcgactttcaaggaagatcacgcagatagatatgaccgacacggagttttggttaaaccggggttggggaatgatcgggtgtgttgtgttttctgattataagcaaagaaaagaaaagctacaagaagagagtctcaattagaattcgtatgttgacaaggagctaggtaaaaggtagtttttcaaaaatttaatttccatttttttcatatattggattgaaaaatggcaatgacatgaatcataggattatcaccacatttaaagatgtagtatttacataacaattgcaagaaataatactacaaaacttcctatctagtatagacgctgccaaagaaatacatacgacgtttttatccacacgcattgatgagattggtatatatctctgtctctgtcgagtgaaaaataaattaatagagtaataattaaaagctctctctctctatctcccacgatttcctttttccgccggaagaagaagcaaaaaaaaaagaaatcgaatctctctttcaagtgttcgatttaaagcaaaagtgtaattataatcggaagcgagatcttgagaaatggtgggatgacggcggagggag

SEQ ID NO: 3276 - DNA, 3000 bp, Unknown
  misc_feature (1)..( 3000): cDNA_ID_1820143_gDNA_ID_1620636_Annot_ID_47374 3000 nt of promoter + ATG
cgtatctgaagcagctctgttggttttttgttattcagttgttaagtacacagctgatgagattaggaaaatggaggaatctattcggattcgaagatcgaaggaacctactctgattcttcaattggttagtggctttttaaaatggaactcgaagatgcacattggctcttctcacaatgtttgatttccttgttaggtgaagaagctcaagcatgaggtttccactgcagaatctagtactgaactatctcctaatgttaaacacaaactagttgatgagatcctccagcgtttgaaaagctttgaggacaaatctaatgttactcagcttagaggtttgtgctactctactatgcccattagcttcatgacatttatttttcaaactgccacaaacttgcatttcatgacttttcctgatctagctgcttaggatttgtcttattacctctttggaatgtcatggtgatttgtcttattacctaacctgtgtaagattttgttggtatcaatagctcagtttagtaaatatttcattatcattcatgtagaagtggatttttgctcaataatgcatatggttatcaggatagtaaaataggctcacaaatttcagacctttctgcatgcactatcacatactagacagaacaattgattttagcgggattttcaatggagattttttcatgcctagtttttctattcttcttgtataagttcatcaggtctatggaacataagctctaacacccacttaagttctgttataatctatgcattgatgatcatatgctatgtacatgaaacatttgagccacagaaactctagcggtggtgccattgtatacataatcttttcgatgttctttagattctcagtagcttacctaacatgttcgtatgtctcaacatgcttctctaattcctttctactgcatcagaaaaagtatgctcaagaattccaaaaagtcatgatatttacctttttgacttgttaaaagtagatttttcattctattcacttcacttgaacaactcttaacatttattatgtgctgactaggctaatgcgcaatgtgcgttaattcttagttatttacaagagttattggaaaaaggtggaaggtaggaatgggttaatttatttggttagagagaggtgacaaaattctaataatccagactttgaagacactggatttctttttgatgcttcaaactgagttctattgttttcccttgtagtattcgtaatgcacgtagacttgttaatgttttcgcctacaatagttttccttttgacacattcatgttatctctgtagtgacctttaataccttcttatcttcatttggcaaacagaagttgtagaaacgtggcgcaatgagaagctggaggaagctaaagagctaattcaagggcaaaatggagtaaattccacccttatagtggaggaagcaggtattactcctttagaaagattactgagtttctcaccttgagcaaagattcatttatggagtcctcccgatactctatccttgttttgtataattagagagaaaactaatttttgttctgtaattatctagggatgcttgtaagagctttggagttggagtgggatgtgctgtctgaagaaatcggtttctggttacctgctgaggttaccaatgtagaacatgatgataaacctgaaggagaggaagagcctggtaatgttttcaaaattttctacattcttgatctctgcttttgcatttatttgggtggaaaagtgtggtgacactggcgaattcaaatctcatgaagttgtgcattttttccgtagaggaaatattggcaggcagaccagtgccagctgtatgtaatgcagagcttcacacagattatggtggtgctgcagtgagatgggggcttacacatcataaagagagtgcagctgattgttgccaggcttgcttagaccaggcaaagcgtgcgaaacctggagaaacgagatgcaatatttgggtttattgcccatctgagtttggttgtttctctccagatatttatgagcataaacatcaggagtgttggcttaaatacgtaagaacttacctcgtacacatactactttacccaattttcagtttccttgagattactcgtccaagttggactggaagcttggctcatatccaatatgtctatgtgaattgcaggcagagaagccaaaacagaatttcaaagacagatattctgagacatacagaaacaaccacccaaaagcgccatctatcgttccatgggtttcaggtgttgtaacggcttgagcaaaacccatgtggacagattgatgggagaaataggagatagttttggtttttttttctcagctgtgttaccattttcagagtcttgaaaattggagtaccgtaccaaagatgcaaacatcttttggccagatgtatacgagggaatagaatgttttgttgtttttgttgattggctttaaacacttgtggtcgaagtcgaatatggtgtaaggaatcatgtttttgttcaagcttgttcgattctatagtggatgattaaaaagctatctataaacatgacgaatgtctgtctcctgttatatgatcagatcaaatgtttatgtctggtctgtaattatgtcacaaaacatcacagtaaaactctgaaatgaaataatggttgaaatataggaactaaaaaaaacaaagcagaaattacggagggaaaagagaaaacagaggagtgtgttcatcttttgcttccggggttgtctctattctaaatatagactttccaattgtgtacctctcttttcttgtcttcttaatcagaaaatcaataattctcttctactttcttcatttttccctttctcttgtaagtctctcttttcattgattctttctattggtggcgagcttcgttcaatcgttttagcatttctcttgtaagtttcggccttgctttcctccg

SEQ ID NO: 3277 - DNA, 3000 bp, Unknown
  misc_feature (1)..( 3000): cDNA_ID_2049637_gDNA_ID_1620636_Annot_ID_162908 3000 nt of promoter + ATG
caaaaattcttaagacttcaatattatatgcacttatgctatgagcaaaacatgaaaatttcaagaatgtcactttctcagcaagaatatacactgcaactagagttctgcttacccaagaaaactgagcattgcggaacttgttgtcagatccagctaaatgtgcatcaagaggcctcaacttaagcaaccttggtgcggcaatcttatttcccatgcgaccctcgaagccggtctttgttttgccacttttgtcagtgaaaagggtacagataacaatcaaatatgtgtcagttgtaccaacaatccatttcccatcgaatgtagcatccacatgagtaacaggtgcaccaagtccagggaaagccgtctttgcctgcctcatagtgttgctcgagtagagtctaattttgccatcaagagagccaacaacaattgagccatcaccagtagttgcaaagcactgaaagttagtccctctagaaaactgatgcccctgtgcccaattcaagactggagtattcgcagtagcaagatcctgaaccatcccatatcggtcacgcatatcccacctgcaaagcctattgttatccagaccaagaaacgttgacgcagatggatccaattgagcacctttaccatcattagtaatgtcactcatagagatatccactccatctttctcaaacttccactctgaaataattttcccggtttcaatgtcaagctgatggatacctcgtgaatgaggcgtttggctcataggactcatgagcagcatattagtctcagctctcatgagaagagccttcttcggtgctgaagaatgagttcgaccataaccaggctcaaagttaacacaaacacctttcccttgaatcccctgtctcatgttcttgaaaacctgaataccagaatctccaactagaaagctattatctaaagcacctagagctaagctatgtatgccctcacttgtagcttcttcaaaggcctcagtcaaatcctgtgtatctctagccggagttgcagatcctcctcctgggctttgaagcaaaatatcatcagcatcttcccacatggaatcatcagcagcttcaggattagcccacccaatgaaatctttcccatagatttttgccttgttagcctcattaaactcaacaccatgattgttctcaaacaagcaattgttatagctgcttacaaaaaccgaaaaatcttcactgctggcgaatttcatagcccaaacagctttagcaacgaaatcaacacggcgttgatctttataagctttcaattgcatttcatctgataccttttcacggatcttgcttccgactttcaaaatccaccattcgttttccacatctccgttctcatcgtcgtcttcatcatcttcatctcctttgttagtcttgacgaaacaataagcagtcagtttctcagctgtgacccatttggctttgggagtgttgccattgatgtagcggaaaagccgagctgagttctgagtagacggggctgattgcgtcaatgggtatttcagcttcagggcttggagttttgcctcaacgtcgtcgagtgatgatgaaggagatttaggccggagacgacgaccaccggaggaagatatacctaacgtatcatcccgcgagtcctgaaacgtctcttcctcttcctctccctctcttccttcttcatattcttcatattcatcttcatcggaggaacagatctctagatcttcatgactgtgagatgctcccatatcgaagaatcctggaaatgggaagagctagagagaataacggcaatgagattattcaaacgaaggtgggaagttgaagaagaagagagaagagcgtaaagttcgaattttgaaaattagggtttttcaaaagcatgtgttcctgttcccctttggacagattgaagttaaccggctatagcccgtaaatgcggatctgtaagtactttcatataccggctatagcccgtaaattcggatctgtaagtactttcatgtaccggctacagccagttgaaatttttatgatttgtggttcattcaaattcaaattagaagtggtccgatttttaagaagtacggttatgttgtgatttggtgatgctgtaacttcgtcttaaatatgttgtcgttttgactcgcattacaatatgttatcgtttaatttacgatacactgtaattaattaatagtttcaatattatagaaacgtttggtcctttagtcggagagactgatatgcgacagaggatccaacgtcgcgactgaaacctagatcccaattctccgtttccaccactgtctctcctccgtcgttagggtttctcaggtgacacactccgcttctcttcttttccgtcttgatctaatttttccgtcaattggtttctgcaatctctacgtttcttctctttcaccttagatattgcttgattcccacattaattgttgctgagaagtataattaatttcttgatcgaatttaccagttctcaaagttttgtgtccgttgagtacaacaaattcctcgaaattgagtcattgattgaaataccaacttaatttttgatttctgggtttgttattaaaatgtagacacacacttggataactgagtttccttaacttcaatctggttataaacaattttaaatttaccctttttcttaaagaactcaactttagcttgaggtctgaatttttgtgccaaacatgtacttagtagcttagtaaccatgtcttgtgaactattatctttcttgatgtcccttgttctgtaaagttcgtaaaaacttaatctttttggttttaaggtggcttacatgaggtttgttggtgtgattttttattttacaggttcacatctgttggaaacttattgcaactcctaaaggcatttcacatatttgcttttatgcgtacgaggcttgggggatatttatataatccgaaataactcttttcttatc

SEQ ID NO: 3278 - DNA, 3000 bp, Unknown
  misc_feature (1)..( 3000): cDNA_ID_1820139_gDNA_ID_1620636_Annot_ID_162907 3000 nt of promoter + ATG
actaaaacttcttcattacaaaagccaacgttttttagtattggtatctctattcataagaaaaaattaaagaacttgttaattgtttatttttcctccctttgagtaacgcaaaaaaaatgagggatataagacatcatctctctttctgaccaattttttttttttttttctttttttgggaacttaagaatacaagaattcttgatctgatgttttcctactaagcgtctttgttttatgtaatatgttttagatttctgaatcatcttgattgatataataaactcagatctctatttcatgagatttctcaatgggattagataatgcaggtccttcccacagctccgcaagatcctttctccgccatgacatgaagatcaccggtcctaacgtagatggtacctatatatccacatcgaaaacagattatacatcataatctcactatacttcacactgatcaagctcttaaaatcattggattgagactacaaagattctatcaacaaaatttcagttgaatcaagtgttgatatcggttgtgcacaaatacacgtagtagaatatatacttttgatgttagaccaagaggaacaaagaagtcacatgaggagaatattaccagataaagtagagctggctgaggtgagtgggtcaagacacctgcagctagagccgccaccaagccaatggcatatccgggaagtgcataccaaatgtatttgtgtcccttggaagattttagatcaaaaatattcaccacatctctagtttttcgatggtcaaagcagaggaccaaagccaaaagcattgcagggatagcctggaacaacaaaacagttaatcaatacaacatgttttttttatctcctcgtcactatagtctgagagagaacatttcttacagttagtacacatataacgacataccaatcttaaaatcaaagaagggattagtctgtaccatgtcaccaagaccaagcatcatgaaatctgaggcactcacaccgggcaccacaccgcccaataggttccgaggaaacacaattttaacaggtagttccagtttctttgtgatcaattgcagtccaggaagattcaaactgttagccactgtgtgaactgggtttgatgcttgctgggttgccacggccaccataacgttagcaccaaagaatctctcagagaagaaaacccagaatatgtcatatacaaagagacacacgaggagcattgcacagattttgatattaggaagacgaacatggctaacaaacgcaatacaaatggagattccgagcaaattgttcaacacccaatggccagagatgagccatgccacaactgtcatagcacaagccacaagtagcaatccttggattcttgtaaacgatttggagcagcagcgtgaaagaaagggatcagatagaccaagctgcgtcttcatatataccgcatatggtgataaccaatagaagagagaagaaacagaggcgatggctgtaaacgcggtcaggagctgagaaacagaagagaacaaatagaacatgagaagcaaactgcaagagctcataactgggatcatcaaggcctgagagctatctagtgttatggatgcttcagagaagtcacggtttctctccatctctttcccgtagttaagtgcacggaaagcggatgcaaatgtcacggtgacagctgtgacaatgagagtagctggagcaggttctagcaaatacaaaagagtccacagagtctccatgataagaaaagagttatttcggattatataaatatcccccaagcctcgtacgcataaaagcaaatatgtgaaatgcctttaggagttgcaataagtttccaacagatgtgaacctgtaaaataaaaaatcacaccaacaaacctcatgtaagccaccttaaaaccaaaaagattaagtttttacgaactttacagaacaagggacatcaagaaagataatagttcacaagacatggttactaagctactaagtacatgtttggcacaaaaattcagacctcaagctaaagttgagttctttaagaaaaagggtaaatttaaaattgtttataaccagattgaagttaaggaaactcagttatccaagtgtgtgtctacattttaataacaaacccagaaatcaaaaattaagttggtatttcaatcaatgactcaatttcgaggaatttgttgtactcaacggacacaaaactttgagaactggtaaattcgatcaagaaattaattatacttctcagcaacaattaatgtgggaatcaagcaatatctaaggtgaaagagaagaaacgtagagattgcagaaaccaattgacggaaaaattagatcaagacggaaaagaagagaagcggagtgtgtcacctgagaaaccctaacgacggaggagagacagtggtggaaacggagaattgggatctaggtttcagtcgcgacgttggatcctctgtcgcatatcagtctctccgactaaaggaccaaacgtttctataatattgaaactattaattaattacagtgtatcgtaaattaaacgataacatattgtaatgcgagtcaaaacgacaacatatttaagacgaagttacagcatcaccaaatcacaacataaccgtacttcttaaaaatcggaccacttctaatttgaatttgaatgaaccacaaatcataaaaatttcaactggctgtagccggtacatgaaagtacttacagatccgaatttacgggctatagccggtatatgaaagtacttacagatccgcatttacgggctatagccggttaacttcaatctgtccaaaggggaacaggaacacatgcttttgaaaaaccctaattttcaaaattcgaactttacgctcttctctcttcttcttcaacttcccaccttcgtttgaataatctcattgccgttattctctctagctcttcccatttccaggattcttcgatatg

SEQ ID NO: 3279 - DNA, 3000 bp, Unknown; identical to SEQ ID NO: 3276
  misc_feature (1)..( 3000): cDNA_ID_1820143_gDNA_ID_1620636_Annot_ID_162906 3000 nt of promoter + ATG

SEQ ID NO: 3280 - DNA, 3000 bp, Unknown; identical to SEQ ID NO: 3274
  misc_feature (1)..( 3000): cDNA_ID_3092946_gDNA_ID_1620636_Annot_ID_162904 3000 nt of promoter + ATG

SEQ ID NO: 3281 - DNA, 3000 bp, Unknown
  misc_feature (1)..( 3000): cDNA_ID_3070973_gDNA_ID_1620636_Annot_ID_162902 3000 nt of promoter + ATG
aacaatctcatctccttttctttttcttacttcaacttgttttttttaaggcagtaacaattagtaaggatgaaaataatcacattatcattaagctgagatgtcaaagcgattatgatgagaggaaaagaaaatgaaaataagtattggtaagacatcttagttttaataatcgtatatcaaccaaatttgatcaataattagcttaaaccaacatatcattttagaggcctcaacctcctttgaataattaggctgatactacattctaatgacagatgaataacgtacatctccactttttaaaacaaacaagattatgttatttgatttaggtatccgtatatgccaaatatatttttctggatgtaagaaccacgagtaacatgttgatgatgtgtttaagtggtaaaaggagaggagaaaactaaattttgggactgtgttgagctctttgggcaattgataatattgcaaaatctcaaaagaggctgttttttttttatcaagtaaaaatacacacattgtgtctattatggttttactctttgatcaaatcctgcatgtgttgtgcataacttcttcccggtggaatgaatattacatcttcccaacctgaattcttctcgctcatctacattgattcaattcagatttttattagactaccaggttttcatactttaaggtttctttaaacaaagaagaagcgtgagtacctccattttcctcaacacatcttccagactcccaacctgcaaaacaaaaagattagttccatggtgaagataagaaaactcttaacaaaaccaatgctgtgaaattactttatatattgatctctgatatgcaactttgataacgataaaccttggaattcattttaactcagatatatgaaggcatgtacaatctgaattccgctctttctaaagttttctaagacttttccctttccctcgctgttcctttgaaaacatggtgttatatgtttgcagaacatgtaatcacaaaaaatgctagaaattacatatgatgccaacacagctactagctactcccacttgttagtaaaccatgtctttagatcaaggtgtttgtttctatcttacgtggcctatcgaagattcaaatacatagaaggtaggtatgaatcattaccataatttgttgatctcctcttgatgctctcgtatatttagaaagttccctctctatatcttcctgaaagtggtcacgcagaacaggaaagtaagagttatcttcctctgttttggcttatgagagatctattagtattctttaacgtgggagaagaaactaaccaaccttactgaaatatacagggcagtaacgtctattttttttcctcacaacaagaagctcagactgtagaggccaataacaacagatagatatcaagagaaaacaaagcaaaaacaccaaaacataaggaatccatattggtataatagaaaaacacagaaaatgagtatatcaatttacctgaaaaaccggaactccatcaaacccattcttatttcctgaggatttgagctgagacgcaagaaaatatagcttatggataagattgaaatgccaaataaatgctatagacacatataattaaaagtctgtttagcatgagccaacctctaacgcattctttatttggattggatctggcaagaagcgaaaggaaatcccttcaacttttagcaagtacacctgtaaacaacatcatcttaacttctgggaatgtagctaccacgattacgcaaataacatcaaaaagttccctaaacgtagttataacttataagttccaagccattagagggattataatcatgccatcgttgcattctttcttgtgacgatgttgtcaacattgctacgtgcacaagaacacaatctcccgttcattcaaactgccaacaggtgttcctattaccgtataatataaacaactaaaatgaggccagacatgaacaagtctacttagaatttgagctcctgaaatttgtttgtttcatttgatttaaccaatggcttcttccacattgatctaatgcagtgatcataaggaaagggaactacctggtccagagtaatgggaacaaccttcgcattggttttcaattctcttctccgaagtcgcgcctaaaggagtatattagagaattatgagctcagaaacttcacatttttttaaaaaagttcggaggagaaaaatacaacaaaaagcgaaacctgagcaagaaaagcttcagcatcctcttgtcgaaaacagagcaaaccgatagacttgcctccggtaggatccgagataagaacgaattcgttattggtgttactgactgtaaacaccgacgtcccagcgagagctttagcgacaagagatggactcaacgtcgtcgtcggggttccagacttggattgtgagacggaggcgaaaggcggcggagtaggaagagagaaacgtcgagtagctagggtttcggcgaatcgtttcgtgtcttcgattcgggcggagaggtcggagctgaagcgggtacactggtggtgaatgaaagaagagaaggagaggaaaggattgggtttcactgatgactccatttttggatttgcagagagaagaaagaagtagaagaagaagaagcaatttttgatactatgaagagagtgaagaaaaaggcttcagagcaattcgtttgggcttttttatttgggctttattggacttgattggttttagtttacgtttaatatggcccttgatcaaaagtttggtgacaaagcatttattaactttctaaactcaacttccacaccattctaaacacatgacatgacttacaaaaagcttttgtcactcaaaattcatgtcgatgacatttttttcctccaaatttctcctccttataaaatacttactagatcaagcaaacaacacactaaagaaaacaaaattgttaaaactctcgttaactgaaaaat

SEQ ID NO: 3282 - DNA, 3000 bp, Unknown; identical to SEQ ID NO: 3273
  misc_feature (1)..( 3000): cDNA_ID_2049665_gDNA_ID_1620636_Annot_ID_162896 3000 nt of promoter + ATG

SEQ ID NO: 3283 - DNA, 3000 bp, Unknown; identical to SEQ ID NO: 3271
  misc_feature (1)..( 3000): cDNA_ID_3092962_gDNA_ID_1620636_Annot_ID_162893 3000 nt of promoter + ATG

SEQ ID NO: 3284 - DNA, 3000 bp, Unknown
  misc_feature (1)..( 3000): cDNA_ID_1822589_gDNA_ID_1620636_Annot_ID_162892 3000 nt of promoter + ATG
gcttttatgcagtttgagcctgagcgcatgaacactcatatcgtggctcgaatcttggtcaaggctcttatggctatgccaactccagacttcagcctttgcctcttcttgattcccgaaagagtggtattcttctttcctcttaacttcacaatgttttgctttcttacatatatagcttatcgtagatacagaagaaacgattgttcaaatgtttctgactcaagttattatgccattccaagttatttctgtcagttcagtctgtgtactgagcattcatgataaagtgtgagtttcaatgtgttggattcttgaggactaataaatgtacttgtttggattgtgtgtttcagcaaatggaggagcagttcaagtcactaattgttctatcacactaccttgaggtacgcaaacatcagtattagttagttgagagttgaaaaggtgtgcattgagtatttaaagcacttgtttttcttttgcagactgggaggttccaacagttctgggatgaagctgccaagaaccgtcacattctcgaggctgttccaggtaactaacttctgaatcataaataaatcgtctactaataacaaatttctagatgtagatttgttacttaaggatatttgtgtgtagatgtcttatggtacgaacaaagtcctcagtagtggtttatggtactgtctattcattttatgattgtgtctagtgtagatgtcttatatgcgagagattaaatgcaggttttgagcaagctattcaagcatatgcaagtcaccttcttagcttaagctaccaaaaggttccaagatcagtgctggctgaggtatgatgtttggtttatgatctcgttttcaccacggatagcttaagtcatcaaaatagtagaacttcggatgtgaaatcttttactttctcatataattttctgttacgaatattccacatcatagttctggaaatctaatttgttgaccttttatttgtcaataaatgacaattttcacaggctgttaacatggatggtgcatctctagacaaattcatcgagcagcaagtgactaacagtggatggattgttgagaaagagggtggaagtattgtcttaccacaaaatgaatttaaccatccggagctcaagaaaaatacaggtgagaatgttcccttggaacacattgcccgcatcttccccatccttggttgaaccaattcatgagaacactgcaaattttccttttgtctcttgttatcttgtgatgtacacttttaagacaccgtaatgtgaattttggcaatggccttcctctttgcaatttgacagattttcttaaaaatctagtagaccgagactttgccataattagtagatcttcatagtctgagctctgcttcttacctttttttttaccttccatggattccaatactggtttctcaacaagtgttggaattggctcgtttctgattgattatcttctgtttacttcattacatctaaataaactaaacgaatcttcagacaacccaaacaattgtcttctttaaaaagcaaaggaaaaaaaaaacttttgtttaggtttcttggaatatagaaactgacacggcaaatttgtattgagaaagtttgaaatacaaagagactgtctatgtcttgtcgtcctctctacacagatcacatacgaagattgacagccatccatttggaagctcacatgttgacaccaaatcatgtcacgtgcacaattttctcttttcccatgcatattttgactgctccctatgtgataaatttgactgattaaactataattagttagatcatctcgtatctaagatgattgcttaaaacaatactattattctactaacaactaggttattcccaagatcataacttttgattttgatgtaactagttttgtaattttgtacatatatgagacttttttgaattgcttaacagaataaataattgaattttatgaatataatatataaattttcaatttgatcgacaacaatgaacggtgttttatttataattgtttttttgacaatcatgaacctaatgatttgttttttctattttatttagtcgacataatgaagactaatgaagatacaatatgtgattgaagtgaacaagttagatttaattaagatacgtggaggatataaagaagggtgataaatacgtgaataaaaagtgaaataaacaaaggcaaacgatcagacagacaagtcgtgaacataaaaacgggagagacaggaaaaacaaaagaaagccagacgagcaccaaaaaagaaactgcaaatcttcgtttatgtaaatcttcttaccgtctctctcttgtatttcttcaatttcaaaggtggcttttttttctttctttgttgggtattaatctgagagaaattgaggaaaactgttttcccctttctatgttctcagcttggcacttttctttgagattatggttaattggttcccttttggaaattgatttcaaatcttatccagaagaaatttggtgccttctgtttttaaacaaattttctagagtttccgtgtttaatttttgtttcttattttgttttctattaaaaaattcgtttcttgctcgtgttagttttcgcatttggagtttcctgacagcgagagttgctcgttttctggggtcacaacagaagaattcgagcttggaagattgaaatttgagatcttttgatcttgaatcaagcataaattctggattttgaagtttgagagtgacccagtgactttggtctgaatctcggaggtatcttattccaggtaaaatccattaacatctctctctctctctctcaagctcctttcttcttttaagagaagtttatgttgattttcgtggttaccattcatcttcagggatcaaggattagacttaatgcgattaagcaaatgggtttttcacgatgactctccttgttgttggggagattcaataaatg

SEQ ID NO: 3285 - DNA, 3000 bp, Unknown
  misc_feature (1)..( 3000): cDNA_ID_2147485_gDNA_ID_1620636_Annot_ID_162923 3000 nt of promoter + ATG
aatgctacgagaagaaaatattaccataagcgtttccaatcgcgaagatatttgaggtagagcagacaacgatcagacacaccaccagaagggaccagttaagaaccggtatataaatctgtccaatgaatttctttgaggtgtgaatgattttaagacgtgggaaacagcctagtgctattgactgtttgatgcatgtaaatgtggctgttgtcattgcacgactggcaattaaagcagcaacattagaaatgagaaagactggccagaacaaagaacctgaaaataaaaaagagtgataaacagttagaaacgtgaaatgagaggtaaaatcaagccagcaaatgaaggaatacccttgttgatcttgacgtactgtggaagctagtggatcttacttggaactgacgaaaagaaagcatccccggcagcgctgaagttttcagagaggtatgcggcttgacccaaataacccagcaagaggcaaggtaacaccagaaggataaaagtaagctgcagataaacaccagtactgaatcaaaagttcagatgactctaagaaagacaactatcagaagagcaataaatgagtatttatctccttaaagtacctggatagagtgaacagagaaatagctaagatctgcaaacatggcctccgatcctgagacaagatccacatgtatagaaatgagcaatgacatttagtcaaaaagtcattcaatgtatttaagctttctaaaatatttcccagaatatgaaacttaccagttgcacataaaacgcaacccccaagtgcataccaagcatttacagagtttctcttgaaaaagaaatagatatatgcaggattgaacgctttaaaaacgctgctgtcatattttacgaggttgtaaattccaatgcccgctagacaaaaaaaccacagaagtaaagcaggacccaaaacaagccccaatttgctggttccatatttttgtacactgaacaagatcacaagaaagctgactgatatcacgaccacctgatctgcaaatgaagccatagtcagaaactttacacaaaaaatagtcactaatcactcatcaagataagattatgttttttgaaagctttgtacaatcattagcccctattcagggggcagaagagtttaccctcttctttgttgtatctataatctaattgaagtcaagggacccaggatgcaaccattaaagacccataaaaagttttctggtccaaggaatacatatatccaaggaacgattacaagttttgaaagccagacgaaatcatgctcgtgaccatacataggcgctaataaacgtcaactagaattagttaccttgttctataacaccaactccaaccttcagaccaccgatagcagacattactgtgtccaaaaaagagggtaaaatttagctgcagattattcatgcaacgataatgctcacatgctttttctctatacttgatatgtgacataggaacaaaaaatgtagcctgacagcatataagtacctgacattgctggcgtaacaacagcatcagcaatcaccatagcagtgccggcaagaactaaaatcagaagaagctttttcaaggccattgacgcctcaagtctttctttaattatcaatgatctttcaagttctggagacggaaccttcaaaccaaagcctgatatgcgagcatctgatggaagttgatttgggataaggctaacatttgcatgccggcagatcaacgaatacaaagcaaacgtcccacctgcaattcatttccaaaacttaaacctttaaaccttaaatgaacttcaatctacaccatataaagaggaagagatataccttcgccatcgtcattggcccaaagaacaaaatgtacatactttacaagaggaatcaatattaaagtgtatataaccaatgacaaggctccaataatatcttctttgtcgttaattggagatcttctgaacatgacagtgaaggtatacaatgggctagttccaatatcaccaaatacaaccccaagtgtctgcaaagcaagtatgagtttctttcctataccagtgtcctgaaaaaacacattaccaagttcaacaactcaatcagatcgaaaagtaaacaacatgaagaagaagaagaacattcacacacaaatgctaacctcgatttcgtttttctgagttccaggaatctcaagagcatctacatcgaaagagtcaacggcagggctagtgcgaatcaaacgctgctccacattgtcatcctcctcatcggaatccatttccgggtgattatgctcatcatatccatcatcgtcgtaatcttcattaacctcataatcatctttctcatcgaacacccatcgcgacaatgacgtcgttgaatcgtctccgccaaactcctcatcaatctcagacccatcgcctccactgctttcttcttccacgtgaaacatcaatcaccgttggaaaacactgaagatctcgagattgtgattcagattcgtatctctgatccaaggaaacaggattggaattggtgtttttgagagattgagagatggaagagagagattgatctacatacactggagaggacctggcacgaatgagaaagaagcttacacgtgtccaatcatgattggattcgagactcacggtttaaggaaaaacaaaccagaccaaattaggcttaaccgctaaaaaaccgggttctcgttttgaaagattgagagagacgatctacaaaggaggacaggacccggcacgaatgagaagaagcttacacgtgtccaatcaggattgaacgatttaatcaagcttaaccgtatgtaaaccggattttagctgggtccacaagtagtcaaatatagattttttaatagtcaaataattttcataggggcgaagttcaagatgagttactacactcatcaaagctcacaaaaagagaagagaagagacgaggatcaatcaccattctc

SEQ ID NO: 3286 - DNA, 3000 bp, Unknown
  misc_feature (1)..( 3000): cDNA_ID_1820105_gDNA_ID_1620636_Annot_ID_162921 3000 nt of promoter + ATG
aggaaacacgaagacttacgagtgctggacacgagatcgaacttctctggagcagaattctccggtggagaagaagaggaagctgaagactttgaaggtgaaatggaattagccaactgtagctgagaggacaatcggaactcaggaacggaatatctgattccaccgggaaatctccatgaacggtgaagagaacaagggaagatgagaaaaggaggagcttgaagagaaagaatcaaatgatcggccataacttaaacattgaagtctgtaacaaagagtgtcacagaaatggtttagagtagacgaagaagatgataattgggtgacgttacaaccggtggtaaccctctgtttctatcagatgtgttcgcttcacagatattttgtggctaccgtttttttttcataattgggctataaaaatcatatctttttgactcttctcttctctatccattctctgccgaactagtcgtcaatcgaaatcccaaagatcagcgatggtgactctaaacgcttcttctcctctcacgaccaagtcgttcctcccctaccgtcacgctcctcgccgtccaatctctttctcccctgtcttcgccgttcattcgactgaccccaagaaatctacccaatcagcctccgcttcggttaaatggagtctagagagttggaagtcgaagaaagctttgcaattgccggattatcctgatcagaaggatgttgattcggttctacagacgctttcttcttttcctcctatagttttcgctggtgaggctaggaaactagaggataagcttggtcaagcggctatgggtcaagcctttatgcttcaaggtggtgattgtgctgagagtttcaaggaatttaacgctaataacattagagacacctttagggttcttcttcagatgggtgttgttctcatgttcggtggccagttaccagttatcaaggtcgattctttacctggagatttttctgtgtgatgaatctctagttagggatagtttatgattttgtgggttttaagttttcaggtgggaagaatggctggtcagtttgcgaagccgagatcagacccatttgaggagaaagatggtgtgaagctgccgagttacagaggagataacataaatggtgatgcttttgatgagaaatcgaggattcctgatcctcataggatggttagagcgtacacacagtctgtggctacgttgaatctcttgagagcatttgctactggaggttatgcagctatgcagagagttagccagtggaaccttgatttcacgcaacatagtgaacagggtgacaggtttataaacttctctccttgtttataatcttgtttgttatgatgttaaccaattgagaatacacttttcttaagtcagaaacggtttcttatttcttgatgttgttgtgacaaaacaggtaccgtgaattggctaatagagttgatgaggctttgggattcatgggtgcagctggacttactagtgctcacccgatcatgactactactgagttttggacatcccatgagtgtttgttattgccttatgagcaagcactcacaagagaggattcaacatctggactttactatgattgctctgcgcacatgctttgggttggagaacgaactcgccaacttgatggtgctcatgttgagtttctgaggggaatcgctaaccccctcggaatcaaggtatgtgatcatcaagtctcttggtttggttaattggaataggagtaagtttcatagctttgttcgtatagaaaaaaacactgagatgtagactcaagaactgttgttaactctataggataccctgcaggtctcaattgcctggtattaaagatattggaaaaccattacaaagaggctacaacagatttttgtatgagaaaatgacagatgttgattgatgtactttgatgcaggtgagtgataaaatggtccctagtgaactggttaagctgatagagatactaaaccctcagaacaagcctggaaggattacggttatagtgagaatgggagctgagaatatgcgggtcaagcttcctaatttgatcagagcagtccgtggagccggtcagattgtgacttgggttagtgatccaatgcacggaaacacaatcatggctcctggtgggctaaaaactcgttctttcgatgcaatcagggtaatcattcgaacttacttcttcatccaactctatgcataatcttgcttatgattcatgtagttacccattaaattatatggtgtatcaggcggaattgagagcgttcttcgacgtccatgatcaagaagggagtttccctggcggggttcatttagaaatgactggtcaaaacgtgacagaatgtgtcggagggtcacgcaccatcacttacaacgatctaagctcacgctaccacactcactgtgacccaagactcaacgcatctcagtctctggagcttgcattcatcattgcagagcgtctgcgaaagagaaggcttggttccgggaatcttccgtcatctattggagtctagagaacaagaaaatacttatccgagctaggatgtgtgtgtatagaggctgatctctacttattaagttgccaagttaaatgagcttgtgtactgttaaaagtaagatattgttgtttttgtgtgttgggttatgattttgtctgaaataagtggctgactttataaacccgtaaatctctacgtcacgcttgcaacaaaaattcgatatttgattcaatcacagaaaagtcctcccattaaggtgtaaatttttgactcaaataccacaaagcataaaccttttgacaaaccaaaagttgtatgaagaaaattggaaaactctgaatgccatttccacacgtggacactattcgtttagagaacacttaaacaaacgcaggaggcctggaaaaaagaaagataacgggactcgagagattgagattacggagccacccactttc

SEQ ID NO: 3287 - DNA, 3000 bp, Unknown
  misc_feature (1)..( 3000): cDNA_ID_1842843_gDNA_ID_1620636_Annot_ID_162920 3000 nt of promoter + ATG
aattctgcaatactgtgccatccctaatgaccatgaatcccgaatctccaatattggctatgtggagttcctacaaagtaattttacatgatcacagactgactctatctcaaaaggatttccaatgcaatatatatgttagggaccaagtctcacattattgtcaagatgagcaattaaggctgttgatgatccagaggacttagtctcattgacacttctatggagaacttgaactgggtcacttatcttagcagtttcattggaaataatcttttcacagttgctcatgagttcttgagcatacattcccttattgattcctgaaagatgaatcaaacatatattcggcaaggccaaatacaagtgactgagtttctgcaagaatttggaaaactatgtgaaaatacttatatacagtatttaccttcaaatgaccactgagagactccatcagcaatacctatccaattgtggtgagagataaaataagcatcttcccgacctgccaatgcctggacatcattatttctaaattactaaccacataacataagtatagggatttaaaattcaaaaattgtcagaatgttaaaaatgatgtttttgaggtggttggaaatgagaacaagatatgaaagatcttgagatatagagtgttaataattaatatttcaacaactgtctcttatttttgtgtatactaaacagaaagaattacaggtaccttaaaggggctttggagtgaagcaaaaccagagtccaagtaaaatgctttggacacaagttcttccctgtttagatgtcaaacatccaaccatagcaaaacaatcatgcttttataaaagctgcaatatgattcctagccctgtatgaaaatatgaatagatacatacatatatgcatgtagctgtatctgtgcaagacaatagtacagtttgtctaagaagagttaaatatatcacttactaacctgccagaagccgctttaatgggttcaagactggccgtttcaggtacaggaagttggagatcttccacttttgtgtcatcattattggatatgctaccactatcagttattgtgtccctcacagttatttcatcttctgtggttgaagctacattttctccatcattttccttcatgaatgataagtaattagagtggtggcactaattctgttcaacaacactctctgatgtctctttccttctacacctgttaaaactacttaatggtttagagttagtactcaccacatcagacgtaacaactacaagcttttcagtgctctcgtcaacgctactatgcactgcttctggttcaacaaaagtttccatagggtttttctcagacgtatcaataataggcttttgagcgatctcatcaacgctgtgacgtgttgcttctgaagttgaaatgagttcatcagaagagacagcagctgtagctgttggttcaactacaggattctcctcagcttcaaaagtgttcagaaggttttcctcagacgtatcaattacaggtttttgagcaatctcatcaacgctgcgatgtgttgcttctgaagttgaaaggagttcatcaggagacaaatcatctgtagctgttggttccgcgacaagattctcctcagcttcaataggcttttccgtcacatccaaattgtcatcaatttcaatggtggatacaggcgtaatttcctgttgtgtagacaatgacggtcttgcctgaacctccatacgattctcttgataaccatttgtctcacagtctcctattttattgacagaaactttcttcatggcttcagaagaaagaggctctacattatatgacttagccgtgatttccttctcaacaacagcttcttcttcagtagagctaattggaatagcttctgctacactaactatggagctcagattggaaacactagcactcttggcatcaattttatcttcgctccgtgatacattcacagtttctttcttcttcttagtaggagaacgaacccttttacgatcctttattttaatgacattgctaagatcggaaggagcagctgtttcctctttctcagtacttgtttcaataatagaactgaccaatttcttttgtttccttgaaacttcactggcttcttcagcaatcttagcattttgcgtttctacctcaacacatctcgctttttcttcagcctcgagatatttctcaatctcacttgcatccccgaaccgaaagacatgacttccatctttaagctctgcaagatccaaacaactatcaatataagagtatagctcagatttcaaagtaaataacttttctattcttaaacttgaaactaaaaaatattttaggttttgatacttgaatccgaagtaaaattggttacaacctagtaattgagtgttcagacacttcaaaaattagggaaaaaactaaaattcaaaacttctccggtgaaggaagataaaacaaaagaagaagaggaaacacgaagacttacgagtgctggacacgagatcgaacttctctggagcagaattctccggtggagaagaagaggaagctgaagactttgaaggtgaaatggaattagccaactgtagctgagaggacaatcggaactcaggaacggaatatctgattccaccgggaaatctccatgaacggtgaagagaacaagggaagatgagaaaaggaggagcttgaagagaaagaatcaaatgatcggccataacttaaacattgaagtctgtaacaaagagtgtcacagaaatggtttagagtagacgaagaagatgataattgggtgacgttacaaccggtggtaaccctctgtttctatcagatgtgttcgcttcacagatattttgtggctaccgtttttttttcataattgggctataaaaatcatatctttttgactcttctcttctctatccattctctgccgaactagtcgtcaatcgaaatcccaaagatcagcg

SEQ ID NO: 3288 - DNA, 3000 bp, Unknown
  misc_feature (1)..( 3000): cDNA_ID_1023835_gDNA_ID_1620636_Annot_ID_162918 3000 nt of promoter + ATG
cttaattgctcatcttgacaataatgtgagacttggtccctaacatatatattgcattggaaatccttttgagatagagtcagtctgtgatcatgtaaaattactttgtaggaactccacatagccaatattggagattcgggattcatggtcattagggatggcacagtattgcagaattcgtctccaatgtttcatcatttttgttttcccttgcatattacgcaaggctgtgatgtcctaaaacttgcagaggtacgatgtcgttacttaagcaagaaatctttattttcaagtaacagacactcttgaatggttcatctacaccagaatatgtgcaacataagtggtcttgctttacacaatttgcaggtttaccatgtgaacctggaagaaggcgatgttgtcatcgcagcaactgatgggctctttgataacttatacgaaaaagaaatcgtttcaatagtttgcgggtcactgaaacagagtctggaacctcaggtgctcaatggtcttgaattatctcctctttttggttgaacaagtagtttcggcgggtgttagttgtgtacgagtcacttagctctcgttttcaaatggttttgagatgaaatgtgctgttatcaatgtgttggggatatatgagtttgattaatgtttgtgcggtgtaacagaaaatagcagagttggtagctgcaaaagcacaagaagtaggacgatctaagacagagagaacgccatttgctgacgcagctaaagaagaaggatacaatggacacaaaggtggtaaacttgatgctgttaccgtcatcatttcattcgtgaaaattgtctctacataaatatgcatcttcctattaattgtaaataatggagagagccgcacacattcacaacaccattctagtttttccaaaaatttcattgaaacgatgtacactggagtaagtttgcattcctgagctatatatgtgagccggatcagtcctggatctgacccgatatccagtttccgacccaaacctagtaaacacagtacaatattactcaacccttgtgacttgctctaaggccttctcagacaaaacaaaaaaaaggatgaagctttttcttagaaatgcttttaaaaccttaaaccctaagagaaaactagcgacgacgattcttccttcaatcaatttaattctcgttaaacccttctctcaatccaccaccattcccaaaaaacaggatcgagttcgtgaccatggctacgacaattacatggaagtggagaaaaaaatccgcaaagtcgtcaaatttcacagcttgattctctctcaacccaaccacacaatcgcaatctctcttctagacacgctcgctcgtcgtctaggtctcggcttcaagcaacacgaaccaggtgcttttctcctcaagttcccacacgtgtttgagatatacgagcacccagttcaaagaatcctctattgtcgattaacccgtaaagctttggatcaaatccgtcacgaacacgaagctgttctcgaccaaatacccgacgccgtgacccggttgaggaaactcgttatgatgtcgaatacgggtcggatccgtcttgaacatgtcaggattgctcggactgagtttggactccctgaagatttcgagtactctgtgattctgaaacatccacagttctttagactcattgatggtgaagagactcgagataagtacattgagattgtggaaaaggatcctaatttatcgatttgtgcaatagagagagttagagagattgagtatagaacaaaaggaattgatgcagaggatgttcgattctcattcgttgtgaattttcctcctggatttaagattggaaagtattttcgaattgctgtttggaaatggcagaggcttccttattggtcaccgtatgaggatatatcgggttacgatttgagatcgatggaagcgcagaatcgattagagaagagatctgttgcttgtattcatgaattgctgtctttgactgtggagaagaagatcacgcttgagagaattgctcattttaggaatgtgatgaatttgcctaagaaattgaaagagtttcttttgcaacatcaggggatattttacatatcgactcgaggaaattacgggaagcttcatacggtgtttcttagagaggggtataagagaggggaattggtagaaccgaatgatgtttatttagctaggaggagattagctgagcttgttttgatgagtcctagaaaggctaaggttgatgcagagttggttcgctacagagatggattggatgatgaagatgatgtcgaatgaacatacgattttcttgaccgttgtttcatctacactctcattctctgcgcatcactgtaagatctttatgtctctgtatctttcctctggtttgttaatagccaaatgaagatgcttttgagctttgaaatttatcgttttcttctgtaatggcagatttgtatccagaaagctagaagtggactgatgatgatgatgatgatgacgaagaatcgaagattgtgaaaaggtgcttattcacttggatggattaatgattgtgaatctcactcattgttctgaatcaatttgaatcgaagaagatgcctgcaagattgcttacttcagctgcaagatatactttggctctaccctttctcatcagcaatattccttaactcgattcttgattttcgcagatactaagaaacaacctggaatattttttgctcaagtcccctatggtttaagccaagaatccttattacctgtctacatattgcaaaccaaatttaaaaaggtttctttgcttatgcatcaacaaaaagacaattctttgtaataaatatcttcaattcgtaaatgtcttggcctttgtcgttttcaaacttcaacatcagcatcacgtgattggctaatacaaataaaattttctctttattttattattttgccacaagccgtgaaaagatg

SEQ ID NO: 3289 - DNA, 3000 bp, Unknown
  misc_feature (1)..( 3000): cDNA_ID_3092933_gDNA_ID_1620636_Annot_ID_162916 3000 nt of promoter + ATG
cccatcaatttctcaacccgtcttcttcgtttcccgtctcgttatcagtctcatctccgaagaatacccgccatcttcgtctcctcatcacctccgctttgaatccacagacgggacagccgacgaagaaggcctccaccggtagtgataagagtagtacgaacaagaaacgtaagaaaaaggggaaaattgcgaaacctgtggaggattgggaattgagagattcagaagacgcttttgaggaagatgatgatgccgattattcttcttcttcgagttctctagcaacttttaactctcctcctaccatacccaaaccacctgctgggtttgtgattaatgaaactggtagggttcttatggcctctaagaagcgtatcaccactgtggtgagtctaaagtgtcacttttttcatgaacattataagttttggtgtttgggaaaaagagaatctaaaaatgtttgtgttgtgagacagattgatccaacaaacaatagccctttggattgtgtgataagaagagtatttacaagtagtaaaggagaggattgtatgcttctttgccctgtggatacgtaagtactgtttttcttcttctcttaccattttagcaacttcttcttttccgtttgattgattaatttcttgcttcaggccagttcagattttgaagagcacaaatattgatggatggtcagctgtaagttttatccttaatgaatctttcttcatgtgtttcttcaagactgcacatctcctgatgtagagagaccttctggatgcatgacactatgcttttgagaactcgaatattaattaattgtagaatagtcagtttctagatgaaagttgcttcgatcaggacctgtcttttgcttatctaggatcgttctgccttttaggtcagtgatgaagaggtcgaatctcttcttcctgctgctgcttatgctcttgcaaagatccatatgcatctagtacacagcgggtatgaccgtgccctgtttcaagcatgacatcatttattatcctatgtctcttctttgtgtctgataccatctaatgggttatcactgtaaatcaggttctgttacactgcaaggggaggcttttgctacacggaagataatgtctttgattttcgcacaggcaacacccttttcttctgatttttacgcatgacgaaaatacttctgattaatgtttttgtggcgtctgctctatatgagcacactaaatgattttggcttcatatacggtggatatattttatcatgattttatatttatgtgtcaaatttcaatctcatggtcatgtgtacttgcaattgcatcttagtaaaattatgtggttatcttcattcttccttatgtttagttctctcgatctgcttcgttctaactgttaggtgttttgacgggtctgctcatatgcttatagtttaaattatgtgtcctactttttcatattactaaatgtttcgagcatcaactatttgcagatgatggccaagatgttgaaggcttgccaactgaaggggttgagattacgtgtttccatctggtatactattgcttttggcattttgcttattgatatgtttgaggcgctttatatagtattttgaacaatcttttgagatatcactattatagcatacttttaaacactaaacctgtcattcaatttatctctgaaccaagtttgtatttgccattgtggatccaaagttcaccactgcaatctggttgtgaaaacagactggttgtgaattttattgtttgaattctgtagaacatgaaacctttgaggtatgatgtggcccctttttcctcgtctaaatataaattctgattcaggatggatcacactatatggtctacacaccttcagatccacttctctttgttgctgctaaggtaagcttgttatctttagttgtttattgtgaaagttttgccgagctgtagcagttttcagatgttacttttatagaagaaatatggaaccttaggactactgtagaataaaaacagagtgatgaatggcaattttatctatgcaggatcaaaatgggctgctgcaaatcgctgatgatgtaagtcgaacctcaattatgtactttttctcctctgcaatttggttgggttataaaaaggttttgagcaaaagttacaccaccagacttggaaaatctgtgaattcatccaaagaagagacttttggaatttgatccaagtagatttgtgataggtcttggcggacaaactaatgatgtttagtagacaatatagagttaagggaaacacaacttggtgattattggttctctgttttttagaagagaggagtgcttataatcctaaataagatttgtgtgtgatggtcaatatgaatgaagtaagctcaccactcgaatgttaatgggtggttgcaggaactcttagacgatccagctgtgatcagcgccatagacgaggaaaccgaattcaatgccttggtggtacgtagagaattcaacaaacttttaagttaagaggtatttaataaaatgatattgaacgtggtaagtaatgtttgtgcaggaggaagaggcggctctcctggaatcactgcttggggaaagaatttgatgttttcatagggactacttagctttctttttgtattccataattgcaatgccatgtaatctaaattttctcttagaaaaactcattttgcctttccaaatctctcttgttgacaattgggttcgatcattaccgaaacagaagtccctccaaatgaccatgcacctacttgtaaaccgaaggattcttttcagttttcactaatacatcaataatatatgttatgcgtgctcagctcttgtgggagtaggaccgtagaaagcctatccatttaacaaagaatatcaaacaaagtcttgtttttcttttaatctttttttttatggctgccttcagtagtaacctctgagcttgagggaaactcatg

SEQ ID NO: 3290 - DNA, 3000 bp, Unknown
  misc_feature (1)..( 3000): cDNA_ID_2049619_gDNA_ID_1620636_Annot_ID_162915 3000 nt of promoter + ATG
tagaaacatatgcaagaaaaatcaatggaggaagtatcttctgaaacccagtggatcatccattaattgctcatttagtacagagaagaatcctctattaccatctatccagcagttagccgatgctcgtctcatatacagtgtatctgcagcattgggtcataacaaggtttttacttgctatattttgttgtttctgtccctctcaatccttttttcacattcatttaagcaatcttttactcgcaggaatcacatccagaatgcagcgctagagttcctgccattgttaatgctctcgagatgaatgagctcactcctaaggtatgaaacaatccatctctatcgtttctatctgacattcttctatattatgcacatgtagctagggaagtttggttaaccgtgatttacaatatttaaggcaaatctcaagtggatggagaccaacataatgcttgtgtaaagttacattagctgaaattttgtacttttctggagttagttagatagacttgcacatttcttctcaaacaagtagattcttttcgaaatatgtttgatgtatttataggtctgcttttgttgtatacaccattcttccttttgttggtttgcttcttcgatggtgaagatctctgtcactatttactgaaaatgacctacgtcttctatcaatgaattctcatatgtgaatcttttttccttgtgtatttcagttccgtggctcacagattcttgaactcgcaaatttcaagactgcaactgtagaagacattgcaaatgttcacgacaaggcttatgtctttggcctagaaaaggttattaactttactcatgttatattattagcatttactcacaactttttatttcataaccaatacattgacacatatagcaaagcaagtaggattgaaaaatgaggatgtacggtacgatttttattctgaccattacaaagacattcttagtgtaggcaatggatgaggcttcagattcgggactaattttcattgaaggctctggaccaacatatgccacttcaacggtaactgctttgtgctcatccggtaacatctccaaaggaaccattttacctacctaaacatcttccctctgtgccagacattccaagattcacttatcgcagcaggagccggaatggctttagttgattcagtggtgatgtctcgtctcaccatgttagtctgcttttactgcttcagtttcattatgttgggaatggttgtagatttcttatatgattatttgtttcagatcgcagcatccagaaacagcgtagatccacccattggttttgcattgataagacctcctgggcaccacgccgtgccaaaaggtccgatggggttctgtgtttttggtaatgtggcaatcgcagctcgtcatgcccaacgcacacatggtctgaagcgcatcttcataattgacttcgatgttcaccacgggaatggcacaaatgatgcatttactgaggaccctgatatattctttttgtcaactcatcaggtaagcctctaacatttttgcgtgacatgtttctaattagttcattgacaaatgatccataccttgtatttcaaaatcattgactaaataacacatgaatgttcaactaaagtgttaagatcattgattgaataacgcatagttaggattagatttcagaaatcaacaaaagttatttattttctgaaaaatgcaggacggaagctaccctggaacagggaaaatcagtgacataggtaaaggaaaaggtgaaggtaccactctaaatttacctttgcctggaggttcaggtgatattgcaatgagaaccgtttttgaagaaatcattgttccatgtgctcaacggttcaagccagatattattcttgtttctgctgggtgagtgagtttataacgtttttcatctatttttgaactgaatatatcatcgtattcttacaaacacttctgcttcattgctttaatctgcttaaggtatgatgctcatgtcctggatccactagcaaatttacagttcacgaccgcaacatactactcattggcaaaagatataaagcggttagcaaaagaagtatgcggagggcggtgtgtgtttttcttggaaggaggatacaatcttgaatcactttcatcatctgtggcagactcgtttcgagcattgcttggagaagatagcttggcatcagagtttgataacccagcttacttgtacgatgaaccaatgagaaaggtgcgagatgcaattcagagagccaaaagcattcattgcttataaggtgaatttgtttgagaagttctgcatcttagtcgtcttaaactgcctgcctacttatgttttcttttgtaaaaatatcattgtaaacattgttgattagaaaattaaagttatgtaaacagaaatgattatggtttttgcttatatatttaaatcagggacagctatttctagtgacctatcaaatgagtccaaaacggatgaccgtcacacctaagttgttccacgtacttattcttgtatcattattaaaaagaaacgaaaatatctcatcacgccgaccaactccatttaataaaatactagaaagaataaaaatcgtgggaagaagtagtagaagaattatctcgttacgttatctatctgcagtcttcatgcaaatcgaaaaatcgcattcgcaatctcacaaactaatccgccacgtgcatggtcaccaccatccttcacacgccacgtgttcccaatccaccgccgtaatccgccccaccacgccacgttgcgtcatatatcttcttgtctctcacttacgtccccacatcgtacttataaaaacgttagatattttcgaagattcattacattcaataaaatccactctttcttcttatatatagaatcaatcaaaagactttgagagatattcatcaaaactttttgttttgtttttcaagctataaaatctgagagatatg

SEQ ID NO: 3291 - DNA, 3000 bp, Unknown
  misc_feature (1)..( 3000): cDNA_ID_2990410_gDNA_ID_1620636_Annot_ID_162910 3000 nt of promoter + ATG
taccgtcggtgttaggagcattcatcggagcaaggatggtcatatttctaataacaacattactgcaaaacaaaagttacagaggtcatcgaaccatgcatacttctaacacagtataaacgcaggaaagatagttgaaagtaataaagaacctgcaataaacaggatggattgtccagaaaggagaattgagcaaagtgaggttagagatgaggatattatgagagttcttgagttcaataagatggcctctcgtatgcaccaatgttctgttccaccataactcccaccacattttcccctgtccatcaattgtcccattttctcctgcagatttttattttagatgtgattagaattagaaactgattttactttgatcatcacagagaatctaagtacagacactgaaccaaggagaaaaataaacagaaaagccaagaagttgatggcgtacttggatactggattgaattctagaattataattgatgtcaaggtatcagaaacattcaagtagtattcttaacaaatcagagaaagcaggccaaattgttcaatgaaacccaacaattcatacaagctccagctaatgattgaacaaaaagcctactgttgatgaatgaaataacaaagtacctgtaatgacaacattagtgagattgtctccatgaatgaggctgatgtgtctaccaccaggtctctctctccctcttccataagaaggcaatggctctattatcggccattcgtctaggtcctatcaaaccataattccagacaaaaatatcaatattgtacttacaacgtaaaattaagaatgtaagaattaaaaaaaacagcgttccaaagtatctatataagtacagatgacttttgagtttacatcgacacatgaaaatgtgctcaaacactagcagacaaacttttaatcagaatcaaacttgacagcaaaaaaactcagtaataatttaatactaaattaggagacaacacaagtaatctgatagatctagttcgtacatgaacatgcttcagacaaaagttgtctatacatctaactcctttcttggaatatgatcatataaaaatggtttcttccacttgactttttttttgttacagctactatcgagacatcacaagaacattcattgaacaagtcaatccgaaattaacaagtgttaatacaaaattcatgcaaaacactgacttttgatatgcaaatccagatttcgcactactagagactatccccactcaaaaataacagcttttttgctgtatcaaacaatggtgggtccattttaaccactgaccgtgattagcgaaatgaatatagtgtttaccaacaaaactttatgaacccacaaatcaaaaagcaatcacaaacccaaattttggattctcacagagcaatcaacaactaattgaattctcttaatactactactgttcagaaccaatcaacaacaaacaaagcaaaaaaaaagtaaactttatcaatgtgttaaagaattcaaaactttgatataaccttggatcccaaaatgagagcgccgcgttcgagaaagagcgtgaaattgctggtgaggttgaagcttccagaaagccacgtgccctccgggacattgagctgggccccaccctccgccgcaaaaccttcaaggtgccttacggcgcggcggaaagcggccgtgttcgacgtctttccgtctccaacaccgccgaaatcggtaatcgacataacgatccggttagggaacgggtcgtgattgaaaaacccggagcaggtaacagggtcgtcatattgagaagtcgggatccagagagggagaaaagaattggaagagatttggagagagagaatcgctaagacggtgaaaacaaggagaagaaacgcccacgaaggtcttgtaatggcactcaatactgtggtcggattcttctccggttccattgttttttggaaacagagagaaaactcaaaagcccatgaagcaagctctgagataaaattacaaacagaagaatgctaaagtgggacttttagatggttggagagaattatgcatgtgtgtggcaatgattagcgtagtgtggtggtgacaacaaacaaaggtggaggaagatagaaagtcgatagataccttacctcgaaaattcgtctctctctttgattatttttgtatatataaatagaaaaaagtagtagtaaataagaaaattggatacagacacagatatgtcgtgaaaagggcactaaaatattggatggtgcatgtgaatcgtcaaaaagtggcaaggagaaagtgaaagtcttcacgaattatattttggtttatatataaaagaagaagaaagaagaagaaagaagaagaaagaagatggatgatacacaatcggtcacggactcacgggtaggaaggattgtgaggcgttacaatctcgtcagacttccaagtcttaatctgatgggcctttaaatagcctactgtactgagttgtttgttgtgtttttgttttgttttttaatgccaaactaaggtatatgtccgtattttattgctggcaacatatactctgtccgtttgtgttttttgttttttatttcatttttcctcaaaattacttttgttcttttaaaaatattaaatggcataaatagttaaactatcaaccagtaaattatatatgatacaataatgttttttgttttgtttaattcattggaccagatggattattcagcttacatttttcaatattgaattgtaattttttagagctataatctttaaaaaagaataaaaaaatcaaaaaagcttttgctcatctttggaataaacgaacttgctattaagaccaagcccaataaacaataaaagcccgaaaaaatagagctgggccggtaattaggattatgatgatggtatataactcactatcaactatcatgagttcatgaccatcatggtttatatctaatgtcatatgatg

SEQ ID NO: 3292 - DNA, 3000 bp, Unknown
  misc_feature (1)..( 3000): cDNA_ID_2049633_gDNA_ID_1620636_Annot_ID_162909 3000 nt of promoter + ATG
accgcgtttacagccatcgcctctgtttcttctctcttctattggttatcaccatatgcggtatatatgaagacgcagcttggtctatctgatccctttctttcacgctgctgctccaaatcgtttacaagaatccaaggattgctacttgtggcttgtgctatgacagttgtggcatggctcatctctggccattgggtgttgaacaatttgctcggaatctccatttgtattgcgtttgttagccatgttcgtcttcctaatatcaaaatctgtgcaatgctcctcgtgtgtctctttgtatatgacatattctgggttttcttctctgagagattctttggtgctaacgttatggtggccgtggcaacccagcaagcatcaaacccagttcacacagtggctaacagtttgaatcttcctggactgcaattgatcacaaagaaactggaactacctgttaaaattgtgtttcctcggaacctattgggcggtgtggtgcccggtgtgagtgcctcagatttcatgatgcttggtcttggtgacatggtacagactaatcccttctttgattttaagattggtatgtcgttatatgtgtactaactgtaagaaatgttctctctcagactatagtgacgaggagataaaaaaaacatgttgtattgattaactgttttgttgttccaggctatccctgcaatgcttttggctttggtcctctgctttgaccatcgaaaaactagagatgtggtgaatatttttgatctaaaatcttccaagggacacaaatacatttggtatgcacttcccggatatgccattggcttggtggcggctctagctgcaggtgtcttgacccactcacctcagccagctctactttatctggtaatattctcctcatgtgacttctttgttcctcttggtctaacatcaaaagtatatattctactacgtgtatttgtgcacaaccgatatcaacacttgattcaactgaaattttgttgatagaatctttgtagtctcaatccaatgattttaagagcttgatcagtgtgaagtatagtgagattatgatgtataatctgttttcgatgtggatatataggtaccatctacgttaggaccggtgatcttcatgtcatggcggagaaaggatcttgcggagctgtgggaaggacctgcattatctaatcccattgagaaatctcatgaaatagagatctgagtttattatatcaatcaagatgattcagaaatctaaaacatattacataaaacaaagacgcttagtaggaaaacatcagatcaagaattcttgtattcttaagttcccaaaaaaagaaaaaaaaaaaaaaaattggtcagaaagagagatgatgtcttatatccctcattttttttgcgttactcaaagggaggaaaaataaacaattaacaagttctttaattttttcttatgaatagagataccaatactaaaaaacgttggcttttgtaatgaagaagttttagtgataatataagttaaaattaaaagtgtgtaaccaattagtcttttttttttccgtcaaaaaaaagaaaaaaaaaaaaaagactaattggttacacacttttaattttaacatatattatcactaaaaccaattagtcaattacacaaatttagtaataatacatagggtctctaatatatattaagctttatataaactaatgaggaaatctgtaaaaatatacaaataagaatttccaaagtagatcctatgtaatttcgaagcgtattactgtgcataagacagtgttaaccaaaaaaaaaaaaaaacatttccgagatgaactgtgttttgtcctcaccggataagaaagtggaagaatgaaccactacaaagtccgcgtcgaaagcactcagttataaaagtaaaattgacatgcgattacattaaaaataccaaactcgcttgtccatttttattgatattgcttgctaatggaagccagctacatgtccgctttcttgtttgactttctttcttttctctttgagttctcttcaatattaatagatgcattttatgttttgcttcttctgagtagcatcgtgaatcaagtcgccattatcttattcagcactaatataattatatatagccagaatttctaaatttcaagaatgtagacaagttctagaaacgccgtccacagttccataaattctagctagttttctgtaatatttcacataacgattcatagacttttctgttcagacaaatatatactttgcaaaacagaacatcaagctcagtagctcacaaccaaaattctctgtccaaatttgaagtaacggaacctagtgtcttgctgggtttgagacttctcaatcaccatatagtcagaaatacctatgaataagattatcttgatgattttttaaaaaaagattttcttcgttaagcttttcttttgtaattagttataaaccttctcactttcaatgaaattcacattcatataagtttaaattttaaattaaaatattggtcagctatagactatagtaagtatattaaataataataacattttttgtggacaaagagaattcgggttttggggttttggcaaaggaaagaaatggtcatatgtggaacactacgtgccacttttcatgcaataacatgcaaatattaggtcagccactaggaatagaataagttgaatagttttttacgatgataagagtaagcgggaagccataatagaccactatcccaaaactttaatctgcttccaactcattatgggaccaactaatacaaaatgatatgtattccatgttccaaccactccaatacgaattacgaagcaagcgtgtctcagtgtctgagtgcgactgccttctctctatatataagagatatacatagtgaattaaacatcttaattatactgatctttatcatgttgactagatttaagaaacaaaataataag

SEQ ID NO: 3293 - DNA, 3000 bp, Unknown; identical to SEQ ID NO: 3278
  misc_feature (1)..( 3000): cDNA_ID_1820139_gDNA_ID_1620636_Annot_ID_47375 3000 nt of promoter + ATG

SEQ ID NO: 3294 - DNA, 3000 bp, Unknown; identical to SEQ ID NO: 3292
  misc_feature (1)..( 3000): cDNA_ID_2049633_gDNA_ID_1620636_Annot_ID_47377 3000 nt of promoter + ATG

SEQ ID NO: 3295 - DNA, 3000 bp, Unknown; identical to SEQ ID NO: 3291
  misc_feature (1)..( 3000): cDNA_ID_1820135_gDNA_ID_1620636_Annot_ID_47378 3000 nt of promoter + ATG

SEQ ID NO: 3296 - DNA, 3000 bp, Unknown
  misc_feature (1)..( 3000): cDNA_ID_1820131_gDNA_ID_1620636_Annot_ID_47379 3000 nt of promoter + ATG
tcacctgaattcggaactttgtgttgttccagtaaaattaagcgaacacaaggatagagttctgattccttttacgaaagctcataattaaaatagaccatattatacaacatcctagtctccaagagaacaccttttcatctagtaaaataacgtagcatctatttggcgacactactttctgactcctacaaatgtaacacgttgcacgaatagcttttacaggaagacaaacacgatcaaggaaactaaagacaataattaggctgcttattaaaaacgtattaaaagaagagagtagaatatggtgcatacaagaaacggagtttcttaagtcggccgagagttgatggaataggcccgcttaaattgttcaagtaaagatccaagctcaccaattccgtcagatttccaagctgttctgggattgtcccagtaatgttattgctataaagctccctgtcattaccattctttaatattaatttcaccataagatcggaaagatatataactaataatctatgataatgcaaaattatgcagttatttggaacattgtaacatttttaacatcccacatacaccaaaagttaaaagacggccttttaaagaaaagatgacttacaagtactgcaagtttggaagctgaccaagttgcattacgagctgtccagatagatttgcattcccaaggtcactgagcaaaaatgaagttcaagtaaattctcagtagatgcgaaaatccgaatcatcttggctagatatagaaagaaacttacacacgtgtaacactattgtcgctattgcaagtaacatgaaaccatgtacatggagtaacaagagtagcatcccaactttgaagcaccttattagggtcggctaaactgtttttcagtgcacttagagcatcacctacaattaaccaaagaagaagaaaaaatcaaactttgcaatcatcaagtgtcacgaggatacataatcactggaatcagtcgaaacagatgtaacccaaatataactcaagtcaatacagcaaaacaagtaacagataagttaaaaatgccttctttaggtgagaacaagctctcataagcctatactaatcaaaatactcaacaagggaaactaatttaattggaaagaatgaaaaattgaaagagaatgagagagaaaggggaaaccttcggcgttgcccgagactctgagaaccaaatccaaaacgagaatcaaccaaaagaagcaagggatcattaatcttcgttccattttatcctcaagagattaaaaacaaaccctagaactatccctcatcagagaaaatccatcattgttaaaacccctgataaaagggatctcgaatccttcgattaagctaccacccacacaaggtaataccaagatgatgaaattagaagcagaatacgagaaaagccctctcaacgcgtatccacccgttgacttaatttgaagagaaaatcaaaatacccaaatcgattaatcgcggaaaccaaaaaagcaaaaaaaaaagaaactgaagctagacttttccgattagaaggaacgccgagatcgctgaccgttgactacttaatgctgagaagagagaaaactgagatagagaaaacgaaaggaggaagaagatatttcctggaaatatactaaaaaagggtcgaaacaaagagagatgagagagaggagagaaaccaagttatcgccgagagcaaggaaggaagacgaattttaattattttctttgcttaaagaagggattttactgggttgagttgttgtactgtgaaaactatattaaaaaaatgacatttaagattgagaaaacgacaaagaggatgatgacgtggacgagcattttcaaagcttttttagagctagtcaaagtcaaagacgcacgacttcattccgaatcatgtttgttatgttcgcccaccttatcatcatccatcatatgacattagatataaaccatgatggtcatgaactcatgatagttgatagtgagttatataccatcatcataatcctaattaccggcccagctctattttttcgggcttttattgtttattgggcttggtcttaatagcaagttcgtttattccaaagatgagcaaaagcttttttgatttttttattcttttttaaagattatagctctaaaaaattacaattcaatattgaaaaatgtaagctgaataatccatctggtccaatgaattaaacaaaacaaaaaacattattgtatcatatataatttactggttgatagtttaactatttatgccatttaatatttttaaaagaacaaaagtaattttgaggaaaaatgaaataaaaaacaaaaaacacaaacggacagagtatatgttgccagcaataaaatacggacatataccttagtttggcattaaaaaacaaaacaaaaacacaacaaacaactcagtacagtaggctatttaaaggcccatcagattaagacttggaagtctgacgagattgtaacgcctcacaatccttcctacccgtgagtccgtgaccgattgtgtatcatccatcttctttcttcttctttcttcttctttcttcttcttttatatataaaccaaaatataattcgtgaagactttcactttctccttgccactttttgacgattcacatgcaccatccaatattttagtgcccttttcacgacatatctgtgtctgtatccaattttcttatttactactacttttttctatttatatatacaaaaataatcaaagagagagacgaattttcgaggtaaggtatctatcgactttctatcttcctccacctttgtttgttgtcaccaccacactacgctaatcattgccacacacatgcataattctctccaaccatctaaaagtcccactttagcattcttctgtttgtaattttatctcagagcttgcttcatgggcttttgagttttctctctgtttccaaaaaaca

SEQ ID NO: 3297 - DNA, 3000 bp, Unknown
  misc_feature (1)..( 3000): cDNA_ID_1820119_gDNA_ID_1620636_Annot_ID_47382 3000 nt of promoter + ATG
ttgatccaacaaacaatagccctttggattgtgtgataagaagagtatttacaagtagtaaaggagaggattgtatgcttctttgccctgtggatacgtaagtactgtttttcttcttctcttaccattttagcaacttcttcttttccgtttgattgattaatttcttgcttcaggccagttcagattttgaagagcacaaatattgatggatggtcagctgtaagttttatccttaatgaatctttcttcatgtgtttcttcaagactgcacatctcctgatgtagagagaccttctggatgcatgacactatgcttttgagaactcgaatattaattaattgtagaatagtcagtttctagatgaaagttgcttcgatcaggacctgtcttttgcttatctaggatcgttctgccttttaggtcagtgatgaagaggtcgaatctcttcttcctgctgctgcttatgctcttgcaaagatccatatgcatctagtacacagcgggtatgaccgtgccctgtttcaagcatgacatcatttattatcctatgtctcttctttgtgtctgataccatctaatgggttatcactgtaaatcaggttctgttacactgcaaggggaggcttttgctacacggaagataatgtctttgattttcgcacaggcaacacccttttcttctgatttttacgcatgacgaaaatacttctgattaatgtttttgtggcgtctgctctatatgagcacactaaatgattttggcttcatatacggtggatatattttatcatgattttatatttatgtgtcaaatttcaatctcatggtcatgtgtacttgcaattgcatcttagtaaaattatgtggttatcttcattcttccttatgtttagttctctcgatctgcttcgttctaactgttaggtgttttgacgggtctgctcatatgcttatagtttaaattatgtgtcctactttttcatattactaaatgtttcgagcatcaactatttgcagatgatggccaagatgttgaaggcttgccaactgaaggggttgagattacgtgtttccatctggtatactattgcttttggcattttgcttattgatatgtttgaggcgctttatatagtattttgaacaatcttttgagatatcactattatagcatacttttaaacactaaacctgtcattcaatttatctctgaaccaagtttgtatttgccattgtggatccaaagttcaccactgcaatctggttgtgaaaacagactggttgtgaattttattgtttgaattctgtagaacatgaaacctttgaggtatgatgtggcccctttttcctcgtctaaatataaattctgattcaggatggatcacactatatggtctacacaccttcagatccacttctctttgttgctgctaaggtaagcttgttatctttagttgtttattgtgaaagttttgccgagctgtagcagttttcagatgttacttttatagaagaaatatggaaccttaggactactgtagaataaaaacagagtgatgaatggcaattttatctatgcaggatcaaaatgggctgctgcaaatcgctgatgatgtaagtcgaacctcaattatgtactttttctcctctgcaatttggttgggttataaaaaggttttgagcaaaagttacaccaccagacttggaaaatctgtgaattcatccaaagaagagacttttggaatttgatccaagtagatttgtgataggtcttggcggacaaactaatgatgtttagtagacaatatagagttaagggaaacacaacttggtgattattggttctctgttttttagaagagaggagtgcttataatcctaaataagatttgtgtgtgatggtcaatatgaatgaagtaagctcaccactcgaatgttaatgggtggttgcaggaactcttagacgatccagctgtgatcagcgccatagacgaggaaaccgaattcaatgccttggtggtacgtagagaattcaacaaacttttaagttaagaggtatttaataaaatgatattgaacgtggtaagtaatgtttgtgcaggaggaagaggcggctctcctggaatcactgcttggggaaagaatttgatgttttcatagggactacttagctttctttttgtattccataattgcaatgccatgtaatctaaattttctcttagaaaaactcattttgcctttccaaatctctcttgttgacaattgggttcgatcattaccgaaacagaagtccctccaaatgaccatgcacctacttgtaaaccgaaggattcttttcagttttcactaatacatcaataatatatgttatgcgtgctcagctcttgtgggagtaggaccgtagaaagcctatccatttaacaaagaatatcaaacaaagtcttgtttttcttttaatctttttttttatggctgccttcagtagtaacctctgagcttgagggaaactcatgtccatggcgctaattgtccggccattctttgttcctggtaattttctcttctttcttctgttcagtgcctttgttttcggctaaaagctctcttctctgtaatccattagataattttccgatcttaaacaatttgtgtaaagaaaagcgacaatctgattctggggatgtttcgtttgctcctccttttcatttttataacataaaaatgggcgtcaaaggttttatgtgcatattgtttcaactacaggagtgattagattccatatcatgttctcactgtttttctttatatcggaaatgaaatgatatatgacattttaattgccttaggaagtgctggaatttctgggagtagaaacatatgcaagaaaaatcaatggaggaagtatcttctgaaacccagtggatcatccattaattgctcatttagtacagagaagaatcctctattaccatctatccagcagttagccgatg

SEQ ID NO: 3298 - DNA, 3000 bp, Unknown; identical to SEQ ID NO: 3288
  misc_feature (1)..( 3000): cDNA_ID_1820113_gDNA_ID_1620636_Annot_ID_47384 3000 nt of promoter + ATG

SEQ ID NO: 3299 - DNA, 3000 bp, Unknown
  misc_feature (1)..( 3000): cDNA_ID_1820109_gDNA_ID_1620636_Annot_ID_47385 3000 nt of promoter + ATG
ggcaaaacagcagctcccaagcttctcaaagctgaattcgacgaagtaaatcgactgccatgaaacccaccaagacgtcgcacggagggagaacagcgagcgagcaataaaggatggaggtgtctggcgccggtaaagtggcggttaagtgctttagaaatagtgaggagaggtaatgaaggaccaccactacttcgagccatcgctgttgccttgacggttgagaaagctgagagtgtagactccatgaaagtgggtggctccgtaatctcaatctctcgagtcccgttatctttcttttttccaggcctcctgcgtttgtttaagtgttctctaaacgaatagtgtccacgtgtggaaatggcattcagagttttccaattttcttcatacaacttttggtttgtcaaaaggtttatgctttgtggtatttgagtcaaaaatttacaccttaatgggaggacttttctgtgattgaatcaaatatcgaatttttgttgcaagcgtgacgtagagatttacgggtttataaagtcagccacttatttcagacaaaatcataacccaacacacaaaaacaacaatatcttacttttaacagtacacaagctcatttaacttggcaacttaataagtagagatcagcctctatacacacacatcctagctcggataagtattttcttgttctctagactccaatagatgacggaagattcccggaaccaagccttctctttcgcagacgctctgcaatgatgaatgcaagctccagagactgagatgcgttgagtcttgggtcacagtgagtgtggtagcgtgagcttagatcgttgtaagtgatggtgcgtgaccctccgacacattctgtcacgttttgaccagtcatttctaaatgaaccccgccagggaaactcccttcttgatcatggacgtcgaagaacgctctcaattccgcctgatacaccatataatttaatgggtaactacatgaatcataagcaagattatgcatagagttggatgaagaagtaagttcgaatgattaccctgattgcatcgaaagaacgagtttttagcccaccaggagccatgattgtgtttccgtgcattggatcactaacccaagtcacaatctgaccggctccacggactgctctgatcaaattaggaagcttgacccgcatattctcagctcccattctcactataaccgtaatccttccaggcttgttctgagggtttagtatctctatcagcttaaccagttcactagggaccattttatcactcacctgcatcaaagtacatcaatcaacatctgtcattttctcatacaaaaatctgttgtagcctctttgtaatggttttccaatatctttaataccaggcaattgagacctgcagggtatcctatagagttaacaacagttcttgagtctacatctcagtgtttttttctatacgaacaaagctatgaaacttactcctattccaattaaccaaaccaagagacttgatgatcacataccttgattccgagggggttagcgattcccctcagaaactcaacatgagcaccatcaagttggcgagttcgttctccaacccaaagcatgtgcgcagagcaatcatagtaaagtccagatgttgaatcctctcttgtgagtgcttgctcataaggcaataacaaacactcatgggatgtccaaaactcagtagtagtcatgatcgggtgagcactagtaagtccagctgcacccatgaatcccaaagcctcatcaactctattagccaattcacggtacctgttttgtcacaacaacatcaagaaataagaaaccgtttctgacttaagaaaagtgtattctcaattggttaacatcataacaaacaagattataaacaaggagagaagtttataaacctgtcaccctgttcactatgttgcgtgaaatcaaggttccactggctaactctctgcatagctgcataacctccagtagcaaatgctctcaagagattcaacgtagccacagactgtgtgtacgctctaaccatcctatgaggatcaggaatcctcgatttctcatcaaaagcatcaccatttatgttatctcctctgtaactcggcagcttcacaccatctttctcctcaaatgggtctgatctcggcttcgcaaactgaccagccattcttcccacctgaaaacttaaaacccacaaaatcataaactatccctaactagagattcatcacacagaaaaatctccaggtaaagaatcgaccttgataactggtaactggccaccgaacatgagaacaacacccatctgaagaagaaccctaaaggtgtctctaatgttattagcgttaaattccttgaaactctcagcacaatcaccaccttgaagcataaaggcttgacccatagccgcttgaccaagcttatcctctagtttcctagcctcaccagcgaaaactataggaggaaaagaagaaagcgtctgtagaaccgaatcaacatccttctgatcaggataatccggcaattgcaaagctttcttcgacttccaactctctagactccatttaaccgaagcggaggctgattgggtagatttcttggggtcagtcgaatgaacggcgaagacaggggagaaagagattggacggcgaggagcgtgacggtaggggaggaacgacttggtcgtgagaggagaagaagcgtttagagtcaccatcgctgatctttgggatttcgattgacgactagttcggcagagaatggatagagaagagaagagtcaaaaagatatgatttttatagcccaattatgaaaaaaaaacggtagccacaaaatatctgtgaagcgaacacatctgatagaaacagagggttaccaccggttgtaacgtcacccaattatcatcttcttcgtctactctaaaccatttctgtgacactctttgttacagacttcaatgtttaagttatg

SEQ ID NO: 3300 - DNA, 3000 bp, Unknown; identical to SEQ ID NO: 3287
  misc_feature (1)..( 3000): cDNA_ID_1842843_gDNA_ID_1620636_Annot_ID_47386 3000 nt of promoter + ATG

SEQ ID NO: 3301 - DNA, 3000 bp, Unknown; identical to SEQ ID NO: 3286
  misc_feature (1)..( 3000): cDNA_ID_1820105_gDNA_ID_1620636_Annot_ID_47387 3000 nt of promoter + ATG

SEQ ID NO: 3302 - DNA, 3000 bp, Unknown
  misc_feature (1)..( 3000): cDNA_ID_2993840_gDNA_ID_1620637_Annot_ID_47388 3000 nt of promoter + ATG
tcaaagattcaattaaacaagacaatgttcacaatcacacattaacaagcttttcaaatcagagaaatttccaagattcaaaacttacaatgaacatcagagtctctttgataactctactcaaaactatagtctcctaaattgggatttcattcaaacatctttattgtcaatttcagcttgctttcttcttctttcttcttcgtcccatcttagtcgaccaaacaaaaaacaatgaatggtgcaatatactaactcagaccactggataactgtgttatgtggacaacgactcttacattggaagcaaataggtcgagacataacctgagtttttaaaagaacatctgcatgcctgtggtcgtactcaaacgatgaaccgggcttcaagtataattctttcccaatcaaacattgaatgtgcagggtgacacaacaatattcatcacacttataaaaccgttcttctgaatttatctctttctcgcaggcttcacaccaatacatcatggtacttgtctcctccccataagaaagagtgagcatgtgcttatcatgcttatacctcacctcgtgaggtaaagtagcacatccaaaacacaaagcaaaggtacactcaccttcaatacaattgaatgtttccgtgtggctaagtggcttttttttgcaaaccccacatcttcttcgttctcttggtttggatgttaagaataaaggatgcacatgactttcatggactaatggctcagaaattgtggcacactgcacatgtagcttaaaacgatcacattcttctttaccgcactcatagaagaaaccattggtgcacatcctaggacacactgaacagaaatccttataatacttggtaacaccgtcgtatcctcccactagattgagcttatgtggatgtatcgggttatgtattttgcgagaaaaattcgcacattcttcatggagaatgaagttgcattgcatacaagagtagatgttaccaaaatagattggtgtgatgcatgcttgacactgcttattctcgtcgtagtctctgccggtattcttatccattctcaaatgatgtggatgactaaaatggtgtattgttccgtcacttattatcacaaatggctcaacttcttcttcttcaacttcttctggctctccctcaaggtctagaccatcccacacattcttttgtgttgcacatcttgaatgtgccacatacgaacaaccgtccttgaggcaagtataaccaccgtaatcattatccatctttttgcgacaaataccacaataccaatttcctttctcaaatgaaggagtgaaggagatacgatgatggtggcgggatatccttatgacatgtggtaagctgagacacttttgatggaccacgaagtcacaggggggacaaatatagaaaggacaacttgaatgtgtgagggcacaaaggttacaaggaaaggaagcctgacttggaaacaaaataaggggatgctgatgccacttgggatggtctatagataagactggtggtggtttctccaaacagcttacattcatagcaaaatcgcaagaggagcaatagtaataataatccatgagatattcatcacaacaataacattcaatcatcgtttcctcctccgaccattgtctaacggcaagctgaagagaatgtcttgggtgaagagggtgtttgacctctataggaaccttgtcatactcttcatggttctcgccattgcatagtatacagtgaaaatggatttgtcttgtagatttccaaatttcgtaagcatacaactcacattcccgctctttagcctttctcggccggacaacttctgtcgtcagttttccatgtacaagttccaccataacttgagggcatacggaaataaactgcataggctcccaattcatagatatgaaggtagagatgatccgcctggtgagtgatgtgagctccggctccggcttggcagagactagttggctaatgagtgatagaagctcagattcttgtgttggctctgaatccgaatccacagaggtatcgatacgcatcaactgtgtaatgagggaaacgagctctgaacccgtatcgggtttagagttgaagagagaaattattttcttgatgagagatgtgagctctgactccgaatccaaatccatagagctaaccagaaacattattttacaaatgagggatacaaacttccactgtctacccatgtccgtagaggtccagaacttgagtatttgacgaaggagtaaatggaactccatcttcgggtaaagggactttatttccatataaacagagcgccaatcatagaatagttgagaaaagagtgatattaccctcggatccacctttaaatttgtggagatgagaaaggttgtgtcagtgatgaccgatatgacattctcctccacctccgaatccatagagatgccaagaaaaagagcgagcaagagagagagatagagagataatttctaagtagttttgagtcgtatgagagattttgagtgctctttacatattgatttgtaatctctcccacgttctctagctatttgattttctatattttttcccctagcttccgggtcttgccttaatatgttttttaaagcagagataatcatagagacaatctcaaacttacaggctgtccgtatatgaagtcaacgattcatttagagttacatatctcaacaatactataatattacgacagctaactaattaactactcgactttctatactaataatagtgttttttaaaaagtaacacttggactaatttactaatttagttagtttgaaattgataatcacgaccgtggttccggtgaggaagaccattggaacgatcacagatttcttgttttgtttgtgataatactctgctttaaaaacagagacaaatgttgctgcccaaaaaaaaaaaaagaaaaagaaaaaaagaagaagacatgcatg

SEQ ID NO: 3303 - DNA, 3000 bp, Unknown
  misc_feature (1)..( 3000): cDNA_ID_1820214_gDNA_ID_1620637_Annot_ID_47393 3000 nt of promoter + ATG
tccggtctaacgggaaccgctcttaaccctttatctcctaagaccgtggaggaccagggctggcttcaatgtgagtctccaagagatgtgtactcgttactataacaaatttttaccaaacgtttccaaaattaatatacgttttttcacagctatattttattcatttaatgttgtatagttaacattttcacaaaagaaattgcaaaattgaatttttttttaacaaatgacttgggttctctacagttgtagatgggtattaaggcttactttatttcatttaacgagtaagttctatttgaattattaattgaagatttaggtattaattaccatagtctaaaataataataacaaatattttgagagatgatatacgtataacatacaaaagagcatgctagcttttagtttttcatacatgaaattctttttcaatttttatttctctttttacaatctaaatcagataaatcatgaagataaagacattaatccaaatgtaaatcaaaactatatacaaggcaaacatgaacttgaacctgaaccttaacccagtcggatttcaaagaaaaatgaagtcaatgaacaaatctcacaacatcataaaagtttataacagttatctcgcaacttccaaaatttgaaaaatgtgcctacaatataaagattgtgttgattgtattgattttatttttcctaattatgcctaaatttatagtattgttgccattatcttcagttagcaatacattttagcgaaagtatcacatttcgacgataaaagtgtgttatattgtcatcattcactcagtcatagatattatacaatttgaaaattgaaataattaatatattatttggatttttgtactaatggccgatacttgtcatcaaatgtaggttaatgttcaaaacttgattcttcgaccttaaacacacaaccgtcttaagaactcatttgaagatctagttaaatgaagatctagaagaactagatgatgctaataatgatgatgataataattttgtcaacaaaagggtatgacaacattagtaatgatctttgtggctgcgcttcaggcaggttgggttctcctaaaagcagtatgatggtgggacaagttggagcctgatagaggttgttgtcagagatctctggtggatacaagaagacacaagtatgtcaaaagagtgtaatgcgcacacgtcactgcttacgaaacaaaaacatgtctcaaaataagaccgttgactcgacggccatgtggctgtatgtcaagtgatccaacaactataagtctataaatgtggtccatatttttccctgcttttaatcaaaaattcagaggaaaaaaaacacgatcgagaaatggagaataatccaagaagctcatcgtctctccctctagccgggcgtgtagctatagtgaccggagccaccagaggcatgggccgtgaaatcgcgattcacctccactctcttggtgcaagagtcaccatcaattatgtctcgagctcatcaaaagctgaactcttggtttcagaactaaacgactcatctcaattaaagtcagcgatcgcagttaaagcagatgtgtcagacccggaccagatcaacaacttgtttgatcaaacagaacaagagttcggatctaaagttcacatcgtcgtgaattgtgcaggtgttttggatccaaagtatccatctttatccgagacgacactagaagatttcgataacacattcacaataaacacaagagggtctttcttgtgttgcaaggaagcagctaaaagggttatgagaggaggtggtggaagaatcattatgatgtctacatcaatggttggtggtctcgccccgggttatggagtttacgcagcatcaaaggccgccgttgagacaatggtgaaagtgttggcgaaggagcttaagggaagccggataaccgcgaattgcgtggcgccagggccggttgcgacggagatgttttatgctggaaagagtgatgaaacggtgaaaatgcttgcaggggcttgtcctatggggaggatcggtgagtcaaaggatataaccgagattgtagggtttttggccggtgatggtggtgaatggattaacggtcaagttattagagccaatggaggctttgttgtctaataaatgaagaactaacattggaatttgatgttgtcttcttcttttcgtgtgttgatctacttttatgtcaatgatgatgagttgtttattgggcaagacaatacttatgttttttaaaagtacattcaatcaaacttaaaaaaattgattgaaaataaaaagacaaccaacactccaaaagctagccttcctctgttttgtcttctagtaagatctttcgacaatgtcatctgaagttattgtgaagtttggaggattctcttacaacataaatcgtttataattaacaaaaaaaaaagaaaaaaatttgtttagagcaaattctccaaaagaacttaaataggttttttctgatggatttattctttctagtagttccttattagttgatccgtttcattcgaacaacatataccgtttccaacgaaagcagctaaggttgtggttcaaaatctgaagcagaacttaaagattatgagaatgtttatatttgaatcgatgaaacagaatcatcaatcttctttggatagtccaatagtaatactcattagcctatcgagttctataagtggagtttttcactgctataatactttaaactcttgtatcatacgtaccataatgattcttagaaatccaataatgatttcttccatatctcatccacagatcataagttttgtccccaacgtaagccaattttgggcttcttaagtaaaggggccaatattgggctttaaacccattttaaaccctagccttgtgttgtgcgtcatatatgataatctactttttcagagccgaagcaagggaagaagaagaagaagaagatg

SEQ ID NO: 3304 - DNA, 3000 bp, Unknown; identical to SEQ ID NO: 3303
  misc_feature (1)..( 3000): cDNA_ID_1820214_gDNA_ID_1620637_Annot_ID_162937 3000 nt of promoter + ATG

SEQ ID NO: 3305 - DNA, 3000 bp, Unknown
  misc_feature (1)..( 3000): cDNA_ID_3089790_gDNA_ID_1620637_Annot_ID_162952 3000 nt of promoter + ATG
ctaatatatatgtcatttgatatccatgtaattgaatacatatgataagagggaaaaaaaatcttttttaacacttttcctttttctcatcaaacgccacttttttagactgaaagtggagatcagggtgatgatgatgaaagtaaagaagaatctgagtttaggtagaagttgatggatgttgaactctactctactcgacgtgtcccaactatactaaagtgtctacaatcatggctctctaccacataaaagttaaaagtggtatatccaagaactaatttgatcagttcatgaaattggttcacgacatgttacatgcggataatgttcttccaaaatctgttcatgagatgaagaagctcttgaagctttttggttttagttatgatttgatttacacatgattgcatcctttatcgaaagatgtttgaggagtttgttagctgcccaagatatagtgcttcgagatggaagtaagataagcatactagagagaaaaagaaggggttcccgcaaaggttcagaggtatttttcgatctaaggatagatttaggaggatatttagattaaaaaggattgcttaggagttgtgttggcatttcaacaatgctagtgtaaccggtccaatgagacacccagttgattcattgacttggtctcaaataaaagataagttttcaaagtattctactaaaccaaggaaccttcgactcgacttttctacagataggatgaactcgttctctatgcagaaaaaagtattgtacatgatcgatgttgttagtcaactacaacatgttccgactatgtgtatgaaggctgggaacatcatgatgactttgctcttccctagaccaactgcaccacacaacaacatagatgtgtatcttgcacctattatagatgatctaaatggtctgtggaaagaatgtataaaggtttatgattcttatatgaaggagaattgcacacttagaactatattgttgtgggctattagtgattatcttgccttagggacactggttagatgtatggttaaagggaaataggagtgtaacatatctggtaaggacaaagggaaataggagtgtaacatatctggtaacgaaaaaaaactataaattgtgtaaatatatcacttaacaaatgctattagagggttacaggccggagaacagagtatgtaatattgtgtttagctacaagatttcgaagaccgcgtgatacaacacccgttattatatgtaattcaagacactttcacacttttttggtgttattgaagagcgatacaatttgacttgtgttgaagtgaagaagaaagttgcattgaatcttataaaaatgacaaggatggtgtcattgacatcaagatacaaaggtaacgaaaataatttgatgaaggaagatactgagttgtttcaggaagttgaagccgttgaagatgaagacaatgatgatgagaatctacctttgattattgtgacgattctgatggaacagattctgatgacgggaattttagcttgtacgggtttccaccacaagaagaagaaaaacttaatttaccaatgaagaagatgagtttaggtatttttattgaagaaaaagaagatgatcattattcaaagttagaaatgtcttctttggatttggttggttgaaatgttatgaaacaaaatatcatttggagacacgattgaagacaacaattatggtataaaattttgattttatgttcataaatcgtcaccatttatattgtttttcaagtcttgtgttaaaaagtgaatgtggaggatatgagctacaccattaagcgactctccaaaattccatgtgtgtgtgtttgtcttggaacatacattttcaatgacagacctttatgcacgtgttcgacaagcaactgatgatatacttggtatgttccacaaaggttttagtaatccagagagagaattggtaaggggaagtccagagaatggatatgagaaaatacccatatacgtatacatgataaggagagaagatcatggaaccttaaatgcgacttgaagttgataaacacatagatgtaagtatttcgcagttaaataaatctagtttgaatcgtcgccatcttttgtaggagcattagattcaaagagagatggctagggtttagtagaaagatcgaaaaagataggacatgaattggaaaatatgtgagagagaaaaaaacttaagaaacgaaaaacctaaatcgagacttattatgttttttggtttttgtttcttaattttgtgttttttatttatttaattaaagaatcaaatttgtatataattttttataggtatggcataatggttataataagtttgatggaaggttaattagtgttttaacagaaaatttagtttactctagttatctatttcgattgacaatcattctagttattttttcaaagttttcagtcaaactagataaactttttaaacttataatatggttaagtttgggttttgtggtcaattttaatgtctaaggttagttcatttgatttattcttcatggttaagcatacatttcgaccctaaaatctcttctaaccaaaggcttaatttgttcatgtttttgtctaaacttagttaatattatataaagaaaaatcttcttacacacacagagaaaaaaaaattataaatactacttgttaatgcccttgtttctccaataattaatttagatccgagaaatgttacgtttaatatttttcatattagttactgctatttgttctacgaaaactgaagcttgcgagaaaaatacaatagtaatcataaacgatctcggtcctggtagaattctccaatatcattgtcgctacacaaaaaaagacttaggagtccaacacctaaacttccatgctattaaaaccattcatcttcaggacgagggaaaaaatataacaaaatggcattgtctctttaagcaagggcttaacatg

SEQ ID NO: 3306 - DNA, 3000 bp, Unknown
  misc_feature (1)..( 3000): cDNA_ID_2166858_gDNA_ID_1620637_Annot_ID_162954 3000 nt of promoter + ATG
acttattttgcattatagatacagatctattatattttattgacaccgtataaaaaagacttattttttatattttgcataaaatcgagatacttataaaaatgcaccgcatattttgttggaattgaaaattttaccctagaaatctatttcaaaaatcattatccccttgcattacgtctcggtaaagttcattttcactgcgcatgtttctctatttggtagcaaatataattagataattgtgtagatagaaacaaattaggtttgggatttattcaggaagtttcttctacaatattgtgataaaataagattgtattgggtaccatttgaaggttccttcaagttaagcacatgcaagttcaaaagagtcagtcatgtctctctttttcattttctcgttttctcctttttttttgttcttgcctaattcttattaaaaacctttcctaatttttttttaatgaaccaagcctagtttgaaacccgttaactctatacatctttactaaattctccaaagaaagacatgatcaaaaagacaaatctatacatattcactaatacccagagaaagaaaattgagatgtcgtatttattgatattccgaaacaataacatgagatgtcgtatttattgatcggaagaaaatttaaactcccattagtaacgaacgcaagaaataaaaccaaaactaaaaaattacaaaaaccaaacaataacatgagatgtataaatcatatataatctaaaccaaaaactacaatttgaaaaaaggaaagctatctatccatcatttcttccgatcatcatcatggaggtgaacactcgactgactcgagaagaacatccattccaagattcatctgcatggtttctacggtaccttgaccaccaaggcgactggcttgaaaaaactaggggaaacctggtcgttgctgcaacagtcatagctgcaatgagctttggggtaatggtgaaccctccaggcggtgtttggcagagtgaagattgttcctccaaaggccaaactacttttcaaaccagaacttgtgaggggaagcttgggacttcgatactagagcacaatccttcaaagcgtatcttctatcttggcatggtcattagcaatttggtatcgttttccgcctcaatgggtatcattttcctcgtcatcattggcttccgattcaggtactagatccattcataaaccataattatataatgtgttttcttcttaaacatttccttgcaaatagtcgaaataaatagtgagacctgtttactaattagtgaactaatattatatctatctgactatctgtaggaaccggttaataatgacgatcatggtcatgtttatggtggtggcggttctatgtatatcggcagccttcttctttgctgcggggttggttcaacacgaggatgatttcatcgagaagattcttcaaatttatttgggattttgggttttgcttcctgttttagtaatcctgatccaattagtgcggtttttatggtgggttattaggttcatatgttgtggttgtggacgtcgaccacggtctactccacggttgctgcctttggctctgccacctgtccgttgacgaagaggaggacccatggctcgaaccgacgtgttaaatggaaatactgtcagcaatgtgataagtagaataaagctctcccatgttgatcattttaaaaagatttctattgtatgtgtgatcttattgtttacggagtcgtcactagctctcaatgggcctaatgtaagactttaaaatgtgtccctcatttactgaaaaatatcttatactagaaaccatctaaataaatgtgaattccttataaacataacttagttctatgaaaaaactatagatataatcatataaatcattttatttgaagatagacaaaatacgacatactaggtcagtacatttataaaatcaactaaaatatcatctattgctgttttataaatatctttcttatcagtattttattttattttgttgatttaaatttatctgatcgaacagagccacgttataaatttattataaatataaattatataatccattaaaagttatgtaaagtaaatataaacaaattttatgataataataattataaaaaaaacaatcgaaagaaatttaggtagccacattacgggttgtggactaaagaggtggaagttttgttctcgtgacacataaggaaagggtgtgttgtaaatacagacacttactcaatgtatgacacttaaacctatcatgcataattcgattaggttaaatattagctacttaataacataggcaaatagccaaatacaaccaaactaaataccgatgacatttatcataaattattacgcggcaaaaactaaaagaataaggaatagattaaaaacaggaataacaacttaaaattatataaaaatacaaagtcaaattgtatctatgcggctacaaaatgagcatatataggaaataggacagagttctaattgaaagaaagaagtgatttaaccaaaagttcaccgatcagtggattggcctaaccaatcggtggctcaagcattttttcactaggtactaaactctagcaaacgggcctcttgatggatcctctctttttctaatgctttttgacccaattcctctttgttatgctcacttttgctttacaggtccatattcctaaaaagacttaattaaacctataaaacaaacgaaataaaactataaattgtgtaaatatatcacttaacaaatgctattagagggttacaggctggagaacagagtatgtaatattgtgtttagctacaagatttcgaagaccgcgtgatacaccacccgttattatatgtaattcaagacactttcacacttttttggggtaattgaagaacgatacaatttgacttgtgttgaagtgaagaagaaagttgcattgaatcttataaacatg

SEQ ID NO: 3307 - DNA, 3000 bp, Unknown
  misc_feature (1)..( 3000): cDNA_ID_2166862_gDNA_ID_1620637_Annot_ID_162955 3000 nt of promoter + ATG
gtggagtactgatttgtttcgtctccatgaagttactgctcatgtttcttgagtggaatggcatagttatatacaagtatacagtcaaaatacatttgctcctcaatgtgatcaactacgtcaatggagtttcacaaagagtgcgatagggtttacatatgatgaccgtcgaccttcaggacccaaatatcgttggagtacttcctagttttctattcttttttctaattctatttaacatttatgcaattcgtttgcggcttatgacctaagacataagactaattcattagtcaatttgttttgtttctttttaatatatatatacagctcatttgatgtttatgtttattgaataaatgttttgaataataagaagacatctttttatatatgctaatgtttacttttataagaaatgactttatatgtatttgtttgctctagaagaatttgttattgatttcatgtttattccgtggagaactatgagttttgaattatggtacaaaaactcgatttgacagaaaagtcggttgtttatattgatggaggtttagacatggttgttacgtagaaacaaaggtctctctatttgaattaagtagttaatgttgaactaatttgaatatgaataaaaatgtaatatattgtatggctttagcttattattaaaaataatatgacagctgttttataagggtaacatttcaaattatataaacgcacagttacatcacaacgatggaatactagtttactattcagaagagaccggaacaccaatcttgcttccaactctacgaagacaatcgttccatgtctgtttgtttcttggaatagatgcaatatttttatattcatacgatgagaagaagattttaatcaatccaagatgacaatctttgccaatcttcaatatatcacgacaacatttatctgtcactaaagttgttgcatccagcacgttctggaaaatctcacctccgcatatggagctcggcttttcaacgcaagcctctagaaaatcatactgtttttgcgagtaatggggaagcttcatgtcatattccattgcgggtgaattagcttcttcgaatggagttggagatatggctacatcttcatgtatctcctgggagaaaattggacaagccatgtaaaacattacaatggatacaagcatgaccatgagaagagactttgccatatttacttttggttttggatgtaagattgctgatataaaaaaaaaacaagagatgttatataggacaatcagtaaggatatttaattaataaattgtttatttattaatagtttatgttactgacttcataaacttcttcatttactagttttgtttagaagacgtttgcagtagagactatagacttataaacttctctacaagtcataacttacaatgtgtgaaaactctttttttcttaatgtttttacaaatcaaagtgatacattagatacaacataattacacgattatacaaaaaaatgaaagaaagaattgtaatgaggacaaccgcatggagactttcaatccgaaatacagcgagtaatattcttgggaagtatatgatccttagacggtaattacaacgagtgttttttgtaatttgaatatttttggggagagtaaagattcaaggacgggatagatcagatttgtttattgacccttataacctcaaatatttatacacattcttatcttttactggttttaaaaccatacggggttaagaaaatagaagtctttaatttagaaaaagattttaaaaaaaaacagtatagatcttctgttacagagggtctagcaagagacatttaaatactctttatttatttctatattttaaataattaaactaaataaatatattattattaaattttaaaaacacatttatcggtagttaaccgatggtgatgctctaaaaatccaaaaatcaaaaggccatagttatatgtttttgttgtagaatttgaacaaaaaaactaagacaaaaaaacgtgtcatcattgagatggcgtttgaaataaaagacccataaacaaaattaacctagtttagtaactattaccaaaaggaaatcaaatcgtcgtcgtttgctttttacttttaccaatagttatttcgcttttgtttaacaaactatctacttattttgcattatagatacagatctattatattttattgacaccgtataaaaaagacttattttttatattttgcataaaatcgagatacttataaaaatgcaccgcatattttgttggaattgaaaattttaccctagaaatctatttcaaaaatcattatccccttgcattacgtctcggtaaagttcattttcactgcgcatgtttctctatttggtagcaaatataattagataattgtgtagatagaaacaaattaggtttgggatttattcaggaagtttcttctacaatattgtgataaaataagattgtattgggtaccatttgaaggttccttcaagttaagcacatgcaagttcaaaagagtcagtcatgtctctctttttcattttctcgttttctcctttttttttgttcttgcctaattcttattaaaaacctttcctaatttttttttaatgaaccaagcctagtttgaaacccgttaactctatacatctttactaaattctccaaagaaagacatgatcaaaaagacaaatctatacatattcactaatacccagagaaagaaaattgagatgtcgtatttattgatattccgaaacaataacatgagatgtcgtatttattgatcggaagaaaatttaaactcccattagtaacgaacgcaagaaataaaaccaaaactaaaaaattacaaaaaccaaacaataacatgagatgtataaatcatatataatctaaaccaaaaactacaatttgaaaaaaggaaagctatctatccatcatttcttccgatcatcatcatg

SEQ ID NO: 3308 - DNA, 3000 bp, Unknown
  misc_feature (1)..( 3000): cDNA_ID_3089786_gDNA_ID_1620637_Annot_ID_162953 3000 nt of promoter + ATG
aatactgtcagcaatgtgataagtagaataaagctctcccatgttgatcattttaaaaagatttctattgtatgtgtgatcttattgtttacggagtcgtcactagctctcaatgggcctaatgtaagactttaaaatgtgtccctcatttactgaaaaatatcttatactagaaaccatctaaataaatgtgaattccttataaacataacttagttctatgaaaaaactatagatataatcatataaatcattttatttgaagatagacaaaatacgacatactaggtcagtacatttataaaatcaactaaaatatcatctattgctgttttataaatatctttcttatcagtattttattttattttgttgatttaaatttatctgatcgaacagagccacgttataaatttattataaatataaattatataatccattaaaagttatgtaaagtaaatataaacaaattttatgataataataattataaaaaaaacaatcgaaagaaatttaggtagccacattacgggttgtggactaaagaggtggaagttttgttctcgtgacacataaggaaagggtgtgttgtaaatacagacacttactcaatgtatgacacttaaacctatcatgcataattcgattaggttaaatattagctacttaataacataggcaaatagccaaatacaaccaaactaaataccgatgacatttatcataaattattacgcggcaaaaactaaaagaataaggaatagattaaaaacaggaataacaacttaaaattatataaaaatacaaagtcaaattgtatctatgcggctacaaaatgagcatatataggaaataggacagagttctaattgaaagaaagaagtgatttaaccaaaagttcaccgatcagtggattggcctaaccaatcggtggctcaagcattttttcactaggtactaaactctagcaaacgggcctcttgatggatcctctctttttctaatgctttttgacccaattcctctttgttatgctcacttttgctttacaggtccatattcctaaaaagacttaattaaacctataaaacaaacgaaataaaactataaattgtgtaaatatatcacttaacaaatgctattagagggttacaggctggagaacagagtatgtaatattgtgtttagctacaagatttcgaagaccgcgtgatacaccacccgttattatatgtaattcaagacactttcacacttttttggggtaattgaagaacgatacaatttgacttgtgttgaagtgaagaagaaagttgcattgaatcttataaacatgacaaggatggtgtcattgacatcaagatacaaaggtaacgaaaataatttgatgaaggaagatactgagttgtttcaggaaattgaagccgttgaagatgaagaccaggactgatgaagacaatgatgatgagaatctacctttgattattgtgacgattctgatggaacagattctgatgacgggaattttagcttgtacgggtttccaccacaagaagaagaaaaacctaatttaccaatgaagaagataagtttaggtatttttattgaagaaaaagaagatgatcattattcaaagttagaaatgtcttctttggatttggttggttgcaatgttatgaaacaaaatatcatttggagacacgattgaagacaacaattatggtataaaattttgattttatgttcataaatcgtcaccatttatattgtttttcaagtcttgtgttaaaaagtgaatgtggaagatatgagctacaccattaagcgactctccaaaattccatgtgtgtgtgtttgtcttggaacatacatgttcaatgacagacctttatgcacgtgttcgacaagcaactgatgatatacttggtatgttccacaaaggttttagtaatccagagagagaattggtaaggggaagtccagagaatggatatgagaaaatacccatatacgtatacatgataaggagagaagatcatggaaccttaaatgcgacttgaagttgatacacacatagatgtaagtatttcgcagttaaataaatctagtctaaatcgtcgccatcttttgtgggagcattagattcaaagagagatggctagggtttagtagaaagatcgaaaaagataagacatgaattggaaaatatgtgagagagaaaaaaacttaagaaacgaaaaacctaaatcgagacttattatgttttttggtttttgtttcttaattttgtgttttttatttatttaattaaagaatcaaatttgtatataattttttataggtatggcataatggttataataagtttgatcgaaggttaattagtgttttaacagaaaatttagtttactctagttatctatttcgattgacaatcattctagttattttttcaaagttttcagtcaaactagataaacttcttaaacttataatatggttaagtttgggttttgtggtcaattttaatgtctaaggttagttcatttgatttattcttcatggttaagcatacatttcgaccgtaaaatctcttctaaccaaaggcttaatttgttcatgtttttgtctaaacttagttaatattatataaagaaaaagcttcttacacacacagagaaaaaaaattataaatactacttgttaatgcccttgtttctccaataattaatttagatccgagaaatgttacgtttaatatttttcatattagttactgctatttgttctacgaaaactgaagcttgcgagaaaaatgcaatagtaatcataaacgatctcggtcctggtagaattctccaatatcattgtcgctacacaaaaaaagacttaggagtccaacacctaaacttccatgctattaaaaccattcatcttcaggacgagggaaaaaatataacaaaatggcattgtctctttaagcaagggcttaacatg

SEQ ID NO: 3309 - DNA, 3000 bp, Unknown
  misc_feature (1)..( 3000): cDNA_ID_3070980_gDNA_ID_1620637_Annot_ID_162950 3000 nt of promoter + ATG
ttgtttttctaatatatatgtcatttgatatccatgtaattgaatacatatgataagagggaaaaaaattcttttttaatacttttcctttttctcatcaaacgccacttttttagactgaaagaggagattagggtgatgatgatgaaagtaaagaagaatctgagtttaggtagaagttgatggatgttgaactctactctactcgacgtgtcccaactatactaaagtgtctacaatcatggctctctaccacataaaagttaaaagtggtatatccaagaactaatttgatcagttcatgaaattagttcacgacatgttacatgtggataatgttcttccaaaatctgttcatgagatgaagaagctcttgaagctttttggttttagttatgatttgatttacacatgattgcatcctttatcgaaagatgtttgaggagtttgttagctgtccaagatatagtgcttcgagatggaagtaagataagcatactagagaggaaaagaaggggttcccgcaaaggttcagaggtatttttcgatctaaggatagatttaggaggatatttagattaaaaaggattgcttaggagttgtgttggcatttcaacaatgctagtgtagacggtccaatgcgacacccagttgattcattgacttggtctcaaataaaagataagttttcaaagtattctactaaaccaaggaaccttcgactcggcttttttacagataggatgaactcgttctctatgcagaaaaaagtattgtacatgatcgatgttgttagtcaactacaacatgttgccgactatgtgtatgaaggctgggaacatcatgatgactatgctcttccctagaccaactgcaccacacaacaacatagatgtgtatcttgcacctattatagatgatctaaatggtgtgtggaaagaatgtatagaggtttatgattcttatatgaaggagaattgcacacttagaactatattgttgtgggctattagtgattatcttgccttaggaacactggttagatgtatggttaaagggaaataggagtgtaacatatctggtaaggacacaccaacatgcatgttttattttgctttagtcaaattttgacaacacgactactggaagtgcacagttaatcgtctgtagtataatgggctttctaaacccattccaactctcatttagtatgatattgtcctctttgggcttatatgctcaagcccgcaaggatttgttattgggttccttcccaaaaggtctcatactagttggagttggacttggcttatatattagaaactctttttctaaactttcgatgtgggacctttggtttgtacccaacaatctccccttcaaaccaaagaccacgaacttggacctccttcttgaggcaccttcttatcgtgtcatgtttgagagattttcccacatcgatcatagcccaagccctaggtccagtgtttcaacctggctctgataccatttaatgggctttcaaagcccattccaactctcatttagtatgatattgtcctctttgggcttatatgctcaagcccacaaagatttgttattgggttccttcccaaaaggcctcatactagttggagttggacttggcttatatattagaaactctttttctaaactttcgatgtgggacctttggtttgtatccaacatagtatttatggatcgaattccattggaagagaagtaattcaaacaagtctgtcagaagagagtaaaactaggacaaatcaataaaagagggggaaagggttgttattgtgtcacagttgtaagtaagtgaagcaagtaaatagtaagtgatcaataagagacaaaagttggacattcaagggatcgtaggggttcaatgatcttcatgatctaatcatgtttatttccatgttttcgagcatataaaacacataaaattcagctactgaggaaaaatatataaacgcatatatacatatgtacacgtccacatactttcacgtttaggttttcgttattagggaagttggacttttaataggtttactgatatttgggtctcacgtaaagcagaccggctctttggaggtgcatgaggcgcatttgttctagatccaaattttttttggtaaatttaaggatctgattagtatggaaaagacctacaatttttttttttttagtatgaaaatgtcaattttaatgtgtttttaaaaaattagcataaaaagggtccaaatttttgttttatagtttagaaaaagattaatttttaaaatttgtacagggactataaatttattgagttggtagagacaaaaagcttaaagtttacacaaaggagaaaattatcataaacacaaacattatcaacttttctttgtttgatattaaatttttaatttataattttttattgttctaaaataatataaataagtaagtggtagtttgacaataatctctatcatctactcaaatgtgacaatggatactacaataatttactcaggtacataagtaatgacgaagtctgagtaaaatgtaatttgaaatcaaattttggctttctagaagcaaaactgaatcaaaattttgttcatgtgaaccaaaatctaaagtagctcccaaagagagaaaaaaatatcttgaaaacatgcgaagggacaaaagaaacacaaaatgacacgtgtcaatgttaggctaacgagatgaggttgctgtaacgtgtggccatcacacttctcttccttctttctttccctcacctctttctttcttcgtcctaatctccttcttcttcctccgatcactctatttaacgtcttcgacgaatccgaagctgaaaaatatctaacaatctatcttttgggtccctaaaaaagctccttcgtttatcttgttttctaagttatctttttgtatgagtttcaaagcttatcattatctcactcttcttccatagctatg

SEQ ID NO: 3310 - DNA, 3000 bp, Unknown
  misc_feature (1)..( 3000): cDNA_ID_1820210_gDNA_ID_1620637_Annot_ID_47395 3000 nt of promoter + ATG
tagtcgtttgcttttatctctattacggtttctctcggggttttcataaaggaaatatggtgtacagtatttttggtaatatagtgaggtggtcacatgtaatggattcaatccaccttcctccctcgtggggtttaattgtgtacataaaaatacactcttattataaaaaaaaacttaagttgtctaattattataccaccgaaaatggaacattaattgacaatgatgctttcaaaaaacaaaccttttactacaagataatattgaataatgtaactaaagtaaaacaataacaattgatcttgcaaagttgcaatgtgtttgtaatttttaatattgtactcactatcttcgagtctcttgactagtttttaatgggacattattttagacacgcaatatctataatcggcgaagcgtagtcaacataacattttcttaggtaagcaagtaaagctacaaaaagtcttgagaaataaatcaaaaggaggaaaaaagcatgaaaaccttctttatttcacctagtctcttttgcttttttctccttagctttcaagattctttgccatagccaattgaccattacatgctttggccttttcctcgatattttcctcttctccagtggcagtcctaccaaaaaattagaaacattcatagggggcaaaaccgtaacctaaccaaagaaaacctgaactgatagtgcatcttattcaaagccctactctgtcccatgtatatgtctcacactcttcaaagatgctcacataaaagggctctttagtaatttgatacctcgtgcaatatctgccacactttttttataagcaggtgtcccatttttttcttcaaaggctgaacaatctttgatgcgatgttttccaacaacatctttattataccattattagattaaagtgcgtgtgtggaaatttgaatatctctctctctcataattagctcatcaagctcctccttcattttcttattcgtactagatttctcttttgcctttttatttggtagagctctgctggttcatggatattgagccctgcttgaagttttggggggtgtttttttcttctttataattgcatggcaactacaattgatcaaaccagcatcaagtcattgcatttccatcaagtcatccgtttgatcatcacaatcatcttcttagctttcttatttctcattggccctacaagttccatgaatcatcaccttcatgaatcctcatctaagaacactatggctccttccaagaggttccttctacaaccttccactccatcttcatctactatgaaaatgcgtccaacagctcaccctagacgcagtggcacttcttcttcttcggcgaggaagaggaggagagagttcagagctgaagctcatgaggttccaagtggtccaaaccctatctccaactaggtgagcaaccggttttttgggtaaggtaatttaattaattaaatatttggggtgtttggagatgagttaatgtatattattaatattgaattttgtaatggatggagagaattgtcatggattcttaattatatatctatgtttcctttacgaatttcccttcttcgtttattgaaatcttttgatcttcgtcttctaagttttggaagttagcattgtatgagaaaaggagagacaaatacttttcacatgtgtatgtatccatctgtatataattccctcacatttctgttttatttcttttatatatttagtgatgcatgtatatataatatatctataattttaaaccaaatatatatatatatatatatatataaatggggacatacgaatgataatatgccaaaaatcaattggctgcttattatattagagcttattctattgggttactctcagagaaaaaaaaatagttgaacacaagaaaatttaaaatctacggtaaataatttaagaatgtggaatatacattatttcattttaacgacacttttatacttaacgatacaattttaagagtaaaaaatggtttgaatagttatatatcaaaataaatacatgtttagactaagttgtattctatggattattaatctcggtttaaggtggtttttgttaagtcatcggttattagagtttcacgtcaaaaaactgtgaagtggatgtttaagtggtgtgcatacaaatttttaacctatttgacctatttttactctttcttttttttaacctagaaaaaaactatttcattaaaattaaaaatagtttagacttacgatgtgaatattatacacaaatgatctcatgacaaaaaagtaaaaaaaaaaaaaaaaaactaaaacaataattcataaaaaaaattattccctatttttacttttcaagcaccaaggatgtagaatataatttacatcaaaagtttgaacccgaaattattcccatttgcgatctgaacaactagtgaagcccaattttggtaaaattgattgaattatttttaggtattcgtttcttttagcgatctattagacttaaacaagctaaacaaaaaacaatagagataacaaaaacatactaaaagaagaagtcaacattaattaggatatctggtaataattaagaatcgtaaattattattggaaaacgttagtaaagattctctgttctactaatatcctcaaccctaagttgttttctaaccaaaaaaaaaaaaaacagcctgctcacatctcatcatgaagttgtctttttagttcttgtttcatcgtcaaacatgtcttctttcttaagaaacatctgaatttaacaacaaaacataatcaactattaaagtctggataaataaataaataaaaacagggtttgtaggatctctggcatactttatgttgttcttgtgaaatccatcaagaaaattttcaaaatttattcttaaactaacaagagagatcctacaaaactaaattttagcttaggtttttggattctttagaaatg

SEQ ID NO: 3311 - DNA, 3000 bp, Unknown
  misc_feature (1)..( 3000): cDNA_ID_1820193_gDNA_ID_1620637_Annot_ID_47401 3000 nt of promoter + ATG
ttttttatattagttactgctatttgttctacgaaaactgaagcttgcgagaaaaatgcaatagtaatcataaacgatctcggtcctggtagaattctccaatatcattgtcgctacacaaaaaaagacttaggagtccaacacctaaacttccatgctattaaaaccattcatcttcaggacgagggaaaaaatataacaaaatggcattgtctctttaagcaagggcttaacatgaggtatcgtaattacgtagaagcatacagtcaaaatacagaggctcctcaatgtggtcaagtacgtgtatggactgccagaatgagtgggatatggtttaaaataagttataataatccatctggaagatatatacgaggttggaagtattgaaaacgggttctaatatttttgtaaaactgtttaaatttatgtaattcttcagctgcttatgacatgaacaaaagttataattcatgtcaattgtttttctaatatatatgtcatttgatatccatgtaattgaatacatatgataagagggaaaaaaattcttttttaatacttttcctttttctcatcaaacgccacttttttagactgaaagaggagattagggtgatgatgatgaaagtaaagaagaatctgagtttaggtagaagttgatggatgttgaactctactctactcgacgtgtcccaactatactaaagtgtctacaatcatggctctctaccacataaaagttaaaagtggtatatccaagaactaatttgatcagttcatgaaattagttcacgacatgttacatgtggataatgttcttccaaaatctgttcatgagatgaagaagctcttgaagctttttggttttagttatgatttgatttacacatgattgcatcctttatcgaaagatgtttgaggagtttgttagctgtccaagatatagtgcttcgagatggaagtaagataagcatactagagaggaaaagaaggggttcccgcaaaggttcagaggtatttttcgatctaaggatagatttaggaggatatttagattaaaaaggattgcttaggagttgtgttggcatttcaacaatgctagtgtagacggtccaatgcgacacccagttgattcattgacttggtctcaaataaaagataagttttcaaagtattctactaaaccaaggaaccttcgactcggcttttttacagataggatgaactcgttctctatgcagaaaaaagtattgtacatgatcgatgttgttagtcaactacaacatgttgccgactatgtgtatgaaggctgggaacatcatgatgactatgctcttccctagaccaactgcaccacacaacaacatagatgtgtatcttgcacctattatagatgatctaaatggtgtgtggaaagaatgtatagaggtttatgattcttatatgaaggagaattgcacacttagaactatattgttgtgggctattagtgattatcttgccttaggaacactggttagatgtatggttaaagggaaataggagtgtaacatatctggtaaggacacaccaacatgcatgttttattttgctttagtcaaattttgacaacacgactactggaagtgcacagttaatcgtctgtagtataatgggctttctaaacccattccaactctcatttagtatgatattgtcctctttgggcttatatgctcaagcccgcaaggatttgttattgggttccttcccaaaaggtctcatactagttggagttggacttggcttatatattagaaactctttttctaaactttcgatgtgggacctttggtttgtacccaacaatctccccttcaaaccaaagaccacgaacttggacctccttcttgaggcaccttcttatcgtgtcatgtttgagagattttcccacatcgatcatagcccaagccctaggtccagtgtttcaacctggctctgataccatttaatgggctttcaaagcccattccaactctcatttagtatgatattgtcctctttgggcttatatgctcaagcccacaaagatttgttattgggttccttcccaaaaggcctcatactagttggagttggacttggcttatatattagaaactctttttctaaactttcgatgtgggacctttggtttgtatccaacatagtatttatggatcgaattccattggaagagaagtaattcaaacaagtctgtcagaagagagtaaaactaggacaaatcaataaaagagggggaaagggttgttattgtgtcacagttgtaagtaagtgaagcaagtaaatagtaagtgatcaataagagacaaaagttggacattcaagggatcgtaggggttcaatgatcttcatgatctaatcatgtttatttccatgttttcgagcatataaaacacataaaattcagctactgaggaaaaatatataaacgcatatatacatatgtacacgtccacatactttcacgtttaggttttcgttattagggaagttggacttttaataggtttactgatatttgggtctcacgtaaagcagaccggctctttggaggtgcatgaggcgcatttgttctagatccaaattttttttggtaaatttaaggatctgattagtatggaaaagacctacaatttttttttttttagtatgaaaatgtcaattttaatgtgtttttaaaaaattagcataaaaagggtccaaatttttgttttatagtttagaaaaagattaatttttaaaatttgtacagggactataaatttattgagttggtagagacaaaaagcttaaagtttacacaaaggagaaaattatcataaacacaaacattatcaacttttctttgtttgatattaaatttttaatttataattttttattgttctaaaataatataaataagtaagtggtagtttgacaataatctctatcatctactcaaatgtgacaatg

SEQ ID NO: 3312 - DNA, 3000 bp, Unknown
  misc_feature (1)..( 3000): cDNA_ID_1820368_gDNA_ID_1620639_Annot_ID_47435 3000 nt of promoter + ATG
atccaagcgctattttgtaaggcgagaatggaaaaaccagacgtcctaagttatgtgcgagtttacatcatagcctaggactgaccctttaccacgcttgtgcacaatgagacatttactttatgtctttatcacatcctttttcagactacattgtctattttgaacttgaagcaaattttcttcccgtttttgtggcccaaaaaccggttaaaaccaacattacaatggcataacgtataaactaaaaggctcttcgtcttaatattttagttgataactcgaatagattatacagattgtattgggtgggctgggttccattttggtggcccgtatgagcaataattatattacaatgtattatttttttttatacttgtctgttgttatcaactaaaatactttgcatttgatccatcgtgttactttcaaatatgggtccatatcaaaagctggttctccatgacacagtgcagtgaacaatcttgtacactcttattctacaaccaaactcatgaatttttttttctattttcagggtaaggtcctcgatttttaaagaatggccacggaattgatcctattacgatcatctttgattataatctgattgtcaccaagaatccgatcgtcaccactatagttgtgcatacgatattaacacttgatgaaagtgaatttctcattaattataaaagaaacatacaagatgtatttatagttacatgagagtagtgaataacataagctaaaggagacttatatcaattctacatctctatatattattaatacacccccctcaactcttagaatcaaaaccttcttgtggagtgaagagagttgacactgacattcgtccaagcaatgaatgaaaaggacctgggggcagaggtttcttcaggatatccgcaagctggttagctgttgaaacatgaaaaaccttgtgaaaacctagctttatacgatcatgcgtcttgtgacaatctatctctatgtacttggtcctttcatgaaagactggattatttgcaatatgcatagcagatttgttgtcacacatcaacttggcttgagttgtgattgtaatatgtagatcttgaagaagctgattcaaccaaaccatttcatcagatgccactgccatggctctgtactcagcttctgtactactactacttgccacattctgcttctttgacttccaagaaatcagagagttgccaagaatgaaattcagctccagtgttgagacgatctgatacaagaaccaacccagcatgatccgagctatgaagaaagaacgaattatcatattgatctgtcgacattgttgtaattttgaaccaaagatgatgttgaacgaaagaatcgatgaatgatgatagaatcaatgatgaatcaaagaatcgaagaaccgaagtatcaatagatgattgaattgaagaaaacgaagatgaagatgatagcgaaagtaacaatttcttcgatttggtggatgaaagaaatgatgaagaaaatggagcatcaatggcttgattctctcatcgtacaataaggatgatgaattttggagaagatatgatgatgaagatgaagatatgaagatgaatcgaagaaattgttgaaaattgatgatgattttcccagaaatgtttttgttatgattttcctggaaaagaatgagagaatgagataaaagaaacatacaagatgtatttatagttacatgagagtagtgaataacataagctaaaagagacttatatcaattctacatctctatatattaatatacgagacgagtgttgcgcaagaaaggtctcctcataagttgcgtgttctactgcttgcatacacatctgaatcttgctagagatttatctggatattaggggttttagagaaattttatacaaatcaaatgtccattgggcctaagatcccggcccattttaaactctggatctaactctaacatttttttttatttttttttggtcaactaactctaacattattatcacattattttcttatctgaatacaaattgccacatgtctcatcgaattatttcagataaatgattatgaacaatgaactaattctaaaccgagaattaagaataaggatcacagttttcgaaccggagggagttacagaaatactatcgtagtagacagaattcatgacaaatacaaaaagatactaaaatttttgatccccacagtcacgtgcattgtagggctcgaaggcttaatgggtcccatagctccggtccggctcgaggtttctgtgtcgcacgtgtgtggcacacacaccagggcacacaaatctctggtacgtaacatatacatgattcccatgttgacctgactggagcagaaggtgctgtgtagtgtggaccattgaatctgagccgttcaaacttttaacctcatcgtcacattttatgaaccacaattaccagagaaacccaaatggcatctttttttttttaaccaatcattcatcaaccattttcttcttcgacatgttttgtccgttggattaaaccacacagattgtgatcttacggcgaagaaaccaaactcaaagacattattatcccttttccaccgaacattgtcagatgaacaaagtagttttttttttttttaataataaaacttcccaacttcaaaatcagtacgtgaggtcatagattctcacctccttttcaccttttgttttccttattatgccaaattagttacaaacatacaatcacatcaaaatttattttgactaatatggttagtccataatatacgtaacaaatcatataaatacgaaactttctctattaaaattatttaacttttgcctctcttttctcctcgtgaaggaaaattctttagtcattttttctctcctcgagaattacgcaaacacaacaaaaacccagacattgaaaagtaaaaaacaaaaacagagaaagtgggagatagaagatg

SEQ ID NO: 3313 - DNA, 3000 bp, Unknown
  misc_feature (1)..( 3000): cDNA_ID_1820358_gDNA_ID_1620639_Annot_ID_47438 3000 nt of promoter + ATG
taagagatgaatgatcattcatttacacgaaaatcatatgattttgagtctatctaagaactagaagtgtcaggcaaacccaaactgcgtgttgattgtgacaccaagaggagggcacttgggatgggtggcaggtgaagaagctcccaacggagctccttggaccgaccaagtggttatggagtttctgcaacatgtagagaatcgtgaaaccattaacggggagagatctttcgaggatgtccatgatcagattcaagtctaattctgtttgtccattcttcacttggagtggtatgtttcacttgtacactgttgttgcgcacaagaataataaacatgtaaagaatcatagtatataagacttcttgcatttcctcctaatatagatgatactatcttcaagttccttagttacattcatgacctcataccatacgtttccacttaccacaacgaattcacattatgtatatatttctaaacccttagataaccgcagatatgtgggatcatattgaggctttatcaaagggttatagctcccagttcttcatagaatcgaacctgtatggaagagacgagagattagtttcctcgacttcagctgcttagagcatccacaacggttaggttctcacaaaaatgtcctttattgataaaaaatattatttttatcatagtttttttagttagttaaatttaaagttattagttaaatctgaccaataaatataaaacatctggcaagtaaaatcttttaaagtagagagacgtctctctcccaagagatttcagaaacaattgtttcatgagtttctctctctcttctccttttcagaattttattattattttaattgttaaaattgatgagagaaccctgcgtgttggagatggtcttagaatctcctccaaaaagctttctccattgtagaatttagaccacaagatcaaaatgttatggtgaagatggagatttgatagtcttaagtgatgaagaataaatgatctctcagctaaactggataaagatatgatcagtaaactaaagcatgcatggtttgaatttgagtcttggttaccgttggtttaattctggttctctcgataaaaggaaccgagttatttttgagtttgttcagaggtcgtaccagagtagtaatatcaaagctttgaacatcttcaagatcaactgatcaagcatggtgttcttcttgtaattctgccgatgcatagagtttaaatttgtatgttcttgtgtattttaaagatacataaaaacagttatagttatgttaaatattcagatatacatacatattaagtataggactgagcaacaaatccaaaacgtttcgctttcaagcttagggatagaattggttaccggtcacttttatgatcaagaaattgttagttcttggaagttttctagagaagaaaaaaacaacacgaatattatgaaaaaactatatagaaacatttcatggtttatttagcttagcttcgacttcattattgttatgttcatgtgggaaattatttattaatttcgttgcaataaaacgaaaaaataaaaagaagtggaacacatggtatcaactatcatcaagagtccttatgcttttttcgtgggtctagcttccagcaaatgccatcaaatcttctttgtcatatatttccatttgtttcagcatatgaagtataacataaattagataaaatacgacttttcctttttagaagtataatatatatagtattatttttcttttgcaagtatgatagtattcttttttcctgattttgttttagtttagcttcaagtctctctaactatgaatgagaattccaacgtaccatttttatgacaatctctaaatgttttgctaacctaaagttgtactcatatattcattgagaaatatatgtgatgtatgtccctaaaatttaattataaccaactctatatgcgtagttttgttcaaccagaaaggtaagtctatatcatagtatgataataaactatacaaaataatactataactacccaaccaaccccctaaatttatggagctcacaatctcaataaattaacaataaaaattcgtacgactaacaccaattatggaatattttatatacttcaattaaaagaaatgagattttaacctatatagccttttgtagaagaagaaaaacagctataggctatatatgttccattaattaatgatctcccaatattaatctcctaattaaccaaattttaatccaaattaaatgcatatcatgtgctttatgtaacacaaatctacaagaaagtgatggtttgttttataagcattactcaagaatctcaaaactcacaaaagaaagagaagaactgtccccacatgaacataaacaaacacacatcaactttaacatttcaaaattcctgatttattctcttttaatcatatactaataataaattttcaaaacattggaggatgagagagagaaatggacatggcgtggctgtctggtcactgagaaataaagtaatgctttttaaagaagaatatttttgttcaacaaaaaaggcccacaaattacatgtaatcatcaaaatcatgcgaagagagagagagagagaagagaggagacaaaggtaaagtagaagataaaggaatcgtagagagacaaaggccatttgatgcatctctttctttgttctttatagttttggcttttctcttcttttcaaaaatctcttataatcacattattgttactataaactttgattctttaaacaccattattacctctccaatcattcattctacacacagctgtttttgattcatctacaaatttctgattttttttctagggttcttgtttttccccccaaattgacttgttctcctctctgtttaggtttgtgtctctttaatggtgtgtgaaaggtgaaagctttaagcttttgtgtgtgttttaacaacaatg

SEQ ID NO: 3314 - DNA, 3000 bp, Unknown
  misc_feature (1)..( 3000): cDNA_ID_2105726_gDNA_ID_1620639_Annot_ID_162991 3000 nt of promoter + ATG
atcattaaaaaaaaggaatttttgtaagaatttctaaaaataaatgactaattttgttgttcaattggttttagcctttctttttattctaatttttgtgtggatatagttaaatttagggagttcgcttatatttattactccctctgtttctaaatatttgtactttaaggtttttgcacacaaattaagaaaacatataaatctcatttaatttatctctttcttataaaaacatcattaattacaactaatccaaccaataaaaaaatatgatgtaaaatataattggttaaaaactattaaatacatttaatgtttgcatagaaaaatgaaaataacacttatattgaaaaaaatgaaaaacctttaaactacacttaattaggaacagaggaagtatgaatgttgacaacaaaagggaaaaactgaattgttacaacaattatgaagtattttaccttgttcatgatttcttatatattcatatcaatatttgttttcagtcacattcacggtaaaaaataaaagaaagatttttatttattttgtattggtttctcataaaaattttaatgtattgattatacttcaaaaggttaactaacaattgttttttgtggacaaattttttaatctgcatttttctttggttgatataaaatattagatgtggaagctcgcaaccggatctgtagaacctcggagaaatactatcgcgaattttgcggccatgcaggaaacgacgattgcctttcaaaatcaaccaaaaaacctaaaccatttaaatgtgtttgccatgataataggagtcagaatataacttcaattaatgatcgatataataactgcatatgtaccttttattgctaagtcttaataaacaaaatagtaactactagatattaatccgcggtttaccactgcgagacgatatttattaaataagaatttcaaattttaagttgtatttttttttatattgtttattttgtttagttttttttttttttttttttttggcaaaattttgtttagtgtttaagattgtatatttttatttgattttgttaatttcacctatagcacacaatcatgtattaatatcaatacaaatccatcaattctaagattttatccgtggtataaagtttaaatgtttataatgtataaatttcttataaatgttggacattcagttgagaaagacatcatatttaccaaatctaaacaatctgtaaaaaatgttacttcttaaatgtcggcatcattcatacacttcatcgcccctgaaaaaagtttcgacttctatatagagtggagataaacttctacgcaaactagtagctcctataattggcgactccccatttaataaggtgcaaaaacatcgtaatcggttttaaaattgatagcttaattctttctattttctgaaaaaaaaatctttaggtcatcatcaatgtctgccaatactgtacttggaagattgagtttgacagtgtgatgaacgcatcttgctcttgattaaatatattttacttccaaaaacgacacacagttttcatctcctatgataagccatgccatggtatgcgtcaatcgtcactctgcccattgtatactaaatttctttctttccatgttctaaagtttttttttttttttttgtcgttctttctttctttccatgtcctaaagtattttttattttttggaattacgagaaagaaccaaaaaaaacttggctaatgcaaatctttgatgtgaccacggtagtttccataccttgcgaccgtatatctgtatttatcgccacaatcgaggataaatatgaatattttacacataactctaatagatctcccaaattgtatataaaaaaagaaaactccgatagatctagtttagcttaaaaaattgatatgattctttacacaaaacggtaacaaagaatttagacctccatatttaatttatatatgtatgcccacataaagcaacattgttctaaaacgctgaaagtgaaacatttaaatattcttccgaataaatcgacgtgtacacgacattgtcaccgttgatctattattgaagcaatatttaattcctccgtaaaacattataactcatccgtaaagaccgtgaaacattataacttagcggtaatatgtaaatttgttgtgaaataataacatgaaaagaaaccgaaaagttcctcttgataacttttttttctttttaataatgtagattaatataattttcgttaattatgttttaatgaaaaagattaattaaacaaactaatcaaatgtgttaattgtaatatacacaatgatacaaaaaatatgaaataagtttttaaaaatatgtgatattccaacaatattccaacttttctataacatcaggtaaatatttcttcaccttttcatgtcaacattttacaagagaagcataaaacaaaacaaaaaatcctctcggcaaccatatgccttttaaactaatgaggatttgtacttttttttttttttttttttttgggcacaaactaatgaggatttgtacaaaagctaaatgaaaagagctacaaaactaagcccatagacatatatctcatgaagccactccagatcacctgatgctacatcaaactaagaatggttttaattaatatatgggcctcagctgaggaaacaaaagcccattaatttgcttcaatattggtttacccgtttattctacatgccacgtggaagaatatgagtggtcacgatattataaaatgcgtcaaggtaaacaacaaataacaaactcgttttcgagcaaaaaaactttgaagattgatttgaagaagaaagctctctctcaggttcttgttctcaaccagacattgatttcttcgatttgcatatttcccttcttcgtcttacgaattttacttcctttagcgatggatttgatactacgttgacttttatcttccttttggaaatg

SEQ ID NO: 3315 - DNA, 3000 bp, Unknown
  misc_feature (1)..( 3000): cDNA_ID_2169105_gDNA_ID_1620639_Annot_ID_162984 3000 nt of promoter + ATG
ccacaacaaaatctgaatttggacatcatttatcatttatagatcttaacttctcgtcgtttttgttacattctcaaaaatagcaagcagttccgtccgttacccaattacaattcacaggcccacgttagactactgagcccatccacgcaacattccacgctcattaaacaaacatgtttggatcaagacttggataagcttttgttacatgttctctgacttattcaggcaagttttttcgaagctaacggccacgccacccggaaacagacttggggacaagtgaaatcgaatttgaggcagcttctaatctgcacaatgccgaaagtgcaactgtttatttccacaccacaaatgcagaaaacagtagactgattgagagagaaggattagggaactactttgatatttcttcaacagccttcatgacttcagcagaactagtttccagtacttgtcctccaaatacaatctcatctaacaccgcgtgcatctgcaatgaaggaaagaaagaagaaggcataaagctatattattgacacgcttttgtttcatgtagctatctaaaagatccaaccaatctgcagcagcaaattctgaaaataatatcaactacactgcaggacaaactgttctgtgtaataagattaccttgctgtagttgaacacaatgtcgagttcgcagacattgctgaagcatttgtccagtgtttcaacaagaactgccaatgcaagaaactaactttaaatcatcatacaatgagaatacattttcaaagcgttaagcaaaaagaatttacgagcagaggaatagacaatgattcatatgtaacatcagtcgatggcatgctaagtcagtctctgtattcacaaaaacgaagaactaatttgatctaagagaatctctactctcgactgaacccaataccaatccaaaaatactcaacacccagttctcttttaaacacatcctatgcagaccagctgagctcgcacaccactcatatgcatttgtactagattcacggcaacaagctttaataaaagagccaagacactgcacaaactctactattcaagactctgattccaaattccctctttctatatatagtcaagctaaacggttaaagatgttcaaaacaagctacatctatgaaacttttctcattccaaagcacaaaaattgaaaatggaaaaaggttttacaccatgccatttcagattatattgcaatctaagaaccatagtgattaaaaacggaccttgaatgagatcaagcatagcaagctcattttctgaaccatcaaatacaagaacaaaatagagtgtagcataatgcttgtatacaagccgcgagtcctgcaaacacactaaataataagtgtccaaagcaacgtttttttttgttaaactaagtattgtggttatatagcataaacaatgaagacgccattaccggtccaaacaatgattcgatctccagaaaattgcttacgttctcaggtctactgcacaatactgtaaattataaacaaaacaaaaaaacaaaatttcagctcaagtttcacgatcgacccagatcttagcgatacagattatgaaattgttaggtatcgtaagatgcagaaagtgattgagaacctgaaaacacgccgcgaataagctcctgctgcttctccacaggctgaaatccaaaaaaaacaaaatcaaaaacccaattttacaaaatcggtcactttgatcgaagaaaccgaaattgaaaaacatatctcaacaagcatcgtaccaagtaatcgtagaatttagctagacgtggtttgccttgtgtgttcatcatcatcactgccttaatcatcttccacctctcctctctttctttcttcgtctctctcgctgacaaactctgaatctcacattttcaaaccctctctctatcttagaggcttcttcaattacatttgatgacgtcatcaccaataacaaccctccacgtgtaaccaaatttgagtgccctaataaatagtagcggggccgtcgtgaggattggtcacaatcaatggctctccgagaagacgacgacgatgttaacatcggagaaaaagtagtcgacgtagaatcggagcttcagaagtaccggatcaattcgatcgaatcaacggttgtgattcgtcagttaccgacacaaggcattgccttcaagctctggatacctgcaacaactctcgtcacgcttttagataactaccgtcgtgacccaaacattagtcctctcaatcgcaccttctcgagttttcaatccgacggttcagattcttcttctccgattaacatcgtcgagctcggatctggaacgggaatcgtcggtatcgcagcggctgcgacactaggtgctaatgtcacggtgacggatctcccaaacgtaatcgagaatctcaaattcaacgccgacgcaaacgctcaagtcgtggctaagttcggtgggaaagtccacgtggcgtctcttcgttggggcgaaatcgatgacgtggaaagtttgggtcaaaacgttgacttgattctagcgtctgacgtggtttatcacgttcatctttatgaacctctcctcaaaacgctgcgttttctgctcttagaaggatcatccgagagagtgtttcttatggctcacctcaagagatggaagaaagaatcgatttttttcaagaaagctcggagattcttcgatgttgatgttatacattgtgatgatcctcaagaaggtgctagaatcggagttgtagtttaccgttttgcaccgaaaaatcaaaacctttaagaagattttgtcaaatgttgataaatgaaatttgcttctttgttaaataagaaacactttatgagaaacatttaattatgtacactttataaatgttggagcttcgaacccgtgaccttgtaagcagagcacttctgattaaaatacagagaacgaagactgaggaaagagagaagaaaatg

SEQ ID NO: 3316 - DNA, 3000 bp, Unknown
  misc_feature (1)..( 3000): cDNA_ID_2169101_gDNA_ID_1620639_Annot_ID_162983 3000 nt of promoter + ATG
ttgataaatgaaatttgcttctttgttaaataagaaacactttatgagaaacatttaattatgtacactttataaatgttggagcttcgaacccgtgaccttgtaagcagagcacttctgattaaaatacagagaacgaagactgaggaaagagagaagaaaatgactctgggactgataaacgcgaatccagtggtgcaagctaagaaggaagggcttgttcgtagagaagatcaatatagagatgatggtgttgatcctcttgaaatatatgatatcctttttctattttgagatcaattttgttttggattttgttctttttggggggtttaatgtatatttttggaatctttgacgaaaatggacaaagtatgtaagagatataagagatccagaacacccttatactttggagcagctaagggttgtctctgaagaatctgttactgtcgatgacaagctcgatcgcatcctgtgagtttatattaaacatcattctttgttgaatcgatttttagagactatcagaagaaagttccaatttttatctctgtattggtaactaatgttgaggcctctttttgtggttacttgcatgatctttaacaataagctggtttgggttatgtgatgaactcaggataacgtttacaccgacgattcagcattgtagtatggcaaatataattggtctgtgtctgagagctaagcttaaagaatgtttgcaacttcattacaaggtcatcttgcttttaaaaaactcttttctgattaagacaaatactcaagatcacttgttagttgttacatatgtgtgattgcttctgttttgttttacttatgtttaggttgatatcagagtgtctccgggttctcacgctgatgaagtttcaggtgaggaagtcttatgtttactagaccatctcttcgcaatggtttaagttcatatatgctttctataaaccttaactaatatagagattgcaaattgaatggatgatttgtgtaaattataaacattgctcttgtccttggtttgatagattttagtttctaattaacatcactgcaaaatctggttttctatatttgtatttttgggaaagttgatgtcttaagctctgaactttaatactcattgggatcatttttgtattgcagttaacaaacaactgaatgataaagaaagagtggtggctgcattggagaatcctaatctccgtcagctcgtggatgagtgtatctactccgatgagatatgatcacatcatttacttctactctcttgtacaggcttcatatcatgggtttatataatgccttagagagcgctctttaatctcagaatacaaattaagggtgtgttcaaatgttgtattctacttgataatgatacagaatctcagaatacacattttaagggtcttctacttctccttcttcttcaaagttcaactgctgcaatgttttagcatcagcaaaagttagtaaatcaaattcttttaattgtatagtatttctgttgaagttcactctttcgataagaacgctaggtaccatcagtttcaccaaaactctaaaaatcaacttgagatatgaaaacttgcctttgactgctccttcaccatggtaacaggataaattttattaagatctctgatgaacattaatttcctgctaataggcctcttgactgtgttcaactcctgcttgataaaccataaaattgggaagtgaaaatgggaagaacttgtgctcaaatggagttagacaatgacatttgtatcaatataatcgaacagcagatgttttagagatttttttcttgtttctaacttttctatataagctttaaaatgtttttgttttaaaataagcataatactacttcacttgcagaaccaagcaaccaaccataataagtataaactcattatttaaaatacttaacatgctaatggagatataaatatagtacatatagttctacaatttaaaactactaatgccaatatagtgtggtcaacaatgaaccaaatcttgatgttgtacaaacttctttgtaaagttgttaacaaaacaggcaatgtacaaggcaaactcttccgaccatagattttctattctgacataaatatcaatgtcttgtctacattaatcatacatatccctgtcttcgtcatgtagattttgttttatatcactgaggctactttggtggttgggggtaaaaacattcagttggccgtttgtttatgtggcaatataatatcttgtttttaatcaacgagttagtttgacttaaccattggttagtctaattgtttgtcatctaaagaatgagtacaacatttgttaggttaactctctcaaatgaattcttatacaaattgtaacatgcatagagataactcacaaaagggtttgatagaaagaagaagaaatgaatgactttgaaagcatgattgattttgatacattcatatatatcttaaattatattattgttctgtcccaacaaattttcaaagcatgattgaggcattttaaatcatcattatatatacatacaaaaaaataataaattttgggccaccatatctttgttatccgcattaaaaccataattggttgaagatttttatagtgttttttttaaaaaatactctaaccaaagattagttagaatcattatgtattcacaaataagaagtttataaagcaaaatttggagggagtttattaacaaatgagtgcgactttgcctcttttcaatgcccaatttcttgagattctggctgttctgcatccaaatattaaacaatcaattccttttataaaaagcaaaagacagaaatatttattattaagctaaagaattgatcaaaaaactcgattcacttttctcaaaaacccgaatataatctcattcccaatagcttccacttccatcgagagattttctttctttgtttttttctgtgattttctccaatg

SEQ ID NO: 3317 - DNA, 3000 bp, Unknown
  misc_feature (1)..( 3000): cDNA_ID_1808168_gDNA_ID_1620639_Annot_ID_162981 3000 nt of promoter + ATG
ggtggcgttagtcaattccgatatggaagagctcaaggtcgctgcgaagaaactgtttagcgatgtttcgaagcttggtggattaggcttcggtgtttcttttctcaaattcctcgcttctttcgctgccatgtgagtttttcaagtcgccatctctgatttcgtgtctcgtcgatttattttgaatttgatttgattttctcgtgggtttttcgataagtcgactactgtgtaatctcgtacatgttgaattcgaaaaaatctgtttatttctgttaatttgttgacatttgcagtaaccctattgtttctagcaatagcatctctgattggttgaaactatagaattgatcagtgatcagtgagcacaaacatgataagggtgtgagagtgtctttgtttcttttactcaatttagaaaagctttctggttattcatggtttcctactttccttaacgtttttgttttggtatttttgatgcagttacttgttaattttggatcgtaccaattggaaaaccaagatgcttacatcactcctaataccatacatcttccttagccttcctagtgtcattttcaactttctcaggtaacaatcttttcttgtcaaaagacacaactattcttaaaactgtagtctatatactggactggtgtaagtggcatttttcgatttttgttatcagtggagatgttgggaaatggattgctttcgttgcggttgttctcagacttttcttccctaagcatttcccaggtgatgacatcttcatatcattcttgatttgtatctttgtattgttgtcatacaatcgctgaagatgtctcgagaatctttaaaatgctttgaggcaaatctatactaacattcaagtcagtgtaattgctgaaacaaaattaaagtctcacacttttgttattgtggttttcaaaatgtgcagattggcttgagatgccaggttctctgatcctgctactggtagtttctccacacttccttgctcaccatatacgtggaacctggataggcactgtaatcagccttttcattggatgttaccttcttcaagaacatattcgagcatcgggtggattcaggaactcattcacacagccccgtggagtatcaaacactttagggatcattcttcttttggtctaccctgtctgggctctaatcgtccgtgtcatgtaatccacattcctctttcatcgacaagttgtttcttgctcggctgctccaataaactgcgtgaaacatcgagcagagcaagtctctatggtgttcctttcttctgattatgttgcatacccaaatactacctcaagctcaatcaatgttctatgtataaaaaaatctcatttttcaactatttgtttgtcctactataagaaaaagttctttattgaatgattgtaaaaaaaaaactagccttcatgagttcatgttgtttgcctagtgttgaaaaattactcgtgacttccgtttcgagtattcacattcgcaatacgtggcgttttcaataggaagaaaactacacgctgtttgaattttataactagacttcatgtcgtctaaaagtaggggggcggcttaaaaccctaaccctagtttggctgactccttataaatacttctctctccgccgtatataatcttaagtcatctctgatctccgagtgcaactcaaatttgaatctctggcttcttaattctttctgatatttcgttttattggttaatctgttttcgatttcatatcattagtctagtatttgttcttctttttgtgtttgattatcttagaaaaaagggtttctcagtgatgaatacacagatgacgagtccgatgaaatccattcattaaatcatggggacaaacgaggcatttgtctgagaggaatccttttatacttttttcaatcttattagttttttctgctaaatgtttttcaaagttgtttgattcgtgattctcgaaaattgaagaaaaaaaggcatgatgaggattgttttattgtcatctgattctcatgatgaatatatacctcctactcattctgagtgccttttcttaatttcttaccatgaaacttcgttgagtctataaactttattcgttctatagtctaaattattgaattggatacttatcaattgatcgaaatctagaagtttgactgtctcagcagtttttgtttttaaaactaggaaatttttgataatctgtgcaagctgggtcggattcatagctactattgtgttcttggttctggaaattataactgttatgttactattgtggatgtgaggacggcttttcatggatgtactctcaattctaactatttgacatggttgcgtaagaatcaggagatgaatgtactgaacctaacagataaacaactgatctttagagaagcactgccctagatgtgtatacctcgaagtcaatcgatgatacttctctgagaaatcacttgtaaactttgattttgtattcaagaatcttaatataataaaataaactctttattcattcgttgtgtcttctttctcataaacaaccttcatcatcactattgaaatcttaatattaatgatatgcataagtgatttcattctgcgattaaaatgttgtgatatgagaagcataataaccgaacatttagttatcctttctctggtgtattccagaccggtcttgaaccgtttctagaaccaaactatttattcaactttatatattccagtggaattgataacattataatcacgtcatcaatactgattgggacagtatctctatttccacatcagctttagacacgtggctattgatcgaccatatagtcatgaaaacaatccaatggaaaattttcaaaacttatccgaccttatcttagcgaaacaaaatctctcctctgattattactactcaacttcgcattatcactcaaacaaacatattgacatctgagtcttgtcatcatg

SEQ ID NO: 3318 - DNA, 3000 bp, Unknown; identical to SEQ ID NO: 3313
  misc_feature (1)..( 3000): cDNA_ID_3071040_gDNA_ID_1620639_Annot_ID_162976 3000 nt of promoter + ATG

SEQ ID NO: 3319 - DNA, 3000 bp, Unknown; identical to SEQ ID NO: 3312
  misc_feature (1)..( 3000): cDNA_ID_1820368_gDNA_ID_1620639_Annot_ID_162972 3000 nt of promoter + ATG

SEQ ID NO: 3320 - DNA, 3000 bp, Unknown; identical to SEQ ID NO: 3317
  misc_feature (1)..( 3000): cDNA_ID_1808168_gDNA_ID_1620639_Annot_ID_47442 3000 nt of promoter + ATG

SEQ ID NO: 3321 - DNA, 3000 bp, Unknown
  misc_feature (1)..( 3000): cDNA_ID_1820347_gDNA_ID_1620639_Annot_ID_47444 3000 nt of promoter + ATG
tgttaaataagaaacactttatgagaaacatttaattatgtacactttataaatgttggagcttcgaacccgtgaccttgtaagcagagcacttctgattaaaatacagagaacgaagactgaggaaagagagaagaaaatgactctgggactgataaacgcgaatccagtggtgcaagctaagaaggaagggcttgttcgtagagaagatcaatatagagatgatggtgttgatcctcttgaaatatatgatatcctttttctattttgagatcaattttgttttggattttgttctttttggggggtttaatgtatatttttggaatctttgacgaaaatggacaaagtatgtaagagatataagagatccagaacacccttatactttggagcagctaagggttgtctctgaagaatctgttactgtcgatgacaagctcgatcgcatcctgtgagtttatattaaacatcattctttgttgaatcgatttttagagactatcagaagaaagttccaatttttatctctgtattggtaactaatgttgaggcctctttttgtggttacttgcatgatctttaacaataagctggtttgggttatgtgatgaactcaggataacgtttacaccgacgattcagcattgtagtatggcaaatataattggtctgtgtctgagagctaagcttaaagaatgtttgcaacttcattacaaggtcatcttgcttttaaaaaactcttttctgattaagacaaatactcaagatcacttgttagttgttacatatgtgtgattgcttctgttttgttttacttatgtttaggttgatatcagagtgtctccgggttctcacgctgatgaagtttcaggtgaggaagtcttatgtttactagaccatctcttcgcaatggtttaagttcatatatgctttctataaaccttaactaatatagagattgcaaattgaatggatgatttgtgtaaattataaacattgctcttgtccttggtttgatagattttagtttctaattaacatcactgcaaaatctggttttctatatttgtatttttgggaaagttgatgtcttaagctctgaactttaatactcattgggatcatttttgtattgcagttaacaaacaactgaatgataaagaaagagtggtggctgcattggagaatcctaatctccgtcagctcgtggatgagtgtatctactccgatgagatatgatcacatcatttacttctactctcttgtacaggcttcatatcatgggtttatataatgccttagagagcgctctttaatctcagaatacaaattaagggtgtgttcaaatgttgtattctacttgataatgatacagaatctcagaatacacattttaagggtcttctacttctccttcttcttcaaagttcaactgctgcaatgttttagcatcagcaaaagttagtaaatcaaattcttttaattgtatagtatttctgttgaagttcactctttcgataagaacgctaggtaccatcagtttcaccaaaactctaaaaatcaacttgagatatgaaaacttgcctttgactgctccttcaccatggtaacaggataaattttattaagatctctgatgaacattaatttcctgctaataggcctcttgactgtgttcaactcctgcttgataaaccataaaattgggaagtgaaaatgggaagaacttgtgctcaaatggagttagacaatgacatttgtatcaatataatcgaacagcagatgttttagagatttttttcttgtttctaacttttctatataagctttaaaatgtttttgttttaaaataagcataatactacttcacttgcagaaccaagcaaccaaccataataagtataaactcattatttaaaatacttaacatgctaatggagatataaatatagtacatatagttctacaatttaaaactactaatgccaatatagtgtggtcaacaatgaaccaaatcttgatgttgtacaaacttctttgtaaagttgttaacaaaacaggcaatgtacaaggcaaactcttccgaccatagattttctattctgacataaatatcaatgtcttgtctacattaatcatacatatccctgtcttcgtcatgtagattttgttttatatcactgaggctactttggtggttgggggtaaaaacattcagttggccgtttgtttatgtggcaatataatatcttgtttttaatcaacgagttagtttgacttaaccattggttagtctaattgtttgtcatctaaagaatgagtacaacatttgttaggttaactctctcaaatgaattcttatacaaattgtaacatgcatagagataactcacaaaagggtttgatagaaagaagaagaaatgaatgactttgaaagcatgattgattttgatacattcatatatatcttaaattatattattgttctgtcccaacaaattttcaaagcatgattgaggcattttaaatcatcattatatatacatacaaaaaaataataaattttgggccaccatatctttgttatccgcattaaaaccataattggttgaagatttttatagtgttttttttaaaaaatactctaaccaaagattagttagaatcattatgtattcacaaataagaagtttataaagcaaaatttggagggagtttattaacaaatgagtgcgactttgcctcttttcaatgcccaatttcttgagattctggctgttctgcatccaaatattaaacaatcaattccttttataaaaagcaaaagacagaaatatttattattaagctaaagaattgatcaaaaaactcgattcacttttctcaaaaacccgaatataatctcattcccaatagcttccacttccatcgagagattttctttctttgtttttttctgtgattttctccaatggctaactccaagaagcaagcatg

SEQ ID NO: 3322 - DNA, 3000 bp, Unknown
  misc_feature (1)..( 3000): cDNA_ID_2105726_gDNA_ID_1620639_Annot_ID_47452 3000 nt of promoter + ATG
taaatatttgtactttaaggtttttgcacacaaattaagaaaacatataaatctcatttaatttatctctttcttataaaaacatcattaattacaactaatccaaccaataaaaaaatatgatgtaaaatataattggttaaaaactattaaatacatttaatgtttgcatagaaaaatgaaaataacacttatattgaaaaaaatgaaaaacctttaaactacacttaattaggaacagaggaagtatgaatgttgacaacaaaagggaaaaactgaattgttacaacaattatgaagtattttaccttgttcatgatttcttatatattcatatcaatatttgttttcagtcacattcacggtaaaaaataaaagaaagatttttatttattttgtattggtttctcataaaaattttaatgtattgattatacttcaaaaggttaactaacaattgttttttgtggacaaattttttaatctgcatttttctttggttgatataaaatattagatgtggaagctcgcaaccggatctgtagaacctcggagaaatactatcgcgaattttgcggccatgcaggaaacgacgattgcctttcaaaatcaaccaaaaaacctaaaccatttaaatgtgtttgccatgataataggagtcagaatataacttcaattaatgatcgatataataactgcatatgtaccttttattgctaagtcttaataaacaaaatagtaactactagatattaatccgcggtttaccactgcgagacgatatttattaaataagaatttcaaattttaagttgtatttttttttatattgtttattttgtttagttttttttttttttttttttttggcaaaattttgtttagtgtttaagattgtatatttttatttgattttgttaatttcacctatagcacacaatcatgtattaatatcaatacaaatccatcaattctaagattttatccgtggtataaagtttaaatgtttataatgtataaatttcttataaatgttggacattcagttgagaaagacatcatatttaccaaatctaaacaatctgtaaaaaatgttacttcttaaatgtcggcatcattcatacacttcatcgcccctgaaaaaagtttcgacttctatatagagtggagataaacttctacgcaaactagtagctcctataattggcgactccccatttaataaggtgcaaaaacatcgtaatcggttttaaaattgatagcttaattctttctattttctgaaaaaaaaatctttaggtcatcatcaatgtctgccaatactgtacttggaagattgagtttgacagtgtgatgaacgcatcttgctcttgattaaatatattttacttccaaaaacgacacacagttttcatctcctatgataagccatgccatggtatgcgtcaatcgtcactctgcccattgtatactaaatttctttctttccatgttctaaagtttttttttttttttttgtcgttctttctttctttccatgtcctaaagtattttttattttttggaattacgagaaagaaccaaaaaaaacttggctaatgcaaatctttgatgtgaccacggtagtttccataccttgcgaccgtatatctgtatttatcgccacaatcgaggataaatatgaatattttacacataactctaatagatctcccaaattgtatataaaaaaagaaaactccgatagatctagtttagcttaaaaaattgatatgattctttacacaaaacggtaacaaagaatttagacctccatatttaatttatatatgtatgcccacataaagcaacattgttctaaaacgctgaaagtgaaacatttaaatattcttccgaataaatcgacgtgtacacgacattgtcaccgttgatctattattgaagcaatatttaattcctccgtaaaacattataactcatccgtaaagaccgtgaaacattataacttagcggtaatatgtaaatttgttgtgaaataataacatgaaaagaaaccgaaaagttcctcttgataacttttttttctttttaataatgtagattaatataattttcgttaattatgttttaatgaaaaagattaattaaacaaactaatcaaatgtgttaattgtaatatacacaatgatacaaaaaatatgaaataagtttttaaaaatatgtgatattccaacaatattccaacttttctataacatcaggtaaatatttcttcaccttttcatgtcaacattttacaagagaagcataaaacaaaacaaaaaatcctctcggcaaccatatgccttttaaactaatgaggatttgtacttttttttttttttttttttttgggcacaaactaatgaggatttgtacaaaagctaaatgaaaagagctacaaaactaagcccatagacatatatctcatgaagccactccagatcacctgatgctacatcaaactaagaatggttttaattaatatatgggcctcagctgaggaaacaaaagcccattaatttgcttcaatattggtttacccgtttattctacatgccacgtggaagaatatgagtggtcacgatattataaaatgcgtcaaggtaaacaacaaataacaaactcgttttcgagcaaaaaaactttgaagattgatttgaagaagaaagctctctctcaggttcttgttctcaaccagacattgatttcttcgatttgcatatttcccttcttcgtcttacgaattttacttcctttagcgatggatttgatactacgttgacttttatcttccttttggaaatggcagcgtcgtcttctcttcttcttcttcttcactgtcccacctgcaatttctactttgactcttcctcgtaccttaaaagatcgagactttcgagctatagttcgattatctctcgtgggtctcctttgtttgtctctagctttggatctatg

SEQ ID NO: 3323 - DNA, 3000 bp, Unknown
  misc_feature (1)..( 3000): cDNA_ID_1825652_gDNA_ID_1620640_Annot_ID_47457 3000 nt of promoter + ATG
cagtttataaggtatgtttctttgagaaaacttcttaacggtaactttggtttcccttggttagatttataagctaaggatgatgcatttcttagggtgtgttctcgggtgggcaagaaatcgcggtgaaaagattatcgtgtacttcaggacaaggagacagtgaattcaagaacgaaattttacttcttgcaaagcttcaacataggaacttggttaggctattaggtttttgcatagaaggacaagaacgaatccttgtctatgagttcatcaagaacgctagtcttgacaatttcatcttcggtaattgttttccgccgttttctccatatgatgatcctaccgttctgttttttctgctctgtgttgatctttacgctgttacagatcttaaaaagcgtcaacttttggattggggagtgcgatacaaaatgataggtggagttgctagaggacttctttatcttcatgaagactctcgttaccggataattcaccgtgatcttaaagctagcaacattcttttggaccaagaaatgaatccgaaaatcgcagattttggattagctaaactctatgacacagaccaaacttcgacacatcgatttacaagcaaaattgcaggaacttagtaagttacttcatcttactaactcattaaccaagaaacaccggtataaacccgttattcatcttgtagcgggtatatggctccagaatacgctatttacggtcaattctcggtgaaaacagacgttttcagcttcggtgtattagtcatagagatcattacgggtaagggaaacaataatggtcgatcaaatgatgacgaagaggcagaaaatctccttagttgggtaagtacacaaaaccaaccaggtaattgaggtttgagtttgattcatcatgttaactgaatttgtaattctgtttgtttctcaggtgtggagatgttggagagaagacattatactaagcgttattgatccgagtctaaccacgggatcaagaagcgagatcttgagatgcatacacattggtcttttatgtgttcaagaaagtccagcgagtagaccaactatggattcggttgctctaatgctcaatagctattcctatactctcccaacgccttcaaggcccgcctttgcgttagagagtgtcatgccttcgatgaatgtttcttcttccacagaaccgttattaatgtccttgaatgatgtcactgtttctgagttatctcctcgttaggaagcttaatctgcatatctttttagtttcttcaatgatggattttgtttgtgtgattttttagacagcttggcttcatctagcttttgaaacgagtagaagttatagctttttcttttagttctacacattcgtcgttaatggtagatttgttttgcaaattcgattttactgtgttttaaaacatataacatgaaatttaacttaagaaaatgaaaatagtattagacttttactaagaaaagctttctactttatcctacacatgaaatgcatacacattggtcttttcaaaagcaacaaatcaatgttaaatacagttttctttatcttaactcctaataatgtagctatagaattcatgactaagcattgtggacccttggagcatttttagatggagatgggtgtttgtttctttattaggttttgttgcctagtagccacattctctcagttaaactaatacatttgtaaattttcacttgtaatcaactaatccaccaaatgaatcaataatgtaaactccagaatcgatctggcattgtatgagtatcaatatatgctttagtgccacttgctagtgcaatccacttgaggtttggctgcatcgatattagatataaatacttaagcgtcatgcaaaaaaaagattactaaataattgtagggttattatgggattttaggcgagcaaacaacatttaaactttgaaggaatacaatttgaaatatcaagatacgtaaaatatgtcacgtgcaataaaataaagagaagacccatccaaatcaagtgtgcgatactttgaccatatgagtcaatgtggcggccaaaggcaacaagcatatctaatctaagtattatataactaagcaaatattccactaaactagtatacaaagccaactgctccactaattgcctgacatacttatttattttcaaatttggtaaccacacctatagcttatacattttcttcgatggccttatacaataggaatatactattaccttctcattgttcttattatcatcaaccatttgataaatcctcatcactcttaaacattgactatgaactaaggacgtcagaagtagtccatacaagatatgaatggttggatcgtcctaagtcattgtattaatatacgtttctaatcaatggaaactatataattgtaatataatttttactaaatcatgtaacttgaaaacctaactttctttcttaataaaaattgaaccgctaaagtatctaatccatcatgtgtcaactgacaccgtccaaaatcctcttagagatgtaagaaaaagtttcaaaacaattaggtcagccaccaatcacatatttctatgcaggttgtataatcttgaaaaagaacaaaaaaagtagatgacaaaaaagaattaaaagacaataataataataccttataaagatgataataattcaaacagtttgacctttttatttcaattctctggtccaactttccaacctgacgagacaaaaatatagaaacttctcaacagcaataaaacagcaacctttcctttttgtatcccttctcctttgtcacctctcctcttacttttttatcaataggaagtttccgccattgtgacagacacagttcctctgtttctcttctttcatctttaagcaaacctcaaaaaccaatcctttattacgaagatcctcacttgtgtcttcttctccaacactaaaccccaagaaaatg

SEQ ID NO: 3324 - DNA, 3000 bp, Unknown
  misc_feature (1)..( 3000): cDNA_ID_1820428_gDNA_ID_1620640_Annot_ID_47458 3000 nt of promoter + ATG
acctcaccaagcagtgtccgctgacaaaacaagctgttgtatggtacacgcactgtatgtttcgttactcaaacaggacaatctacggaagaaaagaaacgaacccgactaaggcttttattgctggtgaagagatatcagcaaacagagatgactttgagcgtctgcagagaggactattggacagactcaaaggaattgcggctgctggtgggcctaataggaaatacgctcaaggaaacggttcagcttcggctgggtaccggagattctatggaactgtgcaatgtacgccagatttgtctgaacaggattgtaatgattgtttagtttttgggtttgagaatattccgagttgttgtgatgctgagattggtcttcggtggttttctcctagttgtaacttccggtttgagacgtggagattctacgagtttgatgccgacctagagccagatccacctgcaattcagcctgctgattcaccacaatcagctgcaagaactgagaggacaggtacatagaaatgtttgaatgtttctctcgtgtgtgctactgcagatgttgtccctagcagaatatgtttttgtttctaagattaagatagtgaatgttttattgcaggaaagggcaaaggtggatctaaagtcattatcgcgatagtcatcccgatacttcttgttgcgttactcgcaatttgcctatgcttggtcttgaagtggaggaagaacaagtctggatataaaaacaaaggtaacacagtgttcttcttcgtgttatcgttatcttgttactaatggattaactattagttctgataaatactatctgcgtattcagttcttgggaaatcacctttgtcgggttcaattgccgaggatgagttctcgaacacagaatcactcttagttcattttgagactctaaagacagcaacagataacttttcttcagaaaacgaacttggacgtggtgggtttggttcagtttataaggtaagcttcttcgaacaaacttcttaccggtaactttggtttatttatttgagagatttataaacttgggattatgtatctcagggtgtgttccctcaggggcaagaaatcgcggtgaagagattatcgggtaattctggacaaggagacaacgagttcaagaacgaaatattactacttgcaaagcttcaacataggaacttggtcaggcttataggtttctgcatacaaggagaagaaagactccttgtctatgagttcatcaagaacgctagtcttgaccaatttatcttcggtaaatctttttccggcttttactcgatctgatcctaccattcttcttccgctctgcattgaccattgcgccgttgcagatactgagaagcgtcaacttttggattgggtagtgcggtacaaaatgatcggaggaattgctagaggactcctttatcttcatgaagactctcgtttccggataattcatcgtgatcttaaagctagcaacattcttttggaccaagaaatgaatccgaaaatcgcagattttggattagctaaactctttgactcaggccaaaccatgacacatcgattcacaagcaggattgcaggaacttagtaagtaaattcatttaactaacttataaatccaggaaacaccagtataaaccagttatcatttcaattttaagcggatatatggctccggaatacgcaatgcatggacaattctctgtgaaaacagatgttttcagcttcggtgtattagtcattgagatcattacaggtaaaagaaacaacaatggtggatcgaatggtgacgaagatgcagaagatcttcttagttgggtaagtacagtatccaaaaccaagctagtaaatggggtttcagttttggtcatcttgttgataaaatttgtgattctgtttttcttttcaggtgtggagaagctggagagaagacactatactaagcgtgatcgatccgagtttaaccgcaggatcaagaaatgagatcttgagatgcatacacattggtcttttatgtgtgcaagaaagtgcagcgactagaccaacaatggctacggtttctctcatgctcaatagctattcttttaccctcccgacgcctttgaggcctgcgtttgtgttggagagtgtcgtcataccttcaaatgtttcttcttcaacggaagggttacaaatgtcgtcaaatgatgttactgtttctgagttttctcctcgttaatctgtaaatgttttgattcttctctgaaaacctttgaaatgggttttgtttgtgtgatttttcaggcagcctggcttgatcttgttgtgaataaaacatgaatgtgaagctgtgagatactttttcctttgtctcattttttttcttccagtttatcgttacttgatttcgttttaaggtacaatttgatagaagtatatatatatgtcagtaagtttagaaaattggataagagatttatattgagtccacatatataaatatgagagttgaaagatgatccactaatcatctacagaagtaaaagaaattgtaaaataaatggcttagacgaaattagatggttcctagttagtcttatattttctagtaggtttgaaaagtattcaaactctttagttttctttcctggtacttgtggggaaagaagtgagcaatgaacacttctaatttaaataacgttttcacaccaagtcgttagtttcatattgtgagtctttgaatctactaccatcatggacccccacaacctcataaagactccacttgtgtttgctactgggttttataattgttattgatcaacaagttttgttctttctgctgttggatattgatttagttcaaagaccatactgcttttgaataattccaaggtcaagttagattgacttcttccatttttagactcgttattacattctggggttttctcatatagattacagaagaagaaaaaagcttcaagcgtccatg

SEQ ID NO: 3325 - DNA, 3000 bp, Unknown
  misc_feature (1)..( 3000): cDNA_ID_1807702_gDNA_ID_1620640_Annot_ID_47459 3000 nt of promoter + ATG
gaggtacgttcccttagtttaaaagttaagacaaggttgagttagaaaggtctggtgtttatgtaataatatattgctgcaatatccaggtgaagaaaatggcgattcataaaatcagcgaagctgtaaaggaaattcgggaactcacatcttcggattcaactggtgcattgagattatataactagagctagaggtaccaatcttgattcttgaccattggtaattaccctattcttctgggaaagattcagctgttgagtttcaaggagtcgtagaatgtaaaaatatatagaaataaagagacaatagcttagagaaagaaaaaaaaaagaattcatttaccattccgattgttgttggatgatataaagaagcattgatatcaaatttgatagtggaaaatatcttgattatacaaaagtctaattacatatgttggtttgttattgttgacaacctaatgatcatatatacacaacttagttacaaatattgacttgcttgggctcattttgttctaagaacaatcttaccttttgcatcgtcatgcataattggtagaactatctccggaggctgaaccctccagactttaggatcctgaaactgatgtcctaacttagccaatttatcagcgactcgatttccttctctgtaaacatggctcaacacgcagttgttcagctcaggcataaccactttgatgtaattcacatgcttatttgtcttttcacatctcaatctccccctcctcgagatgatatccattatgatcttggcatctccttcaagccatagatccgtcaacccgttctctagagccagctcgagccctcttttgagggctgcgaattctgccatggtgcttgtggcttcccctatggattctgagtacccaagaaggaactcggctttgtggtttctgaatacccctccaatgctggcttgtccttctcttcctctggatccgtcaaagtttagctttatccgtccattttcaggtttcttccacacaactttgacaggctgtttgtggtagtctcggattaacaataaagtagcccgggtttgcagcaacccttggaatctagcaatctttgtgaaagctaacatagggtttaatttttttggtaacagattttcttgtcgtaaaaaatggtcgactcagatatttcttttggctctatagtcgtggtgttataccaagagtaggcaatattgtggaaggggtttgttagggaaatgatccttgcaaggaaagcaaagaatgatccttaattgaattgaaagggaaggcacatttgcagaatttagtaagcagtgttatatgaggaatgttttgaagaatgattctgtttcaatggagattttaagtagaagaagttttaacgaagaaaatttaaataaacatgactacttttgtcttatccctaaaatactgaaggtctctcctcaacctcaggaggatctctctttctctctccctctctagaaacttgcaagcaaagaaggaatgagaaacagagttacccacatttcccggaaacataataagttcttatacatgaagttattatttatgttggttctgtttacgaagcaagattcacaacatatcaaacaactaagaaatgattcaatatagagaacacttgtcatactggaggccacttgtcataaaaagaaaaactgatgagtctttagtgtccaagaaacagatcgatcgatccccactaagacattgtctgatacttttttcccatacatcgtggatccattccctcttcgaccaaacttccacaggttcaaaccaaaccggaaatcacagagttcggtttacaactcaagaacctaaattaaaaggatcctaaaaccagagacaaatagataagcaaaccgaaccgttgaccctgtcaaaaatacgtaagttcagcattaccgatccggttattatattattcgacccggtccgagattatttttgttcataaagtggaaccgtcctcactctatccctcagcttaatccgccgtcgttggttcaaacgacggtcgtattgatcttcgctgattggatctttataatccgtacaaactcccggagctcttggcctatcaatgtccgggattgatggagctatccaaaccagctgctctgttacgcacctctggaaccacggcgataagcaaaggcgtcgaattgactcatcacgggaacttcattactttgctgttatttccaagcaaaggattgtgaaaaagtatgaattttcttcattatagtacatgcaggagttatgttttctgtgctgaaaaaaataacattttttcttggtttctggtttgcaaattgcaggtttctcgattgaagaggtagctagtaaagttccaattgcatttctttgatgcattaacaaagcattcagatttgaggtctcattcagcgagtaagatccaagacataaagatcttccacaatccgcacctcataagtataaattcaaatacagcaggagggatgtgaaaaaaaaaaggagtctctaggatgtccttaagtagtttatttcccattaatggaagattagttttagtttctagttggttaaagtttcagactttgagttcttattggtcctggagagaaaagaagtgagaaatataaacttattttaaatgttttcttgtaacttataacttcttatttcacacaccgttgacctgattcgttgcaccaactcctaaatttttatattgaaatttttatatatcatcatgcaggacccaacaagcttacaatggctgtccacttgtgtctgtctgttactgaaatttataattgtttttgatcagcaacttgtgttctttcggctgtgagctagtttaaagaacacacggcttttttttaaggtcaaattaggtcgacatttaccatataaagactcattacacactggtgggtttctcatagattagagaaaaaaagcttcaagctttcatg
